United States Patent Application Publication US 2025/0236857 A1 - sequence listing, part 3

SEQ ID NO: 10184 - protein, 419 aa, unidentified
MVYVQDIDGKPLMPTTRHGKVRRLLKDKKAVVVNLCPFTIKLMYVTSDYKQEIVLGVDAGTKHVGLSATTKSKELYASEVILRNDIINLLSTRRELRKARRNRIRYRKPRFNNRIKSKRQGWIAPSVCQKIDSHIKVVSFIHSILPVSRLIIETSQFDTQKIKNPDILGKEYQQGEQLGFWNVREYILFRDGHKCQHCKGKSKNPILNIHHIESRKTGGDSPSNLITLYETCHKEYHKGNIKLKVKRGTSLRDAAAMGIMKWKLFDKLKSLYPNVSMTFGYITKHNRIKHRIEKSHVSDAFVISENFKAKRLGYHFKMKLTRRHNRQIHKMKMQKGGIKRMNQSPFRVFGFRLFDKVMFYGEKRFIYARRLSGSFKIKDIDGENEKNISYKKLKYIGHGLTSIEVDQSYGYKANTHNNE

SEQ ID NO: 10185 - protein, 518 aa, unidentified; identical to SEQ ID NO: 3878

SEQ ID NO: 10186 - protein, 465 aa, unidentified
MSTCVCVHSNSGERLMPTFRLGKVRRLLKDGKAKIVKHHPFTIQLLYDSKTNTQPIEICEDVGYNYIGISVKSQSHEYVSAQYDTLQDEKACHDSCRKLRRTRRNRLRYRKPRFDNRKRGEGWLVPSLKHKKELNVNVVKMYCAVMPITHATVEVGSFDTMLVKAIQEGKAIPEGADYQKGPRYNLATLREAVFYRDNYVCKVCGRKATEGAILHMHHMFYWKGRHGNSLDELLTVCEKCHTPANHQKSGKLYGFGENVKFADLSGAAFMNTVRWQIVNELYATFGKDFVTVTYGAMTKEKRIALHLEKSHNNDAYAMGEFHPNCRCTFEHYEKVRRNNRILEKFYDSRYIDIHTGEIATGKELFNGRINRNHKKDSENLHKYRGKRLYKGHRALVRKKVNFNPGDLVSLNGEVLVVHGTHTNKKGAVNVEFKTPAKNGRKSANLKKLKIVKAAGSIHPAWEKVS

SEQ ID NO: 10187 - protein, 509 aa, unidentified
LKKEAAGHRQGKDCRPVRYGPPYRAGMPDGRRKPERKHMVAVVTSTGKPLMPTSAYRARKLLKKGRAVIFKYRPYFTIQLVDRADGEVQEVEYKSDTGSVHVGISVCTEKKELLSEQRDLLENEPEHHNDRKKNRRTRRNRKRYRKPRFDNRKKKPQEGHEKWLPPTLLHKMEVQVRLFREFCRVVPVTSACFEMGKFDTQALKAVSKGEPVPEGEGYQKGERYGRAAVFLRDGHTCRFCGRSVKDGAILHVHHVGYWKGDRTNRPANLASACEQCHTPANHGKNGILYGKEPEFKTLKDASYMTSVRWIMLDEIKKAAPGVQVSVTYGVTTKRKRQELHLPKSHVNDAFSMASFHPKKRSDTEYWKKIPRHDRVLQKFYDAIYLDTRDGSEKKGSELSNGRISRNHKKDSENLHQYRGHKVSKGHNSIRRGASSLKPGSIVMYKGEKMTVHGTHTRYVKGKDGKTAKKVNVQFTCPASDGKKSASLEKCTPVSRVYNTGWKRYWPDKK

SEQ ID NO: 10188 - protein, 430 aa, unidentified; identical to SEQ ID NO: 4504

SEQ ID NO: 10189 - protein, 472 aa, unidentified
VVGNNLLSIKPLINIGEGVIYSSICTGLSLQTYQKRKEVPYMVYVLDIDGQPLMPTTRHGKVRRLLNNHLAKVVKRCPFTIQLLYQSTKETQPVSLGVDAGSKHIGMAATTEKKVVYQEELSPRNDVVKLLSARRTLRRTRRNRKTRYRKPRFNNRAHSKHKGWLAPSVEVKIQEHITAIKRICQILPISEIHVETAEFDLQRLKAMDEGSPLPVGIDYQLGEQYDFYNTRQYVLHRDGYTCQCCGTHDNNIKLHVHHIESRQTGGDAPNNLIILCEHCHKALHEGKLELPKGKKRGKSYRDATFMGVMRKTLLERLKKEIDVPVEGTYGYITKYWRERAGLEKSHIHDAVCISKYPYAKPLDIYYLTKTVRHHNRQIHKSNFSKGGIRKRNQAPYLVKGFRLFDKVLYQGKEYFIFGRRATGYFDIRTLDGTKVNKGSISYKKLRIQDTAKAYLKEARAIPHMNEFTCVLA

SEQ ID NO: 10190 - protein, 465 aa, unidentified
MSTCVCVLSNSGERLMPTFRLGKVRRLLKDGKAKIVKHHPFTIQLLYDSKTNTQPIEICEDVGYNYIGISVKSESHEYVSAQYDTLQDEKEHHDDCRKYRRTRRNRLRYRKPRFDNRKRSEGWLAPSLEHKKQLNIRLIERYVSVIPITHATVEVGSFDTMLVKAIEEGKATPESADYQKGSRYNLATLREAVFYRDNYICKVCGRKATEGAILHMHHMFYWKGRHGNSLSELITVCEKCHTPANHQKGGKLYGFGEDIKFANLSGAAFMNTVRWQIVNELYVAFGKPFVTFTYGAMTKEKRIALHLEKSHNNDAFAMGSFHPADRCAFEHYEKVKRNNRILEKFYDSQYIDTRTGELTNGKSLFNGRISRSHKKDSENLHKYRGKRICKGHRALRRKKLALNPGDLVSLNGEILVVHGTHTKKNGSVNVEFKTPSRGGKKSASLKKLKIVKTSNLMHSAWTKVS

SEQ ID NO: 10191 - protein, 423 aa, Arthrospira sp.; identical to SEQ ID NO: 5339

SEQ ID NO: 10192 - protein, 419 aa, unidentified
MVYVISQDGKPLMPCSNSIARLLLKQSKAKVKKREPFTIKLTYETTNYTQDLTLGVDTGSGTIGTSVSKDNGDIIYMSEVVIRNDITGKMTQRAKYRRNRRNRKARYRKARWLNRANSIKNDRFSPTMQSKLHSHVKEIEYIKFILPITEMVFETGQFDTHLMKNPNLANPKIKHWGYQKGINYGFENTKAMVLNRDNYTCQYYKGKHKDSKLEVHHILFRSQGGSDEESNLITLCHTCHKDLHSGKINPKLSGKVKGNLKYATQMNSIRKQLFKLYPDAVETFGYVTKANRLLLGIDKEHYYDACTIATQGNIFTVKSNLYKKKCISDGDFQKTKGIRSEQPIITDKICGFRKFDKVRYFGNKYFIKGRMSTGYAVLMDIDGNKVDFSAMPKGYKTPKLSNCKRIMARSTEMIQTLVI

SEQ ID NO: 10193 - protein, 442 aa, unidentified
MSTTVFVLDKKHRPLMPCRPARARRLLRAGRARVVKRFPFVIRLVDRTVEQSEVQPVLIKLDPGSRETGAAVVRDDEKKRHHALAFFVIKHRGGAIRDALKARSAFRRRRRSQNFRCRSPRFLNRVKPKGWLPPSLRHRVETTLSFVRRMCRYLPVSGIAAELVKFDSQKLQTPEVSGIEYQQGTLFEYEVREYLLEKFGRKCVYCGAEGVPLNIDHVVPRAKGGSNRVSNLVLACVSCNQKKGARSLEDFLKGKPEVLARVRRELKTPLRDAAAVNATRWVLFNELKATGLPVETGSGALTKLNRHAFGVEKEHWLDALCVGRLNGAVTRKGLNVLEIRCMGRGSRQRTRLTKYGFPRGYLMRQKCVHGFATGDMVEANVPKGKKAGLWRGRVAVRVSGSFNIQTPKGVIQGVGWKHCRLISHNDGYGYAWLGHAPHSSPA

SEQ ID NO: 10194 - protein, 512 aa, unidentified
MSTVYVLNKDGKPLMPTTRGGHVRHLLKEQKARVVRTKPFTIQMLYETDDVVQLLYLGIDPGRTNIGVAVVKTDGTAVFTAHLETRNKEIPKLMKKRKNSRRARRTNGRRCRRQRRAKANGTISKKCVKQDTAQNGSVSKHAKKIGVIKRHLPGCEKEVLCIGIKNKEAKFSNRVRPEGWLTPTANQLLQTHINLVKKIQKFLPISDVVLEVNKFAFMQLDNPNIQKWQYQQGPLYQKANLEEAVSEMQEHHCLFCKKPIAHYHHVVPQSENGSDTIGNIVGLCTKHHDLVHKDTEWQKKLAKKKTGLNKKYGALSVLNQIIPALTKELSSLFPKHFFATNGKSTYDYRAAHAVSKDHWLDAYCIACSVLANDVCDSNINSHVPYELKQFRRHDRRALHKENMNRVYTLDGKKVATNRHKATEQTTDSLEEFRQCQQDDVCKLKVKEHYPEYRNPKRNFPGCVFLVGKHTHVMQGTSGSHNGKADGYYDTNGNSYSSGECKFVAKNEGIVFA

SEQ ID NO: 10195 - protein, 381 aa, Moorena sp.
MQNYVFVIDTNKQPLNPISPKKARRLLDKGKAAVFRMYPFTIILKTAINNPTISPCQIKIDPGSKVTGFALVQNNQILWGMELEHRGGLIKKKLESRKAVRRGRRNRNTRYRKPRFLNRRRPPGWLTPSLDHRILTIGTWVKRLIKFCPVNEIWVEKVKFDTQKMQNPEINGVEYQQGELAGYEVREYLLEKWGRECTYCGQQNVPLQIEHISPKSFGGSNRVSNLCLACEKCNQRKGNKPIEEFLKKKPSLLQKIKSKAKQPLKDAAAVNTTRNKLVKVLQKIKPVVTGTGAQTKYNRTKLGFPKEHWIDAACVGDIEALQLRTNQPLLVTCKGQGGRQKAALNKYGYPIRLGKSARLLSLRPLGTVRTSLQVHGATNSN

SEQ ID NO: 10196 - protein, 420 aa, unidentified
MVYVLNKNNNPLMPCSERKARLLLKQGKAVIYRKDVFIIKLTNGSYGYKQHITLGIDCGSKHIGISATTDNKELFSANAELRDDIVKLLSDRRMLRRNRRYRKTRYRKPRFNNRRIPEGWLAPSIRQKIDSHVRIVNLIHKLLPVKQVNVEVATFDIQKIKNPYIKGTEYQMGEQLDSYNVREYVLFRDNHTCQNCKGKSKDDVLQVHHIESRKTGGNAPNNLVTLCKTCHEKYHSGEITLNINRGRSFRDASAMSTMRWFLYEELKNKFSNVRITYGYITKYKRIKLGLSKEHYNDAYCIADNLNAKKMEKHHLIRFILRHSRILHVQTFSKGGKRRSASAPYWLNGGRSSKSGIKFTRFDKVKFNGVVCFISGSSNGSASLRDIEWNKVNGCKTVVTINKLALVSRRHGSMLFGELCG

SEQ ID NO: 10197 - protein, 411 aa, unidentified; identical to SEQ ID NO: 8372

SEQ ID NO: 10198 - protein, 423 aa, unidentified
LVYVISIDGKPLMPCKPVIARLLLKQHKAKVIKKCPFTIKLLYKTKTEYTQPLILGIDTGSSKIGSAVVDGNNNVLYLSQIEVRNDITDKMKQRAKYRRNRRNRKTRYRKPRWLNRKNSIKKDRFSPTMISKINSHLKEIKFVKSILPITNIILETATFDPHALKNPAVLYNKWLYQKGINYGFANTKAYVLNRDNYTCQYCKGKSKDSKLEVHHIIFRCYGGSDEPENLITLCKTCHDKLHAGKINLKRNGKVKGQLKHATQMNSIRQQLLRLLPEAVETFGFITKEHRQLMELPKEHYYDAVAIACLKNIENTGLIDVNFKTNNILLKKCIADGDFQQTKGIRSEQRIITGKIRGFRKFDKVKYQGKEYFIKGRMSTGYTILMDIAGNKIDLKPIPKFDKMKRIQARKSWIISQETIQNTY

SEQ ID NO: 10199 - protein, 456 aa, unidentified
MSTCVCVLSNSGERLMPTFRLGKVRHLLKDGKAKIVKHNPFTIQLLYDSKTNTQPIETCEDVGYNYIGISVKSESHEYVSAQYDTLQDEKEHHDDCRKYRRTRRNRLRYRKSRFDNRKRDKGWLAPSLEHKKQLNISLIERYVSVIPITHVTVEVGSFDTMLVKAIQEGKVIPEGADYQKGPRYNLATLREAVFYRDNYVCKVCGRKATEGAILHMHHMFYWKGRHGYQLDELVTVCEKCHTPANHQKGGKLYGFGKDKKFANLSGAAFMNAVRWQIVNALYATYGKEFVTITYGAMTKEKRIALQLEKTHNNDAYAMGDYHPARRCKFRHYQKRRRNNRVLEKFYDATYVDTRTGNKAKGKELFNGRISRNHKKDCENLHKYRSKKVSKGRRSIRRQHYAIQPYDTVRLEGKTYITSGCHNKGTRLLIPVNGKSKSVAISKVQVVCHAGAWIQII

SEQ ID NO: 10200 - protein, 390 aa, unidentified
LKVFVLNMRGRPLMPCSPAKARHLLKAGKAVVRRRTPFTIQLRIATGETKQSVTLGVDAGAKHVGLSAATEKEEVFASEVELRQDITGLLAARLSLRRERRQRKTRYRAPRFLNRVRSKHKGWLAPSVENRIQAHMSRIDAICGLLPVTKIVIETASFDIQKIKHPDVEGTDYQQGDQLGFWNVREYVLFRDGHVCQHCHGHAKDKILNVHHLESRQTGGDAPNNLITLCERCHKACHAGKIKLKVKRGQSFREEAFIGIMRWTLLDRVRKAHPGLPVENTYGYLTKNTRITLGLPKAHCVDAYCIAGNLKAVRRGVYLHQRQVRKHNRQIHKCTVLSKTLKDGTKIGYRKLNQTPHLVKNFRLFDKVRCLGQTGFIFGRRSSGYFDVRR

SEQ ID NO: 10201 - protein, 414 aa, unidentified
MPCSPAKARLLLKEKKAIVVRRTPFTIQLTIATGESKQPVSLGVDAGYKHVGLSASTEKAELYASEVELRQDVSDLLSARRALRQSRRSRNTRYRAPRFDNRIRTKRKGWLAPTVENRINVHLSRIETVLRLLPVTKITVETASFDTQLLKNPDIAGKEYQEGEQLGFWNVREYVLFRDGHVCQHCHGRSKDPVLNVHHLESRRTGGDSPGNLITLCETCHKALHRGEIKLKAKRGRSFRAETFMRIMRWGVLNRLKASHPKLEVHNTYGYRTKHARIANGIAKSHCADAFCIAGNFGAKRLGEFFFQKQTRRNNRQIHKLSILKGGIRKRNQAPFEVKGFRLFDKVACQGEEGFIFGRRSTGYFDVRKLDGTCISAGISYKKLHLLEKRRTYLTEIRKEEALPPPPEGRGLRA

SEQ ID NO: 10202 - protein, 416 aa, unidentified
MVYVLDKNGQPLMPTDRHRKVRLMLQSGQAKVIKRCPFTIQLNYDSGHQTQEISLGIDAGSKHIGVSTTTKIKVLYEVDVELRNDIVDLLSSRRELRRGRRNRKTRYRPARFDNRRREDGWLAPSIRQKIGTHLTVVENICKMLPISRIMVETASFDIQKIKNPDIQGAEYQQGDQLGFWNVREYVLFRDGHTCQCCKGKSKDKILNVHHIESRKTGGNAPNNLITLCETCHTGYHKGTVQLPKAIKRGMRFKDAAFMGIMRWAFYEALKQQYEPVGTPVHNTYGYITKHTRIAYDLPKEHYVDARCISGNPDAFPSGEYYYQKKVRCHNRQMHKLTILKGGIRKQNQATYLVKGYRLFDKVSYQGKGYFVFGRRQSGFFDIRTLSGEKVNKGSLSCKKLKFIATRTYYLTERRAV

SEQ ID NO: 10203 - protein, 454 aa, Moorena sp.
MKAKCVTSTTSFYNIVVRVAGRSPANITNRDALKMPNYVFVIDTNFQPLNPILPKKARRLLDKGKAAVFRMYPFTIILKTAVDNPTISPCKIKIDPGSKVTGFALVQNNQVIWGMELEHRGGLIKKKLESRKAVRHRRRNRNTRYRKPRFLNRRRPEGWLPPSLEHRILTIQTWVKRLIKFCPVNEIWVERVKFDTQKMPNPEISGVQYQQGELAGYEVREYLLEKWGRECTYCGKQSVPLQIEHIHPKSKGGSDRVSNLCLACEKCNQRKGNKPIEEFLKKKPKLLQKIKTKAKQPLKDAAAVNATRNKLVKVLRVIKPVVTGTGAQTKYNRTKSGFPKEHWIDAACVGDIEPLKLKTKQPLLVTCKGQGGRQKAALNKYGYPVRHNPLKPIKGWCSGDIAKNILTGEFGRVNPRSKSNSFNYTVPGKKAINLHVKNLVRVHQKDGYTYSFCL

SEQ ID NO: 10204 - protein, 461 aa, unidentified
MIIRLNIIVEMKTEKRYGNSSVEYAEPVSIHRERNSNMVYVIDTDNKALSPCKNRTARWLLKHNKAKCVKREPFTIKLNHEGTREIPKLTLGMDTGSDKIGTAAVDDDNHIYYVSEVQVRNDIADKMKQRSKYRRSRRNRKTRYRKARWQNRKNSKRNDRFSPTMRSKIDSHIKEIRFARSILPIAEIIMETGTFDAHAMKNPEALKNKWLYQRGTNYGYANTRAYVLDRDGYICRQCSGKSKDSKLEVHHIQFRSEQGSDDVENLITLCKNCHDKVHGSTTELKLKGKAKGTLRHATQMNGIRVQLLKRVPSKETFGFVTKEHAWAMGLEKTHYNDATAIACLNNIERNGLVSYVLKTDKVLVKKCVSDGDYQQTKGVRSERRIQTGKMQGFRKFDKVRYKGTEYFIKGRMSTGYAILMDIEGNKQELKPIPKLDKMERIGARKGWIVQERRFAAIHPAT

SEQ ID NO: 10205 - protein, 458 aa, Halomonas sp.; identical to SEQ ID NO: 7411

SEQ ID NO: 10206 - protein, 426 aa, Methanosarcina sp.
MLVFVINQNKKPLMPCKPSKARKLLQAGKAKVVRNTPFTIKLLFRSSGYTQPVTAGMDTGSKVVGCAAIANGKVLYQSEIYLRENVSKKMEQRKMYRRTRRSRKTRYRPARFDNRGNSKKEGRLAPSIRSKLEAHFREKRFVESLLPVTEWKVELASFDIHKITNPEVSGIGYQEGDLKGFYNIKAYVLDRDGYTCQHCRGKSKDSRLHCHHIVFRSQKGTDAPENLITLCETCHKALHNGEFKLSGKKSKTKHATEVGIIKSQIRKSGWNFAETFGYETKYRREQVLKLLKTHYFDAVAICCRDEQKVEVEESVFLKRNVSKGDYQQRTGKRSEKKIHTGKLFNLRKFDLVKTSKGIGFVKGKRSSGFFAISDMFGNKISDSVNVKKICERLRARTSTLIQQSRTGKFTHSSPELKTQGFPAEGL

SEQ ID NO: 10207 - protein, 469 aa, unidentified
VKSAGGAGYAHRRGGHYAVRQKESNLMRVFVLDTNKRPLSPCHPARARQLLRKSKAAVFRRVPFTIILKYVPEGDPTPVRVKLDPGSKTTGIALVMKRRGTDEVVWAAELEHKGLEVKAKLDKRRAIRRARRARKTRYRPSQFLNRRRKEGWLPPSLKSRVNNVVTWMRRLCRWAYVNGIAMELVKFDTQAMQNPEVSGIEYQQGTLFGYEVREYLLATRFLSETLVPLGEKWERRCAYCGAENVPLEVDHIVPRSRGGSDRVSNLTLVCHTCNQRKGNRPVEEFLLWKPEVLNKVLSQAKTPLRDAAAVNTTRFVLLERLRATGLPVEVGTGGRTKFNRTTQGYPKAHWIDAACVGQSGSAVRLSPETNVLSIKAMGRGSRQMCRMDRYGFPRTGPKMARTVHEFRTGDLVRANVQNGRHAGVHTGYATVRASGSFRVGNADGVSWRHCRLLQRGDGYRYNVSNSAGV

SEQ ID NO: 10208 - protein, 426 aa, unidentified; identical to SEQ ID NO: 6306

SEQ ID NO: 10209 - protein, 431 aa, unidentified
MVYVLDINGQPLMPTARHGKVRRLLNSHLAKVVKRCPFTIQLLYQSTKEIQPVSLGVDAGSKHIGLAATTEQKVLYQEELTPRNDVVKLLSAKRACRHSRRNRKTRYRKPRFNNRVHSKHKGWLAPSVEVKIQEHITAIKNICKILPASEIHVETAEFDLQRLKAMEEGKTFPVGTDYQLGEQYDFYNTRQYVLHRDGYTCQCCGVHDKDVKLHVHHIESRQTGGNAPNNLITLCEHCHKALHEGKIKLPKGKKRGKSHRDAAFMGIMRNTLLERLKKEVSVPVLMTYGYITKYWREKADLEKSHINDAICISKHPYTKPLDTYYLTKVVRHHNRQIHKANFSKGGIRKRNQAPYLVKGFRLFDKVLYQGKEYFIFGRRTTGYFDIRTLDGTKANKGSVSYKKLRIQDTAKAYLKEVRAIPHMNKFTCDLA

SEQ ID NO: 10210 - protein, 405 aa, unidentified; identical to SEQ ID NO: 7624

SEQ ID NO: 10211 - protein, 544 aa, unidentified
MKQKKQKVMVYILNKKGKPLMPTTRCGHVRKLLDSKKAVVVSSNPFTIRLKYDTPNGVQDVFAGIDSGRENIGSGASNEDGDCLYLGELKTSNKSIKMKITERAGFRKERRRRDRQNKQRKARKDHTEIQNGNADICRTTISCKSVQISYPAAEKSVTHKIIRGKEGKFANRHRDEGWITPSARQLVQMHMNDLKSMCKILPISHVTLERVAFDFQKLENENIKAWEYGKGKLYGYDSPEEYIHDVQGGKCLICGKPHIDYLHHIIPRSKGGSNKVSNLAGLCYDCHYGPMGVHNCQDTQDRLPELKNEANKQYKVSLLNSVMPVLIEEMDKFCKANSIIFSICEGHDTAKVRDIYDLQKDHCVDGFAISLVGRNVKSVDVMPDRIHQKQRYKKKSKNIIKKRNCREYYDGKKLVAVNRHKGTDQKADSLEEYMNTYAETHTADECKKHFESLTVKPARRTYTFHKEGRICPFHIGDKVRYEKKNKIKGNTKVETFICEGIRFPKDENKAKVEHNKTKSKKMKFCRVLEPGCTPYIDYRKLVLI

SEQ ID NO: 10212 - protein, 442 aa, unidentified; identical to SEQ ID NO: 3218

SEQ ID NO: 10213 - protein, 417 aa, unidentified
MVYVISHTGKALMPTVRHGKVKHLLRKGRARVVRREPFTVQLLYDNTEYTQPITLGVDAGTTHVGLSATNESDELFAAEVTLRRDIPGLLTVRREARRTRRNRRTRYRAPHFNNRTKPDGWLAPSVEHAVQSHLSLIRKVHSFLPVTKTVIEVAQFDTQLLKNPDIQGEQYQQGEQMGFWNTREYVLFRDGHTCQHCHGKSGDKVLNVHHIESRQTGGDAPNNLITLCETCHKAYHRGAFQLKVRRGASLRDAALMSIMRWTVYNRAKEEFGNVRLAYGYITKNTRIRHGQEKSHAIDARCISGHPLASSSDTLWLMRQRRRHNRQIYKANTLKGGIRKKNQAPYLVKGFRLLDKVLYDGLECFIFGRRSSGSFDIRKFDGTRVNAGISYKKLKFKSISNSFIVSQLKRNVCVSSPA

SEQ ID NO: 10214 - protein, 431 aa, unidentified
MPNKVYVINKHGRPLMPCSPAKARHLLDEGKAKVKKRTPFTIQLVYGSSGYTQEVILGVDAGSKTIGMSASTTKEELLSAEVKPRNDVVDLLSTRREFRRAQRNRKTRYRKPRFDNRVRSKHKGWLAPSVEVKIQEHITAIRRVCGILPVSKVVIETAEFDLQMLKAIADGKPVPQGEDYQQGEMYGHYNVRQYVLWRDGYTCQCCGAHTTKKKEVRLHVHHLESRKVGGDAPDNQVTLCESCHEKLHKGLIAEKDFKKRKRKSTRDATFMGIMRKTLMQRLCSELPIPVIETRGYITKATREKLLVLPKSHTNDALAIAQGKQGFNVGYLPEIAQIDKIYTIRPVRHHNRQLYKATILKGGIRKSNQTKKYVFGYRLFDKVQFNEQDCFIWGRRTTGIFTIKTINGKMIKDGISFKKLKLVEKSTSYLIA

SEQ ID NO: 10215 - protein, 415 aa, Bacillus sp.; identical to SEQ ID NO: 5517

SEQ ID NO: 10216 - protein, 414 aa, unidentified
MPCSPAKARLLLKEKKAIVVRRTPFTIQLTIATGETKQPVSLGVDAGYKHVGLSASTEKAELYASEVELRQDITDLLSARRALRQSRRNRKTRYRAPRFDNRIRTKRKGWLAPSVENRINAHLSRIEAVLRLLPVTKITVETASFDLQLLKNPDISGKEYQEGEQLGFWNIREYVLCRDGHVCQHCYGRSKDPVLNVHHLESRRTGGDSPGNLITLCETCHKALHRGEITLKAKRGQSFRAEAFMGIMRWEVLGRLKASHPELEVNNTYGYRTKHARIANDIAKSHCADAFCIAGNLGAERLGEFFFQKQTRRNNRQIHKLSILKGGIRKRNQAPFEVNGFRLFDKVACQGEEGFIFGRRSSGFFDVRKLDGTRISAGISYKKLHLLEKRRTYLTEIRKEEVLPPLPEGRGLRA

SEQ ID NO: 10217 - protein, 431 aa, unidentified
MPNKVYVINKHGRPLMPCSPAKARHLLDAGKAKVKKRTPFTIQLVYGSSGYTQEVILGVDAGSKTIGVSALTKKEELFAANVIPRNDVVDLLSTRREFRRARRNCKTRYRKPRFDNRVRSKHKGWLAPSVEVKIQEHITTIRRVYGILPVSKVVVETAEFDLQLLKAIADGKPVPQGEDYQKGEMYGHYNVRQYVLWRDDYTCQCCGAHATKKKEVRLHVHHLESRKVGGDAPDNQVTLCESCHEKLHKGLIAEKDFKKRKRRSTRDATFMGIMRKTLMQRLYSELPIPVIETRGYITKATREKLLVLPKSHTNDALAIAQGKRGFNVGYLPEIAQIDKIYTIRPVRHHNRQLHKATILKGGIRKSNQTEKYVFGYRLFDKVQFNGQDCFIFGRRTSGYFVVKTIDGKVIHNSASFKKLKLVERASNYLIA

SEQ ID NO: 10218 - protein, 346 aa, unidentified; identical to SEQ ID NO: 2872

SEQ ID NO: 10219 - protein, 317 aa, unidentified
LSTRRELRKARRNRLRCRKPRFDNRVKSKRPGWIAPSVKYKVDAHIRVVENVCSILPISRIVIEVAQFDTQKINNPEISGKEYQEGDQLEFWNTREYVLARDGHKCQYCKGKSKDSILNVHHIESRKTGGDSPSNLITLCETCHKEYHKGNIDLKIRRGKSLRDAAVMGIMKWRLYEELKSRYDRVFMTFGYITKHNRIKYGIEKSHTSDAFVISKNINAKRIERQYLKRLIRRHNRQIHKMKILKGGKKKNNQAPFEVFGFRLFDKVLYNNKIFFVYGRRKSGSFNIRDFNGENSKDVSRKKFKLIRGKRHPIILK

SEQ ID NO: 10220 - protein, 508 aa, unidentified
VLLQPQALEDAVADNQKGTDETGHITTHVVDAGVQHGRGETANAPVRVSQRHPSTASAVAGTGREPSAQPRVFVLSKDGKPLDPTTPARAKWLLKKSRAVVARRTPFTIRLKDKHSSECETQGVVIGIDPGSKTTGIAVWMENEPGVREAVFLSEVEHRGSTISKKLGQRSNYRRRRRSKNLRYRAPRFNNRTKPKGWLAPSLQHRVDTTVAWVERLSRWLPVQGVMMELVRFDIQKMEKSEISGVEYQQGELAGYEVREYLLNKWGRQCVYCDAQNVPLQVEHIRPKARGGSNRVSNLTLACGPCNQAKDARPVEEFVTDPKRLERILRNAKAPLRDAAAVSSTRWALFNALSEQHTVLTGTGGQTKYNRSRFGLAKTHALDALAVGRPDTVEAIHATVTATLAITCNGRGQYARTKPDKHGFPRLALTRQKAHFGFQTGDLVRAVVPTGKKAGTHTGRVAVRATGSFNITTAAGTVQGISHKHCTVLQRGDGYGYLWKEEAFSSRP

SEQ ID NO: 10221 - protein, 437 aa, Sulfobacillus sp.; identical to SEQ ID NO: 7950

SEQ ID NO: 10222 - protein, 493 aa, unidentified; identical to SEQ ID NO: 2644

SEQ ID NO: 10223 - protein, 406 aa, unidentified
MVYVQDIDGKPMMPTTRHGKGRRLLKANKATVVNLCPFTIQLTYKSTDHKQPVTLGIDAGAKHIGFSATTEKEELFACETILRTDIVDLLSTRSQNRRTRRSRLRYRKPKFNNRVFSKNKGWVAPSVKQRIDSHLNEVNEIHKILPITKIVIEAAQFDTHKMKNPNISGIDYQNGEQLGFWNVREYVLFRDGHKCSYCKGKSKDLILNIHHIESRKTGGDSPSNLITLCETCHKEYHKGNIDLKVRRGKSLCGAAIMGIMKWRLYDELKSRYSNVSMTFGYITKYNRIKYGIEKSHTSDAFVISKNFNAKRIEYQYLKRLVRRHNRQIHKMKILKGGKKKNNQAPFEVFGFRLFDKVLYNNEINFIYGRRKSVNFNIRDFNGENPKDVSYKKLKLIRGKRHPIILK

SEQ ID NO: 10224 - protein, 431 aa, unidentified
MPNKVYVINKHGRPLMPCSPAKARHLLDEGKAKIKKRTPFTIQLVYGSSGYTQEVILGVDAGSKTIGMSASTTKEELLSAEVKPRNDVVDLLSTRREFRRARRNRKTRYRKPRFDNRVRSRHKGWLAPSEEVKIQEHITAIKMVCRILPVSKVVVETAEFDLQLLKAIADGKPVPQGEDYQKGEMYGHYNVRQYVLWRDGYTCQCCGAHTTKKKEVRLHVHHLESRKTGGDAPGNLVTLCDSCHEKLHKGLITEKDLKKRKHRSTRDATFMGIMRKTLMQRLCSELPIPVAETRGYITKATREKLLVLPKSHTNDALAIAQGKHGFNVGYLPGIEQIDKIYTIRPVRHHNRQLHKATILKGGIRKSNQAEKYVFGYRLFDKVQFNGQDCFIWGRRTTGIFTIKTINGKMIKDGISFKKLKPVEKSTSYLIA

SEQ ID NO: 10225 - protein, 431 aa, Escherichia coli; identical to SEQ ID NO: 4170

SEQ ID NO: 10226 - protein, 411 aa, unidentified; identical to SEQ ID NO: 3917

SEQ ID NO: 10227 - protein, 439 aa, Scytonema sp.; identical to SEQ ID NO: 2714

SEQ ID NO: 10228 - protein, 416 aa, unidentified
MVYVLGQDGHPLMPTCRHGKVKRMLKSGMAKVVKKCPFTIQLQYESTTHTQKINLGIDAGSKTIGVSATTESKVLYESEVVLRNDIVELLSGRRALRRSRRNRKTRYRKPRFDNRRRPDGWLAPSIRQKIKTHVTVVENVMKILPVTKIIVETASFDIQKIKNPKIEGAEYQYGEQLDFWNVREYVLFRDGHTCQCCKGKSKDNILNVHHIESRKTGGNAPNNLITLCETCHKAYHKGVITLPKEIHRGMRFRDAAFMGIMRWAFYDRLKELYTPFGVTVVNTYGYITKNTRIEYGLPKEHYVDARCISGNPAAKPLGHYYFQKKVRCHNRQIHKNTILKGGYRKRNQVEYEVKGFRLYDQVLWKGQKCFIFGRRSTGRMDLRLLDGTHVNASVGYKNLKLLSMRKNYLIEQRKAG

SEQ ID NO: 10229 - protein, 417 aa, unidentified
MPCSPAKARLLLKERKAIVKRRTPFTIQLTIATGEAKQPVALGVDSGYKHIGLSATTEKAELYASEVELRQDITDLLSARLALRRSRRSRKTRYRAPRFDNRVASKREGWLAPSVENRIVAHMSRVEAVMRVLPVTAITVETAAFDTQLLKNPDITGAAYQQGEQLGFWNVREYVLFRDGHVCQHCSGKSKDPILNVHHIESRRTGGDAPNNLITLCETCHKAFHRGEIKLKVKRGKSFKAETFMGIMRWTLLERLKKAHPELSVRHTHGYLTKHKRISHGIAKSHCADAYCIAGNLGAMRLNSYLFQKQTRKHNRQIHKLSILKGGLRKKNQAPYEVKGFRLFDKVICKDEEAFIFGRRSSGSFDVRRLDGTRISAGISYKKLRLLEPRTTYLTEFRKEAALPPLHECRGFRAEFL

SEQ ID NO: 10230 - protein, 512 aa, unidentified; identical to SEQ ID NO: 7964

SEQ ID NO: 10231 - protein, 426 aa, unidentified; identical to SEQ ID NO: 3614

SEQ ID NO: 10232 - protein, 442 aa, unidentified
MVTVQQSTHHLPFGRVFIRRNLFMVYVISQDGKPLMPCSDPIARLLLKQGKAKVKKREPFTIKLTYETTNHTQGLTLGVDTGSGTIGTAVSKDNGDIVYMSEVVVRNDITDKMTQRAKYRRNRRNRKTRYRKARWLNRASSIKKDRFSPTMQSKLHSHVREIEYIQSILPVTEMVFETGQFDMQLMKNPSLANPKVRPWGYQKGANYGFENTKAMVLNRDNYTCQCCKGKHKDSKLEVHHIVFRSQGGSDEESNLLTLCHTCHKDLHSGKITPKLSGKVKGNLKYATQMNSIRKQLFRFYPNAIETFGYVTKVNRLHLGVAKEHYYDACTIATQGNAFNVKSNLYKKKCVSDGDFQKTKGIRSEQPIVTDKICGFRKFDKVRYFGNDYFIKGRMSTGYAILMDIDGNKIDFSTMPRGYKTPKLSNCKRITARSTVMTQVKVV

SEQ ID NO: 10233 - protein, 445 aa, unidentified
MVFVLDKHKKPLMPCTEKRARLLLQRGRAVIHKMEPFTIRLRDRTLEKSNVQLLRLKLDPGSKTTGVAIIDESKPDCSRVIFLGEIRHKAGIKKSLDNRRAIRHSRRNRKTRYRKARFDNRKRPEGWLPPSLQARVDQTLNTVTKLRKFLPIAAISTEHVKFDTQFMQNAEISGIEYQQGELFGYEVREYLLEKWGRKCAYCGKTDVPLEIEHIIPKSRGGSNRVSNLTLSCKLCNQKKGTMTAAEFGFPEVQAQAKKSLRDAAMMNATRWALFNKLKKIGLPVECGTGARTKKQRIEHGLPKTHYYDACCVGISTPKRLMIIPQYISVWTVIGRGTRRMCNTDKYGFPKGHRTSKKMYFGFQTGDIVKAAVPKGKYMGTWIGRVAVRASGYFDLKDGQGKRICQGVSYKHCRLIQRANGWQYEKYLRKEKSRIPPTAKAVGFLR

SEQ ID NO: 10234 - protein, 426 aa, unidentified; identical to SEQ ID NO: 3427

SEQ ID NO: 10235 - protein, 431 aa, unidentified
MDAWDIIVVLNKRGKPLMPCSPAKARLLLKEKKAIVKRRTPFTIQLTIATGESKQPVSLGVDAGYKHVGLSASTEKAELYASEVELRQDVSDLLSARRALRQSRRNRKTRYRAPRFDNRIRTKRKGWLAPSVENRINAHLSRIEAVLRLLPVTKITVETASFDLQLLKNPDISGKEYQEGEQLGFWNVREYVLFRDGHVCQHCHGRSKDPVLNVHHLESRRTGGDSPGNLITLCETCHKALHRGDITLKAKRGKSFRAEAFMGIMRWEVLNRLKASHPELEVNNTYGYRTKHARIANGIAKSHCADAFCIAGNLGAERLGEFFFQKQTRRNNRQIHKLSILKGGIRKRNQAPFEVNGFRLFDKVACQGEEGFIFGRRSSGFFDVRKLDGTRISAGISCKKLHLLEKRRTYLTEIRKEEALPPLPEGRGLRA

SEQ ID NO: 10236 - protein, 431 aa, unidentified
MPNKVYVINKHGRPLMPCSPAKARHLLDAGKAKVKKRTPFTIQLVYGSSGYTQEVILGVDAGSKTIGMSASTTKEELLSAEVKPRNDVVDLLSTRREFRRARRNRKTRYRKPRFDNRVRSKHKGWLAPSVEVKIQEHITSIKRVCRILPVSKVVIETAEFDLQLLKAIADGKPVPQGEDYQQGEMYGHYNVRQYVLWRDGYTCQCCGAHTTKKKEVRLHVHHLESRKVGGDAPDNQVTLCESCHEKLHKGLIAEKDFKKRKRKSTRDATFMGIMRKTLMQRLCSELPIPVIETRGYITKATREKLLVLPKSHTNDALAIAQGKQGFNVGYLPGIVQINKIYTIRPVRHHNRQLHKAAILTGGIRKSNQTEKYVFGYRLFDKVQFNGQDCFIWGRRTTGIFTIKTINGKMIKDGISFKKLKLVEKSTSYLIA

SEQ ID NO: 10237 - protein, 442 aa, unidentified; identical to SEQ ID NO: 2903

SEQ ID NO: 10238 - protein, 415 aa, unidentified; identical to SEQ ID NO: 2674

SEQ ID NO: 10239 - protein, 424 aa, Anabaena sp.
MSNYALVIDTNKQPLSPCHPSVARKLLDSGKAAVFRMYPFTIILNKSCSDVVNQAIELKIDPGSKTTGIALVQGEKIIFGAELSYRGSAIKASLESRRSLRRGRRNRHTRYRQARFLNRTRTKNWLAPSLQHRVETTLTWVNKLIKFAPLTRISQELVRFDLQQIDNPEISGIEYQQGTLFGYEVREYLLEKWKRKCAYCGIENVPLQVEHIHPKARGGTNRISNLCLACEKCNIKKGTQDVEKFLAKKPDLLKCILAQAKRPLKDAAAVNSTRWALFSRLKETGLPVSTGSGGQTKFNRTKFNFPKTHWLDAACVGQIGELEIFTNKPLLIKATGHGTRQMCRTDKFGFPSRYVPRIKFVKGFQTGDIVKAIVTTGKKIGKYIGRVAVRATGSFNISASKLVQGISYKCCKIVHRKDGYNYAF

SEQ ID NO: 10240 - protein, 442 aa, unidentified; identical to SEQ ID NO: 3234

SEQ ID NO: 10241 - protein, 431 aa, unidentified; identical to SEQ ID NO: 8350

SEQ ID NO: 10242 - protein, 446 aa, Pseudomonas sp.
VAVYVLDKTGTPLMPCSEKRARLLLERGRARIHRQVPFVIRLVDRRQADSALQSLTLKFDPGSKFTGIALVRQKGQRVSVLSLMELAHRGAAIRQAMQQRAAFRRRRRGQNLRHRAPRFDNRTRPEGWLPPSLRHRLDTTLGWVGRMRNWAPISDLAVERVKFDMQAIQNPEISGVQYQQGELAGYEVREYLLEKWGRCCAYCDAENTPLEIEHIVPRSAGGSDRVPNLTLACRPCNQRKGNQPVEVFLKARPELLARIKAKAKAPLRDAAAVNATRNALFRGLLDTGLSVTTGTGAQTKYNRRRLDLPKTHALDAACVGEIRAIEHWHRPTLAIKATGRGDYQRTRLTAHGFPRGYLTRQKRHFGFQTGDQVRAEVPTGKKAGTHQGRVAVRKTGSFNIQTSDGVVQGVHHRHFTLIQRADGYAYSHIQTDSPQSQKEAARAEVR

SEQ ID NO: 10243 - protein, 499 aa, unidentified
MRYVYVLDVDGKPLMPTCRFGKVRRMLKSRQAKAVDTLPFTIQLTYKPRTRILQPVTLGQDPGRTNIGMAAVRFDGKELGRFHCITRNKEIPKLMADRMATRRASRRGERLARKRLARKLHTTVKHLEGRMLPGCSEPIAVKDIINTESRFNNRLRPEGWLTPTATQLLRTHINLFRKLSGILPVTDVAVELNKFAFMQLDNPEMKKREIDFCHGPLCGTGGLEAAVKEQQDGKCLLCGKESIGHYHHIVPRSRRGSNTIANIAGLCPKCHELVHKDADTAERLTEMKTGLTKKYGGTSVLNQIIPKLVETLADLFPGHFHVTNGWNTKEFREKHHLEKDHDVDAYCIACSHLKPEETLVETEPFEILQFRKHNRAIIHHQTERTYKLDGVTVAKNRKKRMEQKTDSLEDWYVDMAKEHGKTQADAMRSRLTVIKSTRYYNTPGRMMPGTVFLYEGKRYVMTGQITNGKYYRAYDQEKRNFPAVKVRILTKNTGLVFVA

SEQ ID NO: 10244 - protein, 426 aa, unidentified; identical to SEQ ID NO: 6376
  source 1..426: note = Filamentous sp.

SEQ ID NO: 10245 - protein, 472 aa, unidentified; identical to SEQ ID NO: 2965

SEQ ID NO: 10246 - protein, 427 aa, Nostoc sp.; identical to SEQ ID NO: 2670

SEQ ID NO: 10247 - protein, 427 aa, unidentified
MVYVISKSGKPLMPCENVVARLLLKDGKAKVKKRCPFTIQLTYDSDEYTQEVVLGQDTGAKHIGTACIGNDKVLYQSNIELRDDIKSTMDSRRRARRSRRNRKTRYRESRFLNRKNSTKLNRLPPSVKHKVQAHIDEIEFCRKILPISKIVLEVSQFDTHLMKNPSLILEKVKHWGYHKGFDYGWASRREAILNRDGYTCQICGKKHTRLEVHHIVYRSQSGTDDENNLITLCEDCHTGVHSGKIALDKKPKKMNLKYATHTNIIRSRLLKAYPDAIETFGFVTKINRENLNLPKDHFIDACVISSGGKEFTPNDTIYQKRRVSKGDYQLTKGVRGEQKIPVGKIQGFRKFDKVKYFGKEYFIKGKRSSGFATLMDIFNNKIDFSYMPRGHKTPKLSKCNRISARRSCLCISQKNHSCGEGANYDAI

SEQ ID NO: 10248 - protein, 432 aa, unidentified
MSSARYWHEEKFSERKVSEMTNYAFVLDANGKQLAPTKEQKAWFLIRRKRATLVSKYPMVIQLKKKIPDKEICKDEVRCGIDDGGLHAGIALVQKCQTRNKVVFKGVIEQRNDVKHLMDARRGFRRYHRYHKRYRPARFDNRKSSKRKERIAPSILQKRQAAVRVINQLNRWINITDYWLEDVAIDIRALTDGYKPYKWQYQKSNRLDENIRKAVILRDGCRCMECGKSNRRLEVHHIKPRRLKGSSTPGNLITLCTECHQKTEGVEELYMDRYFALLNSSDNRNLDYAQHVMIGKKWLREQLSNLGMLYLTNGGDTANKRIDWDIAKSHSNDAVCITDLRPDTCEIKEWVIKPMRRQSKAKTDNVLGIKHRDLVEYTFRNGETHIGYVTALYPEQNALNFQSPAKHCKKVNAGKCKVLWKYSKIYWLDNAS

SEQ ID NO: 10249 - protein, 412 aa, Shewanella sp.
MFVFVLNKNGKPLMPCKPQKARVLLRRGDAKVIKRTPFTIKLVGGSSGYKQPLVAGMDTGSKAIGCAVIGLGQVIYQSQVALRQDVSKKMEQRAMYRRNRRGRKCRYRPARWSNRASMRATGRLAPSLKSKLDSHLRERNFVESILPINEWKVETASFDIHKLTKPDVSGAGYQNGVQKGFYNVKAYVLHRDGYKCQSGRKGKHSNKLHVHHIQFRSNGGTDTPTNLTTLCETCHADLHANKFELKAKKSRTKHATEIGVIKSRLKKEWQFAETFGYETKFKREQVLRLPKEHYYDAVAICLEDGELVEPASSVYFKRHVAKGDYQQTKGARSEKRIPVGKLFGLKKHDFISTPQGSGFVKGKRSTGYFALETITGEKVHASANVKKNTIRVTARTTTLTQKMESASNSSSH

SEQ ID NO: 10250 - protein, 536 aa, unidentified; identical to SEQ ID NO: 2718

SEQ ID NO: 10251 - protein, 452 aa, unidentified
VCVLSNNGERLMPTFRLSKVRRLLKDGKAKIVKHHPFTIQLLYDSKTNTQPIEICEDVGYNYIGISAKSKSREYVSAQYDTLQDEKEHHDDCRKMRRSRRNRLRYRKPRFDNRKRDEGWLAPSLEHKKQLNISLIERYVSVIPITHATVEVGSFDTMLLQSIQKGEAKPEGADYQKGPRYNLATLREAVFYRDNYTCQVCKRKITDGAILHMHHMFYWKGRHGYQLDELVTACEKCHTPANHQKGGKLFGFGKDKKFANLTGAAFMNAIRWQIVNALYATFGKEFVTITYGAMTKEKRIALQLEKSHNNDAYAMGKLHPSRRCTFVHYEKIKRNNRVLEKFYDATYIDARTGNKAKGKELFNGRISRDHKKDSENLHKYRNKKVSRGRRSIRRQRYAIQPYDTVRLEGKTYITSGCHNKGTRLLIPVNGKSKSVAISKVQVVCHAGAWIQII

SEQ ID NO: 10252 - protein, 517 aa, Streptosporangium sp.; identical to SEQ ID NO: 6269

SEQ ID NO: 10253 - protein, 440 aa, Clostridium sp.
VPLMIYVLNKEGKPLMPTNRYAKIRVLLKSKKAVVVNSKPFTIKLLYDTKNFTQSITLGIDSGYLNIGFSAITKEKELIAGEVKLLKGMSERLKEKAMYRRQRRSRLHYRKPRFDNRKRSKDWLAPSIQHKYDSHIRFIDKLKKLLPITNIIIEVANFDTHKLKDPSIEGAAYQNGEQKDFFNLREYILHRDGHKCQNPNCKNKNAESILQVHHIGFWKQDRSDRPGNLITLCSKCHTPKNHKKNGFLYGWQPKVKSFKEATFMSMIRWRLVNTLDCNHTYGYITKHNRISLNLQKTHYNDAFCIAGGSSQSRVKPLIFEQIKRNSRSLEKFYDAKIIDIRTNTKVSGVELFNGRRTRNKNLNLENLRKYRGIKVSKGQRRIRTKRYFYQPGDLVKYEDKVYTVKGTQNKGKYIALKELKKVPKVELLAPYKFRKGLVCA

SEQ ID NO: 10254 - protein, 373 aa, Moorena sp.
MQNYVLVIDTEKQPLNPISPKKARRLLDKGKAAVFRMYPFTIILKAAIANPTISPCQIKIDPGSKVTGFALVQDDQVIWGMELEHRGGLIKKKLESRSAVRGGRRNRNTRYRKPRFLNRKRPEGWIAPSLEHRVLTIETWVRRLTKFCPVNEIWIEIVKFDTQKMQDPEINGVEYQQGELAGYEVREYLLEKWGRECAYCGKPNIPLQIEHIHPKSKGGSDSAKPTLRERVSNLCLACEKCNQRKGNRPIEEFLKKKPGLLQKIKNKALSPLRDAAAVNTTRNKVVKVLKEIKPVVTGTGAQTKYNRTKLGLPKQHWIDAACVGDVEALVLRTSQPLLVTCKGQGGRQKAALNKYGYPIRHNPLKPIKGWKAW

SEQ ID NO: 10255 - protein, 464 aa, unidentified
MAVFVLDRQGRPLMPCTEKRARLLLERARARVHRVVPFVIRLTDRRAEDSFFQPRRLKLDPGSKTTGIALVREKVDGIAVLSLMDLVHRGRQIREALTQRRALRRRRRGANLRYRAPRFNNRTRAAGGLAPSLQHRVNSTMSWVRRVMRWAPVSALSMELVRFDMQAMQNPEISGLEYQQGELFGYEVREYLLEKWGRKCAYCDAEGVPLQIEHILARARGGSNRVSNLTLGCAPCNIGKGRRDVREFVKDEARLRRILSKAKAPLRDAAAVNSTRWALPNALKETERALETGSGGRTKWNRARLGIPKAHALDAVCVGEVKAVSGWQRPTLEVRCTGRGSYQRTRLTAQGFARGYLTRKKRVHGFQTGDRVRAIVPKGKKAGTHVGRVAVRASGSFNIQTPTGVVQGIAHRHCTTVQRADGYGYLTVPLTKERESGNGTKAWLAAQAALSHPGMNAEVSRAKR

SEQ ID NO: 10256 - protein, 428 aa, Enterococcus sp.; identical to SEQ ID NO: 4335

SEQ ID NO: 10257 - protein, 431 aa, unidentified; identical to SEQ ID NO: 5265

SEQ ID NO: 10258 - protein, 420 aa, unidentified; identical to SEQ ID NO: 3884

SEQ ID NO: 10259 - protein, 453 aa, Anaerotruncus sp.
MSVAVLSSTGRKLMPTSNYRARKLLKSGRAAIECYRPIFTIRLTDRKEGETQPIEYACDTGYQHVGVSIKSEKHEFVHAQYDTLSNETERHNDRRKYRRKRRNRKRYRKPRFNNRSRKNQEMAPSLRHRRENQINLFESFCKVMPITSATFEMGKFDTQLLQAIADGKPLPEGKDYQQGLKYLFQTEREAVFSRDHYTCQVCGKSVKDGVILHTHHIGFWKGYRPNRISNLLTVCEHCHTAKNHKPGGALWGLEPKSTNLAAATYMSTVRWAIYRELVLKYPEIDIHIQYGAKTSVTRKSLHLAKTHANDAYCIGSLHPRHRTTELVYQKKRRNNRILAKFYDAKYIDIRDGAKKSGAVLSCGRTNRRESRRSDKNQRIYRGNKCSSGRTSVRKNRYAYQPGDTIVFHSQRFVVNGSHCKGARVILGTGKSVKATDLTCIKKEGGWRFLPAQA

SEQ ID NO: 10260 - protein, 413 aa, unidentified
LKVFVLNMRGRPLMPCSPARARHLLKAGKAVVRRRTPFTIQLRIATGETKQSVTLGVDAGAKHVGLSAATEKEEVFASEVELRQDITGLLAARLSLRRDRRHRKTRYRAPRFLNRVRSKHKGWLAPSVENRIQAHMSRIDAVCRLLPVTKIVIETASFDIQKIKDPSVEGTDYQQGDQLGFWNVREYVLFRDGHVCQHCHGHAKDKILNVHHLESRQTGGDAPNNLITLCETCHKACHAGKIKLKVKRGQSFRAEAFMGIMRWTLLDRVRKTHPKLPVENTYGYLTKHKRIALGLPKTHCADAFCIAGNLKALRRGDFLFQQQTRKHNRQIHKCSILKGGVRKLNQAPFLVKGFRLFDKVRIGGQIGFVFGRRVRGTFNIRRLDKTVIGTDINCKKLSLLETRKTFLTELRKE

SEQ ID NO: 10261 - protein, 430 aa, unidentified; identical to SEQ ID NO: 4817

SEQ ID NO: 10262 - protein, 490 aa, unidentified
MYVVYVLNRQGKPLMPTKRFGHVRRMLKTGKAKAISTKPFVIQLQYESTDFVQPLYGGTDPGRTNIGEAVLNNKGEVVYAAHVLTRNKEIPKLMADRATHRRASRRGERLRRKRRAKANGTMTCFPEGRKLPGYKDGVLKLKGIINTESRFNNRKRPTGWLTPTARQCVQTHLNMVQNICKILPVTDWTLEYNRFAFMQLEDGSVCGWDFQNGRLKGYASKEDYIYALQGGVCVCCGASIEHYHHIKPRHKGGSNTHENLVGLCSVCHAEIHIGKRNLDKIGKYKKYAGTSIVNIAIPFIWDGIVKMFGDKAHICEGQETAELRRANNIPKEHFADAVCIAGIGSGITPQYDDNQPFKLRQFRCHDRSRINAQVERTYLDGKTIVAKNRKPRFEQKGDALSDLQSKIAKEHGELAARRAVSKLVVKKSYRRYNVPERIKPSAVFMFNNKKYLLRGQLTNGMYYRAFGEGTKNFPSRNCEIVSSGCSLTYA

SEQ ID NO: 10263 - protein, 419 aa, unidentified; identical to SEQ ID NO: 6355

SEQ ID NO: 10264 - protein, 431 aa, unidentified
MPNKVYVINKHGRPLMPCSPAKARHLLDAGKAKVKKRTPFTIQLVYGSSGYTQEVILGVDAGSKTIGMSASTTKEELLSAEVKPRNDVVDLQSTRREFRRARRNRKTRYRKSRFDNRVRSKHKGWLAPSVEVKIQEHITSIKRACRILPVSKVVVETAEFDLQLLKAIADGKPVPQGEDYQKGEMYGHYNVRQYVLWRDNYTCQCCGAHATKKKEVRLHVHHLESRKVGGDAPDNQVTLCESCHEKLHKGLITAKDLKKRKRRSTRDATFMGIMRKTLMQRLCSELPIPVVKTRDYITKATREKLLVLPKSHTNDALAIAQGKQGFNVGYLPEILQIDKIYTIRPVRHHNRQLHKAAILKGGIRKSNQAGKYVFGYRLFDKVQFNEQDCFIWGRRTTGIFTIKTINGKMIKDGISFKKLKLVEKSTGYLIA

SEQ ID NO: 10265 - protein, 430 aa, unidentified
LSWSNYSNIQEVIETLVYVLNNQGNPLMPCKEAKARKLLKQNKAIIAKYEPFTIQLTFECENQTQEVYLGVDSGSKHIGISATTEKQVLYEADVELRNDIVDKLSSRREARRTRRNRLRYRPVRFNNRVRSKHKGCLAPSIEQKINSHIQVIKKIHQILPISKIIVETAQFDIQKIKNPDIEGKQYQQGEQMEFWNVREYVLFRDGHQCQCCKGKSKDNRLNVHHLESRKTGGNATNNLITLCETCHNDYHQGKTKLNIKRGKSFRDAAFMGIMRKTLLSRLRQIYPNVQETFGYITKNIRIENGLLKEHYIDARCISGNPLAKPLGYYLYQKCVRRQNRKMTKDNFIRGGVKKSNQLVGDVFGFGLFDTVEYQKKKYFVFGRRKGGNFDIRTLYREKNNNCSINYKKLKLIQKNNNILTERRLSISPRS

SEQ ID NO: 10266 - protein, 442 aa, unidentified; identical to SEQ ID NO: 2903

SEQ ID NO: 10267 - protein, 447 aa, unidentified
VPAYRIKHITKKEAPYMVYVLDIDGQPLMPTSRHRKVRKLLNSHLAKVVKRCPFTIQLLYQSTKETQPVSLGVDAGSRHIGLAATTEQKVVYQEELVPRNDVVKLLSARRALRSSRRSRKTRYRKPRFNNRVHSKHKGWLAPSVEVKIQEHITAIKRICQILPISDIHVETAEFDLQRLKAMEEGRPLPVGTDYQLGEQYDFYNTRQYVLHRDEYTCQCCGAHDNNVKLHVHHIESRQTGGDAPNNLITLCEHCHKLLHAGKTILPKGKKRGKSYRDATFMGIMRKTLLERLKKEIDVPVEGTYGYITKYWRERAGLEKSHINDAICISKHPYARPLETYYLTKAVRHHNRQIHKTKFSKGGIRKRNQAPYLVKGFRLFDKVLYQGESYFIFGRRITGYFDIRTLDGTKVNKGSTSYKKLRIQDTAEAYLTEVRAIPHMNEFTCVLA

SEQ ID NO: 10268 - protein, 419 aa, unidentified; identical to SEQ ID NO: 3670

SEQ ID NO: 10269 - protein, 426 aa, unidentified
MRIFVMNMRGDPLMPCTQKKARILLKEGKAVIYKYDPFTIQLTYATGETKQDCHIGIDTGSKHIGMAITSENKVLFKGEIELRQDVKSNIDTKHIYRRSRRNRKTRYRQPRFLNRKRSDKWLPPSLQNRVDHTFHWIDTFCSLISDPILHIEVGKFDTAKMINPEINGVDYQHGQTYGFFEERYFVFARDNYTCQCCGKSKDKILQTHHIIYRSNGGTDRVDNLITVCTDCHTSKNHQKGGILYKWQEQHKKVKQYKEPPFMNAIRKRIFARYPNAHTTYGSETTPHRKELGLEKTHYNDAITISGITNIKEDPKEWLLIKQFRKKKRSLHEATARKGRKEPNCFQKRNSKNTPFYRGFYLNDKVKVFGHGQIGYITGFTSGGAYVKNVDGEYITIPNKSYKQVSIKYLKLLSHNNNWQYVVKSAV

SEQ ID NO: 10270 - protein, 428 aa, unidentified
MVTVQQSTHHLPFGRVFIRRNLFMVYVISQDGKPLMPCSDPIARLLLKQGKAKVKKREPFTIKLTYETTNHTQGLTLGVDTGSGTIGTAVSKDNGDIVYMSEVVVRNDITDKMTQRAKYRRNRRNRKTRYRKARWLNRASSIKKDRFSPTMQSKLHSHVREIEYIQSILPVTEMVFETGQFDMQLMKNPSLANPKVRPWGYQKGANYGFENTKAMVLNRDNYTCQCCKGKHKDSKLEVHHIVFRSQGGSDEESNLLTLCHTCHKDLHSGKINPKLSGKVKGNLKYATQMNSIRKQLFRFYPNAIETFGYVTKANRLHLGVDKEHYYDACTIATQGNAFNVKSNLYKKKCVSDGDFQKTKGIRSEQPIVTDKICGFRKFDKVRYFGNDYFIKGRMSTGYAILMDIDGNKIDFSTMPRGYKTPKLSNCKR

SEQ ID NO: 10271 - protein, 442 aa, Sutterella wadsworthensis; identical to SEQ ID NO: 2834

SEQ ID NO: 10272 - protein, 420 aa, unidentified; identical to SEQ ID NO: 6128

SEQ ID NO: 10273 - protein, 443 aa, Anoxybacillus sp.
MVEENMTCFMQRKGENPMVFVLDTNKRPLAPCHEAVARKLLKQGKAAIYRRFPFTIILKKSVDESEIKATYRLKIDYGSRHTGLAILRGQEVVWLGQLDHRTDIKERIDKRRAFRRARRNRKTRYRKPRFLNRKRKEGWLPPSLESRVQNIQTWVNRLKKLCPIGYISYENTKFDTQLMRNPEISGIEYQQGTLQGYEVREYLLEKFGRKCCYCGKENVPLEVEHIIPKSRGGTDRVDNLCLACHDCNQRKGSKTAEEFGYPHIQKQVKESLKDASAINSTRWKAYEVLKQTGLDVECGTGARTKMNRIRLDLPKTHYFDACCVGESTPNHLYFKTKEVLFIKAKGRGSRSRTNLDRYGFPRGYLARQKFFFGFQTGDMVKAVVPRGKYQGVWFGEVACRKTGSFDIKGKDGKRIAQGINYRYVQVIQRFDGYAYGKGVAELA

SEQ ID NO: 10274 - protein, 431 aa, Escherichia sp.; identical to SEQ ID NO: 3801

SEQ ID NO: 10275 - protein, 333 aa, unidentified
MAMVYVQNKDGKPLMPTTRYCYVRLLLKENKARVVSTTPFTIQLNYDTPDITQDLILGIDPGRTNIGVAVVKEDGQCVFSAHLETRNKDVPLLMQKRAGFRKQHRTLDRRRKRQRRAKVAGTTVEGETIERLLPGYEKPVVCHYIRNKEARFNNRSRPAGWLTPTANHLLQTHINLIAKVAKFLPITKVVVELNRFAFMAMDNPNIRRWEYQQGPLYGLGSVEDAVYAQQDGRCLFCKKPIDHYHHVVPRHKGGSETLANRCGLCREHHALVHTDKVWADKLVTRKEGVNKKYHALSVLNQIIPHLMEYLGSETRYDVYATDGRSTKGFRVAK

SEQ ID NO: 10276 - protein, 306 aa, Erysipelotrichaceae sp.
LAPSVEVKIQEHISAIQRVQKILPITEVHVETAEFDTQRLKAMEEGRPLPVGTDYQLGEQYDSYNVRQYVLKRDNYTCQCCGKQGDGVKFHVHHLETRQTGGNAPNNLITLCEDCHKAIHAGTKHLPAKKAKRGKTHKDAAFMGIMRKTLLARLHSLLDIPVTGTYGYITKYYRELYHIEKSHINDAIMNFSAVPDDTWYVSKAVRRHNRQIHKRKILKGGIRKRNQADHTVCGLRLFDLVAYDKHLYYVFGRRKTGYMDIRTLNGAKVNKGSVSIKRLKYVSASTVLVERRKTIPLMDKSMSFLA

SEQ ID NO: 10277 - protein, 465 aa, unidentified
MVIALDRHKKPLGFVIERRCRKLLEVRRAVFYRHYPAVIILKDVDARNIYKLPSYRIKIDPGAVHTGIAIVCNETNEVMYFLQIEHRGSEVKKALITRKQTRRNRRSRETRYRRCKFKNGGDFDSSRKNGWLPPSVKSTADNVIHWVEKLCRYINITECSFEAVRFDSQLMDNPEIGGEEYQQGTLSGYELREYLMEHFRHTCQYCGGESGDPVLEWEHKIPRSRGGSDSVKNASLACSCCNRDKGNRTLEEYLEDSKHISPKGKSEKALNEARISHISGILEKGTIYGSNRYSAWVNSTRRYIEKYLFLMFDDVECCSGGRTKYNRIKLKLPKDHHYDALCVGSVPKEGYTDRTNSYVLYVKATGRGTRFRGQCNSCGVITVKYKNNSKRKFGFQTGDIVQLNKPKGKDTGQYTGKVAVRSSGSFDLIRKGCKRITANYKYFRMMQYSDGYEYLGPLRPIPHSA

SEQ ID NO: 10278 - protein, 406 aa, unidentified; identical to SEQ ID NO: 3498

SEQ ID NO: 10279 - protein, 423 aa, unidentified; identical to SEQ ID NO: 3951

SEQ ID NO: 10280 - protein, 553 aa, Streptomyces sp.
MTTFPVGEQTHLAVLPQQPALESVGADTPGSRDETAHGHPAAVRGAGREHERGETDGHCTGVRRRHAKGVATAAHAAESWSGDAPPHDQSYAGGVGEGQVFVISKDGRPLMPCHPARARELLSRGRAVVARQVPFVIRLKDRTLAASEVDGVHLRIDPGSKGTGLALMDQKPETGGQGGTFTVRRGLISVELRHRGEQIRLCMRQRAGYRHRRRSADRRYRAPRPDNRSRPAGWLPPSLRHRVDTTYAVAARLCRYAPVTEIHVESTAFDVHSMSAGRPLTDVEYQQGTLAGLEVRAYLHSRWKNACAYCGATGVPLNVEHLSPRSRGGSDRISNLVLACVPCNRAKGALPVQIFLADRPDRLARILRQARTPLNDAAAMNATRWRLMESLRTLGRPVHTWSGARTQWNRETAGLHKTHTVDALCVGGMEPERGDVIVRLPDRVLVVKATGRGSYARTTPDRFGFPRLRRARVKRHFGYSTGDLVRAVVPAGKWAGAWTGRVSVRATGRHSLTTPEGRIDVSYRSLRLVQRGDGYGYDFRLEGGWPSPSRKTG

SEQ ID NO: 10281 - protein, 459 aa, unidentified; identical to SEQ ID NO: 3944

SEQ ID NO: 10282 - protein, 414 aa, unidentified
MPCSPAKARLLLKEKKAIVVRRTPFTIQLTIATGESKQPVSLGVDAGYKHVGLSASTEKAELYASEVELRQDVSDLLSARRTLRQSRRNRKTRYRAPRFDNRIRTKRKGWLAPSVENRINAHLSRIGAILRLLPVTKITVETASFDTQLLKNPDISGKEYQEGEQLGFWNVREYVLFRDGHACQHCHGRSKDPVLNVHHLESRRTGGDSPGNLLTLCETCHKALHRREIKLKTKRGQSFRAEAFMGIMRWEVLNRLKASHPELEVHNTYGYRTKHTRIVNGIDKSHCADAFCIAGNLGAKRLGEFFFQKQTRRNNRQIHKLSILKHGLRKRNQAPFEVKGFRLFDKVVCQGEEGFIFGRRSSGSFDVRKLDGTRISAGISYKKLRLLEKRRTYLKEIRKEEALPPLPEGRSLRA

SEQ ID NO: 10283 - protein, 442 aa, unidentified
MVTVQQSTHHLPFGRVFIRRNLFMVYVISQDGKPLMPCSDPIARLLLKQGKAKVKKRELFTIKLTYETTNYTQGLTLGVDTGSGTIGTAVSKDNGDIVYMSEVVVRNDITDKMTQRAKYRRNRRNRKTRYRKARWLNRASSIKKDRFSPTMQSKLHSHVREIEYIQSILPVTEVVFETGQFDMHLMKNPSLANPKVRPWGYQKGANYGFENTKAMVLNRDNYTCQCCKGKHKDSKLEVHHIVFRSQGGSDEESNLLTLCHTCHKDLHSGKINPKLSGKVKGNLKYATQMNSIRKQLFRFYPNAIETFGYVTKVNRLHLGVAKEHYYDACTIATQGNAFNVKSNLYKKKCVSDGDFQKTKGIRSEQPIVTDKICGFRKFDKVRYFGNDYFIKGRMSTGYAILMDIDGNKIDFSTMPRGYKTPKLSNCKRITARSTVMTQVKVV

SEQ ID NO: 10284 - protein, 415 aa, unidentified
MVYVVANDGQPLMPTERHGKVCRMLKSGMAKVVKKCPFTIQLQYESERNVQPVSLGVDAGSKHIGISATTKTKVLYESDVELRDDIVKLLATRRQLRLSRRSRKTRYRPVRFDNRKRKEGWLAPSIRQKIGSHLTVVANVCKILPINQIIVETASFDIQKIKDPEIQGIEYQQGEQMDFWNIREYVLFRDGHTCQCCKGRSKDKILNVHHIESRKTGGNAPNNLITLCETCHKGYHNGTVILPKNIKHGMQFKDAAFMGIMRWTFYNTLKEQYEPDIPVSMTYGYLTKNTRIEHGLPKEHYIDARCISGNPDAVSDGTYYYQKKVRCHNRQIHKQTILKDGVRKSNQAEYLVKGYRLFDKVRYQDREYFIFGRRKSGFFDIRTLSGEKVNKGSISVKKLTFVDTRKNYFIERRTV

SEQ ID NO: 10285 - protein, 455 aa, unidentified
VWLSKPLATLGKDFDSSLEENSFFLVVNLLGKERDIMYVYVINKHGEPLMPCSSRKARTLLNNKKACVVKRTPFTIKLLHGSAGYKQPITLGVDAGSKHIGLSVSTETHEIYREEFAPRNDVVDLLSTRREFRHARRNRKTRHRAPRFNNRVHSKHKGWLAPSVEVKIQEHITVIKHVCQIMPISLVRVETAEFDTQRLKAMIAGKPLPVGTDYQFGEMYDEYNVRQYVLKRDNYTCQCCGAHATKTKQVKLHVHHLESRKVGGNAPNNLITLCPICHKAIHEGKKALGKKKRGKPLRDAAFMGIMRKTLLARLREELSIPVQQTYGYITKMLREKNNLLKSHMNDALCIAKHPKAAPCENCYRSKAVRHHNRQIHKATILKGGIRKNNQAPYIVKGFRLWDKVLYNGQECFISGRRATGYFALKKLDGTVVTTGASYKKLRLLETTKNYLRERM

SEQ ID NO: 10286 - protein, 414 aa, unidentified
MPCSPAKARLLLKEKKAIVKRRTPFTIQLTIATGESKQPVTLGVDAGYKHVGLSASTEKAELYASEVELRQDVSDLLSARRALRQSRRNRKTRYRAPRFNNRLRTKRKGWLAPSVENRINAHLSRIEAVLRLLPVTKITVETASFDMQLLKNPDIAGKEYQEGEQLGFWNVREYVLFRDRHVCQHCYGRSKDPVLNVHHLESRRTGGDSPGNLITLCETCHKALHRGDITLKAKRGKSFRAEAFMGIMRWEVHNRLRALHPGIEVSNTYGYRTKHARIANGIAKSHCADAFCIAGNLGAERLCEFFFQKQTRRNHRQIHKLSILKGGIRKRNQAPFEVKGFRLFDRVACQGEESFIFGRRSSGFFDVRKLDGTRISAGISCKKLHLLEKRRTYLTEIRKEEALPPLPEGRGLRA

SEQ ID NO: 10287 - protein, 435 aa, unidentified; identical to SEQ ID NO: 4814

SEQ ID NO: 10288 - protein, 357 aa, Calothrix sp.; identical to SEQ ID NO: 4929

SEQ ID NO: 10289 - protein, 411 aa, unidentified
MVYVLDKNGQPLMPTDRHRKVRLMLQSGQAKVIKRCPFTIQLTYNTGHQAQEISLGIDAGSKHIGVSATTKTRVLYEADVELRNDIVDLLSSRRELRRGRRNRKTRYRPARFDNRRREDGWLAPSIRQKIGTHLTVVENICKILPISRITVETASFDIQKIKNPDIQGAEYQQGDQLGFWNIREYVLFRDNHTCQCCKGKSKDKILNVHHIESRKTGGNAPNNLITLCETCHTGYHKGTVQLPKAIKRGMRFKDAAFMGIMRWAFYEALKQQYEPVGTPVHNTYGYITKHTRIAYNLPKEHYVDARCISGNPEASSNGEYYYQKKVRCHNRQIHKLTVLKGGIRKQNQATYLVKGYRLFDKVSYQGKGYFVFGRRQSGFFDIRTLSGEKVNKGSLSCKKLKFIATDRKSVV

SEQ ID NO: 10290 - protein, 426 aa, Parasutterella sp.; identical to SEQ ID NO: 3045

SEQ ID NO: 10291 - protein, 442 aa, Anaerostipes sp.; identical to SEQ ID NO: 3161

SEQ ID NO: 10292 - protein, 413 aa, unidentified; identical to SEQ ID NO: 3220

SEQ ID NO: 10293 - protein, 413 aa, unidentified; identical to SEQ ID NO: 2636

SEQ ID NO: 10294 - protein, 406 aa, unidentified
VVYVQDIDGNPLMPTTRHGKVRRLLKANKATVVNLCPFTIRLTYATSGYKQEIVLGVDAGTKHVGLSATTKSKELYVSEIILRSDIVELLSSRRESRRRRRNRLRYRKPRFMNRIKTKKEEWVSPSVRQKIDSHLKIIGFVYSILPISKLIIEVAQFDIQKIKNPEISGKEYQEGDQLGFWNVREYVLARDGHKCQHCRGKSKDSILNIHHIESRKTGGNSPSNLITLCETCHKEFHKGKIKLKVKRSASLRDAAVMGIMKWRLYDKLKSLYPNVKMTFGYITKHDRIKHGIEKSHVSDAFVISRNFDSERLGYYYKRKLVRRHNRKIHKMKILKGGIRKRNQAPFKVFGFRLFDKVMFQGEEYFIYARRLSGQFNIRDINRENKKDVSCKKLRYIIHGLISIETG

SEQ ID NO: 10295 - protein, 492 aa, unidentified
  REGION 1..492: note = Ga0373625_0041279
VFTDLVPPSNGRTESVCFSQLRRVGNTVIHSSWLREIHTHLRILRKFVALWSVIKSSEGRNGVMNLKTFTNNLDASLTLKGERNLRVYVVNLRNEPLMPTTPRKAKILLKSGEASVFKRTPFTIQLLHASGETKQPITLGVDSGFQNVGLSVITEKEEVFSAEVKLRTDIVKLNSERRQYRRARRNRKTWYREPRFLNRKKDNGWLAPSIQHKLDSHIKLIDMVKKILPITKINIEVANFDIQKIKNPEIDGIGYQNGDQSGFWNIREYVLYRDGHICQHCKGKSGDKILEVHHINTRQTGGDRPDNLITLCGLCHEKVSQNKLQLKIRVSKGYKAESFMSMVRWRLVNIIREKGDIVSHTYGYITKGKRIALGVEKTHINDAFVISGGTNQIRLNGYLIQQVRKCNRKLYKGIRSHIKNTATRFIRGFQRFDKVLWKGVECFIFGRRTSGYFDIRRLDSTKLSQSVKYTELQLLETFRTFSLERRVASSPA

SEQ ID NO: 10296 - protein, 422 aa, Petrotoga sp.; identical to SEQ ID NO: 5403

SEQ ID NO: 10297 - protein, 442 aa, unidentified
MSTSVFVLDKKHRPLMPCRPARARRLLRAGRARVVKRFPFVIRLVDRTVEQSEVQPVLIKLDPGSRETGAAVVRDDGKKRHHALAFFVIEHRGGAIRDALKARSAFRRRRRSQNFRCRSPRFLNRVKPKGWLPPSLRHRVETTLSFVRRMCRYLPVSGIATELVKFDSQKLQNPEVSGVKYQQGTLFEYEVREYLLEKFGRKCVYCGAEGVPLNIDHVVPRAKGGSNRVSNLVLACVSCNQKKGARSLEDFLKGKPEVLARVRRELKTPLRDAAAVNATRWVLFNELKATGLPVETGSGALTKLNRHAFGVEKEHWLDALCVGRLNGAVTRKGLNVLEIRCMGRGSRQRTRLTKYGFPRGYLMRQKCVHGFATGDMVEANVPKGKKAGLWRGRVAVRVSGSFNIQTPKGVIQGVGWKHCRLISHNDGYGYAWLGHAPHSSPA

SEQ ID NO: 10298 - protein, 465 aa, unidentified; identical to SEQ ID NO: 6446

SEQ ID NO: 10299 - protein, 431 aa, unidentified; identical to SEQ ID NO: 3746

SEQ ID NO: 10300 - protein, 447 aa, unidentified
LVFVLDRRGEPLMPCTEKRARLLLRKGRAVVHRISPFTIRLKDRLAEESNLQPCRLKLDPGFRQTGVAVVREEQDPHGPVHHALHCAVIHHRQEEVRSDMLARRSARRRRRSSLRYRPPRFDNRRRPQRWLPPSLRSRVCNVVSIARLYTRLSPIAAIDVELAKFDTHKLQNPEVSGVSYQQGELWGYEVREYLLEKWGRRCAYCGATNVPLEIDHIVPVSRGGTDRVSNLTLACSACNQAKGNRTAEEFGHPEVQERTKQPLVGAAAMNATRYAMLSALRSFGLSVYSHTAARTKWNRSRLGLSKSHTVDALCVGEMAAVAGWEMPVLGIRAIGRGRRCRTNFDAHGLPRGYLPRTKRVFGFCTGDLVVAEVPSGMYAGRHMGTVLIRSSGRFDIKDLRGRRVAQGIRWQHCRLVQRFCGYSYGKEEAAPSSPRLKAGAFGAAEGW

SEQ ID NO: 10301 - protein, 449 aa, Allochromatium sp.
MAVFVLDKQKRPLMPCTEKRARLLLERGRAVVVRLAPFTIRLKDRIGGAVQPLRLKLDPGSRVTGLALVRESEICDPDTGVVERLEHGLWFGELAHRGQAIREALETRRHYRRARRARKTRYRAPRFLNRTRRAGWLPPSLQHRLDTTLNWVQRLRRLAPITALSQELVRFDTQALQNPEISGVEYQRGELAGYEVREYLLEKWHRTCAYCGATNVPLEIEHIVPRSNGGSDRVSNLTLACRDCNQRKGHRPIEDFLQRQPALLHKIQAQAKAPLKDAAAVNATRWALLNALKTTGLPVETGSGGRTKFNRTRLNLPKTHALDAACVGAVDQVRDWNRPVLSIRATGRGVYSRTRTFNNGFPRGYLMRQKRVHGFQTGDWVRAEVPKGKKAGVHVGRVAVRQTGSFNIQAQAGTVQGISYRHCRLLQRADGYGYSFQLKPEMEAARRAA

SEQ ID NO: 10302 - protein, 434 aa, Marinobacter sp.
MPCTERRAWLLLDRGRAVVVRAYPFTIRLKDRTGGITQPVRIKIDPGSKTTGIAVVRENGQKQHVLALMELAHRGRQISKSLEQRRAFRRRRRNQLRYRAPRFLNRTKPKGWLAPSLQHRVDTTKSLLNRLRSLVPVVSISQELVRFDTQKMANPEISGVEYQQGTLLGYEVREYLLEKWGRECAYCTDKDTPLQIEHIDPKANGGSNRISNLTLACRPCNQEKNRKSLVSFFATSKRLKNHQARLDRILKQCKKPLRDASAVNSTRWALYQTLKQTGLPVEVGTGGRTKFNRRRLNIPKTHALDAACVGEVEIVEGWDVPTLAIKATGRGSYKRTRLTKHGFPRGYLMRQKQVKGFQTGDMVRAVVPTGTKAGTWLGRVAVRKTGSFNIQTNSGAIQGISHRHCALTQRADGYGYHIQPNQRKEEGDRKNESR

SEQ ID NO: 10303 - protein, 435 aa, Desulfobacterium sp.
MRGEALMPTSPRKARVLIAHGKAKIDSYRPFTIQLCIATGESRQDLTLGVDAGYATIGFSVIDSTKELFACEIELLKGQVERNNKRRIYRRQRRSRLRYRKARFEKQNKPEGWLAPSIQHKLDTHIKFIHRLQSIMPITETIIEVAAFDIQKIKANGEIEGKEYQEGEQLGFWNLREYILHRDNHKCQHLDCKNKAKSPILEVHHIGFWKKDRTNRPGNLITLCTKCHTAPRHKKNGSLYGWEPKVKTFKPATFMSMIRWKLVNALQCDHTYGHITKHNRIRLDLPKTHFNDAFCIANGQHQTRAIPVFFQQKRKNNRCLEKFYDAKVLDIRTNKIVSGNDLNNGRRTRNKNLNGENLRKYRGLKKSKGRRQVRRQRYSIRPHDIVEFDGSIYKAVGVQNKGTYLKITNGVKTVVKNIKHVKTIFHQKTLMYVSR

SEQ ID NO: 10304 - protein, 408 aa, unidentified
MVYVLNISGKPLMPCKEAKARKLLKQNKAQIAKREPFTIQLLFQCENQTQDISLGVDTGSKHIGLSATTDKKEMYSADVELRNDIVDLLSTRRQNRRTRRNRLRYREPRFNNRMHSKNKGWLAPSIEQKIEKHLRVVDDVYKILPIKNIIVETASFDLQKIQNPEISGEEYQQGEQFSFWNVREYILWRDNHECQCCHGKSKDKILNVHHIESRKTGGDSPNNLVTLCEYCHTQYHKGNIKLHLKRKNSLRDSAFMGIMRWSFYNRLKDKYPNVSMTYGYITKNTRIRNGLPKEHYIDARCISGNPQSEPLGYYFYQKKVRCHNRQIHKANILKGGYKKRNQAEYIVKGFRLFDKVKYDGEEYFIFGRRNSGFFDIRKLDGTKVNNGSVSCKKLQLVDMRKTLLTVRR

SEQ ID NO: 10305 - protein, 414 aa, unidentified
MPCSPAKARLLLKEKKAIVVRRTPFTIQLTIATGEAKQPVSLGVDAGYKHVGLSASTEKAELYASEVELRQDVSDLLSARRALRQSRRNRKTRYRAPRFDNRIRTKRKGWLAPSVENRINAHLSRIEAVLRLLPVTKITVETASFDLQLLKNPDISGKEYQEGEQLGFGNIREYVLCRDGHVCQHCYGRSKDPVLNVHHLESRRTGGDSPGNLITLCETCHKALHRGEITLKTKRGQSFRAETFMGIMRWEVLDRLKASHPKLEVHNTYGYRTKHARIANGIAKSHCADAFCIAGNLGAERLCEFFFQKQTRRNNRQIHKLSILKGGIRKRNQAPFEVKGFRLFDKVACKGEEGFIFGRRSSGFFDVRKLDGTRISAGLSCKKLHLLEKRQTYLMEIRKEEAFPPLPEGRGLRA

SEQ ID NO: 10306 - protein, 420 aa, unidentified
MQYVYVLNKHGEPLMPCSPRKARLLLKQKKACVIKRTPFTVKLLHGSAGYKQPVTLGVDAGSKHIGISATTEKHELYREEATPRNDVVDLLSARRAFRRSRRNRKTRYRAPRFNNRVHSKHKGWLAPSVEVKIQEHITLIKHVFRILPVTLVRVETAEFDTQRLKAMLEGKPLPVGTDYQLGEMYDEYNVRQYVLKRDNYTCQCCGAHSTKTKGVKLHVHHIETRRTGGNAPNNLITLCKACHKALHAEKVTLDGKKRGKPLKDAAFMGIMRKTLMERLRKELKIPVQGTYGYITKYLREKNGIPKSHTNDARCISKNPLAIPCDTCYYTKAVRHHNRQLHKATILKGGIRKANQAPYIVKGYRLWDKVAYNGTECFITGRRTSGYFALKELDGTVVSNSISYKKLRLLEAVTNYIIERK

SEQ ID NO: 10307 - protein, 408 aa, unidentified; identical to SEQ ID NO: 5302

SEQ ID NO: 10308 - protein, 456 aa, unidentified
MSTCVCVLSNNGERLMPTIRLGRVRHLLKDGKAKIIKHHPFTIQLLYDSKTNTQPIEICEDVGYNYIGISVKSQSHEYVSAQYDTLQDEKACHDSCRKLRRTRRNRLRYRKPRFDNRKRGEGWLAPSLKHKKELNVNVVKMYCTVMPITHATVEVGSFDTMLVKAIQEGKVIPEGADYQKGPRYNLATLREAVFYRDNYVCKICGRKATEGAILHMHHMFYWKGRHGNSLNELLTVCEKCHTPANHQKSGKLYGFGEKIKFADLSGAAFMNTVRWQIVNELYVAFGKPFVTITYGAMTKEKRIALQLEKSHNNDAYAMGDFHPVHRCGFRHYQKRRRNNRVLEKFYDATYIDARTGNKAKGKELFNGRISRNHKKDSENLHKYRSEKVSKGRRSIRKRRYAIQPYDTVRLKGKTYITSGCHNKGTRLLIPVNGKSKSVTISKVQVVCHAGPWIQII

SEQ ID NO: 10309 - protein, 420 aa, unidentified; identical to SEQ ID NO: 9481

SEQ ID NO: 10310 - protein, 442 aa, unidentified; identical to SEQ ID NO: 8963

SEQ ID NO: 10311 - protein, 431 aa, unidentified; identical to SEQ ID NO: 4463

SEQ ID NO: 10312 - protein, 470 aa, unidentified; identical to SEQ ID NO: 2825

SEQ ID NO: 10313 - protein, 316 aa, Succinimonas sp.
MIYVLNSKGEPLMPTGRHGRVRHLLRDKKAFIVNYHPFTVQLTKERSNEIQEVALGIDTGYENVGLSATTKDKVLFECKAELRTDLVENLSTRRETRRTRRSRKLRYRKARFSNRKRTEKWLPPSIKSKLECHLTLVAKLHRFLPIGKIVVEVANFDIQKIKNPEIKGAEYQQGVQSDFWNVREYVLYRDNHKCRYCKGKSKDMVLNVHHLESRKTGGNSPDNLITLCETCHNMYHRGLISLDNVTKGSSYKPETFMSILRKYLIENLRKTYNNVSYTYGYETKSKRIANRLEKDHNVDARCISGNFSAKPDGIYL

SEQ ID NO: 10314 - protein, 415 aa, Eubacterium sp.; identical to SEQ ID NO: 6925

SEQ ID NO: 10315 - protein, 331 aa, unidentified
LLSTRRQYRRSRRNRKTRYRAPRFNNRVHSKHKGWLAPSVEVKIQEHITVIKRVCRILPIVLVRVETAEFDTQRMKAMLEGKPLPVGGDYQLGEMYDEYNVRQYVLKRDNYTCQCCGAHPTEKEPVRLHVHHLESRQTGGNAPNNLITLCVACHKALHAGKISLDGKKRGKPLRDAAFMGIMRNTLLARLETELSVPVQQTYGYITKMLREENHIEKSHTNDAHCIAKAPNAKPCDTMLRTRALRHHNRQIHKAKILKGGIRKRNQAPYLVKGFRLWDKVRYNGEECFITGRRTSGYFALKKYDGTVISNSVSYKKLTLLEAATNYITERS

SEQ ID NO: 10316 - protein, 509 aa, unidentified; identical to SEQ ID NO: 3483

SEQ ID NO: 10317 - protein, 263 aa, unidentified
MVYVQDINGKPMMPTTRHGKVRRLLKDKKAVVVNLCPFTIRLTYVTSDYKQEIVLGVDAGTKHVGLSATTKSKELYSSEVILRSDIVDLLSTRRELRKTRRNRLRYRKLRFDNRVKSKRSGWIAPSVKYKIDAHIRIVDNVCSILPISRIVIEVAQFDTQKIKNPNISGKEYQEGDQLGFWNVREYVLARDGHKCQYCKGKSKDKILNVHHIESRKTGGDSPSNLITLCETCHKEYHKGNIDLKIRRGKSRRSRNGNHEMEIV

SEQ ID NO: 10318 - protein, 413 aa, unidentified; identical to SEQ ID NO: 7541

SEQ ID NO: 10319 - protein, 420 aa, unidentified; identical to SEQ ID NO: 3089

SEQ ID NO: 10320 - protein, 420 aa, unidentified
MQYVYVLNKHGEPLMPCSPGKARLLLKQQKAHVIKRTPFTIKLLYGSTGYKQPITLGVDAGSKHVGLSASTEKRELYREEFTPRNDVVDLLSTRKQNRRSRRNRKTRYRPPRFDNRVHSKHKGWLAPSVEVKIQEHITVIKRICRILPITLVRVETAEFDTQRLKAMLEGKPLPVGTDYQLGEMYDEYNVRQYVLKRDNYTCKCCGAHTKVIKAVKLHVHHLESRKMGGNAPGNLITLCITCHDALHKGKVSLDNKKLGKPMRDAAFMGIMRRTLMSRLREELPITVQGTYGYITKMQREQNDIKKSHVNDARCISKHPLAEPCSVCYRTKAIRHHNRQTHKANFSKGGIRKRSQMPYVVEGYRLWDKVLYKGQECFVSGRRTSGSFTLKKLDGTRISKGVTFKKLRLLEPATNYLIERM

SEQ ID NO: 10321 - protein, 434 aa, Prevotella sp.; identical to SEQ ID NO: 9304

SEQ ID NO: 10322 - protein, 465 aa, unidentified; identical to SEQ ID NO: 8068

SEQ ID NO: 10323 - protein, 406 aa, unidentified; identical to SEQ ID NO: 10063

SEQ ID NO: 10324 - protein, 427 aa, Mastigocladus sp.; identical to SEQ ID NO: 3596

SEQ ID NO: 10325 - protein, 503 aa, unidentified
MDTIYVLNRDGRPLMPMHSWGRVQRFLKSGRASVVSSLPFTIRLKKQIEDPELDRCILGIDPGRTNIGLCVTDGKGKPLFASVLETRNKEIPDLMRDRKQARQASRRGERKRRQRRAIHFDKSGETAMTEYWRVLPGTKKAVCQKHIRGQESKFMHRRRPKGWRTPTAEQLYRTHLNAVAKIEKLLPIADIVIEMNRFDFAKMENPGIRNWEYQRGRLFGFKNVQEAVIARQNGKCLLCGRPIEHVHHVRPRSQGGSDHIDNLAGLCCACHQKVHTDPAAKARLASEAKKRLKKYGALSVINQIMPALLDELAYRYLLWITTGWETAKTRRGCGLPEKEKDDGTHYIDAWCIAVSIMENRLYVPDSRDLDDVFHLMRQFRRHDRQKVEATKARSYYLDGRLVAKNRRPRTGQADGKDPKPALSEWRQGHEKDVARLTVRKSTRSYNDLKRVLPGAEVLCDEKRYVVKGKHNDRWIALDAADHTLEKAQSRFTLLHHNTGIVFV

SEQ ID NO: 10326 - protein, 491 aa, Pseudomonas sp.; identical to SEQ ID NO: 6873

SEQ ID NO: 10327 - protein, 447 aa, Pseudomonas sp.; identical to SEQ ID NO: 5615

SEQ ID NO: 10328 - protein, 451 aa, Ruminococcus sp.
MSVAVISKTGERLMPTSEYRARKLLKLGKAIKHSYHPFTIQLTERETGDIQPIELCMDTGYIHIGISAKSEKHEYLAEQIDTLTDERGRHDACRMYRRQRRSKKRYRQARFNNRKRDQGWIAPSLEHKKKIHIQAISRINNVMPLTDITLEMGNFDTQVLKAKEEGKPLPQGADYQHGERYGIATLREAVFSRDGYKCQCCGRTIKDGAILHIHHIKYRSQGGTNSMSNLSTVCDKCHTPKNHKPGGKLYNWRPKLSSFKGATFMTAIRWQLYNEVKALFHDIDIHITYGAATKEQRRELDIDKSHVNDAFVMGQFHPKHRIKAVLYKKKRRNNRCLEKFYDAKYIDSRDGKKRSGQELFNGRINRNHKKDSENLHQYRLQKVTAGKRTVRKQHYKIQPHDIVIYETRKRETAGCHCNGTRVMLLPDKKSISVKKVKICKYAGGYFKSAFN

SEQ ID NO: 10329 - protein, 442 aa, unidentified; identical to SEQ ID NO: 3161

SEQ ID NO: 10330 - protein, 458 aa, unidentified; identical to SEQ ID NO: 4474

SEQ ID NO: 10331 - protein, 456 aa, unidentified
MSTCVCVLSNSGERLMPTFRLGKVRRLLKDGKAKIVKHHPFTIQLLYNSKTNTQPIEICEDVGYNYIGISVKSQSHEYVSAQYDTLQDEKACHDSCRKLRCSRRNRLRYRKPRFDNRKRSEGWLAPSLEHKKQLNIRLIERYVSVIPITHATVEVGSFDTMLLQAIQKGKSKPEGADYQKGPRYNLATLREAVLYRDNYTCQVCGRKIADGAILHMHHMFYWKGRHGYQLDELVTACEKCHTPANHQKGGKLFGFGEDKEFANLSGAAFMNAVRWQIVDALHATYGKEFVTITYGAMTKEKRIILGIEKTHNNDAYAMGNYHPAHRCEFGHYQKRCRNNRVLEKFYDATYIDTRTGNKAKGKELFNGRISRNHKKDSEDLHKYRSKKVSKGRRSIRRQRYAIQPYDTVRLESKTYITGGCHNKGTRLLIPANGKSKSVAISKVQVVCHAGAWIQII

SEQ ID NO: 10332 - protein, 507 aa, Anaerostipes sp.; identical to SEQ ID NO: 2841

SEQ ID NO: 10333 - protein, 470 aa, unidentified; identical to SEQ ID NO: 2925

SEQ ID NO: 10334 - protein, 421 aa, unidentified
MQYVYVLNMHGEPLMPCSPRKARLLLKEGKARVVKRTPFVIKLLHGSAGYKQPVALGVDAGSRHVGLSACTEGRELYKEELSPRNDVVELLSVRRQYRRSRRNRKTRYRAPRFNNRVHSKHKGWLAPSVEVKIQEHITVIKRICRILPVTLVRVETAEFDTQRLKAMLAGKPLPVGADYQLGEMYDEYNVRQYVLKRDNYTCQCCGAYPTEKKPVRLHVHHIESRHVGGNAPNNLITLCAVCHKALHEGKITLGNGKKRGKPLRNAAFMGIMRNTLLARLKDELNIPVKQTYGYITKLLREENHVEKSHTNDARCIAKAPNAKPCDTMFRTRALRHHNRQIHKAKILKGGTRKKNQAPYLVKGFRLWDKVRYNGEECFITGRRTSGYFAIKKYDGTVISNSASYKKLTLLEAATNYITERS

SEQ ID NO: 10335 - protein, 431 aa, unidentified
MPNKVYVINKHGRPLMPCSPAKARHLLDAGKAKVKKRTPFTIQLVYGSSGYTQEVILGVDAGSKTIGMSASTTKEELLSAEVKPRNDVVDLLSTRREFRRVRRNRKTRYRKPRFDNRVRSKHKEWLAPSVEVKIQEHITSIKRVCRILPVSKVVIETAEFDLQLLKAIADGKSVPQGEDYQKGEMYGHYNVRQYVLWRDNYTCQCCGAHATKKKEVRLHVHHLESRKVGGDAPDNQVTLCESCHEKLHKGLIAEKDFKKRKRKSTRDATFMGIMRKTLMQRLYSELPIPVVKTRGYITKATREKLLVLPKSHTNDALAIAQGKQGFNVGYLPGIEQIDKIYTIRPVRHHNRQLHKVTILKGGIRKSNQAEKYVFGYRLFDKVQFNGQDCFIWGRRTTGIFTIKTINGKMIKDGISFKKLKLVEKSTSYLIA

SEQ ID NO: 10336 - protein, 417 aa, unidentified
MLVYVLNRHGKPLMPCRPAKARILLKEKKAVVVKLEPFTIRLVFGSSGYRQKTFLGIDAGSKHIGVSVTTEQKEVFAAEVEVRNDIVKKLAGRREARRTRRNRLRYRKPRFNNRVHAKKKGWIAPSIQHKVETHLKLVEKICKILPIYRIVVEVASFDIQKIKNPAVQGVEYQQGEQLNFWNVREYVLFRDGHTCQCCKGKSKDKILNVHHIESRQIGGNAPNNLITLCETCHKNYHRGELELPTTIRRGMKFKDSAFMGIMRWAFYNRLKSYCEERQIACSLTYGYRTKHMRIVAGLPKTHCVDARCISGNPLAIPSDTYFYCKKVRRNNRQMYKANLLKGGIVKPNQAPFIVHGYRLFDKVRFKNKLYYIFSRRQRGDFDIRTLDGTKVNKGSVSWKKMMLVQKRTTWLIERRPA

SEQ ID NO: 10337 - protein, 439 aa, unidentified
  REGION 1..439: note = Ga0307928_10013462
LKNVNRVFVLNHDKTPLSPCHPARARQLLFKGKAAIFRKYPFTIILKNQKVNPKFQNTQVKIDPGSKTTGLAITLKGKNKGWILIWAANLEHRGQYIKRLLEKRKNVRRSRRHRKCRYRPSRFLNRTRNEDWLAPSILSRINNVIVWVEKLQEFCYLRSCIMEVARFNMQKMMNPEIRGVEYQQGTLQGYDVREYLLEKYHRTCIYCSKKNVPLEIEHVVPKSKGGSNRVSNLTLACKICNQRKGNQPIEFFLKRKPELLRKIKRSLKVSLKDAAAVNIIRKRLRKEVDYCIETKTSTGSITKFNRTKQYYKKDHWIDAACVGKRSGRNVSIPDNFQPLLIKAMGRGRRQMCLVDKYGFPRAKSKSRNKIIKGFQTGDIVKAIVTEGKKVGTYVGRIAVRNKGTCDISTKESLIQGISLRYCKLLQKIDGYSYKLLTGG

SEQ ID NO: 10338 - protein, 413 aa, unidentified; identical to SEQ ID NO: 2636

SEQ ID NO: 10339 - protein, 418 aa, Methanobrevibacter sp.
MFVYVLNMHGEPLMPCKPRKARKLLKEKKAKVVNRTPFTIQLLYGSSGYKQTVNLGVDAGSKYIGLSATTNKKELFKATVELRQDIPKLLESRKTQRKNRRSKLRYRPARFNNRGKKGKLAPSIQHKIDSHLTIIKRICNIIPIENIIVETAEFDMHKLKNPSVSGADYQHGDAEGFYNVKSAVLSRDNYTCQICGAKNTKLQVHHIRFRSDGGSNRMDNLVTLCKECHDKVHTGELKYTKKVKSFKHSSHMNIMRKKLIQSLKKEFRNVFETFGYLTKYTREKLGLVKSHCNDAFVISHNLDAEQSNVEYSYKKVRRHNRQIHKFKPSKGGKRQRNQSPYIVNGFRRYDKVMYNGKGCFITSKRSSGYFQLKTFDGTVISQGVSSKRLKLLEPIKGWLIDWRLAIPPRPKEVGVSLP

SEQ ID NO: 10340 - protein, 465 aa, unidentified
MSTCVCVLSNSDERLMPTIRLGKVRHLLKDGKAKIVKHHPFTIQLLYDSETNVQPIEICEDIGYNYIGISVKSESHEYVSAQYDTLQDEKEHHDDCRMHRRTRRNRLRYRKRRFDNRKRDKGWLAPSLGHKKQLNISLLEQYVSVIPITHATVEVGSFDTMLLQAIQKGEAKPEGVDYQKGPRYNLATLREAVFYRDDYTCQVCGRKITDGAILHMHHMFYWKGRHGNSLSELITVCEKCHTPANHQKGGKLYGFGEDIKFANLSGAAFMNTVRWQIVNVLYAAFGKPFVTFTYGAMTKEKRIALHLEKSHNNDAYAMGSFHPVNRCAFEHYEKVKRNNRILEKFYDSQYIDTRTGELTNGKSLFNGRISRSHKKDSENLHKYRGKRICKGHRALRRKKVALNPGDLVSLNGEILVVYGTHTKKNGSVNVEFKTPSRDGKKSASLKKLKIVKTSNLMHSAWTKVS

SEQ ID NO: 10341 - protein, 416 aa, Parasutterella sp.; identical to SEQ ID NO: 10114

SEQ ID NO: 10342 - protein, 442 aa, unidentified; identical to SEQ ID NO: 7396

SEQ ID NO: 10343 - protein, 462 aa, Scytonema sp.
MGVNQMITNSVFVLSKNGKILKPTTPVRARILQSQGKAKKLKLFPFTLILEKEVDENVELYLELRVDPGAKFTGISLVDLKKNEVVWAMELEHRGLAIKMELIKRAGVRRSRRSRKLRYRKKRFARKKPSGWLPPSLRHRLLTTETWIKRLLKVAPIKSIAIESVKFDLQKLENPDIESIEYQQGTLFGYTLREALLEHWGRECAYCGKTDVPLQIEHIHCRSRGGSERFSNFTLSCEKCNQKKGTKPVEQFLKNKPEILKKIKSHQKKSLSDAAAVNSTRKAIFEMAHQFGLPVISGNGASTKMIRIQSGLPKQHWLDSSCVGTDQIVKLRICQPLRVTCKGHGTRQVQRVNAKGFPAIASVKKNPITGKKEVKLVAKNQKYTHATTGDYVICFLNQDRKHVKAGIYRARVKTPTEKGVEVLISGHRIAVAQRHVKLIHCSDGYEYSFPRISDDLLRFQAI

SEQ ID NO: 10344 - protein, 415 aa, Bacillus sp.; identical to SEQ ID NO: 2431

SEQ ID NO: 10345 - protein, 493 aa, unidentified
MAVVYVISASGKPLMPTTRCGHVRGLLNEGKARVVEREPFTIQLKYETEEMTQPLYLGIDPGRTNVGAVVVREDGECVFTAQLTTRNKDVPKLMKARKQFRMAHRRLKRRCKRQRRAKGAGTLSQKGEFQRLLPGYEKPILCKGIRNKEARFNNRQHPVGWLTPTANHLLLTHLNMVKKLQKLLPITDVVLEVNRFAFMAMENSNIRRWQYQRGPLYGKGSVEDAVYAQQDGHCLFCGKPIAHYHHVVPQHKNGSDTLENRVGLCNEHHDLVHKDRAWEAKMKETKAGLNKKYHALSVLNQIIPALTEQLAELFPQHAFVTTGEDTADFREDHGIAKEHHLDAYCIACSVLAEPSTVAAPTAKPHRLMQFRRHDRQVCHKENIKRVYLLDGKAVATNRHKAIEQKDNSLEEFCKTHTQQEVSALTVKGHKPIYKEIQRFMPGGVFLFNGKVHTLQGSQGRYKGMPKYYIGTDGEKNHAKRCIFLQQNCGLRWA

SEQ ID NO: 10346 - protein, 424 aa, unidentified; identical to SEQ ID NO: 3232

SEQ ID NO: 10347 - protein, 396 aa, unidentified
VVRRTPFTIQLTIATGESKQPVSLGVDAGYKHVGLSASTEKAELYASEVELRKDITDLLSARRALRQSRRNRKTRYRAPRFDNRIRTKRKGWLAPSVENRINAHLSRIEAVLRLLPITKITVETASFDMQRLKNPDISGKEYQEGEQLGFWNVREYVLFRDGHVCRHCHGRSKDPVLNVHHLESRRTGSDSPDNLITLCETCHKALHRGEITLKAKRGQSFRAQAFMGIMRREVLNRLKASYPELKVHETYGYLTKHARIANGIVKSHGADAFCIAGNLGAERLGEFFFQKQTRRNNRQIHKLSILKGGIRKRNQAPFEAKGFRLFDKVACQGKEGFIFGRRSSGSFDVRKLDGTRISAGISCKKLRLLEKRRTYLTEIRKEEALPPLPEGRGLRA

SEQ ID NO: 10348 - protein, 426 aa, Symploca sp.
MFVLTVDKNRFPLNPTHPARARKFLQQGRAVILRRYPFTIMLKDVESTSDVQKYRLKLDPGSKTTGIAIVADERVIWAAQLHHRGYSIKQSLESRRLLRRGRRNRHTRYRQPRFDNRIRADGWLAPSLQHRVLSTMTWVKRLRQFCPISAISMELVRFDTQLMQNREVSGVLYQQGELAGYEIRQYLLEKWGRQCAYCQKKGVPLEVEHIHPRSKGGSDRVSNLTLACCKCNQKKGNKPIEQFLKKKPELLKGILTAVKSPLKDAAAVNSTRWALYGALKETGLPVEIGTGGRTKFNRTRQQLPKTHWLDAACVGSSTPESLKVLVAKPLTITATGHGTRQMCRTDKYGFPSRYVPRNKFVKGFQTGDIVSAIVTTGKKIGTYVGRIAVRSTGSFNISTANGLVQGISYKYCSRVQGKDGYQYCFS

SEQ ID NO: 10349 - protein, 398 aa, unidentified
MLVYVLKQNGQPFMPTERFGKVRRLLKEGKAKVVRREPFTIRLLYESETDVVQECYCGVDTGSKHIGVAVVSDDKVLYQSQTELRDDIKQKMDNRRMYRHNRRSRKTRYRKQRFLNRRNSIREDRLPPSVRHKVQAHIDEIEFCKKILPVSDLILEVSQFDTALMKNPSLMNEKIRHWGYQQGFNYGYSSRREAVLHRDNYTCQCCGKKNCRLEVHHIEFKSNGGTDDEENLITLCKECHDRVHAGTVVLDKKPKKMRLKHATHMSIIRSWLLKIYPDAIETFGFVTSENRNHLNLSKDHYIDACVIASGGLEFKPLDVVFYKRRMSKGNYRLTRKSFGKEIICKGKILGFKSFDKVEYFGVECFIGSRRNSGIATLVDIFRNTLDFSHLQKVSNYLK

SEQ ID NO: 10350 - protein, 513 aa, Micromonospora sp.; identical to SEQ ID NO: 8336

SEQ ID NO: 10351 - protein, 443 aa, unidentified
MTKTATQKVTQVCVLDQNGQPLMPTQRLGKVYRLLETKKAHIVAYEPFTIKLDYEPKTHIIQPLTLGVDSGAIHSGYSIANEHREYYSAEVIARDDISKNISDKRMYRRNRRSRKTRYRKPRFNNRKNKGKGWIPPSLEQKVDVQVNEIEHLHKYFPINNIIIEVAEFDIQKIENPDISGKEYQQGTLQGYNIRNYLLEKYNHKCFYCDKEVSTFEVEHMIPRARNGSNRIDNLTLSCHDCNQKKGTLTAEEFIEQTLSPQKAAQKLRQLPKTKQLLKYMAHMNATRWVLYNTIKETYDSVSITYGYITKHNRINACLPKAHHIDAKCITGFSTVPSFDVIVVKTKMRRHNRQLHRATFSKGHMRRAATLPRIVHDFQLYDIVLFNNHRYYIKSRRSSGSFTIVSLEGLKDEKRSYKKLTFLGHTNAYLTNHVNDEKDYMASK

SEQ ID NO: 10352 - protein, 419 aa, unidentified; identical to SEQ ID NO: 6355

SEQ ID NO: 10353 - protein, 415 aa, Bacillus sp.; identical to SEQ ID NO: 5390

SEQ ID NO: 10354 - protein, 426 aa, Anoxybacillus sp.
MVFVLDTNKCPLAPCHEAVARKLLKQGKAAIYKRYPFTIILKEIVDNFRPKTPYRLKIDHGSKHTGLAILRGQEVVWLGQLDHRTDIKERMDKRRAFRRARRNRKTRYRKPRFLNRRRKDGWLPPSLESRVQNIQTWVNRLKKLCPIGYISYENTKFDTQLMRNPEINGVEYQQGTLQGYEVREYLLEKFGRKCCYCGKENVPLEVEHIIPKSRGGTDRVDNLCLACHDCNQRKGSKTAEEFGYPHIQKQVKESLKDASAVNSTRWKVYEVLKQSGCEVECGTGARTKMNRIRLDLPKTHYFDACCVGESTPNHLYFKTKEVLFIRAKGRGSRSRTNLDRYGFPRGYLARQKFFFGFQTGDMVKAVIPRGKYQGVWFGEVSCRKTGSFDIKGKDGKRIAQGINYRYVQVIQRFDGYTYRREGMNIA

SEQ ID NO: 10355 - protein, 431 aa, unidentified
MPNKVYVINKHGRPLMPCSPAKARHLLDAGKAKVKKRTPFTIQLVYGSSGYTQEVILGVDAGSKTIGMSASTTKEELLSAEVKPRNDVVDLLSTRREFRRVRRNRKTRYRKPHFDNRVHSKHKGWLAPSVEVKIQEHITAIRRVCGILPVSKVVVETAEFDLQLLKAIEEGKPVPQGEDYQQGEMYGHYNVRQYVLWRDDYTCQCCGTHATKKKEVRLHVHHLESRKVGGDAPDNQVTLCESCHEKLHKGLITAKDFKKRKRRSTRDATFMGIMRKTLMQRLCSELPIPVVKTRDYITKATREKLLVLPKSHTNDALAIAQGKQGFNVGYLPEILQIDKIYTIRPVRHHNRQLHKAAILKGGIRKSNQAGKYVFGYRLFDKVQFNGQDCFVWRRRTTGIFTIKTINGKMIKDGISFKKLKLVEKSTGYLIA

SEQ ID NO: 10356 - protein, 414 aa, unidentified
MPCSPAKARLLLKEKKAIVVRRTPFTIQLTIATGETKQPVSLGVDAGYKHVGLSASTEKAELYASEVELRQDITDLLSARRALRQSRRNRKTRYRAPRFDNRIRTKRKEWFAPSVENRINAHLSRIEAVLRLLPVTKISVETASFDMQLLKNPDIAGKEYPEGEQLGFWNVREYVLFRDRHVCQHCYGRSKDPVLNVHHLESRRTGGDSPGNLITLCETCHKALHRGDITLKAKRGKSFRAEAFMGIMRWEVHNRLRALHPGIEVSNTYGYRTKHARIANGIAKSHCADAFCIAGNLGAERLCEFFFQKQTRRNNRQIHKLSILKGGIRKRNQAPFEVKGFRLFDKVACQGEEGFIFGRRSSGFFDVRKLDGTRISAGISCKKLHLLEKRRTYLTEIRKEEALPALPEGRGLRA

SEQ ID NO: 10357 - protein, 442 aa, unidentified
MSTSVFVLDKKHRPLMPCRPARARRLLRAGRARVVKRFPFVIRLVDRTVEQSEVQPVLIKLDPGSRETGAAVVRDDGKKRHHALAFFVIEHRGGAIRDALKARSAFRRRRRSQNLRCRSPRFLNRVKPKGWLPPSLRHRVETTLSFVRRMCRYLPVSGIATELVKFDSQKLQTPEVSGIEYQQGTLFEYEVREYLLEKFGRKCVYCGAEGVPLNIDHVVPRAKGGSNRVSNLVLACVSCNQKKGARSLEDFLKGKPEVLARVRRELKTPLRDAAAVNATRWVLFNELKATGLPVETGSGALTKFNRHAFGVEKEHWLDALCVGRLNGVVTRKGLNVLEIRCMGRGSRQRTRLTKYGFPRGYLMRQKCVHGFATGDMVEANVPKGKKAGLWRGRVAVRVSGSFNIQTPKGVIQGVGWKHCRLISHNDGYGYAWLGHAPHSSPA

SEQ ID NO: 10358 - protein, 450 aa, Clostridium sp.
MVYVIDINGNPLMPTNEAKARKLLKNKKSIVKELKPFTIQLNYKTSNYTQRITLGIDSGYLNIGFSAITDKKELIVGEVKLLQGVKDRIQEKAMYRRQRRSRLRYRKARWNNRTKSKHKGWLAPSLQHKLDNHIKFVDSLYNILPITKCVVEIANFDIQKIKNPDISGEEYQQGEMMGFWNLREYILHRDNHKCQNPNCKNKSKEQILEIHHIKYRSEGGSDSPNNLITLCSKCHTSPNHKKGKFLYDWCMNGKKVRGFKDATFMSMIRWYLINTLKEKHSNISITYGYITKNHRITHKIKKTHYNDAFAIAKGINQIRNNDIFNVSQTRRNNRSLEKFYDCKIIDVRTGNKVSGGDLNCGRRTRNKNHSTENLRIYRGEKISKGQRRIRKQKYFYQPNDLVRYEGKIYTVKGSQNGGKYVALKEIKKVPKVDLLTPYKFQKGFVYEIYK

SEQ ID NO: 10359 - protein, 522 aa, unidentified
MATDFIYVLDTDGTPLAPTHRHKHTRMLLKNGQAKVVCYRPYTIQLLYESEIPRVVPQLIAGQDPGRTNQGTNVIDRTGKSVYAAHIETRNKEIPTLMKNRSANRRASRNGERARRIRKAKLHHTTFQYGDHNRKLPKCNETVPIHYIINTEAKFCCRTRPDGWLTPTANQLLQTHISEVKQLMKILPITDFVIELNKFDFAKLKDPTLQKWQYGKGSLYQTNLKDLIDEEQDHHCLLCKNPIEHYHHIVHKADNGSDRVENMVGLCKKCHTRVHKNQKVEEKVLSKKEGLEKKFAGTSILNQIFKPYIIWLIKTFGEDHVFITDGKTTAKFRNDHNVPKTHELDAYCIACSILENPTINYDCVVFEEKQFRHHNRQLINSTRERKYYHVDRVQTTKTLKNGKQVVKTELKNKTLVATNRKKRMDQKTDSLREYHMKLRQKYDKQTVKKMISELVVVKSTRGYRDQNTIMPGAVFMYHGKHYVLSGTSNQGQYFRAVGQGKTNFPTKDCKIVRKNTGLVYLY

SEQ ID NO: 10360 - protein, 465 aa, unidentified; identical to SEQ ID NO: 3603

SEQ ID NO: 10361 - protein, 512 aa, unidentified; identical to SEQ ID NO: 3711

SEQ ID NO: 10362 - protein, 414 aa, unidentified
MPCSPAKARLLLKEKKAIVKRRTPFTIQLTIATGETKQPVSLGVDAGYKHVGLSASTEKAELYASEVELRQDVSDLLSARRALRQSRRNRKTRYRAPRFNNRLRTKRKGWLAPSVENRINAHLSRIEAVLRLLPVTKITVETASFDMQLLKNPDIAGKEYQEGEQLGFWNVREYVLFRDGHVCQHCYGRSKDPVLNVHHLESRRTGGDSPGNLITLCETCHKALHHGEITLKTKRGQSFRAEAFMGIMRWEVLNRLKASHPELEVNNTYGYRTKHARIANDIVKSHCVDAFCIAGNLGAERLGEFFFQKQTRRNNRQIHKLSILKHGLRKRNQAPFEIKGFRLFDKVVCKGEEGFIFGRRSSGYFDVRKLDGTHISAGISYKKLRLLEKRQTYLTEIRKEEALPPLPEGRGLRA

SEQ ID NO: 10363 - protein, 443 aa, unidentified
LLEVRRAVFYRHYPAVIILKDVDARNIYKLPSYRIKIDPGAVHTGIAIVCNETNEVMYFLQIEHRGSEVKKALITRKQTRRNRRSRETRYRRCKFKNGGDFDSSRKNGWLPPSVKSTADNVIHWVEKLCRYINITECSFEAVRFDSQLMDNPEIGGEEYQQGTLSGYELREYLMEHFRHTCQYCGGESGDPVLEWEHKIPRSRGGSDSVKNASLACSCCNRDKGNRTLEEYLEDSKHISPKGKSEKALNEARISHISGILEKGTIYGSNRYSAWVNSTRRYIEKYLFLMFDDVECCSGGRTKYNRIKLKLPKDHHYDALCVGSVPKEGYTDRTNSYVLYVKATGRGTRFRGQCNSCGVITVKYKNNSKRKFGFQTGDIVQLNKPKGKDTGQYTGKVAVRSSGSFDLIRKGCKRITANYKYFRMMQYSDGYEYLGPLRPIPHSA

SEQ ID NO: 10364 - protein, 418 aa, unidentified
MVYVLNIDGQPLMPTTRHGKVKHLLKDGKAKVVKRCPFTIKLLYETPNCTQDLTLGIDTGSGAIGTAVSTDDGEIVYMSEVVVRNDITDKMTQRAKYRRNRRSRKTRYRKARWLNRKNSIKKDRFSPTMVSKLHSHVKEIEYIKSILPITTMVFETGTFDTYLMKNPSLVNENVRHWGYQKGTNYGFENTKAMVLNRDNYTCQYCKGKHKDSKLEVHHIVFRSKHGSDEESNLITLCHTCHKALHSGKISLKLEGKVKGNLKYATQMNSIRKQLFRIYSEAIETFGYITKANRLKLGVDKEHFYDACVIATHGNKFSVRCNLYKKKCVSDGDFQQTKGVRSEQRIPTCKIQGFRKFDKVRYFGKEYFIKGRLSTGYAILMDIDGNKSDFSYMPKGFKTPKIINLKRLEARSSWIVIFK

SEQ ID NO: 10365 - protein, 395 aa, Thiodictyon sp.
VRVKLDPGSKTTGLALVREDQAGAVQQVLLLAEIQHRGPAIRKALLQRRGYRQRRRSANLRYRAPRFNNRTRSAGRLAPSLQHRVDTTLAWVHRFCRWAPVTALSMELVRFDLQLMQNPEISGVEYQQGTLAGYEVREYLLEKWGRKCAYCADEGVPLEIEHITPRSRGGADRVTNLTLACHPCNQAKGNRNAAEFGHPEIQSKAKQPLRDAAAVNSTRWSLFNALTATGLSVETGTGGRTKWNRTRLGMPKTHALDAAGVGAVKHVSGWAIPTLTIRCTGRGAYQRTRVTQDGFPRGYLMRHKQVRGFQTGDLVRATVPSGKKAGVHIGRVAVRATGRFNVQTPQGVVQGIGHRHCRIIQRGDGYGYSQVATTTLPSPAIPPRPEGRGFSRRSG

SEQ ID NO: 10366 - protein, 423 aa, unidentified
MVYVLNIDGQPLMPTDRHGKVRHLLKDGRAEVVKCCPFTIRLLYDSTHYTQDIVLGVDAGSKHIGLSGTTETKELYASDVELRNDIVDLISTRRQNRRSRRNRKIRYRKARFQNRVSDKKDWLAPSIRQKVDTHMTVVSRVCKILPVTKIIVETASFDIQKIKDPDISGTGYQHGEQLDFWNVREYVLFRDGHTCQCCKGKSKDPVLNVHHIESRKTGGDAPNNLITLCETCHKGYHSGAVQLPKAIHRGMRFKDAAFMGIMRWAFYNKLKEVYEPQDIEVSMTFGYLTKNTRIRHYLPKEHYIDARCISGHPEAIPNNEVFYQKKVRCHNRQIHKNTILKGGIRKRNQTGYLVKGFRLFDKVAYKGREYFIFGRRQSGFFDLRNLSGCKVNKGSLSYRKIGFLEPRQYYLCERRVMDTQGCA

SEQ ID NO: 10367 - protein, 440 aa, Calothrix sp.; identical to SEQ ID NO: 9761

SEQ ID NO: 10368 - protein, 453 aa, unidentified
MSVAVVSKTGMLLMPTSEYRARKLLKSKKAIIHGYHPFTIQLTERETGYIQPVELCMDTGYIHIGTSVKSEKHEYLGEQIDTLTDERQKHDACRMYRRQRRNRKRYRQPRFNNRERDDGWIAPSLEHKKTIHIQAISRICKVIPVTDITLEMGNFDTQVLKAREEGRPLPQGLDYQHGERYSVTTLREAVFLRDGYTCQCCGRTIKDGAILHAHHVVYRSQGGTNRISNLITVCDKCHTPANHKPGGKLYGWKPKVASFKGATYMTTIRWKLYNEVKALFLDIDIHITYGAETKERRRAFDITKSHVNDAFVMGQFHPKHRSKPVCYKKKRRNNRCLEKFYDAKYIDNRNGKTRTGQELFNGRISRNHKKDSENLHQYRRQKISAGKRTIRKQHYAIQPHDIVIFNGEKFETSGCHNNGTRVILLPQKKSVAIKKLNIYRYAGGYFKSAFNQK

SEQ ID NO: 10369 - protein, 428 aa, unidentified
LKVFVLNMRGQPLMPCSPAKARHLLKAGKAVVKRRTPFTIQLRIATGETKQSVTLGVDAGAKHVGLSAATEKEEVFASEVELRQDITGLLAARLSLRRDRRHRKTRYRAPRFLNRVRSKHKGWLAPSVENRIQAHMSRIDAVCRLLPVTKIVIETASFDIQKIKDPSVEGTDYQQGDQLGFWNVREYVLFRDGHVCQHCHGRSKDKILNVHHLESRQTGGDAPNNLITLCETCHKAYHAGKIKLKVKRGQSFRAEAFMGIMRWTLLDRVRKAHPGLPVENTYGYLTKHTRITHGLPKTHCVDAYCIAGNLKAVRRGVYLHQRQMRKHNRQIHKFTVLSKRLEDGTKIGYRKLNQSPYLVHGFRLFDKVRCLGQIGFIFGRRSSGYFDVRRLDGVKLSPSISWRKLTLLEKRSTYLTELRKQDGASSPV

SEQ ID NO: 10370 - protein, 423 aa, Arthrospira sp.
MSNHVFVLDTNRKPLTPCKPGVARSLLKAGKASVFRRYPFTIILNKEVDANPEPLELKLDPGSKVTGIALKQGNHIIFAAELQHRGQQIKEALLSRRQLRRSRRNRKTRYRPARFLNRTRSKGWLAPSLQHRVDTLMTWVHRFRRLAPVGRITQELVRFDLQLMENPEISGVEYQQGELQGYEVREYLLFKWGRTCAYCGAQNVPLEVEQIQPRSKGGSDRVSNLTMACHSCNQAKGNGDIRDFLSGQPDVLSRLLRQAKSPLKDAAAVNSTRWALFKALKATGLPVTTGTGGQTKFNRLRLNLPKAHWLDAACVGPVESLEVLTSKPLLILAKGHGTRQMCGTNKYGFPNRHRSRRQIHKGFQTGDMVTATVTAGKKIGSYLGRVLCRASGSFDITTASVRVAGISHKYCQPIHSTDGYAYA

SEQ ID NO: 10371 - protein, 406 aa, unidentified
MRGRPLMPCSPARARHLLKAGKAVVRRRTPFTIQLRIATGETKQSVTLGVDAGAKHVGLSAATEREEVFASEVELRQDITGLLAARLSLRRDRRHRKTRYRAPRFLNRVRSKHKGWLAPSVENRIQAHMSRIDAVCRLLPVTKIVIEAASFDVQKIKNPTIEGTDYQQGDQLGFWNVREYVLFRDGHVCQHCHGRSRDKILNVHHLESRKTGGDAPNNLITLCETCHKAYHAGKIKLKVKRGQSFRAEAFMGIMRWTLLDRVRKTHPKLPVENTYGYLTKHKRIALGLPKTHCADAFCIAGNLKALRRGDFLFQQQTRKHNRQIHRCSILKGGVRKLNQAPFLVKGFRLFDKVRIGGQIGFVFGRRVRGTFNIRRLDKTVIGTDINCKKLSLLETRKTFLTELRKE

SEQ ID NO: 10372 - protein, 408 aa, unidentified; identical to SEQ ID NO: 4142

SEQ ID NO: 10373 - protein, 539 aa, Marinobacter sp.
LKDGACRKHPASQVDQGKRTPIRYVYHRSLRPTVECFLSSALWKTGITLAKGKAPKVPVAAQAGAGDRHSRGETNRKIRVTRPVRAFIERKTMSVFVLDRRKQPLMPCSEKRARLLVGRGRAVVVRAYPFTIRLKDRTGGIIQPVRIKIDPGSKTTGIAVVRESGQKQHALALMELAHRGRQISKSLEQRRAFRRRRRNQLRYRAPRFLNRTKPRGWLAPSLQHRVDTTKNLVNRLRSLVPVEFISQELVRFDTQKMENPEVSGVEYQQGTLLGYEVREYLLEKWGRECAYCTGKDTPLQIEHIDPKANGGSNRISNLTLACRPCNQEKGRQPLADFFASSKRLKNHQARLDRILKQCKKPLRDASAVNSTRWALYQTLKKTGLKVEVGTGGRTKFNRRRLNIPKTHALDAACVGEVEIVEGWNVPTLAIKATGRGSYQRTRLTRYGFPRGYLMRQKKVQGFQTGDMVRAVVPTGTKAGTWLGRVAVRKTGSFNIQTSSGAIQGISHRHCVLTQRADGYGYHIQPNQPKEEGDREHESR

SEQ ID NO: 10374 - protein, 361 aa, Anoxybacillus sp.
  VARIANT 361: note = X can be any naturally occurring amino acid
MVFVLDTNKRPLAPCHEAVARKLLKQGKAAIYRRFPFTIILKKSVDESEIKATYRLKIDYGSRHTGLAILRGQEVVWLGQLDHRTDIKERIDKRRAFRRARRNRKTRYRKPRFLNRKRKDGWLPPSLESRVQNIQTWVERLRKICPIEHISYENAKFDTQLMRNPEINGVEYQQGTLQGYEVREYLLEKFGRKCCYCGKENVPLEVEHIIPKSRGGTDRVDNLCLACHDCNQRKGSKTAEEFGYPHIQKQVKESLKDASAINSTRWKAYEVLKQTGLDVECGTGARTKMNRIRLDLPKTHYFDACCVGESTTNHLYFKTKEVLFIKAKGRGSRSRTNLDRYGFPRGYLARQKFFFGFQTGX

SEQ ID NO: 10375 - protein, 442 aa, unidentified; identical to SEQ ID NO: 2903

SEQ ID NO: 10376 - protein, 413 aa, unidentified; identical to SEQ ID NO: 2636

SEQ ID NO: 10377 - protein, 512 aa, unidentified
MPTVYVLNKDGKPLMPTTRCMHVRHLLKNGKARVVKSKPFTIQLLYETDDVVQPLYLGIDPGRTNIGVAVVKADGAAVFTAHLETRNKEVPKLMKKRKESRCARRTNGRRCRRQRRAKTNGTISKKCVKQTTAQNGSVSKRAKEIGVIKRHLPGCEKDVLCIGIKNKEAKFTNRARPEGWLTPTANQLLQTHINLVKKIQKFLPISDVVLEVNKFAFMQLDNPNIQKWQYQQGPLYQKGSLENAVSEMQEHHCLFCEKPIEHYHHVVPKSENGSNTIANIVGLCTEHHNLVHKDATWQKKLAKEKVGLVKKYSALSVLNQIISALTKEMNSLFPKHFFVTNGKSTYDYRTAHGVSKDHWLDAYCIACSVLPNDVCDSNINSHVPYELKQFRRHDRRVLHKANMSRVYTLNGKTVATNRHKAIKQTTDSLEEFRQSHPGDVCKLKVKEHHPAYRNLNRNYPGSVFLVDGQVHVMQGVSGSHNGKADGYYNTNGNAYPYYKCKFVVKNEGIVFA

SEQ ID NO: 10378 - protein, 421 aa, Lactobacillus sp.; identical to SEQ ID NO: 5881

SEQ ID NO: 10379 - protein, 473 aa, unidentified
MAVFVIGLTEKRLMPTTERKARILLKQKKAEVFCKNPFTIKLLYQTGGTTQHVTLGVDTGSQHLGFAVAGDNGNIIHEQEVSLRRSMEKRKLLVKCKESRRGRRYRKVRYRHPKWRHHTVRAYIQKGCRKKGAKRYWKKLKVQFSSPRPEGWLPPSLQSKTDHHIRWIHRFLDVLPKNTRMVLEVGRFDAARMKNPEIHGELYQRGPQYDYENVKAYVFDRDSYKCRCCHAKAGTRRKDGTVVKLIAHHIDYRSRGASDNPDALASVCDACHTAANHQPGGVLYDWMIKNKRFKRGHRDTAFMNILRRRLFEAFPDAEYTYGNITAARRKELMLPKSHADDAVAIACTVMDINSIRKRPDHVVYVQQVRKKKRSLHEANPRKWSKTKNRFAVRNSKNTKEVNRVCLFDKVEVIGKGYGWVTGFTGTSCYVLDRNGNYVTTADTYKQVAISRLKVIQHSGNWISGLKCPIGNGS

SEQ ID NO: 10380 - protein, 414 aa, unidentified; identical to SEQ ID NO: 2588

SEQ ID NO: 10381 - protein, 462 aa, unidentified; identical to SEQ ID NO: 2823

SEQ ID NO: 10382 - protein, 465 aa, unidentified
MSTCVCVLSNNGERLMPTIRLGRVRHLLKDGKAKIIKHHPFTIQLLYDSKTNTQPIEICEDVGYNYIGISVKSQSHEYVSAQYDTLQDEKACHDSCRKLRRTRRNRLRYRKPRFDNRKRGEGWLAPSLKHKKELNVNVVKMYCTVMPITHATVEVGSFDTMLVKAIQEGKVIPEGADYQKGPRYNLATLREAVFYRDNYVCKICGRKATEGAILHMHHMFYWKGRHGNSLNELLTVCEKCHTPANHQKSGKLYGFGEKIKFADLSGAAFMNTVRWQIVNELYVAFGKPFVTITYGAMTKEKRIALQLEKSHNNDAYAMGEFHPNLRCMFEHYEKTRRNNRILEKFYGSRYIDIRTGEIATGKELFNGRINRNHKKDSENLHKYRGKRTYAGHRALLRKKVNLNPGDLVSLNGENLIVHSTHTKKNGAVNVEFETPAKSGQKSASLKKLKIVKAANSIHPAWKKIS

SEQ ID NO: 10383 - protein, 458 aa, Lactobacillus sp.; identical to SEQ ID NO: 5912

SEQ ID NO: 10384 - protein, 427 aa, Calothrix sp.
MCKVFVIDTNKRPLNPIHSAQARQLLRSKKAAIYRRFPFTLILKESCPDVPVAPLRLKLDPGAKTTGIALVNDATGEVVFAAELKHRGFAIRDALISRRQLRRGRRNRKTRYRKPRFLNRTRPPGWLAPSLMSRVHNVETWVNRLRKFAPITAISTELVKFDMQLMRNPEIEGKEYQQGTLAGYETREYLLEKWNRQCAYCAVKDVPLQIEHIHPCSKGGSNSITNLTLSCEKCNIKKGTKDIKDFLKKDPTTLQKILAQAKKALADAAAVNATRYKLLEVLKATGLPVECGSGGLTKFNRTRQQLIKTHWIDAACVGKSTPTLNIKGIKPLLITANGHGNRQMCGTDKFGFPSRHRTNKQIHFGFQTGDIIKAVVTSGKKVGEYVGRVLCRATGSFDIASKTGRISGISHKYCSAIHKKDGYSYAF

SEQ ID NO: 10385 - protein, 426 aa, unidentified; identical to SEQ ID NO: 3614

SEQ ID NO: 10386 - protein, 470 aa, Anaerostipes sp.; identical to SEQ ID NO: 2949

SEQ ID NO: 10387 - protein, 427 aa, Fischerella sp.; identical to SEQ ID NO: 6171

SEQ ID NO: 10388 - protein, 354 aa, Erysipelotrichaceae sp.
SEVELRNDIVELISTRREARHARRNRKTRYRAPRFDNRTSSKKEDWLAPSIRQKIHSHLKVIADVHEILPVSKVIIEVASFDTQLLKAAEEGRPLPQGTDYQFGEQLGFYNTREYVLFRDNHTCQCCKGKSKDKVLNVHHIESKKVGGNAPNNLITLCETCHTGYHKGVVKFPSSIRRGMKFNDASFMGIMRWPVYSRLKEIYPSVELTYGYKTKNMRIENQLPKEHYIDARCISGNPKAKSDGIVYYQKKVRCHNRQIHKFKVNKDGLRKLNQAPYLVKGFRLWDKVLYNSEECFVQGRRSSGFFQLKKLDGTMISASASCKKLSLVETGKHFITERKRAIPPTVEECGFSCL

SEQ ID NO: 10389 - protein, 430 aa, unidentified
MPKVYVLNRHGRPLMPCSPAKARHLLDAGKAKVRHRTPFTIQLLYGSTGYTQEVILGVDAGSKTIGLSAATETEELFSAEVKPRNDVVELMSARRQFRRARRNRATRYRKPRFDNRVRSKHKGWLAPSVGVKIQEHMTAIRRACAILPVSKVVVETAEFDLQLLKAVAEGKPVPQGEDYQHGEMYGHYNVRQYVLWRDGYTCQCCGAHATQKKEVRLHVHHLESRRVGGDAPDNLVTLCTACHDKLHKGIIMAADIKKRKRRSTRDATFMGIMRMTLLRRLREQLPVPVVETRGYITKATRENLLVLPKSHTNDALAIAHGPQGFRAEYLPNIRQADRLYTIRPVRHHNRQLHKATILKGGVRKANQAEKYICGFRLYDKVLYNGIECFVWGRRTSGSFLLRQLNGEKVKDGVSYKHLKLLERSHSYLVA

SEQ ID NO: 10390 - protein, 425 aa, unidentified; identical to SEQ ID NO: 8924

SEQ ID NO: 10391 - protein, 441 aa, Sulfobacillus sp.; identical to SEQ ID NO: 4231

SEQ ID NO: 10392 - protein, 423 aa, Moorena sp.
MRVFVLNKNRQPLDPCKPARARIILSKGKGKVYRRYPFTIILTEEIEEPITHGSQLKIDPGSKTSGLAIIQNNRVVWGCEITHRGFQIRDALTSRRQLRRARRHRKTRYRQPRFLNRTRPKGWLAPSLMSRVKNILTWVKKLTRLCPVTGISQELVRFDTQKLQNPEISGIEYQQGTLYGYELREYLLEKWNGKCAYCGATGTQLEIEHIKPKSKGGSDRVSNLAIACHPCNQAKSNQDIELFLSGKPKILKRILGQAKRPLADAASVNTTRWRLYHELKSIGLPVEVGSGGLTKFNRCRQSLPKTHWLDAANVGKVETLIVEVTHPLIITAKGHGTRQLCRTNKFGFPVRHCSRTKIHKGFQTGDIVRAVVTKGKKIGTYVGRVATRKSGSFNILTKSGLVQGISHKYCQCIHRKDGYAYTN

SEQ ID NO: 10393 - protein, 442 aa, unidentified; identical to SEQ ID NO: 2834

SEQ ID NO: 10394 - protein, 428 aa, Enterococcus sp.; identical to SEQ ID NO: 4335

SEQ ID NO: 10395 - protein, 415 aa, Bacillus sp.; identical to SEQ ID NO: 2671

SEQ ID NO: 10396 - protein, 425 aa, unidentified; identical to SEQ ID NO: 9313

SEQ ID NO: 10397 - protein, 443 aa, unidentified
MTYVIAKDGTPLMPTERRGKVRHLLREGKAKVVRNKPFTIQLTYETTHYTQPITLGVDSGHKHIGFSAVTEKEEVLSGEVELRDDVSELIKEKGMYRRIRRNRLRYREPKFDNRISSRKETLRKGIKESWLAPSIKHKLDTHIRFIEFIKKILPITEIIIEVAKFDTQKIKNPNIEGIEYQQGEQQNFYNLREYILYRDNYTCQLCGKINVPLEVHHIGYWKGERTNRPSNLITLCTKCHDPKNHLKGGKLYGMKPVQKPLKEATFMSTVRWKLVNALGCKYTYGYITKSKRIKLNLDKTHYNDAFCIAGGTRQRRIEPIYFEQIRRNNRSLEKFYDAKYIDTRDGSTKKGQELFNGRTTRNKNYNTQNLKKFRGQKVSKGRRSIRTQRYFYQPKDIVIYEGKKYTVKGIQNKGSYIKLAGLSKPVKTEIVEPYIFRKGLCVV

SEQ ID NO: 10398 - protein, 403 aa, unidentified
MVYVQDIDGKPMMPTTRHGKVRRLLKANKATVVNLCPFTIQLTYKSTDHKQPVTLGIDAGAKHIGFSATTEKEELFACETILRTDIVDLLSTRSQNRRTRRSRLRYRKPKFNNRVFSKKKGWVAPSVKQRIDSHLNEVNEIHKILPITKIVIEAAQFDTHKMKNPNISGIDYQNGEQLGFWNVREYVLFRDGHKCSYCKGKSKDLILNIHHIESRKTGGDSPSNLITLCETCHKEYHKGNIDLKVRRGKSLCGAAIMGIMKWRLYDELKSRYSNVSMTFGYITKYNRIKYGIEKSHTSDAFVISKNFNAKRIEYQYLKRLVRRHNRQIHKMKILKGGKKKNNQAPFEVFGFRLFDKVLYNNEINFIYGRRKSGNFNIRDFNGENPKDVSYKKLKLIRGKRHPI

SEQ ID NO: 10399 - protein, 420 aa, unidentified; identical to SEQ ID NO: 3288

SEQ ID NO: 10400 - protein, 427 aa, Parasutterella sp.; identical to SEQ ID NO: 6030

SEQ ID NO: 10401 - protein, 430 aa, unidentified; identical to SEQ ID NO: 4504

SEQ ID NO: 10402 - protein, 458 aa, Scytonema sp.
MMITNSVFVLSKNGKILKPTTPVRARFLQSQGKASCLRLFPFTLILDKDVDENVEPYLELRIDPGSKFTGISLVDLNKNEIVWAMELEHRGDRIKMEMIKRSGVRGSRRTRRLRYRKKRFERQKPNGWLAPSLRHRLLTTQTWIKRLLKIAPIKSIAIESVKFDLQKMETPDIEGIEYQQGTLWGYTLREALLEHWGRECVYCGQTDVPLQIEHINARSNGGSDRFSNLTLSCEKCNQKKGNKPVEQFLKDKGEILQKITSHQKKSLSDAAAVNSTRQAIFEMAHQFGLPVISGDGASTKMIRIKSGLPKAHWIDSACVGTDQIVKLRICQPLRITCTGHGTRQVQRVNAKGFPAIASIKKNPVTGKKEVKLVSKNQKYTHATAGDYVICNLLKDRKHVRSGIYRARVKTPTDKGVEVLINGHRIAVDRQYVKLIHQSDGYEYSFTTIDQDLLRFSAI

SEQ ID NO: 10403 - protein, 413 aa, unidentified
MTSYAFVLDANGKQLAPAKEQKAWFLIRKKRAALVSKYPMVIQLKKEIPENEICKDEIRCGIDDGGLHVGIALVQKCKTKNKVVFKGIMEQRNDVKHLMEVRRSYRRYHRYHKRYRLARFDNRKSSKRKKRIAPSILQKRQAIIRVIHWLNKWINITNYWLEDVSIDIRALTDGYKPYRWQYQKSNRLDENIRKAAILRDGGKCMECGKLNCRLEVHHIKPRRRNGSDTLDNLITLCESCHQKTEGQEELYMDRYFSLLKSSDHKNLNYAQHVMIGKEWLRKQLSSLGVLYLTNGGDTANKRIDWNIEKSHANDAVCITNLQPDTYDMKEWTVKPMRRQSKAKTDNVLGIKHRDLVEYTFKNGETHRGYVTALYPEQKAINFQSSTKHCKKVNARKCKLLWKYSKIYWFENAS

SEQ ID NO: 10404 - protein, 420 aa, unidentified
MQYVYVLNKHGEPLMPCSPGKARLLLKQQKACVVKRTPFTIKLLFGSAGYKQPITLGVDAGSKHVGLSASTEKRELYSEEFTPRSDVVELLSTRRQNRRTRRNRKTRYRVPRFDNRVHSKHKGWLAPSVEVKIQEHITVIKHICKILPISLVRVETAEFDTQRLKAMLAGKPLPVGTDYQLGEMYDEYNVRQYVLKRDHYTCQCCGTHNTAKKVVKLHVHHLESRKTGGNAPSNLVTLCTTCHKNLHKGRVTLDGKERGKPLRDAAFMGIMRKTLMARLKEELPIPVQGTYGYITKMRREQNDIKKGHTNDARCISKHPLAEPCSVCYRTKAIRHHNRQTHKANFSKKGIRKRSQMPYLVEGYRLWDKVLYKEQECFVSGRRSSGSFTLKKLDGTSVSKGVTFKKLRLLEPATNYLIERM

SEQ ID NO: 10405 - protein, 498 aa, unidentified
MPTTRCGHVRYLLKEKKARVVKTKPFTIQLLYETDDVVQPLYLGIDPGRTNIGVAVVKADGMAIFTAHLETRNKEIPKLMKKRKDSRRARRTNGRRCRRQRRAKANGTISKKCVKQAPAQNGSASKRAKKIGVIKRHLPGCEKEVLCIGIKNKEAKFNNRTRPAGWLTPTTNQLLQTHTNLIKKIQKLLPISDVVLEINKFAFMQLDNPNIQKWQYQQGPLYQKANLEEAVSEMQEHHCLFCKKKIDHYHHVVPQHKNGSNTIDNIVGLCTKHHDLVHKDTAWHEKLTKKKTGLNKKYGALSVLNQIIPALTKELSSIFPKHFFVTTGKSTYDYRAAHGVSKDHWLDAYCIACSVLPNDVCDSSINNRVPYELKQFRRHDRRALHKENMSRVYTLNGKKVATNRHKATEQTADSLEEFRQNHPDDVCKLKVKEHHSEYRNPKRNFPGCVFLVGKRTHVMQGTNGSHNGRADGYYDTNGNSYPFGKCKFVAKNGGIVFT

SEQ ID NO: 10406 - protein, 396 aa, unidentified; identical to SEQ ID NO: 10347

SEQ ID NO: 10407 - protein, 401 aa, unidentified
RRQRRAKANGTISKKCVKQTTAQNGSVSKRAKDIGVIKRRLPGCEKDVLCIGIKNKETKFTNRTRPEGWLTPTANQLLQTHINLVKKIQKFLPISDVVLEVNKFAFMRLDNPNIQKWQYQQGPLYKKESLESAVSEIQEHHCLFCKKPIDHYHHVVPQHKNGSNTIGNIVGLCAKHHDLVHKDSAWEKKLAKKSTGLYKKYGALGVLNQIIPTLTNELSSLFPKHSFVTNGKSTYDYRAAHGVSKDHWLDAYCIACSVLPSNVCDSNINNHMPYELKQFRRHDRRVLNNENMNRVYTLNNKAVAINRHKAKDQKTVSLEEFRKEHPDDVCKLKVKEHHPTYRNMNRNFPGSVFLVGKQIHVMQGIASSKDGKATKYNDTSATAIAAGKCKFVAKNTGILFV

SEQ ID NO: 10408 - protein, 429 aa, unidentified; identical to SEQ ID NO: 8379

SEQ ID NO: 10409 - protein, 410 aa, Bacillus sp.; identical to SEQ ID NO: 3163

SEQ ID NO: 10410 - protein, 454 aa, unidentified
YNFGEGLASSEVTPLRRRGQLIISCHTNRKEHGIMQYVYVLNKHGEPLMPCSPRKARLLLKQKKACVVKRTPFTIKLLYGSTGYKQPITLGVDAGSKHIGISAATEKYELYCEEATPRNDVVDLLSARRAFRRSRRNRKTRYRAPRFNNRVHSKHKGWLAPSVEVKIQEHITLIKRVCRILPVTFVRVETAEFDTQRLKAMLEGKPLPVGTDYQLGEMYDEYNVRQYVLKRDNYTCQCCGAHSTKTKDVKLHVHHIETRRTGGNAPNNLITLCTACHKALHAGKVTLDGKKRGRSLKDAAFMGVMRKTLMERLLKELKIPVQGTYGYITKYLREKHSIPKSHTNDARCISKNPLAIPCDTCYYTKAIRHHNRQLHKAAILKGGIRKANQAPYTVKGYRLWDKVSYNGSECFITGRRTSGYFALKKLDGTVVSNSASYKKMRLLEVATNYITERR

SEQ ID NO: 10411 - protein, 512 aa, unidentified; identical to SEQ ID NO: 3493

SEQ ID NO: 10412 - protein, 426 aa, unidentified; identical to SEQ ID NO: 3614

SEQ ID NO: 10413 - protein, 429 aa, Moorena sp.
MCNYVFVLDASHKPLNPCRPVTARKLLTAGKAAVYRRYPFTIILKKQVDGVAKPMSLKIDPGSKITGLAIVYGNQVVWSAEIEHRGSKIKSALDSRRAVRRSRRNRKCRYRKPRFNNRKRPEGWLAPSLQHRVATTMTWVLKLMKLTPIGGISQELVRFDTQKLQNPEISGIEYQQGELMGYEVREYLYQKWGRQCVYCGANSVKLEVEHIVPKSKGGTNRVNNLTLACHGCNQAKGNLDARDFLSGKPDVLKRILGKAKQPLLDAAAVNSTRWQLYQSLKETGLSVAVGTGGRTQYNRIKLGLPKGHWVDAACVGEVATLKIVTRQPLLIKAMGHGCRQVIQMDKYGFPRKGYKPKHPVKGWKTGDIVNVVAGKNAGLKGVRIKSVRAKGNFDLIGSFNGASNKVLSASQNYIQCVHRHDGYSYSFAE

SEQ ID NO: 10414 - protein, 457 aa, unidentified; identical to SEQ ID NO: 4299

SEQ ID NO: 10415 - protein, 420 aa, unidentified
MQYAYVLNKRGEPLMPCSPGKARILLKQQKACVVKRTPFTIKLLHGSAGYKQPITLGVDAGSKHVGLSASTEKRELYSEKFTPRNDVVELLSTRRQNRRSRRNRKTRYRAPRFNNRVHSKHKGWLAPSVEVKIQEHITVIKRICRILPITLVRVETAEFDTQRLKAMLAGKPLPVGTDYQLGEMYDEYNVRQYVLKRDNYTCQCCGAHTTAKKTVKLHVHHLESRKVGGNAPSNLITLCTTCHNNLHKGKITLDGKKRGKTLRDAAFMGIMRNTLLTRLRNELNIPVQNTYGYITKLLREQNDIKKSHVNDARCISKHPLAKPCSVCYRTKAIRHHNRQIHKAKILKGGIRKANQAPYIVKGFRLWDKVLYNEQECFISGRRSSGYLALRKFDGTTITNSISFKKLRLLEPATNYLIERK

SEQ ID NO: 10416 - protein, 435 aa, Ktedonobacter sp.
MAVFVLDKRGTPLMPCSEKRARVLLARGRARVHRLVPFTIRIVDRLLADSAWQPLCVKIDPGSKTTGIALVRETAQTTTVLGLFALSHRGRQISAALRQRANSRRRRRSTNLRYRAPRFRNRTKPAGWLPPSLLHRVETTMTWVHRLQRLAPIAALSVELVRFDMQLLEHPDIAGVAYQHGTLAGYELREYLLEKWKRQCAYCDKQDVPLQIDHIVPTSASGSNRVSNLTLACRPCNQNKGSRDIRDFVKDATRLQRILAHAKAPLRDAAAVNTTRWALCHVLQATGLPVETGTGGRTKWNRARCGIPKTHALDAVCVGVVEAVRDWHRPTLTIKATGRGSYQRTRLTPYGFPRGYLPRKKQVHGFQTGDLVKAVVPSGKKVGIYLGRVAVRASGSFNIQCADGVVQGISCKHCRVLQRNDGYEYAQCPKIAATQ

SEQ ID NO: 10417 - protein, 515 aa, Actinoplanes sp.; identical to SEQ ID NO: 2700

SEQ ID NO: 10418 - protein, 491 aa, unidentified
MSTCVCVLSNSGERLMPTFRLGKVRRLLKDGKAKIVKHHPFTIQLLYDSKANTQPIEICEDVGYNYIGISVKSQSHEYVSAQYDTLQDEKACHDSCRKLRRTRRNRLRYRKPRFDNRKRSEGWLAPSLEHKKELNVNVIKMYCEVMPITHAIVEVGSFDTMLVKAIEEGKATPESADYQKGPRYKLATLREAVFYRDNYTCQVCGRKANEGAILHVHHMFYWKVRHGNSLSELITVCEKCHTPANHQKGGKLFGFGEDKEFANLSGAAFMNTVRWQIVNVLYAAFGKPFVTFTYGAMTKEKRIALHLEKSHNNDAYAMGSFHPINRCAFEHYEKVKRNNRILEKFYDSQYIDTRTGELTNGKSLFNGRISRSHKKDSENLHKYRGKRICKGHRALRRKKVALNPGDLVSLNGEILVVHGTHTKKNGSVNVEFKTPSREGKKSASLKKLKIVKTSNLMHSASCILRGLKYLKKLKKGDTGYLDLLSVPQMYS

SEQ ID NO: 10419 - protein, 424 aa, unidentified
MRVFVFNMRGRPLMPCSQRKARLLLRENKAMIYKYHPFTIQLTYTTGETKQDCHIGIDTGSKYIGAAVRSEDKVFWKGEIELRQDIRSNLDTKRIYRRSRRNRKTRYRKPRFLNRKRRDEWLPPSLQSRINHTFHWIDTLSSLVPNPILHIEVGKFDVAKMINPEIHGVDYQHGQTYGFFDERYFVFARDNYTCQCCGKSKNKILNTHHIIYRSNGGTNRVDNLITVCTDCHTSQNHRKGGIFYQWQEQHKKVKQYKEPPFMNTLRKRIFVAYPDAEITYGSETTPKRKAMKLDKTHYNDAIVISGINEIKENPEEWLLIKQFRKKKRSLHEATARKGRKKPNRNQTRHSKNTPYYKGFYLNDKVSVFGKSGYITGFTSNAAYIKDENNDYITLPNKTYKQVSINKMKLECHNNNWQYIIKNAV

SEQ ID NO: 10420 - protein, 317 aa, unidentified
VKKIQKFLPISDVVLEVNKFAFMRLDNPNIQKWQYQQGPLYKKESLESAVSEIQEHHCLFCKKPIDHYHHVVPQHKNGSNTIGNIVGLCAKHHDLVHKDSAWEKKLAKKSTGLYKKYGALGVLNQIIPTLTNELSSLFPKHSFVTNGKSTYDYRAAHGVSKDHWLDAYCIACSVLPSNVCDSNINNHMPYELKQFRRHDRRVLNNENMNRVYTLNNKAVAINRHKAKDQKTVSLEEFRKEHPDDVCKLKVKEHHPTYRNMNRNFPGSVFLVGKQIHVMQGIASSKDGKATKYNDTSATAIAAGKCKFVAKNTGILFV

SEQ ID NO: 10421 - protein, 413 aa, unidentified; identical to SEQ ID NO: 2636

SEQ ID NO: 10422 - protein, 441 aa, Lactobacillus sp.
MKNERSKTMPNRVFVINKHGQALMPCKPRKARILLRDGKAKVIKKEPFTIQLLYGSTGYKQNVNIGVDSGQRHIGLAVTSQAKVLFQAEVELRQDVKSLLDTRRTYRRSRRNRKTRYRKARFLNRIANKKANWLPPSVASKVNHNINWIKRLLAVLPKPELHIEVGKFDMQKMMNPNIKSEGYQQGDLYGYQTVKQFILARDNYTCQVCKQTGGKLKIHHIIYRALGGTNTVDNLITVCANCHTAKNHQTGILAKWCQAKKKVNKTYKGATFMNILRRRLFTAFPQAEFQYGAWTTLQRADLDLAKSHYNDAVAISGIKQIKEKPTRIVMFKQFRKKKRSLHEATARKGRKTPNVMSKRNAKNTKYAKGLWLNDYVKIKDSRSKGYISGFSKTTCYIKDIFGNYLTVSPKYKQVALSKLVRITHNNNWSRQEINEKNYQMH

SEQ ID NO: 10423 - protein, 424 aa, Enterococcus sp.; identical to SEQ ID NO: 8879

SEQ ID NO: 10424 - protein, 439 aa, unidentified; identical to SEQ ID NO: 3280

SEQ ID NO: 10425 - protein, 482 aa, unidentified
LVWNVQAPWDVYPSPTLCGLCLKVLRGRNGDADKKPIPTLTKDENRPSGRTTGLRAEQAEPAGIRKGDTLKVFVLNMRGKPLMPCSPAKARHMLKAGKAVVVRRTPFTIKLTIATGETKQDVTLGVDAGARHVGISATTEKEEVFASEVALRQDITGLLADRLAFRRARRNRKTRYRAPRFNNRVRSKHKGWLAPSVENRIQAHISRIEAVCRLLPVTKIVIETASFDIQKIRNPEVEGTGYQQGDQLGFWNVREYVLFRDGHICQHCRGRSKDPILNVHHLESRKTGGDAPNNLITLCETCHKAYHAGKIKLKVKRGQSFRAEAFMGIMRWTLLDRVRKTHPKLPVENTYGYLTKHKRIALGLPKTHCADAFCIAGNLKALRRGDFLFQQQTRKHNRQIHKCSILKSGVRKINQAPFLVKGFRLFDKVRIGGQIGFVFGRRVRGTFNIRRLDKTVIGTDINCKKLSLLETRKTFLTELRKE

SEQ ID NO: 10426 - protein, 457 aa, unidentified
MDAVAVISASGKPLMPTTPVRARKLIKKGKAVIYKYRPLFTIRLTERTDGDIQTIEYCCDTGYQHIGLSIKSRKHEYVNEQRDLLPNETERHNDSRKYRRARRRRKLRHRACRRDNRHDNQICKDGYAPSIRNKRDQHISLYKSYTEILPVGRALFEMGQFDTQVLKAIEKGEPLPQGKDYQHGERYGYATLREAVFARDDYTCICCGKNAFKDKRILCVHHLGFRIGDRTNRLANLATVCTKCHTPKNHQPKGKLYNLKPELKDFKGATFMTMVRWDMLDKLKAVSKGIQVDVTYGAATKEARRDLKIKKSHANDAYCMGSFYPSHRTDLKRYEKCRRNNRVLSKFYDATYIDIRDGKKKKANALGCNRTKRRESRRSEKNERIYRGEKISKGRIVLRTRRAVIRPGDIVYVGKKKYIVASSKNLGAQLKLADGSLLTTSKVTKIIHCGGWKRVTL

SEQ ID NO: 10427 - protein, 466 aa, Erysipelotrichaceae sp.
MSVAVLSSTGRKLMPTSNYRARKLLKSHRAAIECYRPIFTIRLTDRKGGNTQPIEYACDTGYQHVGVSIKSEKHEFVHAQYDMLSDETERHNDCRKYRRTRRNRLRYRKPRFDNRSKKNKEMPPSLRHRKENQISLFESFCKVMPITSATFEMGKFDTQLLQAIANGKPLPEGKDYQQGSKYLYQTEREAVFGRDHYTCQVCGKSVKDGVILNTHHIGYWKGYRSNRISNLLTVCEHCHTAKNHRPGGKLWGLEPKSTNLAPAAYMSTVRWAMYRDLVLMHPEIDIHIQYGAKTSVTRKSLHLAKTHANDAYCIGSLRPKHRAAELVYQKKRRNNRILSRFYDAKYIDIRDGKKKSGSALSCGRTNRRESRRSDKNQRIYRGKKCSSGRTSIRKRRYAYQPGDAILFRSQRFAVNGAHCNGTRVILNTGKSVKTADLTCIKKEGGWRFLPANSAQKQQIRFSNQKA

SEQ ID NO: 10428 - protein, 489 aa, unidentified
MAMVYVQNKDGKPLMPTTRYCYVRLLLKEKKARVVCTTPFTIQLNYDTPDITQDLILGIDPGRTNIGVAVVKEDGQCVFSAHLETRNKDIPLLMKKRAGFRRQHRTLDRRRKRQRRARAAGTTIADGSVERLLPGYEKPVVCHYIRNKAARFNNRSRPAGWLTPTANHLLQTHINLIAKVAKFLPITKVVVELNRFAFMAMDNPNIHRWEYQQGPLYGLGSVEDAVYAQQDGHCLFCKKPIDHYHHVIPRHKGGSETLANRCGLCAKHHDLVHKDKAWADKLVTRKEGMNKKYHALSVLNQIIPFLMEYLGSETLYDVYAIDGRSIKGFRIAKNVPKEHYTDAYCIACSILDTDNKVSAPVEPFELKQFRRHDRQACIRQMVDRKYLLHGKVVAANRHKAFEQKSDSLQEFREAYSDVAVSQLTVKPHPPQYKDMSRIMPGAVMDFDGIVGVMQSSIVGQFYKSTKGHKATPKRCVLLSQNAGMVFIPT

SEQ ID NO: 10429 - protein, 436 aa, Pseudomonas sp.; identical to SEQ ID NO: 3629

SEQ ID NO: 10430 - protein, 374 aa, unidentified
LYDSPEYTQPITLGVDAGSKVVGLSATTEKKELFVSEITLRDDIPELLSTRRQNRRARRNHLRYRMARFLNRTASKKEGWLAPSVKHKVDSHLKVIGNVHRILPISKIVIETASFDIQKIRNPEISGREYQQGEQLGFWNTREYVLWRDNHECLHCHGKSKDRVLNVHHKESRKTGGDSPGNLVTLCETCHKSHHAGRIKLKLTPNKSYRHSSFMGIMRWYVYNSLQELYSEVSMTYGYITKNNRINNNIEKTHSADAYCISGNLNAKRIDEIYNQAFKRKHNRQIHKANFLKGGKKKLNQSAYEVKGFRLFDHVRYRDEECFIFGRRTSGYFDLRKLDGSVVHRSASFKEIKLLKRQNTILIERKGCNGVLLS

SEQ ID NO: 10431 - protein, 419 aa, Geobacillus sp.; identical to SEQ ID NO: 3993

SEQ ID NO: 10432 - protein, 442 aa, unidentified; identical to SEQ ID NO: 2903

SEQ ID NO: 10433 - protein, 426 aa, Oscillochloris sp.
MSFVFVLSSDGQPLDPCHPARARQLLDHGKAAVWRRYPFTIRLKERRAAASVTHPHRVKLDPGSKTTGIAVVAETTGRVVWAGELTHRGQAIRDALLSRRAIRRSRRQRKTRYRQPRFLNRRRPEGWLAPSLAHRVDTTRTWVNRLRRFVPVTAISMELVRFDTQLLEHAEISGVEYQQGTLAGYEVRQYLLEKWGRRCAYCGTTGVPLQVEHITPRARGGSDRISNLALACEPCNTRKGTQTAEAFGHPEIQAQARRPLKDAAAVNQTRWALYGRLIATGLPVEVGTGGRTTFNRTRLGLPKAHWHDAACVGASTPEVLDTRGVRPLFIQAMGHGTRQMCRMNAFGFPRTGPKGARVVKGFKTGDMVRATVTTGTKQGMYVGRVAVRTSGSFNITTAAGTIQGLHHRFFRAVQRADGYSYTYEVA

SEQ ID NO: 10434 - protein, 434 aa, Mitsuokella sp.; identical to SEQ ID NO: 2893

SEQ ID NO: 10435 - protein, 493 aa, unidentified; identical to SEQ ID NO: 3154

SEQ ID NO: 10436 - protein, 427 aa, unidentified
LRVFVKNIRGEALMPCSQRKARFLLKEDKARIIGYKPFAIQLIVPAGESTQEIHLGVDTGAKYIGIAATSENKVLAKGEIELRDDIHKNMQTRSELRRTRRNRNLRYRQLRFLNRKRKYGWLPPTVQSKLDATFRWIDKFCDLLPNPVLHIEVGKFDIQKIMNPDIANEEYQNGQCAGYYDVRYFVFARDNYTCQVCKKQNKILNTHHLVYKSKGGSDRADNLITVCTDCHSSENHKEGGILYNWMIKHKKVKQYKEASFMNIIRKRTFQKYSNAVITYGSKTSPYRKELGLDKTHYNDAIAISKIENIKENTQDYFYIKQFRKKKRSLHESIPTRGRRKGKNVNAERRNKNSPCRAGWFMNDMVSFQNIIGWIYGFSGGESGKECVLRDINGKIIKDSKRSKNNPNVKFSDLKFICHNNNWQYQIV

SEQ ID NO: 10437 - protein, 500 aa, Eubacterium sp.
MVYVLDQNGDSLMPTNRHGWVRRALKSGKAKAVRTMPFTIRLFYRTTDPVLQEITLGIDPGRENIGVAAVREDGTCLYAAHCETQNKKIKKRMQKRKAHRQASRRGERLRKKRRAAKKRTIHTKIVYFDTPMGKRPNIKIDGCFFRILPGCEEPSVFKDIINTEARFSNRHREEGWLTPTATQLLRTHINLVRNIQKILPVSRVALELNKFSFMELEAGRKLLWWEYQQGPMYGKKDQMEALRDIQNGKCLLCKKGVITRKHHIYPRHLGGTDRLSNLAGLCEKCHEELHHDKKMEDDLKKKTNARNNKYGAASTVNQIIPYLADHLGDIFRDQAYGVKGWETKQFRDEHHIKKTHENDAYCIACMALEHSAGIASPKGHYEIQQFRRHDRALIHRQTERRYYLDGTGVAANRRKRMDQKEAQKMRSRLKVKKSSRSYNDPDRTLPGAVFQFEGKTYIMKLQITNGQYYKALHGNTKNIPAARAKILCKNRGLVTVLFCN

SEQ ID NO: 10438 - protein, 413 aa, unidentified; identical to SEQ ID NO: 2636

SEQ ID NO: 10439 - protein, 417 aa, unidentified; identical to SEQ ID NO: 6274

SEQ ID NO: 10440 - protein, 451 aa, Blautia sp.
MSVAVISKTGERLMPTSEYRARKLLKSGKAIIHSYHPFTIQLTERETGDIQSIELCMDTGYIHIGISVKSKKHEYLAEQIDTLTDERGRHDTCRMYRRQRRSRKRYRQPRFNNRKRNDGWIAPSLEHKKSIHIQAILRICKVMPVTDITLEIGNFDTQVLKAREEGKPLPQGVDYQHGERYGITTLREAVFARDGYTCQCCMRTIKDGAILHVHHIVYRNQGGTNRMSNLITVCDKCHTPANHKQGGKLYNWKPKIASFKGATYMTTIRWKLYNEVKALFPDIDIHITYGAETKERRMALDIDKSHVNDAFVMGQFHPKHRSKPICYKKKRRNNRCLEKFYDAKYIDSRDGKKRSGQELFNGRISRNHKKDSENLHQYRLQKVTPGRRAIRRQHYPIQPHDIIVYNGNKIEVSGCQHKGTRVVFSKTKKSVQISKIKLFKYAGGYSKSVFN

SEQ ID NO: 10441 - protein, 494 aa, unidentified
MTMVYVQNKDGKPLMPTTRYCYVRLLLKEKKARVVCTTPFTIQLNYDTPDITQDLILGIDPGRTNIGVAVVKEDGQCVFSAHLETRNKEVPLLMQKRASFRRQHRTQGRRRKRQRRAIATGTTVESNTIERLLPGYKKPIVCHYIRNKEARFNNRSRPAGWLTPTANHLLQTHINLIAKIAKLLPVTKVVVELNRFAFMAVDNPNIHRWEYQQGPLYGLGSVEDAVYAQQDGHCLFCKKPIDHYHHVVPRHKGGSETLANRCGLCEKHHALVHKDKAWAEKLVTRKGGMNKKYHALSVLNQIIPHLMEYLGRETPYDVYATDGKSTKGFRIAKNVPKEHYTDAYCIACSILDADTKVSAPVEPFELKQFRRHDRQSCIRQMVDRKYLLDGKVVAANRHKAIEQKSDSLEEFREAYGDAAVSQLTVRPHSPQYKDMARIMPGAVMDFDGIVGVFKGSSGRNNGTPNYYNSTKGTRVLTKRCALLAKNTGMVFIPA

SEQ ID NO: 10442 - protein, 424 aa, unidentified
MASMQYVYVLNKHGEPLMPCSPGKARLLLKQQKACVVKRTPFTIKLLYGSAGYKQPVALGIDAGSKHVGLSASTEKRELYREEFTPRNDVVELLSTRRQNRRSRRNRKTRYRAPRFDNRVHSKHKGWLAPSVEVKIQEHITVIKRICRILPITLVRVETAEFDTQRLKAMLEGKPLPVGTDYQLGEMYDEYNVRQYVLKRDNYTCQCCGAHPTEKKPIRLHVHHIESRHVGGNAPNNLITLCVACHKALHEGKITLDKGKKRGKPLRDAAFMGIMRNTLLARLKDELNIPVKQTYGYITKLLREKNKIPKSHVNDARCIAKAPNAKPCDTMLYTRALRHHNRQIHKAKILKGGIRKKNQAPYLVKGFRLWDKVRYNGEECFITGRRSSGYFALKKYDGTVISNSASYKKLMLLEAATNYITERS

SEQ ID NO: 10443 - protein, 414 aa, unidentified
MPCSPAKARLLLKEKKAIVKRRTPFTIQLTIATGETKQPVSLGVDAGYKHVGLSASTEKAELYASEVELRQDITDLLSARRALRQSRRNCKTRYRAPRFDNRIRTKRKGWLAPSVENRINAHLSRIEAVLRLLPVTKITVETASFDLQLLKNPDISGKEYQEGEQLGFWNIREYVLCRDGHVCQHCYGRSKDPVLNVHHLESRRTGGDSPGNLITLCETCHKALHRGEITLKAKRGQSFRAEAFMGIMRWEVLNRLKASHPELEVNNTYGYRTKHARIANDIAKSHCADAFCIAGNLGAERLGEFFFQKQTRRNNRQIHKLSILKGGIRKRNQAPFEVKGFRLFDKVACQGEEGFIFGRRSSGFFDVRKVDGSRISAGISYKKLHLLEKRRTYLTEIRKEEALPPLPEGRGLRA

SEQ ID NO: 10444 - protein, 421 aa, unidentified; identical to SEQ ID NO: 8171

SEQ ID NO: 10445 - protein, 513 aa, Acrocarpospora sp.
MATFRTGPKTDRAVLPQQPALESESADNPGIRDETGLGRHARVAPGAGHGREETTRRAPALGGVTPEPPSGAGERPRERHPFVFVLDKRGTPLQPTTPARARRLLKAGRAVVARHTPFVIRLKDRTVEQSQVDGVEVGVDPGSKHTGIAVFTAQAGERRGRYAVQLDHRGARIRQKLEQRAAYRRGRRSRNLRYRAPRFLNRTRPDGWLAPSLRHRVDTTVSWVDRFTRWAPVTAVHVERVAFDTHAISAGRPLEGAEYCRGTLHGTEVREYLLAKFGRACLYCGTTGVPLNIDHVHPRSKGGSDRVSNLVLACIPCNQAKSDRPVEEFAPKRAAEILKRAKAPLRDAAAVQSTRWALWRALDSRLPTHVASGGRTKWNRARAGLPKTHTLDALAVGKLDTVTETVSWVLVAGCAGRGVHARTRTDKHGFPRLRLPRQKQFHGYVTGDLVRAVVPQGAKAGTHTGRVAVRATGSFNITTALGTVQGIHHRHLHLLQRADGYAYTTRGETDVSR

SEQ ID NO: 10446 - protein, 412 aa, unidentified
MVYVLSKTGQPLMPTENHAKVRILLKQGKAKVVNRCPFTIQLLYSSTNYTQKVTLGVDSGSKHIGLSATTKDKGLFESDVELRNDIVDLLSTRRELRRSRRNRKLRHRKPRFNNRRRNDGWLAPSVKQKVDSHITMIAKVHKILPISNIVVEVASFDIQKIKDPTISGMDYQQGEQLGFWNVREYVLFRDGHKCQCCKGKSKDKILNVHHIESRKTGGDAPNNLITLCETCHTGYHKGTVKLPKTIHRGMSFKDATFMGIMRWALFEKLKAIYSDVKLTYGYITKNTRIKNGLPKDHYIDARCISGNPNAVSNGNVYYYKKVRCHNRQIHKTNFIKGGYRKRNQAPYEVKGFRLYDQVLWKGQKCFIFGRRATGRMDLRLLDGTHVNASVGYKNLKLLKMRSSYLVEQRKVG

SEQ ID NO: 10447 - protein, 410 aa, Bacillus sp.
MTYCFVLDEQGNKLSPTRENRAWYLIRKQKATLKSKFPMIIQLKRKIPESKIDSSSIRLGIDDGSKLVGIAIVQECETKNKPVFKGTIELRTDVKEKIAIRRGYRQYRRQHKKYRPARFDNRSSSKREGRIPPSIKQKKDSILRVVNQLHKWIRIDRIFLEDVFIDIRALEKGYKPYKWEYQQSNRLDENIRKAVVLRDHNTCQDCGMTNTRIEVHHITPRRLNGSDSIHNLITLCTTCHGKVTGDELNDRERFYQKVNGRKISYSDAMYVMQGKTYLQNKLKKISPLSLTTGGDTANKRIDWGIKKTHANDAIVICHSTVWPKQCEMKNWVIKPMRKHSNKKIESLNGFHHRDFVKYTKRNGESYLAYITALYPEKNQCNMTTIEGGILKRYGLSRLTLLWRFNKIYWL

SEQ ID NO: 10448 - protein, 420 aa, unidentified
MQYVYVLSKHGEPMMPCSPGKARLLLKQQKACVVRRTPFTIKLLYGSAGYKQPITLGVDAGSKHVGLSASTEKRELYREEFAPRNDVVELLSTRRQNRRSRRNRKTRYRAPRFDNRVHSKHKGWLAPSVEVKIQEHITIIKRICKILPISLVRVETAEFDTQRLKAMLAGKPLPVGTDYQLGEMYDEYNVRQYVLKRDNYTCQCCGAHTTAKKLVKLHVHHLESRKTGGNAPSNLITLCTTCHKNLHKGKVTLDGKERGKPLRDAAFMGIMRKTLMARLKKELPIPVQGTYGYITKMRREQNDIKKSHTNDARCISKHPLAEPCSVCYRTKAIRHHNRQTHKANFSKKGIRKRSQMPYLVEGYRLWDKVLYKEQECFVSGRRSSGSFTLKKLDGTSVSKGVTFKKQRLLEPATNYLIERM

SEQ ID NO: 10449 - protein, 413 aa, unidentified
MTSYSFVLDANGKQLAPTKEQKAWFLIRKKRAALVSKYPMVIQLMKEIPENEICQDEIRCGIDDGGLHVGIALVQKCKTKNKVVFKGTMEQRKDVKHLMEVRRGYRRYHRYHKRYRQARFDNRKSSKREGRIAPSILQKRQATIRVIHWLNKWINITNYWLEDVSVDIRALTDGYQSYRWQYQKSNRLDENIRKAAILRDGGKCIECGKSNCRLEVHHIKPRRRNGSDTLDNLITLCESCHQKTEGQEELYMDRYFSLLKSSDNKNLNYAQHVMIGKMWLRKQLSGLGVLYLTSGGDTANKRIDWNIEKSHANDAVCITDLQPDTCDMKEWTMNPMRRQSKAKTDHVLGIHHRDLVEYTFKNGETHRGYVTALYPEQKAINFQSPTKHCKKVNARKCKLLWKYSKIYWFENAS

SEQ ID NO: 10450 - protein, 468 aa, unidentified; identical to SEQ ID NO: 4678

SEQ ID NO: 10451 - protein, 420 aa, unidentified
MQYVYVLNKHGEPLMPCSPRKARLLLKQKKAYVIKRTPFTVKLLYGSAGYKQPVTLGVDAGSKHIGISATTEKHELYREEATPRNDVVDLLSARRAFRRSRRNRKTRYRAPRFNNRVHSKHKGWLAPSVEVKIQEHITLIKHACCILPVTLVRVETAEFDTQRLKAMLEGKPLPVGTDYQLGEMYDEYNVRQYVLKRDNYTCQCCGAHSTKTKGVKLHVHHIETRRTGGNAPNNLITLCKACHKALHAEKVTLDGKKRGKPLKDAAFMGIMRKTLMERLRKELKIPVQGTYGYITKYLREKNGIPKSHTNDARCISKNPLAIPCDTCYYTKAVRHHNRQLHKATILKGGIRKANQAPYIVKGYRLWDKVAYNGTECFITGRRTSGYFALKKLDGTVASNSISYKKLRLLEAATNYIIERK

SEQ ID NO: 10452 - protein, 414 aa, Selenomonas sp.
MPIIKKYAFVLDAEGKRLDPTIEQNAWRLVRQHKARLVSKFPMVIQLNKVVDNPNNDEIRCGIDDGANHVGLALVQKCLTKNKVVFKGTIEQRKVVKHLLTVRRGYRRYHRYHKQYRPARFFNRASSRRSGRLMPSIIQRKQATLRVIDRLRQWIRIDGYWLEEVKIDIRALTDGYKPYRWQYQRSNRLDNNLRLAAIYRDGCKCMECGKVKTRFEVHHITPREAGGADTISNLITLCPNCHARTFSRESQFADRYYALIGSAGHVEGLDDAQRVMQGKHWFKKQLQLRGSLVLTTGGDTANKREDWNISKTHTNDAVCITDLKPENIGVGEWSIKPMRRKSKAGVDEVCGFRHRDYVTYTYRNGETHTGYVTAMYPDKNQLNFQSPTKHCKRVNALKTRLLWRFNKIYWLKCA

SEQ ID NO: 10453 - protein, 408 aa, unidentified
MVYVQDIDGKPMMPTTRHGKVRQLLKDNKAVVVNTCPFTIKLTYKTSDYKQEIVLGVDAGTKHVGLSATTKSKELYSSEVILRSDIVDLLSTRRELRRTRRNRLRYRKPRFDNRIKSKRTGWVSPSVRHRIDAHIRVIDNVCSILPISRIIVEVAQFDTQKIKNPNISGNEYQEGNQLGFWNVREYVLTRDGHKCQHCKGKSKDPILNVHHIESRKTGGDSPSNLITLCETCHKEYHKGKIDLRVKRGKSLRDAAVMGIMKWKLYEELKSRYDNVSMTFGYITKYNRIKYGIEKSHISDAFVISKNFNALRLGYHYKVRLVRRHNRQIHKQKVLKGGVKKPNQSSFEVFGFRLFDRVMFEGNCYFIFGRRKSGSFNIRDIDGGNQRDITYKKLKLLRCKRFMIQKETN

SEQ ID NO: 10454 - protein, 442 aa, unidentified
MVTVQQSTHHLPFGRVFIRRNLFMVYVISQDGKPLMPCSDPIARLLLKQGKAKVKKRDPFTIKLTYETTNYTQGLTLGVDTGSGTIGTAVSKDNGDIVYMSEVVVRNDITDKMTQRAKYRRNRRNRKTRYRKARWLNRASSIKKDRFSPTMQSKLHSHVREIEYIQSILPITEMVFETGQFDMHLMKNPSLANPKVRPWGYQKGANYGFENTKAMVLNRDNYTCQCCKGKHKDSKLEVHHIVFRSQGGSDEESNLLTLCHTCHKDLHSGKINPKLSGKVKGNLKYATQMNSIRKQLFRCYPNAIETFGYVTKANRLHLGVDKEHYYDACTIATQGNAFNVKSNLYKKKCVSDGDFQKTKGIRSEEPIVTDKICGFRKFDKVRYFGNDYFIKGRMSTGYAILMDIDGNKIDFSTMPRGYKTPKLSNCKRITARSTVMTQVKVV

SEQ ID NO: 10455 - protein, 507 aa, unidentified
MSEYIYVIGMDGDPQMPTKRKRHVEQLLQTGRARVFRQVPFTIQLTYKNEPVLQPVTIAEDPGRSNIGMAVVSLSGELLSAAVVQTRNKEIVKLMDKRKQHRRASRNGERKARQRLAKKCHTMVKAGSLMRKLPMYGKDKRVRCNVIKNTEARFCNRKREDGWLTPSAEHLVRTQINLIHKMQKFLPITDVAIEINRFAFLSLEDPSISGVDFQNGPLKGYDDLNAAVEDLQDGHCLMCNSPIEHRHHIVPRSMQGSNSIGNIAGLCCKCHERVHKDSAFEDSLKKKKAGLNKRYAAVSVLNQAIPFICKRLEQEFRKEHVHYCSGRDTSMVRRSLGYHKTKEEQLHEVDAWCIAVLSLQQIPEKAPSFDHVHEILQFRRQDRSRIKAQTSRAYYHERKKIAKNRKKAEGQREDSLQEWRKRQVERYGEEQTRKMISQLKVKKSIRRYNRLDRLMPGAVFYYQGVRYVMRGQHCEGTYLQAVGMGSKDFPAKKCKIVAHNEGLVFVS

SEQ ID NO: 10456 - protein, 410 aa, unidentified
MPCTQRKARLLLKEGKAKIHKYNPFTIQLTIPTGENKQDCHVGIDTGAKHIGLAITSENKVLFKGEVELRQDVKTNLDARRIYRYNRRSRKTRYRKSRYLNRKTENNWLPPSLQNRINHTYRWIDEMCNLVPIPMLHIEVGKFDAAKMINPEIQGIDYQHGQTYGFYDVRYFVFARDNYTCQCCGKSKDKILYTHHILYKSQGGTDRADNLITVCSDCHTTENHKPGGILYDWMIKRKKAKQYKEPPFMNILRKRIFDRYPNAIISYGSETVMRRKKLGLSKTHYNDAIAISGISNIKENPNEWLLIKQFRKKKRSLHEATIRKGIKEPNKTQKRHRKNTKCFKSWYLNDEVIVFSKKGYISGFGGSTVYIKDLFDNYMKDGNKKNTQISAKKLKLVSHNNNWKYIHRKY

SEQ ID NO: 10457 - protein, 386 aa, Anabaena sp.
MSKVFVLDTNFTPLNPIHSAQARQLLRSKKAAIYRQFPFTIILKESRSDLLISLLRLKIDPGAKFTGMVLVNDSTGEVVFAAELKHRGFAIRDALTSRSQLRRSRRARKTRYRQPRFLNRTRPERWLAPSLQSRIENIKTWVERLRKLAPIEAISQELVRFNMQLMTNPDIQGKEYQRGSNSITNLTLSCEKCNTKKGTKDIKYFLKKDPLKLEKILKQAKRPLADAAAVNTTRTALLEVLKATGLPVETGSGGLTKFNRSEQNLEKTHWIDAACVGKSTPILNIKGVKPLLITANGHGSRQSCRTDKYGFPSRHVPREKIHFGFQTGDIAKAVVTTGKKIGTYVGKVAIRSTGSFNIYTKNGLIQGISHKFCKRIHAKDGYSYAQ

SEQ ID NO: 10458 - protein, 412 aa, unidentified
  REGION 1..412: note = Ga0307928_10048042
MQKTYIQNKDGEPLMPTERSGKVRRLLRDNKAIVVNLCPFTIRLNYDCENNTQEVIVGLDTGAVNVGCSAVSNNKCLYASETKLRTDIHKKMQRRAMYRRTRRSRNTRYREARFDNRTSNRQLPPSLQSKLDSTVKVVKQLSKILPINKVIVEIAKFDTQKLQNPDIKGKQYQKGVTEGYDNVRAYVFERDNYTCQICKKREGILQTHHIKQRKDGGTDRPDNMITVHLKCHQDFHKGLIKHKFRKPKEYKMATQVTILKDFIIKELRKDFDVSITFGHITKRNRMRLNLPKSHCFDAVAIANPKNIERINKIFKKVCVTQRRYQMTKGVRSEKKLPSGQIFGYNQWDKVKINNQIGFVKGRRSSGFFDVCDIDKNNISHSVKYTKIQRLCSNNIMEVEAIPPTAKAVGILA

SEQ ID NO: 10459 - protein, 418 aa, Moorena sp.
MQNYVFVIDTNKQPLNPISPKKARRLLNKGKAAVFRMYPFTIILKTAVDNPTILPCQLKIDPGSKVTGFALVQNNQVIWGMELEHRGGLIKKKLESRKAVRRGRRNRNTRYRKPRFLNRRRPEGWLAPSLEHRVLTIETWVKRLIKFCPINEVWVEIVKFDTQKMQNPEISGVEYQQGELAGYEVREYLLEKWGRECTYCGKQSVPLQIEHIQPKSKGGSDRVSNLCLACEKCNQRKGNKPIEEFLKKKPSLLQKIKTKAKQPLPDAAAVNATRNKLVKVLRGIKPVVTGTGSQTKYNRTKLRFPKQHWIDAACVGDIETLILRTTQPLLVICKGQGGRQKAALNKYGYPIRHNPLKPIKGWVTGDIAKHQKLGIGKVTPRSKGSFGFTPLGTKGYKSCKPQDISAIHRKDGYIYSFC

SEQ ID NO: 10460 - protein, 594 aa, Streptomyces sp.; identical to SEQ ID NO: 9399

SEQ ID NO: 10461 - protein, 442 aa, unidentified; identical to SEQ ID NO: 4418

SEQ ID NO: 10462 - protein, 442 aa, unidentified; identical to SEQ ID NO: 3218

SEQ ID NO: 10463 - protein, 431 aa, unidentified
MPNRVYVLNKHGRPLMPCSPAKARHLLDAGKAKVKKRTPFTIQLVYGSSGYTQEVILGVDAGSKTIGMSASTTKEELLSAEVKPRNDVGDLLSARREFRRARRNRKIRYRKPRFDNRVRSKHKGWLAPSVEVKIQEHITSIKRVCRILPVSKVVVETAEFDLQLLKAIADGKPVPQGEDYQKGEIYGHYNVRQYVLWRDNYTCQCCGAHATKKKEVRLHVHHLESRKVGGNAPDNQVTLCESCHEKLHKGLITEKDFKKRKRRSTRDATFMGIMRKTLMQRLCSELPIPVVETRGYITKATREKLLVLPKSHTNDALAIAQGLQGFRVGYLPGIVQIDKIYTIRPVRHHNRQLHKAAILKGGIRKSNQAEKYVFGYRLFDKVQFNGQDCFIWGRRTSGYFAVKTIDGKVIHNSASFKKLNLVERASNYLIA

SEQ ID NO: 10464 - protein, 411 aa, unidentified; identical to SEQ ID NO: 9890

SEQ ID NO: 10465 - protein, 450 aa, unidentified
VAVFVLERTGKALMPCSEKRARLLLARGRACVHRLVPFVIRLTDRQLDTCTLQPLRIKLDPGSKTTGLALVRDTEHLNTDTGEIQRGVAVLSLIELVHRGRQISEALTARRQMRRRRRGCLRYRAPRFLNRGNKARGWLAPSLQHRINTTMAWVARIRRWSPVTALSAELVRFDMQRLQNPEISGVEYQQGTLAGYEVREYLLAKWSRKCAYCGVENVPLQIDHVHPKAKGGTNRVSNLTLACGPCNARKSAQSVDAFLAKDPKRLTALLAQAKRPLKDAAAVNATRWALVGALKATGLPVETASGGCTKFNRSRLAIPKTHALDAVCVGAVSVVTNWQKPSLTIKCTGRGSYQRTRLDKYGFPRGYLMREKSVKGFKTGDLVRAIVPTGKKAGRHTGRVAIRKSGSFNIQTLAGVVQGIGYRHCRLLQRADGYGYFFNKAACDTAQKRE

SEQ ID NO: 10466 - protein, 427 aa, Parasutterella sp.; identical to SEQ ID NO: 6030

SEQ ID NO: 10467 - protein, 413 aa, unidentified
MTSYSFVLDANGKQLAPTKEPKAWFLIRKKRAALVSKYPMVIQLKKKIQENEICKDEIRCGIDDGGLHVGIALVQKCKSKNKVVFKGTIEQRNDVKHLMEVRRNYRRYHRYHKRYRQARFDNRKSSKRKGRIAPSILQKRQATIRVINRLNKWINITNYWLEDVSIDIRVLTDGYKSYSWQYQKSNRLDENIRKATILRDGGKCMECGKSNCRLEVHHIKPRRRNGSNTLDNLITLCESCHQKTEGQEELYMDRYFSLLKSSDNKNLNYAQHVMIGKRWLRKQLSGLGVLYLTSGGDTANKRIDWNIEKSHTNDAVCITDLQPDTCDIKEWAIKPMRRQSKAKTDHVLGIHHRDLVEYTFKNGETHRGYVTALYPDQKAINFQSQTKHCKKVNARKCKLLWNYSKIYWFENAS

SEQ ID NO: 10468 - protein, 415 aa, Bacillus sp.; identical to SEQ ID NO: 2431

SEQ ID NO: 10469 - protein, 189 aa, unidentified
MVYVLANDGQPLMPTERHGKVCRMLKSGIAKVVKKCPFTIQLQYESERNVQPVALGIDAGSKHVGVSATTKAKVLYESDVELRDDIVKLLATRRQLRRRRRSRKTRYRPARFDNRRRKEGWLAPSIRQKIESHLTVVANVCKILPVSQIIVETASFDIQKIKNPDIQGIEYQQGEQMDFWNIREYVLFR

SEQ ID NO: 10470 - protein, 431 aa, unidentified
MPNKVYVINKHGRPLMPCSPAKARHLLDEGKAKVKKRTPFTIQLVYGSSGYTQEVILGVDAGSKTIGMSASTTKEELLSAEVKPRNDVVDLLSTRREFRRARRNRKTRYRKPRFDNRVRSKHKGWLAPSVEVKIQEHITSIKRVCRILPVSKVVVETAEFDLQLLKAIADGKPVPQGEDYQKGEMYGHYNVRQYVLWRDNYTCQCCGAHATKKKEVRLHVHHLESRKVGGDAPDNQVTLCESCHEKLHKGLITEKDFKKRKRRSTRDATFMGIMRKTLMQRLCSELPIPVVETRGYITKATREKLRVLPKSHINDALAIAQGKQGFNVGYLPGILQIDKIYTIRPVRHHNRQLHKAAILKGGIRKSNQAGKYVFGYRLFDKVQFNGQDCFIWGRRTTGIFTIKTINGKMIKDGISFKKLKLVEKSTSYLIA

SEQ ID NO: 10471 - protein, 450 aa, Clostridium sp.
MVYVIDINENPLMPTNEAKARKLLKNKKAIVKELKPFTIQLNYETSNYTQRITLGIDSGYLNIGFSAITDKKELIVGEVKLLQGIKDRIQEKAMYRRQRRSRLRYRKARWNNRMKSKHKGWLSPSLQHKLDSHIKFVDSLYNILPIQKTIIEIANFDIQKIKNPNISGEEYQQGEMMGFWNLREYVLHRDNHKCQNPNCKNKSKQQVLEVHHIKYRSEGGSDAPNNLITLCSKCHTSPNHKKGKFLYDWCMNGKKVRGFKDATFMSMIRWYLTNILKEKHNNVSITYGYITKNHRITHKIKKTHYNDAFAIAKGINQIRNNDIFTVSQVRRNNRSLERFYDCKIIDVRNGNKVLGGDLNCGRRTRNKNHSTENLRIYRGEKVSKGQRRIRKQKYFYQPNDLVRYNGKVYTVKGSQNGGRYVALKDIKKVPKVDLLTPYKFEKGFVYGVCK

SEQ ID NO: 10472 - protein, 456 aa, unidentified
MSTCVCVLSNSGERLMPTIRLGKVRRLLKDGKAKIVKHHPFTIQLLYDSKTNTQPIEICEDVGYNYIGISVKSESHEYVSAQYDTLQDEKEHHDDCRKYRRTRRNRLRYRKPRFDNRKRSEGWLAPSLEHKKQLNIRLIERYVSVIPITRATVEVGSFDTMLLQAIQKGESKPEGVDYQKGPRYNLATLREAVFYRDNYTCQVCGRKIADGAILHMHHMFYWKGRHGYQLDELVTACEKCHTPANHQKGGKLFGFGENKEFANLSGAAFMNAVRWQIVNALYATYGKEFVTITYGAMTKEKRIILGIEKTHNNDAYAMGDYHPAHRCVFRHYQKRRRNNRVLEKFYDATYIDARTGNKAKGKELFNGRINRNHKKDSENFHKYRSKKVSKGRRSIRRQRYAIQPYDTVRLESKTYITSGCHNKGTRLLIPANGKSKSVAISKVQVVCHAGAWIQII

SEQ ID NO: 10473 - protein, 453 aa, unidentified
MLMAVAVVSRTGVPLMPTSPYRARKLLASGKAEKYGYDPFTIRLTERETGDTQPVELCMDIGYIHIGVSVKSEKHEYLALQIDTLTDEKKKHEKCREKRRNRRSRKRYRKPRFDNRKRDKGWLAPSLEHKKEIHVQAAERICRVIPVTDITMEMGNFDTQVLKAKEEGRPLPQGTDYQQGERYGTATLREAVFSRDNYTCLCCGRTMKDGAYFHVHHIRYRSQGGTDRMANLATVCEKCHTPANHQPGGKLYNWKPEIKSFKGATFMTAVRWQMYHEIKEKIPDVSVHLTYGAATKERRSALDIEKSHVNDAFVMGRFHPGHRARPELYIKKRRNNRVLESFYDARYIDSRDGKRKPGKELFNGRISRNHKKDSENLHKYRLRKVSKGKRCIRKKHYPIQPHDILVYCGRKYETAGCHNLGTGAILLPEGRSIAVSKLKIYRYSGGYYKAAFN

SEQ ID NO: 10474 - protein, 418 aa, Anoxybacillus sp.
MVEENMTCFMQRKGENPMVFVLDTNKCPLAPCHEAVARKLLKQGKAAIYKRYPFTIILKEIVDNFRPKTPYRLKIDHGSKHTGLAILRGQEVVWLGQLDHRTDIKERIDKRRAFRRARRNRKTRYRKPRFLNRKRKEGWLPPSLESRVQNIQTWVSRLKKLCPIGHISYENAKFDTQLMRNPEINGVEYQQGTLQGYEVREYLLEKFGRKCCYCGKENVPLEVEHIIPKSRGGTDRVDNLCLACHDCNQRKGSKTAEEFGYPHIQKQVKESLKDASAINSTRWKAYEVLKQTGLDVECGTGARTKMNRIRLDLPKTHYFDACCVGESTTNHLYFKTKEVLFIKAKGRGSRSRTNLDRPPCRKKFGTIGRMKTNIVEISPCSWGHEVDVSMVRKSPKDRRTPVAWCTTECRSRVGKHAG

SEQ ID NO: 10475 - protein, 413 aa, unidentified; identical to SEQ ID NO: 2636

SEQ ID NO: 10476 - protein, 426 aa, unidentified
MRIFVMNMRGDPLMPCTQKKARILLKEGKAVIYKYDPFTIQLTYATGETKQDCHIGIDTGSKHIGMAITSENKVLFKGEIELRQDVKSNIDTKHIYRRSRRNRKTRYRQPRFLNRKRSDKWLPPSLQNRVDHTFHWIDTFCSLVSDPILHIEVGKFDTAKMINPEINGVDYQHGQTYGFFEERYFVFARDNYTCQCCGKSKDKILQTHHIIYRSNGGTDRVDNLITVCTDCHTSKNHQKGGILYKWQEQHKKVKQYKEPPFMNAIRKRIFARYPNAHTTYGFETTPHRKELGLEKTHYNDAITISGITNIKEDPKEWLLIKQFRKKKRSLHEATARKGRKEPNCFQKRNSKNTPFYRGFYLNDKVKVFGHGQIGYITGFTSGGAYVKNVDGEYITIPNKSYKQVSIKYLKLLSHNNNWQYVVKSAV

SEQ ID NO: 10477 - protein, 512 aa, unidentified; identical to SEQ ID NO: 5811

SEQ ID NO: 10478 - protein, 420 aa, unidentified
MQYVYVLNRHGEPMMPCSPGKARLLLKQQKACVVKRTPFTIKLLYGSAGYKQPITLGVDAGSRHVGLSASTEKRELYREEFSPRNDVVKLLSTRKQNRCSRRYRKTRYRPPRFDNRVHSKHKGWLAPSVEVKIQEHITVIKHICKILPISLVRVETAEFDTQRLKAMLAGKPLPVGTDYQLGEMYDEYNVRQYVLKRDHYTCQCCGAHNTAKKVVKLHVHHLESRKTGGNAPGNLITLCATCHENLHKGKVTLDGKERGKPLRDAAFMGVMRKTLMARLKEELPIPVQGTYGYITKMRREKNDIKKSHTNDARCISKHPLAEPCSVCYRTKAIRHHNRQTHKVNFSKGGYRKRSQTPYLVEGYRLWDKVLYKGQECFVSGRRSSGSFALKKLDGTTISEGVTFKKLRLLEPATNYLIERM

SEQ ID NO: 10479 - protein, 369 aa, Lactobacillus sp.
VVSQEKVLCQSEVELRQDVHANLYTRKIYRRGRRSRKTRYRQARFLNRVHGKRDGLWLPPSVKGKVNHNIAWIKRYLAVLPNPDLHVEVGKFDMAKMLNPKISGKQYQEGSLRGWKNYEYYVLARDKYTCQLCRKHGKGVKLAVHHIIYRSQGGTDRVSNLITLCTDCHTTKNHQPGGKLYKWMKAKKKVTTHLKGATFMNILRKRIMAAFPEASFQYGSQTYVDRKNLNLPKGHFMDAIAISGIKSVGQMPETVTMISQFRKKKRSLHEATARKGRKQPNTTAKRNAKNTKCARGIWLNDYVRVIGNNAKGYVQGFKSNGYFVYLTDGLGNYVLNNGKNYINGKQCRLIMHNGNWQKAEQKLSLYEFK

SEQ ID NO: 10480 - protein, 515 aa, unidentified
MTALEERLSKTEYIYVLGFDGKPQMPTRRKRHVLKLLKTGRARIAEDIPFTIRLTYRNAPVLQPVTLAEDPGRTNIGAAVLSPLGDLLFAAVIETRNKEIKKLMTDRQKSRQASRRGERKARQRLAKRYGSMVKSGMVMRKLPMYAADRFVTCKFIRNTQARFCNRKRCPDWITPTVQHLVQTHLNIIRKISRYLPVTDIAFEVNRFAFMHMENPEAIGVDFQNGPLKGYGDVKEAIRTQQHGKCLMCKKPIAHFHHIVPRSRGGSDTIQNLAGLCPECHTKVHKDTAFRKDFDEKKSGQLKKYGALSALNQAVPFICKKLLEEYGEEHVHFCRGLDTSLIRTALGFEKTKKDQMHEVDAYCVGLAALEVNEVETPAFDHTFQIRQFRRQDRSIIHHQTGRSYYQGKEKIAQNRKPGFEQKTTALSQWYEEQVRIHGEKEAEKLRSQLRVEKSCRHYNDMDRFLPGAVFLYEGKRYVLSGRITNGKYLRACGQGMKNFPAAECTFIRHNAGLVFI

SEQ ID NO: 10481 - protein, 425 aa, unidentified; identical to SEQ ID NO: 8847

SEQ ID NO: 10482 - protein, 431 aa, unidentified
MPNKVYVINKHGRPLMPCSPAKARHLLDAGKAKVKKRTPFTIQLLFGSTGYTQEVILGVDAGSKTIGLSASAETKELFSAEVKPRNDVVDLLSTRREFRRARRNRKTRYRKPRFDNRVRSKHKGWLAPSVEVKIQEHITAIRRVCGILPVSKVVVETAEFDLQLLKAIADGKPVPQGEDYQKGEMYGHYNVRQYVLWRDDYTCQCCGAHATKKKEVRLHVHHLESRKVGGDAPDNQVTLCESCHEKLHKGLIAEKDFKKRKRRSTRDATFMGIMRKTLMQRLCSELPIPVIETRGYITKATREKLLVLPKSHTNDALAIAQGKRGFNVGYLPEIAQIDKIYTIRPVRHHNRQLHKATILKGGIRKSNQTEKYVFGYRLFDKVQFNGQDCFIWGRRTTGIFTIKTINGKMIKDGISFKKLKPVEKSTSYLIA

SEQ ID NO: 10483 - protein, 557 aa, unidentified
MIYNLVSIRERSFMKQKKQKVMVYILNKKGKPLMPTTRCGHVRKLLDSKKAVVVSSNPFTIRLKYDTPNGVQDVFAGIDSGRENIGSGASNEDGDCLYLGELKTSNKSIKMKITERAGFRKERRRRDRQNKQRKARKDHTEIQNGNADICRTTISCKSVQISYPAAEKSVTHKIIRGKEGKFANRHRDEGWITPSARQLVQMHMNDLKSMCKILPISHVTLERVAFDFQKLENENIKAWEYGKGKLYGYDSPEEYIHDVQGGKCLICGKPHIDYLHHIIPRSKGGSNKVSNLAGLCYDCHYGPMGVHNCQDTQDRLPELKNEANKQYKVSLLNSVMPVLIEEMDKFCKANSIIFSICEGHDTAKVRDIYDLQKDHCVDGFAISLVGRNVKSVDVMPDRIHQKQRYKKKSKNIIKKRNCREYYDGKKLVAVNRHKGTDQKADSLEEYMNTYAETHTADECKKHFESLTVKPARRTYTFHKEGRICPFHIGDKVRYEKKNKIKGNTKVETFICEGIRFPKDENKAKVEHNKTKSKKMKFCRVLEPGCTPYIDYRKLVLI

SEQ ID NO: 10484 - protein, 462 aa, Burkholderia sp.
MSVFVLDRSGKPLMPCTEKRAKMMLTRGRARVHRVVPFVIRLTDRLADSSSFQPLRIKIDPGSKITGIALVRESAEGIAVLNLFELAHRGRQISEALTARRAFRRRRRGANLRYRAPRFLNRTKPNGWLAPSLQHRVDTTAAWIQRIRRWAPVAALSSELVRFDMQAMANPEISGVEYQQGTLAGYEVREYLLEKWGRCCVYCDGKDRLLQIEHLTSKANGGTDRIGNLALACAPCNQDKGALDVRAYVKDPKRLARILATASRPLKDAAAVNATRWALANSLRETDLPLELASGGRTKFNRIAHNIPKTHALDAVCVGHVASISDWQCPTLSIKATGRGSYQRTRLTASGFARGYLMRRKQVNGFQTGDRVRAVVPSGKKAGVHVGRVAVRASGSFNIQIPDGVVQGISHRYCRVIQRGDGYGYHFNPKDSFLEGDAESGRASHAALSLPALKDRVSRAFG

SEQ ID NO: 10485 - protein, 412 aa, unidentified; identical to SEQ ID NO: 5514

SEQ ID NO: 10486 - protein, 933 aa, Streptomyces sp.
MADISRACTSSASALRTAHPANPCRPTASAAVQPRIRSASRFQCVTTPSASKAHSAASMPSSSAASRSEPPVSSGPSGPPGPSWLCGPSRSGSSGPSSSVVPLRREALTWTPWRLRRRICGARFAHWPSFNWNVTQPTSCSRRLTESMPGTGLRLQPQIDPLVGLPVQHVPVDLHEPAPLGEPQPVRVHGQHACLDRPRTQHTRAGEPALVQRRAETTPPELGQHARDDRRDALLPGRRPHRGTPHEHVTQIRVLQPVPLTAHPGVLQGHRGGRHDDVVDVAPLFELGVAVHGFDSKIGHTVSQPAVPAPGQLHKRTPAGRASTTVTAYAFGKSDRFANPSDVRLIISAARSPFTSVSRNSERRSPAPQPQRCHVTSPSHHDQRIREVTPMTTFPAGEQTHQAVLPQQPALESVRADTPGSRDETAHGHPATARGTGREHGRGETDGHGTRTRRRHAKRAAQAAQAEENGSGDAPTGASRVFVLSKDGHPLMPCHPARARELLSKGRAAVARQVPFTIRLKDRTLADSEVDGVQLRIDPGSKGTGLVLTDEKKETTEDGTTVTVRRGLISVELHHRGAQIQSCMRQRAGYRNRRRSANCRYRTPRSQNRVRPEGWLPPSLRHRVDTTFSLANRLCRYAPVTDIHLERTAFDTHSMSAGKPLYGAEYAQGLLAGTTTRSYLHARWGGACAYCGATGVPLNIEHVRPRSRQGSSRISNLVLSCIPCNKAKGSRSIESFLAHRPDLLARILEQTKAPLRDAAAMNAIQWQLTEALETLERPVHAWPGLLTKTNRDAMGLAKTHTLDALSVGHIDHESGDAIARFPDRVLIVKATGRGSYARTTPDRYGFPRLRRARKKQHFGYVTGDLVRAVMPSGKWAGTWTGRISVRARGQHSLTTSIGRINLSHWNLRLLQRGDGYGYSFRPEAVPSASPKNS

SEQ ID NO: 10487 - protein, 411 aa, unidentified; identical to SEQ ID NO: 4865

SEQ ID NO: 10488 - protein, 413 aa, unidentified; identical to SEQ ID NO: 2636

SEQ ID NO: 10489 - protein, 493 aa, unidentified
MAVVYVISASGKPLMPTTRCGHVRGLLNEGKARVVEREPFTIQLKYETPDVTQPLYLGIDPGRTNVGAAVVCEDGECVFTAQLTTRNKDVPKLMKARKQFRMAHRRLKRHCKRQRRAKAAGTLSQKGEFQRLLPGYEKPILCKGIRNKEARFNNRQRPVGWLTPTANHLLLTHLNMVKKLQKLLPITDVVLEVNRFAFMAMENPSIRRWQYQRGPLYGKDCVEDAVYAQQDGHCLFCGRPIAHYHHVVPQHKNGSDTLENRVGLCNEHHDLVHKDRAWEAKMKETKAGLNKKYHALSVLNQIIPALTEQLTELFPQHAFVTTGKDTADFREDHGIAKEHYLDAYCIACSVLTEPDRVSAPTAKPYRLMQFRRHDRQVCHKENIKRVYLLDGKAVATNRHKPIEHKDDSLEEFRRTHTQQEVSSLTVKDHQPIYKDMQRFMPGGVFLCNGKVHTLLGSQGRYKGMPYYYIGTDGSRNNATRCIFLQQNCGLRWV

SEQ ID NO: 10490 - protein, 493 aa, unidentified
MAAVYVISASGKPLMPTTRCGHIRGLLNAGKARVVEREPFTIQLKYETPDVTQPLYLGIDPGRTNVGSAVVREDGECVFTAQLTTRNKDVPKLMKARKQFRMAHRRLKRRCKRQRRGKAAETLSQKGEFQRLLPGYEEPILCKGIRNKEARFNNRQRPAGWLTPTANHLLLTHLNMVKKLQKLLPITDVVLEVNRFAFMAMENPSIRRWQYQQGPLYGKGSVEDAVYAQQDGHCLFCGKPIAHYHHVVPQHKNGSETLENRVGLCNEHHDLVHKDRAWDAKMKETKAGLNKKYHALSVLNQIIPALTEQLTAMFPQHAFVTTGKDTADFREDYGIAKEHHLDAYCIACSVLAEPTKVAAPTGKPHRLMQFRRHDRQVCHKENIKRVYLSEGKAVATNRHKAIEQKDDSLEEFRKTHTQQEVSALTVKDHQPVYKDMRRFMPGGVFLFNGKVHTLQRSHGRYKGMPFYYIDTDGSKNHAKGCIFLQQNCGLRWV

SEQ ID NO: 10491 - protein, 573 aa, Streptosporangium sp.; identical to SEQ ID NO: 7666

SEQ ID NO: 10492 - protein, 442 aa, Lactobacillus sp.; identical to SEQ ID NO: 5571

SEQ ID NO: 10493 - protein, 421 aa, unidentified
MRGQPLMPCSPAKARHLLMDKKAVVKRRTPFTLQLTIATGETKQDVTLGVDAGAKHIGLSASTEKEEVFASEVELRQDITGLLAARLAFRRARRHRKTRYRAPRFLNRVHSKHRGWLAPSVENRIQAHMSRIDAICGLLPVTKIVIETASFDIQKIKNPDVEGTDYQQGDQLGFWNVREYVLFRDGHVCQHCRGRSKDKVLNVHHLESRQTGGDAPNNLITLCETCHKAYHAGKIKLKVKRGQSFREEAFMGIMRWTMLDRVRKAHPDLPVENTYGYLTKNTRITLGLPKTHCIDAYCIAGNLNARRRGVYLYQRQMRKHNRQIHKCKVLSKTLKDGTKVGYRKLNQTPYLVKNFRLFDKVRCFGQTGFIFGRRTSGHFDVRTLNRTRLSDCVNSKKLTLLEKRRTFLTELRKEDGASSPV

SEQ ID NO: 10494 - protein, 456 aa, unidentified
MSTCVCVLSNSGERLMPTFRLGKVRRLLKDGKAKIVKHHPFTIQLLYDSKTNTQPIEICEDVGYNYIGISVKSQSHEYVSAQYDTLQDEKACHDSCRKYRRTRRNRLRYRKPRFDNRKRSEGWLAPSLRHKKELNVNVVKMYCAVMPITHATVEVGSFDTMLVKAIQEGKAIPEGADYQKGPRYNLATLREAVFYRDNYVCKVCGRKATEGAILHVHHMFYWKGRHGNSLSELITVCEKCHTPANHQKGGKLYGFGENVKFADLSGAAFMNTVRWQIVNELYAAFGKDFVTVTYGAMTKEKRIALHLEKSHNNDAYAMGNCHPAHRCEFGHYQKRCRNNRVLEKFYDATYIDTRTGDKAKGKELFNGRISRNHKKDSEDLHKYRSKKVSKGRRSIRRQRYAIQPYDTVRLESKSYITSGCHNKGTRLLIPANGKSKSVAISKVQVVCHAGAWIQII

SEQ ID NO: 10495 - protein, 460 aa, unidentified; identical to SEQ ID NO: 7734

SEQ ID NO: 10496 - protein, 512 aa, unidentified; identical to SEQ ID NO: 4049

SEQ ID NO: 10497 - protein, 428 aa, unidentified
LKVFVLNMRGRPLMPCSPAKARHLLKAGKAVVRRRTPFTIQLRIATGETKQSVTLGVDAGAKHVGLSAATEKEEVFASEVELRQDITGLLAARLSLRRERRQRKTRYRAPRFLNRVRSKHNGWLPPSVENRIQAHLSRIDAICGLLPVTKIVIETASFDIQKIKHPDVEGTDYQQGDQLGFWNVREYVLFRDGHVCQHCHGHAKDKILNVHHLESRQTGGDAPNNLITLCERCHKACHAGKIKLKVKRGQSFREEAFMGIMRWTLLDRVRKAHPGLPVENTYGYLTKNTRITQGLPKAHCVDAYCIAGNLKAVRRGVHLYQRQVRKHNRQIHKCTVLSKTLKDGTKIGYRKLNQTPHLVKNFRLFDKVRCLGQTGFIFGRRSSGYFDVRRLDGVKLSPSISWRKLTLLEKRSTYLTELRKEDGASSPV

SEQ ID NO: 10498 - protein, 1304 aa, Nocardiopsis sp.; identical to SEQ ID NO: 3641

SEQ ID NO: 10499 - protein, 488 aa, Streptomyces sp.; identical to SEQ ID NO: 7205

SEQ ID NO: 10500 - protein, 507 aa, unidentified
MSEYIYVIGVDGDPQMPTKRKRHVEQLLQTGRARIFRQVPFTIQLTYENKPVLQPVTIAEDPGRSNIGMAVVSLSGELLSAAVVQTRNKEIVKLMEKRKQHRRTSRNGERKARQRLAKKCHTMVKAGSLMRKLPMYGKDKRVRCNMIKNTEARFCNRKQEDGWLTPSAEHLVRTHINLIHKMQKFLPITDVAIEINRFAFLSLEDPSISGVDFQNGPLKGYDDLNAAVEDLQDGHCLMCNSPIGHRHHIVPRSMQGSNTIGNIAGLCCKCHERVHKNSAFEDSLKKKKAGLNKRYAAVSALNQAIPFICKRLEQEFGKEHVHYCSGRDTSMVRRSLGYHKTKEEQLHEVDAWCIAVLSLQQIPEKAPSFDHVHEILQFRRQDRSRIKAQTSRAYYHERKKIAKNRKKAEGQREDSLQEWRKRQVERYGEEQTRKMISQLKVKKSIRRYNRLDRLMPGAVFYYQGVRYVMRGQHCEGTYLQAVGMGSKDFPAKKCKIVAQNEGLVFVS

SEQ ID NO: 10501 - protein, 415 aa, unidentified; identical to SEQ ID NO: 5395

SEQ ID NO: 10502 - protein, 413 aa, unidentified; identical to SEQ ID NO: 7541

SEQ ID NO: 10503 - protein, 424 aa, unidentified
MRVFVFNMRGRPLMPCSQRKARLLLRENKAMIYKYHPFTIQLTYTTGETKQDCHIGIDTGSKYIGAAVRSEDKVFWKGEIELRQDIRSNLDTKRIYRRSRQNRKTRYRKPRFLNRKRRDEWLPPSLQSRINHTFHWIDTLSSLVPNPILHIEVGKFDVAKMINPEIHGVDYQHGQTYGFFDERYFVFARDNYTCQCCGKSKNKILNTHHIIYRSNGGTNRVDNLITVCTDCHTLQNHRKGGIFYQWQEQHKKVKQYKEPPFMNTLRKRIFVAYPDAEITYGSETTPKRKAMKLDKTHYNDAIVISGINEIKENPEEWLLIKQFRKKKRSLHEATARKGRKKPNRNQTRNSKNTPYYKGFYLNDKVSVFGKSGYITGFTSNAAYIKDENNDYITLPNKTYKQVSINKMELECHNNNWQYIIKNAV

SEQ ID NO: 10504 - protein, 412 aa, unidentified; identical to SEQ ID NO: 5514

SEQ ID NO: 10505 - protein, 442 aa, Anaerostipes sp.; identical to SEQ ID NO: 3218

SEQ ID NO: 10506 - protein, 442 aa, unidentified; identical to SEQ ID NO: 2834

SEQ ID NO: 10507 - protein, 490 aa, unidentified; identical to SEQ ID NO: 6170

SEQ ID NO: 10508 - protein, 434 aa, unidentified; identical to SEQ ID NO: 5659
  source 1..434: note = Clostridiaceae bacterium

SEQ ID NO: 10509 - protein, 431 aa, unidentified
MPGKVYVISRLGHPLMPCSPAKARHLLDDGKAKVVKRTPFTIKLLYGSTEYTQPVILGVDAGSKTIGLSASTTKEELFAAEVMPRNDVVENLSTRREFRRARRNRTTRYRKPRFNNRVHSKNNGWLAPSVEVKIQEHITSIKRVCAILPISKIVVETAEFDLQLLKAVQDGKPVPEGEDYQKGEMYGSYDVRQYVLWRDNYTCTCCGVKGTDKKPIKLHVHHFESRKHGGNAPDNYGTLCEDCHKKHHLGIITDISLKTRKRPSTRDAAFMGIMRKTLMQRLITGLSIPVAETKGYITKAAREEILKLPKTHTNDALAIAQGRHGFGIREPAYVKPTNRIYTVRPVRHHNRQLHKATILKGGIRKLNQASKYIFGFRLYDKVLYRGGECFVWGRRTSGSFLLRTIDGTKVKDGVGHRNLTLLERSTNYLIA

SEQ ID NO: 10510 - protein, 423 aa, unidentified; identical to SEQ ID NO: 3951

SEQ ID NO: 10511 - protein, 535 aa, unidentified; identical to SEQ ID NO: 6116

SEQ ID NO: 10512 - protein, 439 aa, unidentified; identical to SEQ ID NO: 9904

SEQ ID NO: 10513 - protein, 415 aa, unidentified
MVYVLDKNGQPLMPTDRHRKVRLMLQSGQAKVIKRCPFTIQLNYDSGHQTQEISLGIDAGSKHIGVSTTTKIKVLYEVDVELRNDIVDLLSSRRELRRGRRNRKTRYRQAKFNNRRRGNGWLAPSIRQKIGTHLTVVENICKMLPISRIMVETASFDIQKIKNPDIQGAEYQQGDQLEFWNVREYVLFRDGHTCQCCKGKSKDKILNVHHIESRKTGGNAPNNLITLCETCHTGYHKGTVQLPKAIKRGMRFKDAAFMGIMRWAFYEALKQQYEPVALVHNTYGYITKHTRIEHNLPKEHYVDARCISGNPDAFPSGEYYYQKKVRCHNRQIHKLTILKGGIRKQNQATYLVKGYRLFDKVSYQGKGYFVFGRRQSGFFDIRTLSGEKVNKGSLSCKKLKFIATRTYYLTERRAV

SEQ ID NO: 10514 - protein, 518 aa, unidentified
VKEVAYMSTVYVLNKDGKPLMPTTRGGRVRHLLKEQKARVVRTKPFTIKLLYETNDVVQPLYLGIDPGRTNIGVAVVKTDGTAVFTAHLETRNKEIPKLMKKRKDSRRARRTNGRRCRRQRRAKANGTISKKCVKQATAQNGSVSKRAKEIGVIKRHLPGCEKDVLCIGIKNKEAKFNNRTRPEGWLTPTANQLLQTHINLVKKIQKFLPISNVVLEINKFAFMQLDNPNIQKRQYQQGPLYQKGSLESAVSEMQEHHCLFCKNAIDHYHHVVPQSENGSNTISNIVGLCTKHHDLIHKETAWQEKLAKKKTGLNKKYGALSVLNQIIPALTKELSSLFPKHFFATNGKSTYDYRAAHAVSKDHWLDAYCIACSILPNDVCDSDINNRVPYELKQFRRHDRRALHKENMSRVYTLNGKKVATNRHKAVEQTTDSLEEFRQRQPNDVCKLKVKEHHPEYRNPKRNFPGCVFLIGKRTHVMQGTSGSHNGKADGYYDTNGNSYSSGECKFVAKNEGIVFT

SEQ ID NO: 10515 - protein, 464 aa, unidentified
MYVFVIGLDGTRLMPCKPRKARKLIEAHKAEIYKKQPFTIRLLYKTGCATQPVTIGIDTGSQHIGIAVTSGNKVLYQAEIELRSTMDKRSLMETRRSYRRSRRYRKTRYRSPKFRFHTKRTYSETLVKRKTTGVMTHWVKHTNSMSTNRPDGWLAPSMQSKADYHIRWINRFLDVLPPDTKLRLEIARFDIARMKNPEVHSELYQYGPQYDYENLKAYVFDRDHYKCVVCKRKLGSKQPDGHSLKGMMHHITFRSKGATDNPDQLVTVCEYCHTPQAHKKGGVLWNLKEKHRPVQRGLRDATQMNIIRTRLVKAFPDAELTYGNITAADRKKMHLPKSHAGDAVAIAMKGKTVNICEPTVYIKQVRKKKRSLHEATPRKGRKNPNTQAVRNPKNTKSIDIYHIYDTVRFQNKTGFISGFTGMSAYVQDFDGNYITMPGKSYKQINLSNLELVRHNNNWIQKTGN

SEQ ID NO: 10516 - protein, 455 aa, unidentified; identical to SEQ ID NO: 7753

SEQ ID NO: 10517 - protein, 450 aa, unidentified
MVYVINFEGKPLMPTTNAKARKLLNQKKATVKRVNPFIIQLLYKTDTEYIQTITLGIDSGYLNIGFSAITDSKELIVGEVKLLQGMKDRLLEKSQYRRIRRQRLRYRKPRWNNRKIKQGWLAPSLQHKLDTHVKFIDYLNTILPIRNIVLEVANFDIQKIKNPDISGVEYQQGKQMGFWNVREYVLHRDGHKCQNPNCKNKSKEQILEIHHIKYKSEGGSDAPSNLITLCNKCHTSPNHKKGKFLYDWCENGKKVRGFKDATFMSMIRWYLLEQLKEKYTNIKATYGYLTKNHRIEHGIEKSHFNDAFAIAKGVNQVRNLEIFKVEQSRLNNRSLEKFYDAKYIYSRTGEKVSASELNCGRRTRNKNLNSENLRVFRGQKISKGQRRIRKKKSLYQPNDLIKYESKVYTVKGSQNEGKYIALKEIKKVPNVKLIKPYIFKKGLNWSSGLC

SEQ ID NO: 10518 - protein, 416 aa, unidentified
MVYVLDKNGQPLMPTDRHRKVRLMLQSGQAKVIKRCPFTIQLNYDSGHQTQEISLGIDAGSKHIGVSATTKIKVLYEADVELRNDIVDLLSSRRELRRGRRNRKTRYRQAKFNNRRRGNGWLAPSIRQKIGTHLTVVENICKILPISRIMVETASFDIQKIKNTDIQGAEYQQGDQLGFWNIREYVLFRDNHTCQCCKGKSKDKILNVHHIESRKTGGNAPNNLITLCEICHTGYHKGAVQLPKTVKRGMRFKDAAFMGIMRWAFYEALKQQYEPVGTPVHNTYGYITKHTRIEHNLPKEHYVDARCISGNPDAFPNGEYYYQKKVRCHNRQMHKLTILKGGIRKQNQATYLVKGYRLFDKVSYQRKEYFVFGRRKSGFFDIRTLSGKQVNKGSLSCKKLKFIATRMYYLIERRAV

SEQ ID NO: 10519 - protein, 447 aa, unidentified
VPAYRFKHITKKEVPYMVYVLDIDGQPLMPTSRHGKVRRLLNSHLAKVVKRCPFTIQLLYQSTKETQPVSLGVDAGSRHIGLAATTEQKVVYQEKLVPRNDVVKLLSARRALRSSRRNRKTRYRRVRFNNRVHSKHKGWLAPSVEVKIQEHITATKRICQILPIFDIHVETAEFDLQRLKAMEEGRLLPAGTDYQLGEQYDFYNTRQYVLHRDEYTCQCCGTHDNNVKLHVHHVESRQTGGEAPNNLITLCEHCHKSIHAGKMMLPKGKKRGKSYRDAAFMGIMRNTLLERLRKEVNVPVTMTYGYITKYWREKAGLEKSHINDAICISKHPYARPLETYYLTKAVRHHNRQIHKTKFSKGGIRKRNQAPYLVKGFRLFDKVLYQGESYFIFGRRITGYFDIRTLDGTKVNKGSTSYKKLRIQDTAEAYLKEARAIPHMNKFTCVLA

SEQ ID NO: 10520 - protein, 423 aa, Tolypothrix sp.
  VARIANT 408: note = X can be any naturally occurring amino acid
MSNYVFLIDQNKTPLNPVHPAQARKLLDCGKAAVFRHYPFTLILKRIIENPNVYPLTLKIDPGSKFTGIVLVTNQGNVIWGMELQHRGQQIKDALLHRRAIRRGRRNRNTRYRKARFLNRKRPDGWLAPSLRHRILTTETWVKRIQKFASIGSIVQELVKFDTQVIQNAEISGTEYQQGTLHGYECREYLLEKWNRQCAYCGAKNVPLEIEHIQPKSKGGSDRISNLCLACNKCNQRKGNKDIFDFLKDKPHVLSRVLRQAKAPLKDAASVNSTRWALFNTLNSFGLPVSTGTGGQTKFNRIRLELPKAHWIDAACIGVVETIKFATTKILQVKATGFGGRQRCQTNKFGYPQKHRPLRPILGFCTGDIVRADVPKGKYKGTFTARVCPMSHGYGEFVIDKKRRSIKXNYLTPVHRKDGYDYA

SEQ ID NO: 10521 - protein, 418 aa, unidentified; identical to SEQ ID NO: 2710

SEQ ID NO: 10522 - protein, 456 aa, unidentified
MNTCVCVLSNNGERLMPTIRLGRVRHLLKDGKAKIIKHHPFTIQLLYDSKTNTQPIEICEDVGYNYIGISVKSQSHEYVSAQYDTLQDEKACHDSCRKLRRTRRNRLRYRKPRFDNRKRGEGWLAPSLKHKKELNVNVVKMYCTVMPITHATVEVGSFDTMLVKAIQEGKVIPEGADYQKGPRYNLATLREAVFYRDNYVCKICGRKATEGAILHMHHMFYWKGRHGNSLNELLTVCEKCHTPANHQKSGKLYGFGEKIKFADLSGAAFMNTVRWQIVNELYVAFGKPFVTITYGAMTKEKRIALQLEKSHNNDAYAMGDFHPVHRCGFRHYQKRRRNNRVLEKFYDATYIDARTGNKAKGKELFNGRISRNHKKDSENLHKYRSEKVSKGRRSIRKRRYAIQPYDTVRLKGKTYITSGCHNKGTRLLIPVNGKSKSVTISKVQVVCHAGPWIQII

SEQ ID NO: 10523 - protein, 408 aa, unidentified; identical to SEQ ID NO: 4810

SEQ ID NO: 10524 - protein, 416 aa, unidentified; identical to SEQ ID NO: 5729

SEQ ID NO: 10525 - protein, 431 aa, unidentified
MPNKVYVINKHGRPLMPCSPAKARHLLDAGKAKVKKRTPFTIQLVYGSSGYTQEVILGVDAGSKTIGMSASTTKEELLSAEVKPRNDVVDLLSTRREFRRVRRNRKTRYRKPRFDNRVRGKNKEWLAPSVEVKIQEHITAIKRVCYILPVSKVVVETAEFDLQLLKAIEEGKPVLQGEDYQQGEMYGHYNVRQYVLWKDNYICQCCGAHATKEKEVRLHVHHLESRKTGGDAPGNLITLCDSCHEKFHKELITEKDLMKRKRKSTRDATFMGIMRKTLMQRLCSELPIPVVETRGYITKATREKLLVLPKSHTNDALAIAQGKRGFNVGYLPGIIQTDKIYTIRPVRHHNRQLHKAAILKGGIRKSNQAGKYVFGYRLFDKVQFNGQDCFIWGRRTTGIFTIKTINGKMIKDGISFKKLKLVEKSTSYLIA

SEQ ID NO: 10526 - protein, 475 aa, unidentified
HYYLTKGVSCMSTCVCVLSNNGERLMPTIRLGRVRHLLKDGKAKIIKHHPFTIQLLYDSKTNTQPIEICEDVGYNYIGISVKSQSHEYVSAQYDTLQDEKACHDSCRKLRRTRRNRLRYRKSRFDNRKRGEGWLAPSLRHKKELNVNVVKMYCAVMPITHVTIEVGSFDTMLLKAVQEGKAIPEGADYQKGPRYNLATLREAVFYRDNYVCKVCGRKATEGAILHMHHMFYWKGRHGNSLSELITVCEKCHTPANHQKSGKLYGFGENVKFADLSGAAFMNTVRWQIVNELYAAFGKDFVTITYGAMTKEKRIALRLEKSHNNDAYAMGEFHPNHRCTFEHYEKVRRNNRTLEKFYDSRYIDIRTGEIATGKELFNGRINRNHKKDSENLHRYRGKRTYAGHRALLRKKVKLNPGDLVSLNGEVLIVHGTHTNKKGAVNVEFKVPAKNGQKSASLKKLKIVKTTDSMHSAWEKIS

SEQ ID NO: 10527 - protein, 427 aa, Enterococcus sp.; identical to SEQ ID NO: 2410

SEQ ID NO: 10528 - protein, 421 aa, unidentified
MIYVRSKDGKALMPSERGGRIGYLLRHGKAHVVSRVPFVVQLDYESTIYTQEVSLGIDAGSKHIGVSASSEKKELLAAQVELRSDVVNLLSTRKELRRTRRNRKTRYRKVRFDNRKKKDGWLAPSVEQKVESHLKVISLVRKLLPITKTTIEVAPFDAQKIKNPDIKGDEYQQGEQMGFWNVREYVLARDGHKCVHCKGKSRDPILNVHHLESRKTGGNSPSNLVTLCETCHKAYHRGEFDLKIKRGTTLRDAAVMNIMRWSVYERAKAEFGNVYLTYGYITKHTRIENDIEKTHAADAFCIAKNVHARRSRTFFMCRCVPRHTRALHVANPKKGGIRRSCIASHKIGKSRFQRFDMVWWKGKECFIFGSTHGRPILRDVEGKQIAGQPSVNIKTIKFLKRLRNNILVEERTSESWIENES

SEQ ID NO: 10529 - protein, 416 aa, unidentified
MVYILNKHNEPLMPCSERKARLLLKDGMAIVYRRDIFTIKLINGSYGYKQHITLGVDCGSKHIGVSATTDKQELFSANAELRNDVVKLLSDRRMLRRSRRFRKTRYRKPRFNNRIVKNGWIAPSIKQKIQSHFNLVGFLHKLLPISNIVIETASFDIQKINNPSISGSEYQQGEQLDFFNVREYVLFRDNHICQHCKGKSKDKVLNVHHIESRKTGGDSPKNLITLCETCHKAYHRGEFELNVKRGKSFRDAAFMGIMRWKLYDELKLRYDNVSMTFGYITKYKRIKLGLDKEHYNDAYCICGNLAAKMLSTHHFIRFIPRHSRVLHMQKFSKGGVRRSASASYWLNGGKPSKYGIRFTRFDKVNFNGITCFISGSSKGFAVLRDINWNKVNCCKTTVTVNKLALISRVHGCMLFG

SEQ ID NO: 10530 - protein, 749 aa, unidentified
LKVFVLNMRGQPLMPCSPAKARHLLKAGKAVVKRRTPFTIQLRIATGETKQNVTLGVDAGAKHVGLSATTEKEEVFASEVELRQDITGLLAARLSLRRERRQRKTRYRAPRFLNRVRSKHKGWLAPSVENRIQAHMSRIDAVCRLLPVTKIVIETASFDIQKIKDPSVEGTDYQQGDQLGFWNVREYVLFRDGHVCQHCHGHAKDKILNVHHLESRQTGGDAPNNLITLCERCHKACHAGKIKLKVKRGQSFREEAFIGIMRWTLLDRVRKAHPGLPVENTCGYLTKNTRITLGLPKAHCVDAYCIAGNLKAVRRGVHLYQRQVRKHNRQIHKCTVLSKTLKDGTKIGYRKLNQTPHLVKNFRLFDKVRCLGQTGFIFGRRSSGCFDVRRLDGVKLSSDISYRKLTLLEKRGTHLTELIKEDGASSSVRRQRFLRRVSMNKPCTYLLSALMASAVLAPVAASAADKSELEVRMEAAQKVLADRSYYERWSPEAALKTVEDAKAANEAGSARQKEIDGALDVMKDWCHTRFLVNACIKDARDLHHEREKEIRSVRLKADEMIRLDRVEQRRARQESQKQNVKQPMKLGGSTESPESRSESRAEEVKTKQSRAEERRALEEANVRAYEEKQARAARKAEERHDPIRVKSRVKAPSSPIEGHLGRTAADVEAGRAEAAERMAQEDANIAAFNAKQAEAKKRLEEAEATAAERKASREARQANFNKTLEERRAAQKRYEESRENKDSGLKKYF

SEQ ID NO: 10531 - protein, 416 aa, unidentified
MPCSPAKARHLLDDGKAKVKKRTPFTIQLVYGSSGYTQEVILGVDAGSKTIGMSASTNKEELFAANVIPRNDVVDLLSTRREFRRSRRNRTTRYRQPRFNNRVGSKHKGWLAPSVEVKIQEHITAIKRVCNILPVSKVVVETAEFDLQLLKAIEQGNPIPQGEDYQRGEMYGHYNVRQYVLWRDGYTCQCCGAHSTNKKEVRLHVHHLESRKTGGDAPSNQITLCESCHKRFHKGLLTDKNLKKRKRRSTRDATFMGLMRPTLMQRLRAELAIPVVETRGYITKATREKLLILPKSHTNDALAIAQGKHGFKVGYLPGIKQVDKIYTVRPVRHHNRQLHKATILKGGGRKSNQAEKYVFGYRLFDKVLYQGVECFVFGRRSNGYFLLKKINGEKVKDGVSYKHLKLLERSQSYLVA

SEQ ID NO: 10532 - protein, 414 aa, unidentified
MPCSPAKARLLLKEKKAIVKRRTPFTIQLTIATGESKQPVSLGVDAGYKHVGFSASTEKAELYASEVELRQDVSDLLSARRALRQSRRNRKTRYRAPRFDNRIRTKRKSWLAPSVENRINAHLSRIEAVLRLLPVTKITVETASFDMQLLKNPDISGKEYQEGEQLGFWNVREYVLFRDGHVCQHCHGRSKDPVLNVHHLESRRTGGDSPGNLITLCETCHKALHRSEITLKTKRGQSFRAEAYMGLMRWEVLNRLKTSHPGLEVHNTYGYRTKYTRIVNGIDKSHCADAFCIAGNLGAERLGEFFFQKQTRRNNRQIHKLSILKGGIRKRNQAPFEVNGFRLFDKVACKGEEGFIFGRRSSGYFDVRKLDGTCISAGISYKKLHLLEKRRTYLTEIRKEEALPPLPEGRGLRA

SEQ ID NO: 10533 - protein, 470 aa, Anaerostipes sp.; identical to SEQ ID NO: 2825

SEQ ID NO: 10534 - protein, 412 aa, unidentified
MENNIEYCFVIDKDNQPLAPTKVNKGWYLIRKSRAKLKSMYPMVIQLNKKVESNENDKSYMACGIDDGFVHVGLAIVQKCPTKNKVVFKGTIEQRQDVKHLMDTRRGYRQYHRYHKRHRPARFNNRSSSKRIGRLVPSIKQKKDAILRVLYQLNKWIYIKEYYLEDVCIDIRSMTDNYKPYKWQYQKSNRLDENLRKAAIIRDNYKCQECGKSNCKLEVHHIRARKYHGADTIGNLITLCSKCHEKTEGKEKDFEDKYFKIISSKPKRFDYVMHVMQGKNYLRNKISNLGLLHLTNGGATANKRIEWNIEKSHSNDAICITDSIPDFCNIKEWTIKPMRRKSKAKTDNVLGIKHRDLVSYTYKNGETHIGYVTALYPEQLALNFQSKTKHCKKVNAQKCRLLWKFNKIYWLK

SEQ ID NO: 10535 - protein, 415 aa, unidentified
VLGQDGHPLMPTCRHGKVRRMLKSGMAKVVKRCPFTIQLQYESTIHTQEINLGIDAGSKTIGVSATTEKKVLYESEVILRNDIVGLLSGRRALRSSRRNRKTRYRKPRFDNRKKPDGWLAPSIRQKIETHVTVVGNVIKILPVTKIIVETASFDIQKIKNPEIEGEGYQHGEQLNFWNVREYVLFRDGHTCQCCKGKSKDSILNVHHIESRKTGGNAPNNLITLCETCHKAYHKGIITLPKEIYRGMRFRDAAFMGVMRWAFYDRLKELYNPLGVEVINTYGYITKNTRIEYGLPKEHYVDARCISGNPAAKHLGHYYFQKKVRCHNRQIHKNTILKGGTRKRNQAAYLVKGFRLFDKVKYQDQEYFIFGRRTRGSFDIRTLDGTKVNKGSISCKKLQLVEKSKHYLTEQRKVTA

SEQ ID NO: 10536 - protein, 520 aa, Parasutterella sp.
  VARIANT 51..97: note = X can be any naturally occurring amino acid
MPCSPAKARLLLKEKKAIVVRRTPFTIQLTIATGESKQPVSLDVDAGYKHXXXXXXXXXXXXXXXXXXXXXXXXXXXXXXXXXXXXXXXXXXXXXXXNKRGKPLMPCSPAKARLLLKEKKAIVVRRTPFTIQLTIATGESKQPVSLDVDAGYKHVGLSASTEKAELYASEVELRQDITDLLSARRALRESRRNRKTRYRAPRFDNRIRTKRKGWLAPSVENRINAHLSRIESVLRLLPVTKITVETASFDTQLLKNPDISGKEYQEGEQLGFWNIREYVLCRDRHVCQHCYGRSKDPVLNVHHLESRRTGGDSPGNLITLCETCHKALHRGEITLKAKRGQSFRAEAFMGIMRSEVPNRLKASHPELEVNNTYGYRTKHARIANDIAKSHCADAFCIAGNLGAERLCEFFFQKQTRRNNRQIHKLSILKGGIRKRNQAPFEVKGFRLFDKVACQGEEGFIFGRRSSGFFDVRKLDGTRISAGISCKKLHLLEKRRTYLTEIRKEEALPPLPEGRGLRAKM

SEQ ID NO: 10537 - protein, 442 aa, unidentified; identical to SEQ ID NO: 3161

SEQ ID NO: 10538 - protein, 436 aa, unidentified
VSSFFLAAFYRKEHGIMQYVYVLSKHGEPMMPCSPGKARLLLKQQKACVVRRTPFTIKLLYGSAGYKQPITLGVDAGSKHVGLSASTEKRELYREEFTPRNDVVELLSTRRQNRRSRRNRKTRYRAPRFDNRVHSKHKGWLAPSVEVKIQEHITIIKRICKILPISLVRVETAEFDTQRLKAMLAGKPLPVGTDYQLGEMYDEYNVRQYVLKRDNYTCQCCGAHTTAKKLVKLHVHHLESRKTGGNAPSNLVTLCTTCHKNLHKGKVTLDGKERGKPLRDAAFMGIMRKTLMARLKKELPIPVQGTYGYITKMRREQNDIKKSHTNDARCISKHPLAEPCSVCYRTKAIRHHNRQTHKANFSKKGIRKRSQMPYLVEGYRLWDKVLYKEQECFVSGRRSSGSFTLKKLDGTSVSKGVTFKKLRLLEPATNYLIERM

SEQ ID NO: 10539 - protein, 420 aa, unidentified; identical to SEQ ID NO: 8844

SEQ ID NO: 10540 - protein, 469 aa, unidentified
MSVFVVGLNGCRLMPTSEREARLLLKHGKASVYRKVPFTIKLNYKTGSTTQPGYLGIDTGSQHIGVSVVRKDGTVLHKEEISLRDSMTKRKLLEAKASLRRGRRYRKTRYRHPKWRPKTKRVYCEVPDKKGRHWQKQKNTFTSKRPEGWLPPSLQSKTDHHIRWIKKLQNFLPEGYRLSIELGRFDPARMKDPEIHGELYQKGPQYDYENVRAYVLDRDRYTCQVCKKKGGKLHVHHILYRSQGASDNPQYMVTVCSDCHTTENHLPGGILYQWMQEQKKFTRGLRDATFMNLLRKRLMKTFTDAVFTYGNITKVDREKLKLSKNRGNDATAIALVRTGVTSVKDEEPVLYIQQVRRKRSLHEETPRKGRKEPNRTAARNSKNTKAVTVTKRRGGKKVSVTACLFDRVELNGKKGWITGFTGKACRIVDTEGNYVAATDKYTQVNISSIRILHHTGNWVTGLKRNVGKR

SEQ ID NO: 10541 - protein, 431 aa, unidentified
MPNKVYVINKHGRPLMPCSPAKARHLLDAGKAKVKKRTPFTIQLVYGSSGYTQEVILGVDAGSKTIGMSASTTKEELLSAEVKPRNDVVDLLSTRREFRRARRNRKTRYRKPRFDNRVRSKHKGWLAPSVEVKIQEHITAIRRVCGILPVSKVVVETAEFDLHLLKAIADGKPVPQGEDYQKGEMYGHYNVRQYVLWRDNYTCQCCGTHPSKKKEVRLHVHHLESRKVGGDAPDNQVTLCESCHEKLHKGLIAEKDFKKRKRKSTRDATFMGIMRKTLMQRLCSELPIPVVKTRGYITKATREKLLVLPKSHTNDALAIAQGKRGFNVGYLPEIAQIDKIYTIRPVRHHNRQLHKATILKGGIRKSNQTEKYVFGYRLFDKVQFNGQDCFIWGRRTTGIFTIKTINGKMIKDGISFKKLKLAEKSTSYLIA

SEQ ID NO: 10542 - protein, 415 aa, Bacillus sp.; identical to SEQ ID NO: 4797

SEQ ID NO: 10543 - protein, 415 aa, Clostridium sp.
MENKIEYCFVVDKNNRPLAPTKVNKGWYLIRKGRAKLKSKYPMVIQLEKEVEPDDEDESHMVCGIDDGSSHVGIAIVQKCPSKNKVVFKGTIEQRQDVKHLMDVRRGYRQYRRYHKRYRKPRFNNRASSKKTNRLAPSIKQKKDSILRVLYQLNKWINIKEYYLEDVAIDIRAMTDGYKPYNWQYQKNNRLDENLRKATILRDSCKCQECGKTNTVLEVHHIRAKRFGGANTIGNLITLCSSCHQKTEGKEREFEERYFTKIKSKPKRFDYAMHVMQGKNYLRENIKQLGILHLTTGGDTANKRIEWNIEKSHSNDAICITNCFPDTCNIKEWMIKPMRRKSKAKTDNVLGIKHRDLVEYTYRNGETHKGYVTALYPHLNALNFQSPTKHCKKVNVRKCRLLWKYNKIYWLDSVI

SEQ ID NO: 10544 - protein, 345 aa, unidentified
VYMSEVVGRNDITDKMTQRAKYRRNRRNRKTRYRKARWLNRASSIKKDRFSPTMQSKLHSHVREIEYIQSILPVTEMVFETGQFDMQLMKNPSLANPKVRPWGYQKGANYGFENTKAMVLNRDNYTCQCCKGKHKDSKLEVHHIVFRSQGGSDEESNLLTLCHTCHKDLHSGKINPKLSGKVKGNLKYATQMNSIRKQLFRFYPNAIETFGYVTKANRLHLGVDKEHYYDACTIATQGNAFNVKSNLYKKKCVSDGDFQKTKGIRSEQPIVTDKICGFRKFDKVRYFGNDYFIKGRMSTGYAILMDIDGNKIDFSTMPRGYKTPKLSNCKRITARSTVMTQVKVV

SEQ ID NO: 10545 - protein, 426 aa, unidentified
  REGION 1..426: note = Ga0373628_0000021
MQQLQLKLNNIPTNASLVCSSISFDLNKDVSLSDQDKVLDCNNLEVNQRLHTSGLKDIVYVLNVNAQPLMPCSCAKARKLLKKRRANVVKNYPFTIRLTFNCENVVQDVMLGIDSGFKYIGYSAITKTKELISGTLTLDCQTISRLANRRMYRRNRRDRLWYRKSRFNNRKSSKKGWLSPSIKRKYNTHVNLINKLKKLLPIKEVIIEVAKFNSNIKSSKLIDNSKCQLCHKNFSNTNHVNEHHIITRLYGTNRKANIAYVHESCHKKIHKNKMLDMFEKDKIYRQSAFMNIISKRFLEDGYKTIFGFDTFNKRQVYNLEKTHTDDAFIIAGGDNQERAINKNVVQKHRNNRILQLNRKGFKRSIRRQRFKIQPKDLIWINNKKYISKGCFGKRKRVTYNDENGKSCQQYIDRIDKYYNFGSLIFL

SEQ ID NO: 10546 - protein, 493 aa, unidentified
MAAVYVISASGKPLMPTTRCGHIRGLLNAGKARVVEREPFTIQLKYETPDVTQPLYLGIDPGRTNVGSAVVREDGECVFTAQLTTRNKDVPKLMKARKQFRMAHRRLKRRCKRQRRAKAAETLSQKGEFQRLLPGYEEPILCKGIRNKEARFNNRQRPAGWLTPTANHLLLTHLNMVKKLQKLLPITDVVLEVNRFAFMAMENPSIRRWQYQQGPLYGKGSVEDAVYAQQDGHCLFCGKPIAHYHHVVPQHKNGSETLENRVGLCNEHHDLVHKDRAWDAKMKETKAGLNKKYHALSVLNQIIPALTEQLTAMFPQHAFVTTGKDTANFREDYGIAKEHHLDAYCIACSVLAEPTKVAAPTGKPHRLMQFRRHDRQVCHKENIKRVYLSEGKAVATNRHKAIEQKDDSLEEFRKTHTQQEVSALTVKDHQPVYKDMRRFMPGGVFLFNGKVHTLQRSHGRYKGMPFYYIDTDGSKNHAKGCIFLQQNCGLRWV

SEQ ID NO: 10547 - protein, 413 aa, unidentified; identical to SEQ ID NO: 2636

SEQ ID NO: 10548 - protein, 420 aa, unidentified; identical to SEQ ID NO: 7011

SEQ ID NO: 10549 - protein, 431 aa, unidentified
MVYVLDINGQPLMPTTRHGKVRRLLNSHLAKVVKRCPFTIQLLYQSTKEIQPVSLGVDAGSKHIGMAATTEKKVVYQEELSPRNDVVKLLSLRRASRSSRRSRKTRYRKPRFNNRVHSKHKGWLAPSVEVKIQEHITAIKRICQILPISEIHVETAEFDLQRLKAVEEGRTLPVGTDYQLGEQYDFYNTRQYVLHRDGYTCQCCGTHDNNIKLHVHHIESRQTGGDAPSNLITLCEHCHKALHKGKLELPKGKKRGKTYRDATFMGIMRKTLLERLRKEVDVPASGTYGYITKYWRERAGLEKSHINDAICISKYPYAKPLDTYYLTKAVRNHNRQIHKSNFSKGGIRKRNQAPYLVKGFRLFDKVLYQGKEYFIFGRRATGYFDIRTLDGTKVNKGSISYKKLRIQDTAKAYLKEARAIPHMNKFTCVLA

SEQ ID NO: 10550 - protein, 518 aa, Erysipelotrichaceae sp.; identical to SEQ ID NO: 7410

SEQ ID NO: 10551 - protein, 430 aa, unidentified; identical to SEQ ID NO: 4504

SEQ ID NO: 10552 - protein, 350 aa, unidentified
LRYRKPRFDNRKRGEGWLAPSLEHKKQLNIRLIERYVSVIPITHATVEVGSFDTMLLQAIQKGKSKPEGVDYQKGPRYNLATLREAVFYRDNYTCQVCGRKIADGAILHMHHMFYWKGRHGYQLDELVTACEKCHTPANHQKGGKLFGFGEDKEFANLSGAAFMNAVRWQIVDALHATYGKEFVTITYGAMTKEKRIILGIEKTHNNDAYAMGDYHPVHRCVFRHYQKRRRNNRVLEKFYDATYIDTRTGNKAKGKELFNGRISRNHKKNSEDLHKYRSKKVSKGRRSIRRQRYAIQPYDTVRLESKTYITSGCHNKGTRLLIPANGKSKSVAISKVQVVCHAGAWIQII

SEQ ID NO: 10553 - protein, 430 aa, unidentified; identical to SEQ ID NO: 4002

SEQ ID NO: 10554 - protein, 416 aa, unidentified
VSEITSYAFVLDVNGKPLAPTKEQKAWFLIRKKRAALVSKYPMVIQLKKEIPENKICKDEIRCGIDDGGLHVGIALVQKCKTKNKVVFKGTIEQRNDVKHLMEVRRGYRRYHRYYKRYRQARFDNRKSSKRKERIAPSILQKRQATMRVIHRLNKWINITNYWLEDVSVDIRALTDGYKPYRWQYQKSNRLDENIRKAAILRDGSKCMECGRANCRLEVHHIKPRRRNGSNTLDNLITLCESCHQKTEGQEELYMDRYFSLLKSSDHKNLNYAQHVMIGKKWLRKQLSNLGVLYLTNGGDTANKRIDWNVEKSHANDAVCITDLQPDTYDMKEWAIKPMRRKSKAKTDNVLGIRHRDLVEYTFKNGETHRGYVTALYPEQKAINFQSPTKHCKKVNARKCKLLWNYSKIYWFENAS

SEQ ID NO: 10555 - protein, 428 aa, unidentified
LKVFVLNMRGQPLMPCSPAKARHLLKAGKAVVKRRTPFTIQLRIATGETKQNVTLGVDAGAKHVGLSATTEKEEVFASEVELRQDITGLLAARLSLRRDRRHRKTRYRAPRFLNRVRSKHKGWLAPSVENRIQAHMSRIDAICGLLPVTKIVIETASFDIQKIKHPDVEGTDYQQGDQLGFWNVREYVLFRDGHVCQHCHGRSKDKILNVHHLESRQTGGDAPNNLITLCETCHKAYHAGKIKLKVKRGQSFRAEAFMGIMRWTLLDRVRKAHPGLPVENTCGYLTKNTRITPGLPKAHCVDACCIAGNLKAVRRGVCLHQRQMRKHNRQIHKCTILLQTLEDGTKIGYRKLNQTPHMVKNFRLFDKVRCLGQTGFIFGRRSSGYFDVRRLDGVKISSCISYRKLTLLEKRSTCLTELRKEDGASSPV

SEQ ID NO: 10556 - protein, 416 aa, unidentified
MVYVLDKNGQPLMPTDRHRKVRLMLQSGQAKVIKRCPFTIQLNYDSGHQTQEISLGIDAGSKHIGVSTTTKIKVLYEVDVELRNDIVDLLSSRRELRRGRRNRKTRYRQAKFNNRRRGNGWLAPSIRQKIGTHLTVVENICKMLPISRIMVETASFDIQKIKNPDIQGAEYQQGDQLEFWNVREYVLFRDGHTCQCCKGKSKDKILNVHHIESRKTGGNAPNNLITLCETCHTGYHKGTVQLPKAIKRGMRFKDAAFMGIMRWAFYKALKQQYEPVGTPVHNTYGYITKHTRIAYNLPKEHYVDARCISGNPEASSNGEYYYQKKVRCHNRQIHKLTVLKGGIRKQNQATYLVKGYRLFDKVSYQGKGYFVFGRRQSGFFDIRTLSGEKVNKGSLSCKKLKFIATRTYYLTERRAV

SEQ ID NO: 10557 - protein, 485 aa, unidentified
MRHKARKGNSFTGAAVAVFVLDRRGRPLMPCTEKRARLLLARGRARVHRVMPFVIRLTDRKADACSFQPLRVKLDPGSRVTGIALVREADDGIAVLNLFELVHRGRQISEALTARRAFRRRRRGTNLRYRAPRFLNRSKPEGWLAPSLMHRVHTTMAWVNRIRRLAPVAALSSELIRFDMQALENPEVSGVGYQQGTLAGYEVREYLLEKWNRTCIYCDATDRPLQVEHLTARARNGSNRIGNLGLACGGCNQEKGSLNVREYVKDPKRLARILAAASRPLKDAAAVNATRRALADALRATGLPLELASGGRTKFNRVTHGIPKTHALDAVCAGCVNAVRDWQRPSLTIAATGRGSYQRTRLTRYGFPRGYLMRQKQVQGFQTGDHVRADVPHGKRAGVHTGRVAVRATGSFNIQTATAVVQGISHRHCTLIQRGDGYAYLQPKDSFRQEDAGDGRASHAALSLPGMNPGFLAQSDDFEIDFQGI

SEQ ID NO: 10558 - protein, 415 aa, unidentified
MVYVVANDGQPLMPTERHGKVCRMLKSGMAKVVKKCPFTIQLQYESERNVQPVSLGVDAGSKHIGISATTKTKVLYESDVELRDDIVKLLATRRQLRRSRRSRKTRYRPARFDNRKRKEGWLAPSIRQKIGSHLTVVANACKILPINQIIVETASFDIQKIKDPEIQGIEYQQGEQMDFWNIREYVLFRDGHICQCCKGRSKDKILNVHHIESRKTGGNAPNNLITLCETCHKGYHNGTVILPKNIKHGMQFKDAAFMGIMRWTFYNTLKEQYEPDIPVSMTYGYLTKNTRIEHGLPKEHYIDARCISGNPDAVSDGTYYYQKKVRCHNRQIHKQTILKGGIRKSNQAEYLVKGYRLFDKVRYQGREYFIFGRRKSGFFDIRTLSGEKVNKGSISVKKLTFADTRKNYLIERRTV

SEQ ID NO: 10559 - protein, 480 aa, unidentified
LYTKPLDNIGEGSLPPSGEINLKGMTFMVYVKSIDGKALMPTSNAKARKLLKQKKAKVVSLRPFVVKLTYKTKTEYTQKLNLGVDSGYSNIGFSVIDAKQEYIAGEVKLLEGMKKRLLEKASYRRIRRSRLRYRKARWNNRVKSKKKGWLAPSLKHKLDTHIKFIDYLKDILPIGKITIEVANFDIQKMKYDLISGIDYQNGDMFGFWNMREFVLHRDGHKCQNPNCKHKDKKEQILKVHHIRYRSEGGSDRPENLITLCSKCHTPVNHRKGKFLYDWCVNGKKVRGFKEATFMSMIRWYLVNELKSKHNNVYITYGYITKNHRIQNGIEKSHLNDAFAIAKGTNQARTKDRFLVIQDRLKNRSLEKFYDSKIIDIRIGKKVSGGDLNCGRSTRNKNLNTENLRKYRGAKISKGQRRIRKQKYFYKPNDLVKYDGKVYTVKGTQNEGKYIALKEIKKVPKVELLIPYVFKKGLNWSYGLC

SEQ ID NO: 10560 - protein, 512 aa, unidentified
MSTVYVLNKDGKPLMPTTRGGHVRHLLKEQKARVVRAKPFTIQLLYETNDVVQPLYLGIDPGRTNIGVAVVKANGTAVFTAHLETRNKEIPKLMQDRKKARRARRTNGRRCRRQRRAKANGTISKKCVKQTTAQNGSVSKRAKDIGVIKRRLPGCEKDVLCIGIKNKETKFTNRTRPEGWLTPTANQLLQTHINLVKKIQKFLPISDVVLEVNKFAFMRLNNPNIQKWQYQQGPLYKKESLESAVSEIQEHHCLFCKKPIDHYHHVVPQHKNGSNTIGNIVGLCAKHHDLVHKDSAWEKKLAKKSTGLYKKYGALGVLNQIIPTLTNELSSLFPKHSFVTNGKSTYDYRAAHGVSKDHWLDAYCIACSVLPSNVCDSNINNHMPYVLKQFRRHDRRVLNNENMNRVYTLNNKAVAINRHKAKDQKTVSLEEFRKEHPDDVCKLKVKEHHPTYRNMNRNFPGSVFLVGKQIHVMQGIASSKDGKATKYNDTSATAIAAGKCKFVAKNTGILFV

SEQ ID NO: 10561 - protein, 431 aa, Escherichia sp.; identical to SEQ ID NO: 3801

SEQ ID NO: 10562 - protein, 450 aa, unidentified
VTTILKTCFAAFNLAKVVVLMDAWDIIVVLNKRGKPLMPCSPAKARLLLKEKKAVVVRRTPFTLQLTIATGEAKQAVSLGVDAGYKHVGLSASTKKAELYASEVELRQDITDLLSARLALRRSRRNRKTRYLAPRFDNRIRTKRKGWLAPSVENRINAHLSRIEAVLRLLPVTKITVETASFDMQLLKNPDIAGKEYQEGEQLGFWNVREYVLFRDGHVCQHCHGRSKDPVLNVHHLESRRTGGDSPGNLITLCETCHKALHRGGITLKAKRGQSFRAEAFMGIMRWEVLNRLKASHPELEVNNTYGYWTKHARIANGIAKSHCADAFCIAGNLGAERLGEFLFQKQTRRNNRQIHKLSILKGGRRKRNQASFEVKGFRLFDKVACKGEEIFIFSRRSSGYFDVRKLDGTRISAGISYKKLRLLEKRRTYLTEIRKEAFSPLPEGRSLRA

SEQ ID NO: 10563 - protein, 423 aa, Turicibacter sp.
  VARIANT 423: note = X can be any naturally occurring amino acid
LRVFVLNKRGKPLMPCSPAKARLLLKEKKAIVVRRTPFTIQLTIATGESKQPVSLDVDAGYKHVGLSASTEKAELYASEVELRQDVSDLLSARRTLRRARRNRKTRYRAPRFDNRIRTKRKGWLAPSVENRINAHLSRIETVLRLLPVTKITVETPSFDMQLLKNSDISGKKYQEGEQLGFWNVREYVLFRDGHVCQHCHGRSKDPVLNVHHLESRRTGGDSPGNLITLCETCHKALHRGEITLKAKRGQSFRAETFMGIMRWEVLDRLKASHSKLEVQNTYGYRTKHARISNGIAKSHCADAFCIAGNLGAERLGEFFFQKQTRRNNRQIHKLSILKGGIRKRNQAPYEIKGFRLFDKVACQGEEGFIFGRRSSGYFDVRKLNGTHISAGISCKKLRLLEKRQTYLTEIRKEEALPPLPEGX

SEQ ID NO: 10564 - protein, 414 aa, unidentified; identical to SEQ ID NO: 2588

SEQ ID NO: 10565 - protein, 416 aa, unidentified
MVYVLDKNGQPLMPTDRHRKVRLMLQSGQAKVIKRCPFTIQLNYDSGHQTQEISLGIDAGSKHIGVSATTKIKVLYEADVELRNDIVNLLSSRREFRRGRRNRKTRYRQAKFNNRRRGNGWLAPSIRQKIGTHLTVVENICKMLPISRIMVETASFDIQKIKNPDIQGAEYQQGDQLEFWNVREYVLFRDGHTCQCCKGKSKDKILNVHHIESRKTGGNAPNNLITLCETCHTGYHKGTVQLPKAIKRGMRFKDAAFMGIMRWAFYEALKQQYEPVGTPVHNTYGYITKHTRIAYNLPKEHYVDARCISGNPEASSNGEYYYQKKVRCHNRQIHKLTVLKGGIRKQNQATYLVKGYRLFDKVSYQGKGYFVFGRRQSGFFDIRTLSGEKVNKGSLSCKKLKFIATRTYYLTERRAV

SEQ ID NO: 10566 - protein, 419 aa, unidentified; identical to SEQ ID NO: 3628

SEQ ID NO: 10567 - protein, 414 aa, unidentified; identical to SEQ ID NO: 2588

SEQ ID NO: 10568 - protein, 416 aa, unidentified
LRVFVLNKRGKPLMPCSPAKARLLLKEKKAIVVRRTPFTIQLTIATGETKQPVSLGVDAGYKHVGLSASTEKAELYASEVELRQDITDLLSARRALRQSRRSRNTRYRAPRFDNRIRTKRKGWLAPTVENRINVHLSRIETVLRLLPVTKITVETASFDTQLLKNPDIAGKEYQEGEQLGFWNVREYVLFRDGHVCQHCHGRSKDPVLNVHHLESRRTGGDSPGNLITLCETCHKALHRGEIKLKAKRGRSFRAETFMGIMRWGVLNRLKASHPKLEVHNTYGYRTKHARIANGIAKSHCADAFCIAGNFGAKRLGEFFFQKQTRRNNRQIHKLSILKGGIRKRNQAPFEVKGFRLFDKVACQGEEGFIFGRRSTGYFDVRKLDGTCISAGISYKKLHLLEKRRTYLTEIRKEEAL

SEQ ID NO: 10569 - protein, 420 aa, unidentified; identical to SEQ ID NO: 10478

SEQ ID NO: 10570 - protein, 418 aa, unidentified
MVYVLGQDGHPLMPTCRHGKVKRMLKSGMAKVVKKCPFTIQLQYESTTHTQKINLGIDAGSKTIGVSATTETKVLYESEVALRNDIVELISGRRALRSSRRNRKTRYRKPRFDNRKRPDGWLAPSVRQKIETHITVVENVMKILPVTKIIVETASFDIQKIKNPEIEGVGYQHGEQLDFWNVREYVLFRDGHTCQCCKGKSKDNILNVHHIESRKTGGNAPNNLITLCETCHKAYHKGIITLPKEIHRGMRFRDAAFMGIMRWAFYDRLKELYTPFGVTVVNTYGYITKNTRIEYGLPKEHYVDARCISGNPAAKDLGHYYFQKKVRCHNRQIHKNTILKGGIRKRNQAAYLVKGYRLFDKVKYQNQEYFIFGRRSSGFFDIRTLDGTKVNKGSISCKKLQLVEKSKHYLTEQRKVTT

SEQ ID NO: 10571 - protein, 424 aa, unidentified
MVYVLSKEGTPLMPTNRRGRVRHLLDAGEAKAVKRCPFTIQLLYQSTTYTQEITLGVDAGSKTIGLSASTEKKELYASETRLRMDITDLLSVRRQFRRTRRNRKTRYRKARFNNRVHAKHKGWLAPGIEAKIGTHFRAVRDVCRILPVTEIIVETASFNLQKIKALEKGEPVPEGTDYQKGDQLGFWNVREYVLWRDGYKCRCCNGKSKDQVLNVHHIESRKTGGDAPNNLATLCGYCHKQYHKGTILLPKSVRRGNSFRDAAFMGIMRRTFYNRLKEQYPRVAMTYGYITKNTRIRNSLPKTHYADARCIAGHPQAEPLEVYYFQKKVRCHNRQIHKSNILKGGKKKRNQAEYLVKGYRLYDRVRYQNREYYVFGRRASGFFDIRTLGGNKGNKGSVSCKKLRFLEPRKTMLIERRMQEREAV

SEQ ID NO: 10572 - protein, 414 aa, unidentified
MVYVINKQGQALMPTERFGKVRRLLKNSLAHVVCRIPFTIQLDYDTTDYTQPVSLGVDAGSKHIGISATTSEKELYAADVELRNDIVDKLSTRREQRRTRRSRLRYRKARFNNRVSSKRKGWLAPSVENKIQTHLTVVEKIHKFLPITNIVVEIASFDIQKINNPIISGSEYQQGEQLDFFNVREYVLFRDNHICQHCKGKSKDKVLNVHHIESRKAGGDSPNNLITLCETCHKAYHRGEFELNVKRGKSFRDAAFMGIMRWSFYDRLKNIYPNVSMTFGYITKNTRITNNLPKDHYVDARCISGNPTAKPLGYYFYQKKVRCQNRQIHKANFLKGGRKKLNQAPFLVKGFRLFDLVEYQKELYYIFGRRSSGSFDIRKLDGTKVNKGSINCKYLRLIATRKSILTEKRMQVNL

SEQ ID NO: 10573 - protein, 465 aa, unidentified
MNTNFVFVLDTDRRPLSPCRPARARELLRKGKAAVFRRYPFTIILKRAIPDATPTPCQVKLDPGSKTTGLALVQGEKVIWGGELHHRGHQIKERLASRAALRRGRRNRLRYRKPSYRTKAQINNAKATYARKRAAGWLPPSLQHRIETTMTWVNRLMRFAPVGELTQELVRFDMQRMENPEVSGVEYQQGELAGYELKEYLLQKWGRKCAYCGKENVPLEVEHIHCRSKGGTDRVSNLTLSCVPCNQKKGNRPIEEFLKNKPDVLKRVLAQAKRPLKDAAAVNATRWALFHRLNATDLPVTVGTGGQTKFNRKRFGIDKAHWKDAACVGDMAAITFATDTALDITCKGQGGRQKAVVDRYGYPKQHRPLKPIHGWRSGDIARCNGQVGRISPRARGSFELRPFSGGKPFSRPMRQFERLHVTSIRLDEVYAEKRRYFAAVTNRFSQQQFNNRRGCVCQKNIPLWQ

SEQ ID NO: 10574 - protein, 413 aa, unidentified; identical to SEQ ID NO: 3616

SEQ ID NO: 10575 - protein, 470 aa, unidentified; identical to SEQ ID NO: 2825

SEQ ID NO: 10576 - protein, 320 aa, unidentified
RAPRFDNRIRTKRKGWLAPSVENRINAHLSRIEAVLRLLPVTKITVETASFDLQLLKNPDISGKEYQEGEQLGFWNIREYVLCRDGHVCQHCYGRSKDPVLNVHHLESRRTGGDSPGNLITLCETCHKALHRGEITLKAKRGQSFRAEAFMGIMRWEVHNRLRALHPGIEVSNTYGYRTKHARIANGIAKSHCADAFCIAGNLGAERLCEFFFQKQTRRNNRQIHKLSILKGGIRKRNQAPFKVKGFRLFDKVASQGEEGFIFGRRSSGFFDVRKLDGTRISAGISCKKLHLLEKRRTYLTEIRKEEALPPLPEGRGLRA

SEQ ID NO: 10577 - protein, 414 aa, Parasutterella sp.; identical to SEQ ID NO: 8883

SEQ ID NO: 10578 - protein, 413 aa, unidentified; identical to SEQ ID NO: 3587

SEQ ID NO: 10579 - protein, 413 aa, unidentified; identical to SEQ ID NO: 2636

SEQ ID NO: 10580 - protein, 430 aa, unidentified; identical to SEQ ID NO: 9911

SEQ ID NO: 10581 - protein, 416 aa, unidentified
MVYVLSQNGQPLMPTENHAKVRVFLKQGKAKVVQRCPFTIQLLYESTTHTQKINLGIDAGSKTIGISATTDSKVLYEAEVVLRNDIVELLSGRRALRRSRRNRKTRHRKPRFDNRKKPDGWLAPSIRQKIETHVTVVENITKILPMTKIIVETASFDIQKIKNPEIEGAEYQHGEQLDFWNVREYVLFRDGHTCQCCKGKSKDNILNVHHIESRKTGGNAPNNLITLCETCHKAYHKGIITLPKEIHRGMRFRDAAFMGVMRWAFYDRLKELYNLLGVEVINTYGYITKNTRITYDLPKEHYVDARCISGNPAAKPMDYYYLQKKVRCHNRQIHKCKINKGGTRKRNQAAYEVKGFRLYDQVLWKGQKCFIFARRSTGRMDLRLLDGTHVNASVGYKNLKLLSMRKNYLIEQRKAG

SEQ ID NO: 10582 - protein, 456 aa, unidentified
MNTCVCVLSNSGERLMPTFRLGKVRHLLKDGKAKIVKHHPFTIQLLYDSKTNTQPIEICEDVGYNYIGISAKSKSHEYVSAQYDTLQDEKEHHDDCRKMRRTRRNRLRYRKPRFDNRKRSEGWLAPSLKHKKELNVNVVKMYCAVMPITHATVEVGSFDTMLVKAIQEGKAIPEGADYQKGPRYNLATLREAVFYRDNYTCQVCGRKITDGAILHMHHMFYWKGRHGYKLDELVTACEKCHTPANHQKGGKLFGFGDDKEFADLSGAAFMNAVRWQIVNALHTTYSKEFVTITYGAMTKEKRIALQLEKSHNNDAYAMGDFHPVHRCGFRHYQKRRRNNRVLEKFYDATYIDTRTGNKAKGKELFNGRISRNHKKDSENLHKYRSKKVSKGRRSIRRRRYAIQPYDTVRLEGKTYITSGCHNKGTRLLIPVNGKSKSVAISKVQVVCHAGPWIQII

SEQ ID NO: 10583 - protein, 413 aa, unidentified; identical to SEQ ID NO: 2636

SEQ ID NO: 10584 - protein, 470 aa, unidentified
MSVFVVGLNGCRLMPVSERKARLLLKGGKASVYRKVPFTIKLNYKTGSTVQPGYLGIDTGSQHIGVSVVRQDGTVLHKEEIGLRDSMSKRKLLESRASLRRGRRYRKTRYRHPKWKPKTKRIYSEKADRKGRHWKKQKNMFTSKRQAGWLPPSLQSKTDHHIQWIRKLLHLLPEGYRLSIELGRFDPARMKNPGIHGELYQKGPQYDYENVRAYVLARDGYTCRVCKKKGGKLHVHHILYRSRGASDDPKYMAAVCSNCHTTENHLPGGILYQWMQDQKKFTRGLRDATFMNILKKRLRRAFPDAVFTYGNITKADREKLGLPKSHGNDATAIALVKTGVTSVRDEEPVIHIQQVRRKKRSLHEETPRKGRKEPNRTASRNDKNTRSVTVSKGSGKKKVSMTACLFDRVELDGKKGWITGFTGTSCYVKDKEDNYICTSPKYKQVSISKLRILHHCGNWVIGAEKPLGKG

SEQ ID NO: 10585 - protein, 512 aa, unidentified; identical to SEQ ID NO: 4350

SEQ ID NO: 10586 - protein, 397 aa, unidentified
MDTGYIHIGASVKSEKHEYLGEQIDTLTDERQKHDACRMYRRQRRNRKRHRQPMFNNRKRDDGWIAPSLEHKKNIHIQTVSRICKVMPVTNITLEMGNFDTQVLKAREEGRPLPHGLDYQHGERYSVATLREAVFLRDGYTCQCCGRTIKDSAILHVHHVVYRSQGGTNRMSNLITVCDKCHTPANHKPGGKLYGWKPKVASFKGATYMTTIRWKLYNEVKALFPDIDIHITYGAETKERRRIFDITKSHVNDAFAMGQFHPKHRLKPVCYKKKRRNNRCLEKFYDAKYIDSRDDKKRTGHELFNGRISRNHKKDSENLRQYRRQKISAGRRTIRKQHYAIQPHDIVIFDGEKFETSGCHNNGTRAILLPQKKSVAIKKLNIYRYAGGYFKSAFNKK

SEQ ID NO: 10587 - protein, 431 aa, Klebsiella sp.; identical to SEQ ID NO: 2435

SEQ ID NO: 10588 - protein, 413 aa, unidentified; identical to SEQ ID NO: 2636

SEQ ID NO: 10589 - protein, 515 aa, unidentified
MTALEEKLSKTEYIYVLGFDGKPQMPTRRKRHVLKLLKTGRARIAEDIPFTIRLTYRNAPVLQPVTLAEDPGRTNIGAAVLSPLGDLLFAAVIETRNKEIKKLMADRQKSRQASRRGERKARQRLAKRYGSMVKSGMVMRKLPMYAADKFVICKFIRNTQARFCNRKRCPDWITPTVQHLVQTHLNIIRKISRYLPVTDIAFEVNRFAFMHMENPEAMGVDFQNGPLKGYGDVKEAIRTQQHGKCLMCKKPITHFHHIVPRSRGGSDTIQNLAGLCTECHTKVHTDTAFRKDFDEKKSGQLKKYGALSALNQAVPFICKKLLEEYGEEHVHFCRGLDTSLIRTAFGFEKTKKNQMHEVDAYCIGLAALEVNEVETPAFDHTFQIRQFRRQDRSIIHHQTGRSYYQGKEKVAQNRKPGLEQKTTALSQWYKEQIRIHGEKEAEKLRSQLRVEKSCRHYNDMDRFLPGAVFLYEGKRYVLSGRITNGKYLRACGQGMKNFPAAECTFIRHNAGLVFI

SEQ ID NO: 10590 - protein, 433 aa, Scytonema sp.; identical to SEQ ID NO: 8889

SEQ ID NO: 10591 - protein, 413 aa, unidentified
MTNYAFVLDANDKKLAPTKEQKAWFLIRKKQATLVSKYPMVIQLKKKIPDNEICKNEIRCGIDDGGLHVGVALVQKCQTRNKVIFKGTIEQRNDVKHLMDARRGFRRYHRYHKRYRPARFDNRKSSKRKERIAPSILQKRQATIRVIHQLNKWINITNYWLEDVTINIRALTDGYKPYRWQYQKSNRLDENIRKAVILRDGCKCMECGKSNCRLEVHHIKPRRLKGSNTLGNLITLCTKCHQKTEGVEELYMDRYFALLNSSDNKNLNYAQHVMIGKKWLREQLSNLGMLYLTNGGDTANKRIDWNITKSHSNDAICITDLRPDTCEIKEWVIKPMRRQSKAKTDNVLGIKHRDLIEYTFRNGETHRGYVTALYPEQNALNFQSSTKHCKKVNARKCKVLWKYSKIYWLDNVS

SEQ ID NO: 10592 - protein, 493 aa, unidentified; identical to SEQ ID NO: 2644

SEQ ID NO: 10593 - protein, 418 aa, unidentified; identical to SEQ ID NO: 4934

SEQ ID NO: 10594 - protein, 384 aa, unidentified; identical to SEQ ID NO: 4952
  VARIANT 384: note = X can be any naturally occurring amino acid

SEQ ID NO: 10595 - protein, 448 aa, unidentified; identical to SEQ ID NO: 9395

SEQ ID NO: 10596 - protein, 443 aa, Anoxybacillus sp.
MVEENMTCAMQRKGENPVVFVLDTNKRPLAPCHEAVARKLLKQGKAAIYKRFPFTIILKKAVDASETKTEYRLKVDYGSRHTGLAIVRGKEVLWLAQLDHRTDIKERLDKRRAFRRSRRNRKMRYRKARFLNRKRKEGWLPSSLASRVQNIQTWVNRLKKVCPIEHVSYESAKFDTQLMRNPEISGVEYQQGTLQGYEVREYLLEKFGRKCCYCGKEHVPLEVEHIIPKSRGGTDRVDNLCLACHDCNQKKGNQTAEEFGYPHIQKQVKEPLKDVAIVNTTRWKVYEVLKQSGLVVECGTGARTKMNRIRLGLPKTYYFDACCVGESTPNHLHFKTKEVLFIKAKGRGSRSRTNLDKYGFPRGYLARQKFFFGFQTGDMVKAAVPKGKYKGVWFGEVACRKSGSFDIKGRDGKRIAQGINYKYIRLIQRLDGYTYRKEGMKLA

SEQ ID NO: 10597 - protein, 412 aa, unidentified
  REGION 1..412: note = Ga0315279_10001675
MVYVLSKEGKPLMPTNRHGKVRHLLKDGKVKVTKRTPFTIQLLYNSEEYTQPITLGIDSGYQNIGLSAVTESQEVFSAEVKLRTDIVKLNSERRQYRRSRRNRKTWYREPRFLNRKKDNGWLAPSIQHKIDSHIKLIDTVKKILPITKINIEVANFDIQKIKNQDIEGIGYQNGDQSGFWNIREYVLYRDGHICQHCKGKCGDKILEVHHINTRQTGGDRPDNLITLCGLCHEKVSQNKLQLKIKVSKGYKSESFMSMVRWRLVNIIREMGDIVSHTYGYITKGNRIALGISKSHANDAFVIAGGAKGISQTRLNSYLIQQVRKCNRKLYKGIRSHIKNTASRFVNGFQRFDKILFESIECFIFGRRATGRFDIRLLDGTVVSSSVSYKQLTLLECSSTLLIERGSGNSSNS

SEQ ID NO: 10598 - protein, 512 aa, unidentified; identical to SEQ ID NO: 4031

SEQ ID NO: 10599 - protein, 451 aa, Blautia sp.
MPVAVISKTGERLMPTSEHRARKLLKSGKAIKYSYHPFTIQLTKRESGDVQPIELCVDTGYTHIGISVKSEKHEYLAEQIDTLTNEKARHDACRMYRRQRRSRKRYRQPRFNNRKRNDRWIAPSLEHKKSIHIQAILRICKVMPVTDITLEMGNFDTQVLKAREEGKPLPQGVDYQHGERYGITTLREAVFARDGYTCQCCGRAIKDGAILHVHHIVYRSQGGTNRMSNLITVCDKCHTPANHKQGGKLYNWKPKIASFKGATYMTTIRWKLYNEVKALFPDIDIDITYGAETKERRRALDIDKSHVNDAFVMGQFHPKHRSKPICYKKKRRNNRCLEKFYDAKYIDSRDGKKRSGQELFNGRISRNHKKDSENLHQYRLQKVTPGRRAIRRQHYPIQPHDIIVYNGNKIEVSGCQHKGTRVVFSKTKKSVQVSKIKLFKYAGGYSKSVFN

SEQ ID NO: 10600 - protein, 419 aa, unidentified; identical to SEQ ID NO: 6355

SEQ ID NO: 10601 - protein, 396 aa, unidentified; identical to SEQ ID NO: 7299

SEQ ID NO: 10602 - protein, 424 aa, unidentified; identical to SEQ ID NO: 3434

SEQ ID NO: 10603 - protein, 552 aa, unidentified
MTSCTCTVFPAYNYAKASSSQGKHNPLLRQGRLIVKEVAYMSTVYVLNKDGKPLMPTTRGGHVRHLLKEQKARVVRTKPFTIQLLYETDDVVQPLYLGIDPGRTNIGVAVVKTDGTAVFTAHLETRNKEIPKLMQGRKKARRTRRTNGRRCRRQRRAKANGTISKKCVKQTTAQNGSVSKCAKEIGVIKRHLPGCEKDVLCVGIKNKEAKFSNRTRQEGWLTPTANQLLQTHINLIKKIRKFLPISNVVLEINKFAFMRLDNPNIQKWQYRQGPLYQKASLEEAVSEMQEHHCLFCKKPIAHYHHVVPQSENGSNTIGNIVGLCTKHHDLVHKDTTWQKKLAKKKTGLNKKYGALSVLNQIIPALTKELSSLFPKHFFATNGKSTYDYRAAHSVSKDHWLDAYCIACSVLANDVCDSNINSRVPYELKQFRRHDRRALNNENMSRVYTLNGKVVATNRHKATKQTTDSLEEFRQNHSDDVCKLKVKEHHPTYRNMNRNYPGSVFLIGKQVHVMQGIAGSKNGEATTYKDTNANSIAAGKCKFVAKNSGILFV

SEQ ID NO: 10604 - protein, 423 aa, unidentified; identical to SEQ ID NO: 8727

SEQ ID NO: 10605 - protein, 406 aa, unidentified; identical to SEQ ID NO: 7944

SEQ ID NO: 10606 - protein, 493 aa, unidentified
MAVVYVISTSGKPLMPTTRCGHVRGLLNEGKARVVEREPFTIQLNYETPDVTQPLYLGIDPGRTNVGAAVVREDGECVFTAQLTTRNKDVPKLMKARKQFRMAHRRLKRRCKRQRRAKTAGTISQKGDFQRLLPGYEKPILCKGIRNKEARFNNRQRPAGWLTPTANHLLLTHLNMVKKLQRFLPITDVVLEVNRFAFMAMENPHIQRWQYQRGPLYGKGSVEDAVYAQQDGHCLFCGKPIAHYHHVVPQHKNGSETLENRVGLCNEHHDLVHKDRAWEAKMKEAKAGMNKKYHALSVLNQIIPELTEQLAQLFPQHAFVTTGKDTADFREDHGIAKEHHLDAYCIACSVLTEPSRVSAPAATPHHLMQFRRHDRQVCHKENIKRVYLLDGKTVATNRHKAIEQKDDSLEEFRKTHTQQEISSLTVKGHQTIYKDMQRSMPGGVFLCNGKLHTLQGSTGRYKGIPKYYIGIDGGKSHAKRCIFLQQNCGLRWV

SEQ ID NO: 10607 - protein, 465 aa, unidentified
MSTCVCVLSNSGERLMPTFRLGKVRHLLKDGKAKIVKHHPFTIQLLYDSKTNTQPIEICEDVGYNYIGISVKSQSHEYVSAQYDTLQDEKACHDSCRKLRRTRRNRLRYRKPRFDNRKRGEGWLAPSLRHKKELNVNVVKMYCAVMPITHATVEVGSFDTMLVKAIQEGKAIPEGADYQKGPRYNLATLREAVFYRDNYTCQVCGRKVADGAILHMHHMFYWKGRHGDSLNELLTVCEKCHTPANHQKGGKLYGFGENVKFADLSGAAFMNTVRWQIVNELYAAFGKDFVTVTYGAMTKEKRIALRLEKSHNNDAYAMGEFHPNCRCTFEHYEKVRRNNRILEKFYDSRYIDIRTGEIATGKELFNGRINRNHKKDSENLHRYRGKRTYAGHRALLRKKVNLNPGDLVSLNGEVLVVHSTHTNKKGAINVEFKTPGKSGQKSASLKKLKIVKAADSMHSAWEKIS

SEQ ID NO: 10608 - protein, 406 aa, unidentified; identical to SEQ ID NO: 7944

SEQ ID NO: 10609 - protein, 451 aa, unidentified
MSVAVISKTGERLMPSSEYRARKLLKSGKAVKYSYHPFTIQLTKRKTGYAQPIELCMDTGYIHIGISVKSEKHEYLAEQIDTLTDEKTKHGACRMYRTLRRGRKRYRQPRFNNRKRDKDWIAPSLEHKKDIHVQAISRINKVMPLTDITMEMGNFDTQVLKAKEEGKPLPQGADYQHGERYGIATLREAVFSRDGYKCQCCGRTISDGAILHVHHIKYRSQGGTNSMTNLATVCDKCHTPKNHKPGGKLYNWKPKLPDFKGATFMTTIRWQLYNEVKSLFPDINVHITYGAATKEQRRELNIDKSHVNDAFAMGKFHPKHRTNAALYKKKRRNNRCLEKFYDAKYIDSRDGSKRTGQELFNGRINRNHKKDSENLHRYRLQKITAGKRTVRKRHYNIQPHDIVMYENRKRETSGCQSNGTRVILLSDKKSVAVKKVKIYKYAGGYFKSAFN

SEQ ID NO: 10610 - protein, 462 aa, unidentified
MSVLVIGRNGRALMPTNPRKARLLLKKKTASVVCRHPFTIQLLYKTGCATQEGCIGIDTGSQHIGVGITCGDRVILKDEHALRSSMEKRSLLATRAAMRRGRRYRKVRYRKPKWRHHTKRMYFEKANRRGQHWRKVKTTTQSPRPKGWLPPSLQSKCDHHFRIIDRYLKYLPDPITRNLVIETGRFDMARMNDPTIHGEMYQRGPMYDAENRRAYIFARDNYQCACCKAKAGTTRKADGTTVKLVAHHILFRSRGATDNPKYIISVCDHCHTTKAHQPGGILYSWMENNKKVTRGLRDATFMNILRKRLFARYPQAAFTYGNITAADRKQYHLPKSHVNDAVAVSLFGKEVPTVRDTCQTTYYKQVRKSKRSLHEAIPRKGRKRPNTKAVRNKKNTTQVNGFKLWDSVLANGKKLFICSFTGTSAYLIDKNGCYISQPGKAYKQWPLSKLKRLHPNGNWLMA

SEQ ID NO: 10611 - protein, 470 aa, unidentified; identical to SEQ ID NO: 5320

SEQ ID NO: 10612 - protein, 374 aa, unidentified
VVRRTPFTIQLTIATGEAKQPVSLGVDAGYKHVGLSASTEKAELYASEIELRQDITDLLSARRELRRARRNRKTRYRAPRFDNRIHTKRKGWLAPSVENRINAHLSRIEAVLRLLPVTKITVETASFDMQLLKNPDISGKEYQEGEQLGFWNVREYVLFRDGHVCQHCHGRSKDPVLNVHHLESRRTGGDSPGNLITLCETCHKALHRGEITLKAKRGQSFRAEAFMGIMRWEVLNRLKASHPELEVNNTYGYRTKHARISNGIAKSHCADAFCIAGYLGAKRLGKFFFQKQTRRNNRQIHKLSILKHGLRKRNQAPFEIKGFRLFDKVASKGEEGFIFGRRSSGYFDVRKLDGTRISAGISYKKLHLLEKRRT

SEQ ID NO: 10613 - protein, 420 aa, unidentified; identical to SEQ ID NO: 6212

SEQ ID NO: 10614 - protein, 465 aa, Calothrix sp.; identical to SEQ ID NO: 3024

SEQ ID NO: 10615 - protein, 396 aa, unidentified; identical to SEQ ID NO: 5072

SEQ ID NO: 10616 - protein, 480 aa, unidentified; identical to SEQ ID NO: 2726

SEQ ID NO: 10617 - protein, 382 aa, unidentified
  VARIANT 382: note = X can be any naturally occurring amino acid
LGKVFLVDTNKQPLDPVHPGWARKLLNTGQAAVFRRYPFTLILKKQVAEEVARPLRLKLDPGSKTTGFALVDDQNGEVVFAAELTHRGQQIKNALHARRAVRRSRRQRKTRYRAPQFDNRRRPKGWLAPSLESRMATTLTWTRRLMRVCPITEISMELVKFDMQLMDHPEIAGIEYQQGELAGYEVREYLLEKWGRRCAYCDAKDVPLQIEHLVCRARGGTDRVSNVCLACEPCNRKKGTQDISVFLKRDPVRLARLLAQAKAPLRDAAAVNTTRWVLYDRLKTFGLPIECGSGGLTKYNRVKLGFPKAHWTDAACVGKSTPQELCVKGVTPLLITAMGHGSRQMCRMNKRGFPRTGPKAARRVKGFQTGDIVRAVVPTGKX

SEQ ID NO: 10618 - protein, 490 aa, unidentified; identical to SEQ ID NO: 3566

SEQ ID NO: 10619 - protein, 424 aa, unidentified; identical to SEQ ID NO: 6934
  source 1..424: note = Microcoleaceae bacterium UBA10368

SEQ ID NO: 10620 - protein, 536 aa, unidentified; identical to SEQ ID NO: 2718

SEQ ID NO: 10621 - protein, 521 aa, Nonomuraea sp.
MATFHVGQQTHRQVLPQPAALESVSADNPGRDETGHRRPRDGVSGVEHGRGETRRTVPGGGRYPEASHDVEGGCGIPAALGAYQPRVFVLDRHGIPLQPARPAMARKLLASGRAVIHRRTPLVVRLKDRGAGSSAVPGVEVGLDPGSKHTGIAVFTNDKGTRTGLVAVQLDHRGGRIRDSMAARAGYRRRRRSANLRHRAPRFRNRTRPRGWLAPSLRHRVDTTMSWVDRLTRWAPVRAVHVERVAFDTHAMSAGRPLAGAEYQQGTLAGYEVREFLLAKWGRACAYCAASGVPLNIDHIHPRSRGGPDRVSNLVVACISCNQAKSSMPVEVFLAGRPKVLARVLAQAKAPLRDAAAVNATRWALWRALAATGLPVHTASGGRTKWNRSRTGATKSHTLDALHVGVLDQVTGRPATVLVAAATGRGSYCRTRTNAFGFPRLRLPRVKQIRGFATGDLVRAIVPAGKKTGTWTGRVAVRTSGSFNITTAAGTVQGIGHRHVRRLQRGDGYAYTTRGEPDALI

SEQ ID NO: 10622 - protein, 406 aa, unidentified; identical to SEQ ID NO: 2874

SEQ ID NO: 10623 - protein, 465 aa, unidentified
MSTCACVLSKNGERLMPTIRLGKVRHLLKDGKAKIIKHHPFTIQLLYDSETNIQPIEICEDVGYNYIGISVKSQSHEYVSAQYDTLQDEKSCHDACRRMRRTRRNRLRYRQKRFDNRKRDKGWLAPSLKHKKELNVNVIKMYCEVVPITHATVEVGSFDTMLVKAIEEGKATPEGADYQKGPRYNLATLREAVFYRDNYTCQVCGREASEGAILHVHHMFYWKGRHDNSLSELITVCEKCHTPANHQKGGKLYGFGEDIKFANLSGAAFMNTVRWQIVNELYAAFGKPFVTFTYGAMTKEKRIALHLEKSHNNDAYAMGEFHPNCRCTFEHYEKVRRNNRILEKFYDSRYIDIRTGEIATGKELFNGRINRSHKMDSENLHKYRGKRIRKGYRALRRKKVALNPGDLVSLNGEILTVHGTHTKKNGSVNVEFKTPSKSGKKSTSLKKLKIIKTISPMRSAWDKVS

SEQ ID NO: 10624 - protein, 519 aa, unidentified
MLWNSTWNESSTNYIKIKKERFMYYVYVLDSSGIPLMPTARYGKVRRMLKSGKAVAVSTNPFMIRLQYEPKTKITQSVTLGNDPGRTNIGVAAVDDLGRCLYSAKCETRNKQIPKLMAERAAHRRTSRRGERLARKRLAKKLGTTTIFLNGRMLPGCDKPIMLKDIINTEAKFHNRKRKEGWLTPTATQLLRTHLNLIELVKKILPVSRIAVELNRFAFMAMDNPSIQKWQYQKGPLCGYKNIREALEDIQNGSCLLCGRHNIEHDHHIVSRSRGGGNTLTNMAGLCENCHTKVHTDGNAAEKLLKIKDGQNKKYHALSVLNQIIPSLFTELDARFPGQVFITTGMDTKAYRDRNDVIKDHNADAYCIACSTLKSQSVIDIPSYSFRIKQYRRHNRQLIHSQKERTYCLDGKIVAKNRRKRMDQKEPSLHEWYIKTKRQYGQKETRRLQSQMTVIKSTRCYNDPKRTLPGAVFLSKGKRFVMSGQLSRGTYLRAEGCGTKNFPISKVRIQSQNRGLVYI

SEQ ID NO: 10625 - protein, 464 aa, unidentified
  REGION 1..464: note = Ga0307928_10037786
MQKLSEELKNAPASTSLAYSSASQPLNKEATLSVASKVLSDNHSEENQRQHTDGPKVLVYVLNKNGKPLMPCKPTKARHLLEQNRAKAVSRKPFTIQLLWTCEHKTQPVKLGMDPGYQKVGVSAASNKKELLSAEIQLRTDMPKKLQEKAMYRRNRRNILWHRQPRFKNRSKPKEWLAPSIQHKLDSHLRIIEKIQMLLPVTEIMVEVAAFDIQKIKNPGIDGEEYQQGEQLGFWNIREYVLHRDNHTCQHCHGKKKDKILQIHHINEKAEGATDRPEELLTVCKTCHDEHHAGIDIIPKKKIKNFKPETFMTMVRWKIVNALGCRHTYGYITKHNRIKQGLMKSHVNDAFVIAGGTNQERCKTIISKQVRRNNRKLQINRKGFKPAIRRQRYKLQPNDLVRYGGKECRVKGVHSYGKYVILITKLMEKIDVSVKRIELICYGKGLFTPIHPTTKVVGILGGIL

SEQ ID NO: 10626 - protein, 404 aa, unidentified
TQPIEYCCDTGYQHIGISIKSAKHEYVGVQIDTLKNEKKHHQDAITYRRTRRNRKTRYRAARFDNRKATKSKGWLAPSIRHKKDIHLAQVQKYAKVFPITSIVFEMGEFDTQKLKAIEEGRPAPVGIEYQQGEQYGFDDVRNAVFTRDGYRCVCCGRGIENGAILHAHHLKYRSLGGTNRMGNLVTVCDRCHTPVNHQKGGLLWKLMDKYKVKNFKGATFMTAVRWQMYDELKSMFPDTEIHLTYGSRTKEARRLLSVRKSHINDAYCMGDFHPKHRSKRWLYIKKRRNNRVLAKFYDAKYIDSRDGKKKSGQELFSGRTKRNRELNAENQHRYRQLKVSKGRVSIRRQHYSIQPGDTVIYEGKKHITKGVQNLGTYLKIGEKVVPVKKIHIYRYVGGYIRQMM

SEQ ID NO: 10627 - protein, 509 aa, unidentified
VYVLNKDGKPLMPTTRCGHVRYLLKEKKARVVKTKPFTIQLLYETNDVVQPLYLGIDPGRTNIGVAVVKADGTAVFTAHLETRNKEIPKLMKKRKDSRRARRTNGRRYRRQRRAKANDTLSTKRVKQTTAQNGSVSKRAKEIGVIKRHLPGCEKEVLCIGIKNKEAKFNNRTKPEGWLTPTANQLLQTHINLVKKIQKFLPISDVVLEVNKFAFMQLDNPNIQKWQYQQGPLYQKANLKEAVYEMQEHHCLFCKKPIEHYHHVVPQHKNGSNTISNVVGLCAKHHDLVHKDTAWQEKLAKKKNGLNKKYGALSVLNQIIPALTKELSSLFPKHSFITTGKSTYDYRAAHGVCKDHWLDAYCIACSVLPNDVCDSNINSHVPYELKQFRRHDRRALHKENMNRVYTLNGKKVATNRHKAIEQTTDSLKEFRQNHPDDVCKLKVKEHHPEYRNPKRNFPGCVFLVDKQAHVMQGTNGSHNGRADGYYDTNGNSYPFGKCKFVAKNGGIVFT

SEQ ID NO: 10628 - protein, 413 aa, unidentified; identical to SEQ ID NO: 2636

SEQ ID NO: 10629 - protein, 442 aa, unidentified; identical to SEQ ID NO: 2637

SEQ ID NO: 10630 - protein, 420 aa, unidentified
MQYVYVLNKHGEPLMPCFPGKARLLLKQQKACVVKRTPFTIKLLYGSAGYKQPITLGVDAGSKHVGLSASTEKRELYREEFTPRSDVAELLSTRKQNRRSRRNRKTRYRAPRFDNRVHSKHKGWLAPSVEVKIQEHITVIKHICRILPISLVRVETAEFDTQRLKAMLAGKPLPVGTDYQLGEMYDEYNVRQYVLKRDHYTCQCCGAHTTAKKAVKLHVHHLESRKVGGNAPSNLITLCTTCHNNLHKGKITLDGKKRGKTLRDAAFMGIMRNTLLTRLRNELHIPVQNTYGYITKLLREQNDIKKSHVNDARCISKHPLAEPCSICYRTKAIRHHNRQIHKAKILKYGIRKANQAPYIVKGFRLWDKVLYNGQECFISGRRTSGYFALRKLDGTTITNSISFKKLQLLEPATNYLIERM

SEQ ID NO: 10631 - protein, 451 aa, unidentified; identical to SEQ ID NO: 3061

SEQ ID NO: 10632 - protein, 424 aa, unidentified; identical to SEQ ID NO: 3434

SEQ ID NO: 10633 - protein, 427 aa, unidentified; identical to SEQ ID NO: 5713

SEQ ID NO: 10634 - protein, 374 aa, unidentified
MVIQLKKEIPENEICKDEIRCGIDDGGLHVGIALVQKCKTKNKVVFKGTIEQRNDVKHLMEVRRSYRHYHRYHKRYRPARFDNRKSSKRKKRIAPSILQKRQAIIRVIHWLNKWINITNYWLEDVSIDTRALTDGYKPYRWQYQKSNRLDENIRKAAILRDGGKCMECGKLNCRLEVHHIKPRRRNGSDTLDNLITLCKSCHQKTEGQEELYMDRYFSLLKSSDHKNLNYAQHVMIGKEWLRKQLSSLGVLYLTNGGDTANKRIDWNIEKSHANDAVCITNLQPDTYDMKEWTVKPMRRQSKAKTDNVLGIKHRDLVEYTLKNGETHRGYVTALYPEQKAINFQSPTKHCKKVNARKCKLLWKYSKIYWFEYAS

SEQ ID NO: 10635 - protein, 441 aa, unidentified
MSVSVFVQDRKHRPLMPCRPARARRLLKSGRARVVRLFPFTIRLVDRLLEDSSVQPVLVKIDPGSRHSGFVVVRADEQGHHHGLFFIDIVHRGESIRDALTARRNCRRRRRGNLRHRAPRFLNRTKPQGWLPPSLRHRVDTATAWVAKLVKLAPVTGIVEELVKFDAQKLQNPEISGTEYQQGTLFEYEVREYLLEKFGRKCVYCGAENVPLNIDHVVPKARGGSNRISNLVLSCVNCNQKKDSQPVDVFLKNRPEVLDRIKRRLKTSLAHAATVNATRWSLFNALKAFGLPVETGSGALTKFNRHTFGVPKEHRLDALCAGRVNGVHYPEGMGILQVRCTGRGNYQRTRVDKYGFPRGYLTRQKRVHGFATGDMVEVVVPSGKKAGTYRGRVAVRKSGYFNIQTPEGVIQGIGWRHCRLLSFNDGYGYAWLRPAPHSSPV

SEQ ID NO: 10636 - protein, 351 aa, unidentified
STEKRELYSEEFTPRSDVVKLLSTRKQNRRSRRYRKTRYRAPRFDNRVHSKHKGWLAPSVEVKIQEHITVIKRICKILPISLVRVETAEFDTQRLKAMLAGKPLPVGTDYQLGEMYDEYNVRQYVLKRDHYTCQCCGAHNTAKKVVKLHVHHLESRKTGGNAPSNLVTLCTTCHKNLHKGKVTLDGKERGKPLRDAAFMGIMRKTLMARLKEELPIPVQGTYGYITKMRREQNDIKKSHTNDARCISKHPLAEPCSVCYRTKAIRHHNRQTHKANFSKKGIRKRSQMPYLVEGFRLWDKVLYKGQECFVSGRRSSGSFALKKLDGTSISKGVTFKKLRLLEPATNYLIERM

SEQ ID NO: 10637 - protein, 424 aa, unidentified
MRVFVFNMRGRPLMPCSQRKARLLLRENKAKIYKYHPFTIQLTYTTGETKQDCHIGIDTGSKYIGAAVRSEDKVFWKGEIELRQDIRSNLDTKRIYRRSRRNRKTRYRKPRFLNRKRRDEWLPPSLQSRISHTCHLIDTLSSLVPNPILHIEVGKFDVAKMINPEIHGVDYQHGQTYGFFDERYFVFARDNYTCQCCGKSKNKILNTHHIIYRSNGGTNRVDNLITVCTDCHTSQNHRKGGIFYQWQEQHKKVKQYKEPPFMNTLRKRIFVAYPDAEITYGSETTPKRKAMKLDKTHYNDAIVISGINEIKENPEEWLLIKQFRKKKRSLHEATARKGRKKPNRNQTRNSKNTPYYKGFYLNDKVSVFGKSGYITGFTSNAAYIKDENNDYITLPNKTYKQVSINKMKLECHNNNWQYIIKNAV

SEQ ID NO: 10638 - protein, 427 aa, Parasutterella sp.; identical to SEQ ID NO: 6030

SEQ ID NO: 10639 - protein, 341 aa, unidentified
LLSTRRESRRARRNRKTRYRKPRFDNRVRSKHKGWLAPSVEVKIQEHITAIRRVCGILPVSKVVVETAEFDLQLLKAIEEGKPVPQGEDYQQGEMYGHYNVRQYVLWRDNYTCQCCGAHATKKKEVRLHVHHLESRKTGGDAPGNLVTLCDSCHEKLHKGLIAEKDFKKRKRRSTRDATFMGIMRKTLMQRLCSELPIPVVETRGYITKATREKLLVLPKSHTNDALAIAQGKRGFNVGYLPGIIQTDKIYTIRPVRHHNRQLHKAAILKGGIRKSNQAGKYVFGYRLFDKVQFNEQDCFIWGRRTTGIFTIKTINGKMIKDGISFKKLKLVEKSTSYLIA

SEQ ID NO: 10640 - protein, 420 aa, unidentified
MQYVYVLNKHGEPLMPCSPGKARLLLKQQKACVVKRTPFTIKLLYGSAGYKQPITLGVDAGSKHVGLSASTEKRELYREEFSPRNDVVKLLSTRKQNRRSRRYRKTRYRPPRFDNRVHSKHKGRLAPSVEVKIQEHITVIKHICKNLPITLVRVETAEFDTQRLKAMLAGKPLPVGTDYQLGEMYDEYNVRQYVLKRDHYTCQCCGAHNTAEKVVKLHVHHLESRKTGGNAPSNLVTLCTTCHKNLHKGKVTLDGKERGKPLRDAAFMGIMRKTLMARLKEELPIPVEGTYGYITKMRREQNDIKKSHTNDARCISKHPLAEPCSVCYRTKAIRHHNRQTHKANFSKKGIRKRSQMPYLVEGFRLWDKVLYKGQECFVSGRRSSGSFALKKLDGTSISKGVTFKKLRLLEPATNYLIERM

SEQ ID NO: 10641 - protein, 427 aa, Parasutterella sp.; identical to SEQ ID NO: 4733

SEQ ID NO: 10642 - protein, 431 aa, Klebsiella sp.; identical to SEQ ID NO: 2435

SEQ ID NO: 10643 - protein, 428 aa, unidentified
LKVFVLNMRGQPLMPCSPAKARHLLKAGKAVVRRRTPFTIQLRIATGETKQSVTLGVDAGAKHVGLSAATEKEEVFASEVELRQDITGLLAARLSLRRERRQRKTRYRAPRFLNRVRSKHKGWLAPSVENRIQAHMSRIDAICGLLPVTKIVIETASFDIQKIKHPDVEGTDYQQGDQLGFWNVREYVLFRDGHVCQHCHGHAKDKILNVHHLESRQTGGDAPNNLITLCETCHKAYHAGKIKLKVKRGQSFRAEAFMGIMRWTLLDRVRKAHPGLPVENTYGYLTKNTRITLGLPKAHCVDAYCIAGNLKAVRRGVYLHQRQVRKHNRQIHKCTVLSKTLKDGTKIGYRKLNQTPHLVKNFRLFDKVRCLGQTGFIFGRRSSGYFDVRRLDGVKISSCISYRKLTLLEKRSTCLTELRKEDGASSPV

SEQ ID NO: 10644 - protein, 419 aa, Moorena sp.
MPKYVFVIDTNKQPLNPIPPKKARRLLDKGKAAVFRMYPFTIILKTAIDNPIVSPCKIKIDPGSQTTGFALVQNNQIIWGMELEHRGGLINKKLESRKAVRHRRRNRHTRYRKPRFFNRKRSEAWLPPSLEHRVSTIETWVKRLTKFCPVNEIWVERVKFDTQKMPNPEINGIQYQQGELAGYEVREYLLDKWGRECTYCGKQSVPLQIEHIHPKSFGGSNRVSNLCLACEKCNKRKGNKPIEEFLKKKPSLLQKIKTKAKQPLLDAAAVNATRNKLVKVLQNIKFVVTGTGAQTKYNRTRLGLPKEHWIDAACVGDIETLVLKTSQPLLVTGKGQGGRQKAALNKYGYPVRHNPLKPIKGWVTGDIAKHQRLGIGKVTPRSKGSFGFTPLGMKGYKSCNPQDISAIHRKDGYTYSFCK

SEQ ID NO: 10645 - protein, 442 aa, unidentified; identical to SEQ ID NO: 2903

SEQ ID NO: 10646 - protein, 416 aa, unidentified; identical to SEQ ID NO: 7823

SEQ ID NO: 10647 - protein, 456 aa, unidentified
MSTCVCVLSNSGERLMPTFRLGKVRRLLKDGKAKIVKHHPFTIQLLYDSKTNTQPIEICEDVGYNYIGISVKSESHEYVSAQYDTLQDEKKHHDDCRKYRRTRRNRLRYRKPRFDNRKRSEGWLAPSLEHKKQLNIRLIERYVSVIPITRATVEVGSFDTMLLQAIQKGESKPEGTDYQKGPRYNLATLREAVFYRDNYTCQVCGRKIADGAILHMHHMFYWKGRHGYQLDELVTACEKCHTPANHQKGGKLFGFGEDKEFANLSGAAFMNTVRWQIVDALHATYGKEFVTITYGAMTKEKRIILGIEKTHNNDAYAMGDYHPACRCKFRHYQKRCRNNRVLEKFYDATYIDTRTGDKAKGKELFNGRISRNHKKDSEDLHKYRSKKVSKGRRSIRRQRYAIQPYDTVRLENKTYITSGCHNKGTRLLIPANGKSKSVAISKVQVVCHAGAWIQII

SEQ ID NO: 10648 - protein, 465 aa, Variovorax sp.
MPCSEKRASKLLAAGRARVHRVQPFVIRLVDRTHDECTLQPLRLKLDPGSKTTGIAVVRDIEAIDAGTGEVDRGAAVVNLTEIIHRGRQISEALTARSQMRRRRRGNLRYRTPRFLNRGGDKAGWLAPSLRHRIDTTMAWVARLQRLAPITAISSELVRFDIQALQNPEVSGTEYQQGTLFGYELREYLLEKWGRQCAYCDIKDVPLQIEHIVARMRGGSNRASNLTLACAFCNQKKGARSIEEFLAKDSKRLARILVQAKRPLKDAAAVNATRWALSTALKTFCLPVELSSGGRTKFNRSMLGIPKTHALDAACVGQVDAISDWVRPTLVVKCTGRGSYQRTRLDQFGFPRGYLMRSKRVHGFGTGDMVVADVPKGLKAGKHAGRVAVRATGSFNIKTLRDGVSSVVQGINHKHCRVVQRNDGYGYFFNRAEFTGREHARHKASDASHPALDLPALKGEVSRAF

SEQ ID NO: 10649 - protein, 473 aa, unidentified; identical to SEQ ID NO: 3562
  source 1..473: note = uncultured beta proteobacterium

SEQ ID NO: 10650 - protein, 419 aa, unidentified; identical to SEQ ID NO: 3670

SEQ ID NO: 10651 - protein, 434 aa, Anoxybacillus sp.
MVFVLDTNKCPLAPCHEAVARKLLKQGKAAIYKRFPFTIILKKSVDESEIKTTYRLKIDYGSRHTGLAILRGQEVIWLGQLDHRTDIKERIDKRRAFRRARRNRKTRYRKPRFLNRKRKEGWLPPSLESRVQNIQTWVSRLKKLCPIGHISYENAKFDTQLMRNPEISGIEYQQGTLQGYEVREYLLEKFGRKCCYCGKENVPLEVEHIIPKSRGGADRIDNLCLACRDCNQRKGNQTAEEFGCPHIQKQVKESLKDTSIINATRWKVYEVLKQARLDVECGTGARTKMNRIRLGLPKAHYFDACCVGESTPSHLYFKTKEVLFIKAKGRGSRSRTNLDRYGFPRGYLARQKFFFGFQTGDMVKAIVPRGKYKGVWFGEVACRKTGNFDIKGKDGKRIAQGISYKYIQVIQRFDGYTYRKEEAELAQGAIPPRA

SEQ ID NO: 10652 - protein, 417 aa, unidentified
VQRVFVVDKNRDPLMPCHPARARELLKNGRAKVFRRYPFTIILLDREGGDVQPVTLKIDPGSKTTGLALVADSKRGKRVVWAGELNHRGEQIKAALLSRKQLRRGRRSRKTRYRQPRFDNRRRAEGWIPPSLRSRVDNVLTWVERLRRFTPICAISMELVKFDTQVMQNPEISGVEYQQGELMGYEVREYLLEKWGRKCAYCGATNMPLEIEHIIPKSRGGSNRASNLTLACNACNQCKGNQTAEEFGYPAIQGKAKQPLKDVAAVNTTRWTLYRRLRQCGLPLEVGTGARTKYNRTKQNYPKEHWIDAACVGVSGEKVYIASGTTPLVVKATGRQSRIMCRPDKYGFPRTKAKQGRVHYGFQTGDIVLATIPEGKYTGVHIGRVAVRNRPSFRLNDFDVHPKYLKVLHHSDGYSYL

SEQ ID NO: 10653 - protein, 427 aa, Sharpea sp.; identical to SEQ ID NO: 8854

SEQ ID NO: 10654 - protein, 442 aa, unidentified; identical to SEQ ID NO: 4522

SEQ ID NO: 10655 - protein, 413 aa, unidentified
MTNYAFVLDADGKQLAPTKEQKAWFLIRKKRAILVSKYPMVIQLKKEIPDKEICKNEIRCGIDDGGLHIGVALVQKCQIRNKVIFKGVIEQRNDVKHLMDVRRGYRRYHRYHKRYRPARFNNRKSSKREGRIAPSILQKRQATIRIINQLNKWINITNYWLEDVAIDIRALTNGYKPYRWQYQKSNRLDENIRKAVILRDGCKCMECGKSNCRLEVHHIKPRRLKGSSTLDNLITLCTKCHQKTEGIEELYMDRYFGLLNSSDNKNLNYAQHVMIGKKWLREQLSNLGMLHLTNGGDTANKRIDWDIAKSHSNDAICIADLRPDTCEIKEWTIKPMRRQSKAKTDNVLGIKHRDLVEYTFRNGETHRGYVTALYPEQNALNFQSPTKHCKKVNASKCRLLWKYSKIYWLDNVS

SEQ ID NO: 10656 - protein, 426 aa, Moorena sp.
MPNYVFVIDTNKQPLNPISPKKARRLLDKGKAAVFRMYPFTIILKTAIRQSRRCANANPTISPCQIKIDPGSKTTGFALVQNDQVIWAMELEHKGSLIKKKLESRSAVRRGRRNRNTRYRKPRFLNRRRPEGWIAPSLEHRVLTTETWVKRLIKFCPVNEIGIERVKFDTQKMQNPEVNGVEYQQGDLAGYEVREYLLEKWGRECAYCSKQNTPLQIEHIHPKSKGGSDRVSNLCLACEKCNQKKGNKPIEEFLKKKPDLLRKILAIAKQPLTDAAAVNTTRNKIVKVLKAIKPVVTGTGAQTKYNRTRLGLPKQHWIDAACVGDIKDLVLKTSQPLLVTCKGQGGRQKAALNKYGYPIRHNPLRPIKGWSTGDIARHQKLGIGKVTPRSKGSFGFTPLGAKGYKSCKPQDIFAVHRKDGYIYSFC

SEQ ID NO: 10657 - protein, 335 aa, unidentified; identical to SEQ ID NO: 9848

SEQ ID NO: 10658 - protein, 415 aa, Bacillus sp.; identical to SEQ ID NO: 2431

SEQ ID NO: 10659 - protein, 470 aa, unidentified
MSVFVVGLNGCRLMPVSERKARLLLKGGKASVYRKVPFTIKLNYKTGSTVQPGYLGIDTGSQHIGVSVVRQDGTVLHKEEIGLRDSMSKRKLLESRASLRRGRRYRKTRYRHPKWKPKTKRIYSEKADRKGRHWKKQKNMFTSKRQAGWLPPSLQSKTDHHIQWIRKLLHLLPEGYRLSIELGRFDPARMKDPEIHGELYQKGPQYDYENVRAYVLARDGYTCRVCKKKGGKLHVHHILYRSRGASDNPKYMAAVCSKCHTTENHLPGGILYQWMQDQKKFTRGLRDATFMNILKKRLRKAFPDAVFTYGNITKADREKLELPKSHGNDATAIALVKTEVKSVKDEEPVIHIQQVRRKKRSLHEETPRKGRKEPNRTASRNDKNTRSVTVSKGSGKKKVSMTACLFDRVELDGKKGWITGFTGTSCYVKDKEDNYICTSPKYKQVSISKLRILHHCGNWVIGAEKPLGKG

SEQ ID NO: 10660 - protein, 416 aa, unidentified
MVYVLDKNGQPLMPTDRHRKVRLMLQSGQAKVIKRCPFTIQLNYDSGHQTQEISLGIDAGSKHIGVSATTKIKVLYEADVELRNDIVNLLSSRRELRRGRRNRKTRYRQAKFNNRRRGNGWLAPSIRQKIGTHLTVVENICKMLPISRIMVETASFDIQKIKNPDIQGAEYQQGDQLGFWNVREYVLFRDGHTCQCCKGKSKDKILNVHHIESRKTGGNAPNNLITLCETCHTGYHKGTVQLPKAIKRGMRFKDAAFMGIMRWAFYEALKQQYEPVGTPVHNTYGYITKHTRIAYNLPKEHYVDARCISGNPEASSNGEYYYQKKVRCHNRQIHKLTVLKGGIRKQNQATYLVKGYRLFDKVSYQGKGYFVFGRRQSGFFDIRTLSGEKVNKGSLSCKKLKFIATRTYYLTERRAV

SEQ ID NO: 10661 - protein, 446 aa, Pseudomonas sp.
MAVFVLDKAGKSLMPCSEKRARLLLERGRARVHRLTPFVIRLVDRQRADSALQPLTLKTDPGSRYTGLALVRQQVGRVSVLSLMELVHRGAAIRKALEQRAGFRRRRRSKNLRHRKPRFNNRTRRKGWLAPSLQHRIDTTLSWVRRIRRWAPITELAVERVKFDMQAMQNPEISGVEYQQGELAGYEVREYLLEKWGRCCAYCGTENIPLEIEHIQARSNGGSDRVSNLTLACRPCNQRKGNQPVEVFLKGKPELLARIKAKAKAPLRDAAAVNATRNALFVALLETGLPVATGTGAQTKYNRRSLNIPKTHALDAVCVGEVEAVSSWQRPTLTIKATGRGDYQRTRLTVQGFPRGYLTRQKRHFGFQTGDQVIATVPSGKKAGFHRGRVAVRKTGSFNIQTQGAVVQGIHHRHCQIIQRADGYAYAQTPTEDSQPQKEAARTGAR

SEQ ID NO: 10662 - protein, 420 aa, Shewanella sp.
MHVYVINQHNKPLMPCQPVIARLLIKQGKAKVKTRTPFTIKLLMETDEYTQPVIAGMDTGSKIIGCAVTANGKVIYQSEVQLRNDVSKKMQQRAMYRRTRRNRKTRYRPARWLNRSSMRKVGRLAPSIKSKVDSHLREKRQVEAILPVTTWKVEIASFDIHKITNPDVTGVKYQQGVQKDYYNVKAFVLSRDSHQCQSKRKGKHSDKLHVHHIVFRSQGGTDTPSNLITLCEKCHNDLHAGKFELKTGKSKTKHATEIGIIKSQLSKRWDFEATHGYETKFKREQVLALPKTHYYDAVAICLEDGELVSLNDMVLHKRHVSKGDYQLTKGKRSEKRIPVGKLFGFKKHDFIKTSQGIGFIKGKRSTGYFALETITGDKVHASANIKNQTVRLSARTTTLKQFMEAAIPPCALAQGGIAEY

SEQ ID NO: 10663 - protein, 441 aa, Moorena sp.
VVSPTSHYNIVKEHITNSEALTMQNYVFVIDTNFQPLNPIPPKKARRLLDKGKAAVFRMYPFTIILKTSVMNPTISPCQLKIDPGSKVTGFALVQNNQVIWGMELEHRGGLIKKKLESRRAVRHRRRNRHTRYRKPRFLNRKRPEGWLPPSLEHRILTIQTWVRRLIKFCPLNEVWVERVKFDTQKMQNPEINGVEYQQGKLAGYEVREYLLEKWGRECTYCGKQSVPLQIEHIHPKSKGGSERVSNLCLACEKCNQRKRNKPIEDFLKKKPSLLQKIKSKAKQPLKDAAAVNTTRNKLVKVLREMKPVVTGTGAQTKYNRTKLGFPKEHWIDAACVGNIETLVLKTSQPLLVTCKGQGGRQKAALDKYGYPTRHNPLKPIKGWCSGDIAKNLLTGKFGRVNPRSKSNSFNYTVPGEKAISLHLKNLAKVHRKDGYAYGFC

SEQ ID NO: 10664 - protein, 398 aa, unidentified
MSVFVVGLNGCRLMPTSERKARLLLKQGKAFVEQKVPFTIRLNYKTGSTTQLGYLGIDTGSQHIGVSVVREDGTVLHKEEIGLRDSMSKRKLLEAKASLRRGRRYRKTRYRHPKWRPKTKRVYCEVPDRKGRHWQKKKITFTSKRPKGWLPPSLQSKTDHHIRWIKKLQDLLPEGYRLSIELGRFDPARMKNPEIHGDLYQKGPQYDYENVRAYVLDRDRYTCQICKKKGGKLHVHHILYRSHGATDDPQYMVTVCSDCHSAQNHLPGGILYQWMQEQKRFSRGLRDATFMNILRKRLIRAFPEAVFTYGNVTKVDREKLKLPKSHGNDATAIALVKTGITAVKDKESVICIQQVRRKKRSLHEETPRKGRKDPKLHAIIRTQRRSLLPKDRIRKRYQ

SEQ ID NO: 10665 - protein, 415 aa, Bacillus sp.; identical to SEQ ID NO: 5533

SEQ ID NO: 10666 - protein, 393 aa, unidentified; identical to SEQ ID NO: 5287

SEQ ID NO: 10667 - protein, 386 aa, unidentified; identical to SEQ ID NO: 9453

SEQ ID NO: 10668 - protein, 456 aa, unidentified; identical to SEQ ID NO: 7423

SEQ ID NO: 10669 - protein, 501 aa, unidentified; identical to SEQ ID NO: 10016

SEQ ID NO: 10670 - protein, 462 aa, unidentified
MSVLVIGSNGRALMPTNPRKARLLLKKKTASVVCRHPFTIQLLYKTGCATQEGSIGIDTGSQYIGVGVTCGDRVILKEEHELRSSMEKRSLLVARAAMRRGRRYRKVRYRKPKWRHHTKRMYFEKPNRRGQHWRKVKTTTQSPRPKGWLPPSLQSKCDHHFRIIDRYLKYLPDSITRNLVIEVGRFDMARMNDPMIHGEMYQRGPMYDAENLRAYIFARDNYQCACCKAKAGTTRKADGTTVKLVAHHILFRSRGATDNPRYIISVCDHCHTTKAHQPGGVLYSWMENNKKVTRGLRDATFMNILRKRLFARYPQSAFTYGNITAADRKQLRLPKSHANDAVAISLLGKEASTVKNICQTMHYKQIRKSKRSLHEAIPRKGRKNPNTKAVRNKKNTTQVNGFKLWDSVLANGKKLFICSFTGTSAYLIDKNGCYISQPGKTYKQWPLSKLKRLHPNGNWLMA

SEQ ID NO: 10671 - protein, 430 aa, unidentified
MLVYVLKQNGQPFMPTARFGKVRRLLKAKKAKVVRREPFTIKLLYEPETNVVQECYCGVDTGSRHIGVAVVSNDKVLYQSQTELRSDIKQKMDARRQARSFRRFRKTRYREPRFLNRGNSTKSDRLPPSVKHKVQAHIDEIEFCKKILPLSDSNLIIEVSQFDTALIKDPRLINEKIKHWGYQQGFNYGYSSRREAILHRDNYTCQCCGKKNCRLEVHHVKFKSNGGTDDEENLLTLCEECHKGVHAGTVVLDKKPKKSKNLKYATHMSVIRSRLLKKYPDAIETFGFVTAENRNHLNLPKDHYIDACVIASGGLEFKELEVIFYKNRVSKGDYQLTKGIRGEQKLPTGKICGFRKFDRVEYLGNKYFIKGRMSSGFATLMDIFGNKIDFSDMPRGTKTPKLSKCKRISARSSCLCISQIRKERAIHTLS

SEQ ID NO: 10672 - protein, 442 aa, unidentified; identical to SEQ ID NO: 3161

SEQ ID NO: 10673 - protein, 442 aa, unidentified
MVTVQQSTHHLPFGRVFIRRNLFMVYVISQDGKPLMPCSDPIARLLLKQGKAKVKKREPFTIKLTYETTNYTQGLTLGVDTGSGTIGTAVSKDNGDIVYMSEVVVRNDITDKMTQRAKYRRNRRNRKTRYRKARWLNRASSIKKDRFSPTMQSKLHSHVREIEYIQSILPVTEMVFETGQFDMHLMKNPSLANPKVRPWGYQKGANYGFENTKAMVLNRDNYTCQCCKGKHKDSKLEVHHIVFRSQGGSDEESNLLTLCHTCHKDLHSGKINPKLSGKVKGNLKYATQMNSIRKQLFRFYPNAIETFGYVTKVNRLHLGVAKEHYYDACTIATQGNAFNVKSNLYKKKCVSDGDFQKTKGICSEQPIVTDKICGFRKFDKVRYFGNDYFIKGRMSTGYAILMDIDGNKIDFSTMPRGYKTPKLSNCKRITARSTVMTQVKVV

SEQ ID NO: 10674 - protein, 426 aa, unidentified; identical to SEQ ID NO: 3614

SEQ ID NO: 10675 - protein, 431 aa, unidentified; identical to SEQ ID NO: 6234

SEQ ID NO: 10676 - protein, 512 aa, unidentified; identical to SEQ ID NO: 4031

SEQ ID NO: 10677 - protein, 520 aa, Parasutterella sp.; identical to SEQ ID NO: 10536
  VARIANT 51..97: note = X can be any naturally occurring amino acid

SEQ ID NO: 10678 - protein, 420 aa, unidentified
MQYVYVLNKHGEPLMPCSPGKARLLLKQQKAHVIKRTPFTIKLLYGSTGYKQPITLGVDAGSKHVGLSASTEKRELYREEFTPRNDVVDLLSTRKQNRRSRRNRKTRYRAPRFDNRVHSKHKGWLAPSVEVKIQEHITVIKRICRILPITLVRVETAEFDTQRLKAMLEGKPLPVGTDYQLGEMYDEYNVRQYVLKRDNYTCQCCGAHTTAKKAVKLHVHHLESRKMGGNAPGNLITLCITCHDALHKGKVSLDNKKRGKPMRDAAFMGIMRRTLMSRLREELPITVQGTYGYITKMQREQNDIKKSHVNDARCISKHPLAEPCSVCYRTKAIRHHNRQTHKANFSKGGIRKRSQMPYVVEGYRLWDKVLYKGQECFVSGRRTSGSFTLKKLDGTRISKGVTFKKLRLLEPATNYLIERM

SEQ ID NO: 10679 - protein, 414 aa, unidentified; identical to SEQ ID NO: 2588

SEQ ID NO: 10680 - protein, 431 aa, unidentified
MPNKVYVINKHGRPLMPCSPAKARHLLDAGKAKVKKRTPFTIQLVYGSSGYTQEVILGVDAGSKTIGMSASTTKEELLSAEVKPRNDVVDLLSTRREFRRARRNRKTRYRKPRFDNRVRSKRKGWLAPSVEVKIQEHITSIKMVCRILPVSKVVIETAEFDLQLLKAIADGKPVPQGEDYQKGEMYGHYNVRQYVLWRDDYTCQCCGAHATKKKEVRLHVHHLESRKVGGDAPDNQVTLCESCHEKLHKGLITEDDFKKRKRRSTRDATFMGIMRKTLMQRLCSELPIPVVKTRDYITKATREKLLVLPKSHTNDALAIAQGKQGFNVGYLPEILQIDKIYTIRPVRHHNRQLHKAAILKGGIRKSNQAGKYVFGYRLFDKVQFNGQDCFIWGRRTTGIFTIKTINGKMIKDGISFKKLKLVEKSTGYLIA

SEQ ID NO: 10681 - protein, 413 aa, unidentified; identical to SEQ ID NO: 2636

SEQ ID NO: 10682 - protein, 413 aa, unidentified; identical to SEQ ID NO: 3290

SEQ ID NO: 10683 - protein, 293 aa, unidentified
MSVAVISKTGIVLMPTSEYRARKLLDSGKAIIYGYRPFTIQLTERETGDVQPVELCVDTGYIHIGVSVKSEKHEYLGLQVDTLTDEKAKHDDRRMYRRQRRNRKRYRKSRFDNRKRKSGWLAPSLEHKKEINLQIITAICGVYPIADITLEMGNFDTQVLKAKEEGKQIPQGTDYQHGERYGIATLREAVFTRDGYKCQCCDRGIKDGAILHAHHIQYRSQGGTNRMSNLITVCEKCHTPANHKPGGKLYGWKPKIASFKDATYMTAVRWQLYRKVKEMFPGIHVKITYGAET

SEQ ID NO: 10684 - protein, 423 aa, unidentified; identical to SEQ ID NO: 3576

SEQ ID NO: 10685 - protein, 419 aa, unidentified; identical to SEQ ID NO: 4209

SEQ ID NO: 10686 - protein, 412 aa, unidentified; identical to SEQ ID NO: 4932

SEQ ID NO: 10687 - protein, 518 aa, unidentified; identical to SEQ ID NO: 3878

SEQ ID NO: 10688 - protein, 470 aa, unidentified; identical to SEQ ID NO: 9228

SEQ ID NO: 10689 - protein, 480 aa, unidentified
LYTKPLDNIGEGSLPSSGEINLKGMTFMVYVKSIDGKALMPTSNAKARKLLKQKKAKVVSLRPFVVKLTYKTKTEYTQKLNLGVDSGYSNIGFSVIDAKQEYIAGEVKLLEGMKKRLLEKASYRRIRRSRLRYRKARWNNRVKSKKKGWLAPSLKHKLDTHIKFIDYLKNILPIGKITIEVANFDIPKMKDDLISGVDYQNGDMFGFWNVREFVLHRDGHKCQNPNCIHKDKKEQILKVHHIRYRSEGGSDRPENLITLCSKCHTPANHKKGKFLYDWCVNGKKVRGFKDATFMSMIRWYLVNELKSKHNNVSITYGYITKNHRIQNGIEKSHLNDAFAIAKGTNQARTKDRFLVIQDRLKNRSLEKFYDSKIIDIRTEKKVSGGDLNCGRSTKNKNLNTENLRKYRGAKISKGQRRIRKQKYFYQPNDLVKYDGKVYTVKGTQNEGKYIALKEIKKVPKVELLIPYVFKKGLNWSYGLC

SEQ ID NO: 10690 - protein, 475 aa, unidentified; identical to SEQ ID NO: 4985

SEQ ID NO: 10691 - protein, 415 aa, unidentified; identical to SEQ ID NO: 6534

SEQ ID NO: 10692 - protein, 428 aa, unidentified
LKVFVLNMRGQPLMPCSPAKARHLLKAGKAVVKRRTPFTIQLRIATGETKQNVTLGVDAGAKYVGLSATTEKEEVFASEVELRQDITGLLAARLSLRRDRRHRKTRYRAPRFLNRVRSKHKGWLAPSVENRIQAHMSRIDAVCRLLPVTKIVIETASFDIQKIKDPSVEGTDYQQGDQLGFWNVREYVLFRDGHVCQHCHGRSKDKILNVHHLESRQTGGDAPNNLITLCETCHKAYHAGKIKLKVKRGQSFRAEAFMGIMRWTLLDRVRKAHPGLPVENTYGYLTKHTRITHGLPKTHCVDAYCIAGNLKAVRRGVYLHQRQMRKHNRQIHKFTVLSKRLEDGTKIGYRKLNQSPYLVHGFRLFDKVRCLGQIGFIFGRRSSGYFDVRRLDGVKLSPSISWRKLTLLEKRSTYLTELRKQDGASSPV

SEQ ID NO: 10693 - protein, 518 aa, unidentified
MANLKLIDELLEKTEYIYVLGIDGKPQMPTNRKVRVRSLFKYGLAKIVDTVPFTIRLLYENDAVLQPITIAEDPGRTNIGAAVLTQLGDLVFSAVVETRNKSIKKLMSDRKAHRQTSRRGERKARQRLAKRHGNMIKAGMIMRKLPQYAADKFVTCKIIKNTEARFCNRKRMPGWLTPTVNHLVQTHINLIKKIERHLPITDVAIEVNRFAFMQMENPNISGVDFQNGPLKGFDDVKAAIREQQHGKCLMCKKDIEHFHHIIPRSKGGSDTIQNQAGLCEKCHTKVHTDAEFLAKFKDKKDGLIKKYGALSALNQAVPFICKELLKIYGVEHVHFCTGKDTSLIRSSLGYEKTKDNQMHEVDAYCIGLAAIGADKAKRPDFNNVFKIKQFRRQDRSIINYQRERTYYLEGKKIATNRKPRFEQKGDALSDWYSEKVKLKGKEYADKLTGHITVKKSTRGYNSKNRVMPGTIFYYGGKRLVLSGQTTRGKYYKAYGDPKTNYPAAKCQIYKHNEGLVFI

SEQ ID NO: 10694 - protein, 434 aa, unidentified
MSNYVFVLDTNKQPLEPCSPTIAKKLLSAGKAAVFRQYPFTIILKKAVLKDTASHIQPKEVKQCQLKLDPGSKTTGIAILQDSKLIWAAELTHRGQRIKDDLESRRSLRRGRRGRKTRYRQPRFLNRKREKGWLAPSLEHRVLTTMTWVKRLIKLCPIKSIAQELVRFDTQKLDNPEISGTEYQQGTLYQYEVREYLLEKFNRTCVYCGAKDTPLEVEHIKPRSKGGSNRVSNLTIACVPCNQAKSNLDIQDFLANKQPSILKRVLATAKAPLKDAAAVNSTRQKLFDSLKETGLPVITGTGGQTKFNRTQQGLSKTHYLDAAMVGNTPQLEILTDQPLLIKSTGHGNRQMCGTNKYGFPVRHRTNQKNHKGFQTGDIIKAIVTKGKKIGTYTGRVLCRASGSFDISTQAARVAGISYKYCSHIHKKDGYQYSF

SEQ ID NO: 10695 - protein, 405 aa, unidentified
GRRHRRQRRAKANGTISKKCVKQDTAQSKNPSKRAKEIGIIKRRLPGYKKDVLCIGIKNKEAKYTNRTRPEGWLTPTANQLLQTHINLVRKMQKFLPISDVVLEVNKFAFMRLDNPDIQKWQYQQGPLYQKGSLENAVSEMQEHHCLFCDKPIDHYHHVVPQSENGSNTIANIVGLCAEHHNLVHKDAAWQKKLAEEKVGLNKKYGALSVLNQIIPALTNKLSVLFPKHFFVTAGKSTHDYRAAHGVSKDHWLDAYCIACSVLPSNVCDSNINNHMPYELKQFRRHDRRVLNNENMNRVYTLDNKAVAINRHKATEQEAASLEEFRKEHPNDVCKLKVKEHHPTYRNMNRNYPGSIFLVGKHVHIMQGIAGSKDGKATTYKDSNANSITASKCKFVAKNSGILFV

SEQ ID NO: 10696 - protein, 415 aa, Bacillus sp.; identical to SEQ ID NO: 7676

SEQ ID NO: 10697 - protein, 429 aa, unidentified
MLVYVLKQNGQPFMPTARFGKVRRLLKTKKAKVVRREPFTIKLLYEPETNVVQECYCGVDTGSKHIGVAVVGNDRVLYQSQTELRSDIKKKMDSRRQARRSRRSRKTRYRKCRFLNRRNSIKKDRLPPSVRHKVQAHIDEIEFCKKILPVSDLILEVSQFDTALMKNPSLMNEKVKHWGYQKGFNYGYSSRRSAILHRDNYTCQCCGKKNCRLEVHHIKFKSNGGTDDEENLITLCEDCHKGVHAGTVELNKKPKKSKELKHTTHMSIIRSWLLRKYPNAIETFGFVTSENRNHLQLEKDHYIDACVIASGGIEFKELDVIYRKRHVSKQDRVLTKGIRGEQKLPTSKVFGFKKFDKVKYLGETCFIKGRRSSGAFVLMDIDNNSIDFRDRGGKQNPSYMSIKRITTRKSVLCISKRTKREARLIPILS

SEQ ID NO: 10698 - protein, 389 aa, unidentified
MPNKVYVINKHGRPLMPCSPAKARHLLDAGKAKVKKRTPFTIQLVYGSSGYTQEVILGVDAGSKTIGMSASTTKEELLSAEVKPRNDVVDLLSTRREFRRVRRNRKTRYRKPRFDNRVRSKHKEWLAPSVEVKIQEHITSIKRVCRILPVSKVVIETAEFDLQLLKAIADGKSVPQGEDYQKGEMYGHYNVRQYVLWRDNYTCQCCGAHATKKKEVRLHVHHLESRKVGGDAPSNLITLCDSCHEKFHKGIITAANLKKRKRRSMRDATFMGIMRKTLIQRLRAELTIPVAETRGYITKTTRKKLLVLPKSHTNDALAIALGKHGFNVGYLPEIAQIDKIYTIRPVRHHNRQLHKVTILKGGIRKSNQAEKYVFGYRLFDKVQFNGQDC

SEQ ID NO: 10699 - protein, 406 aa, unidentified
MVYVQDIDGKPLMPTTRHGKVRRLLKSNKAVVVNLCPFTIRLTYISDSYKQEIVLGVDAGTKHVGLSATTKSKELYSSEVILRNDIVDLLSTRRELRKARRNRLRYRKPRFDNRVKSKRPGWIAPSVKYKVDAHICVINNVCSILPISRIVIEVAQFDTQKIKNPEISGKEYQEGDQLEFWNTREYVLARDGHKCQYCKGKSKDSILNVHHIESRKTGGDSPSNLITLCETCHKEYHKGNIDLKIRRGKSLRDAAVMGIMKWRLYEELKSRYDRVFMTFGYITKHNRIKYGIEKSHTSDAFVISKNINAKRIERQYLKRLIRRHNRQIHKMKILKGGKKKNNQAPFEVFGFRLFDRVLYNNKIFFVYGRRKSGSFNIRDFNGENSKDVSRKKFKLIRGKRHPIILK

SEQ ID NO: 10700 - protein, 441 aa, unidentified
MSVSVFVQDRKHRPLMPCRPARARRLLKSGRARVVRLFPFTIRLTDRLIEDSKLQPVLVKIDPGSRRSGFAVVRVDEKGDHHALFFIELVHRGEYIRDALTGRSAHRRWRRGNLRHRAPRFLNRTRPQGWLPPSLQHRVDTATAWVAKLIKLAPVTEIVEELVKFDTQKLQNPEISGIEYQQGTLFEYEVREYLLEKFGRKCVYCGAENVPLNIDHVVPKARGGSNRISNLVLSCVDCNQKKDAQPVDVFLKNRPEVLDRIKRQLRTSLADAAAVNATRWSLFNALKAFGLPVKTGSGALTKFNRHTFGVPKEHWLDALCAGRVNGVHYPKGMGILQVRCTGRGSYQRTRVDKYGFPRGYLTRQKRVHGFATGDMVKAAVPSGKKAGAYLGRVSVRKSGSFNIQTPEGVIQGIGWRHCRLLSFNDGYGYAWLCPAPHSFPV

SEQ ID NO: 10701 - protein, 502 aa, unidentified; identical to SEQ ID NO: 6049

SEQ ID NO: 10702 - protein, 512 aa, unidentified; identical to SEQ ID NO: 3776

SEQ ID NO: 10703 - protein, 431 aa, Anabaena sp.
MSKVFVLDTNFTPLNPIHSAQARQLLRTKKAAIFRQFPFTIILKKSRPDSPVSSLRLKIDPGAKFTGMALVNDSTGEVVFAAELKHRGFAIRDALTSRRQLRHSRRARKTRYRQPRFLNRTRPEGWLAPSLQSRVDNIKTWVERLRKLAPIEAISQELVRFDMQLMANPDIQGKEYQQGTLAGYETREYLLEKWGRQCAYCGVKDVPFQVEHIHPRAKGGSNSITNLTLSCEKCNTKKGTKDIKYFLKKDPSKLEKILKQAKRPLADAAAVNTTRFALLEVLKATGLPVETGSGGLTKFNRNQQKLEKTHWIDAACVGQSTPILNIKGVKPLLITANGHGSRQSCRTDKYGFPSRYVPRFKFVNGFQTGDIVKAVVTKGKKIGAYIGRVAVRTSGSFNISTVFGLIQSISYKYCKSIHKKDGYEYGKSKIC

SEQ ID NO: 10704 - protein, 417 aa, unidentified
MPCSPAKARLLLEEKKAIVKRRTPFTIQLTIATGEAKQPVALGVDSGYKHIGLSATTEKAELYASEVELRQDITDLLSARLALRRSRRSRKTRYRAPRFDNRVANKREGRLAPSVENRIAAHMSRVEAVMQVLPVTAITVETAAFDTQLLKNPDITGAAYQQGEQLGFWNVREYVLFRDGHVCQHCRGKSKDPILNVHHIESRRTGGDAPNNLITLCETCHKAFHRGEIKLKVRRGKSFKAETFMGIMRRTLFERLKKAHPELNVRNTYGYLTKHKRISYGIAKSHCADAYCIADNLGAKRLEGFFFQKQTRKHNRQIHKLLILKGGLKKKNQAPYEVKGFRLFDKVICKGEEAFIFGRRTSGSFDVRRLDGTRISAGINYKKLRLLEPRTTYLTEFRKEAALPPLHECRGFRAEFL

SEQ ID NO: 10705 - protein, 470 aa, unidentified; identical to SEQ ID NO: 2825

SEQ ID NO: 10706 - protein, 441 aa, unidentified; identical to SEQ ID NO: 6900

SEQ ID NO: 10707 - protein, 473 aa, Actinoplanes sp.
VRHGRGETTAPIPGQWRHPDGQPSGDRGRKAPPTHHPVVFVLDKHGRPLQPCTPARARKLLTAGRAVVHRHTPFVVRLKDRTVQDSEIQGVEVGVDPGSKATGVAAFTTQTGARTGLLAIEVRHRGGQIRDKLTARAALRRGRRSRNLRYRAPRFRNRARPKGWLAPSLQHRVDTTMSWIERLRRWAPVIQLHVERVAFDTQLLQNPTIQGAEYQAGELAGYEVREYLLEKWKRRCAYCGASGVPLNIDHIHPKARGGSDRIANLTLACVPCNQAKGSTPVEVFLTGRPVVLARILRQVKTPLRDAAAASSTRWALWRALTGTGLQVAVATGGRTKWNRARTGAPKTHTLDALHVGVLDTVTRWPGTTLVATSTGRGSYARTRSDRYGFPRLRLPRIKQVWGFATGDLVHAVVPSGVKRGTHTGRVAVRSTGSFNIRTKTGLVQGIHHRHIRLLQRADGWAYTHQPEGQPTDA

SEQ ID NO: 10708 - protein, 412 aa, unidentified; identical to SEQ ID NO: 6105
  source 1..412: note = Microcoleaceae bacterium UBA9251

SEQ ID NO: 10709 - protein, 450 aa, unidentified
VKSDSLYGNSIEIRITYRKVKYLSGRTDYVVYVINCDGKPLMPCQPVIARLLLKQGKAKVIKRTPFTIRLLYQTTSYTQPLTLGIDTGSSKIGSAVVNDKNEVVYLSQVEVRNDIADKMKQRAKYRRNRRYRKTRYRKARWLNRKNSIKKDRFSPTMTSKINSHLKEIKFVKSILPITKTILETATFDPHALKNPEVLKNKWLYQKGINYGFANTKAYVLNRDNYTCQYCKGKTKDSRLHVHHIIFRSNGGSDEHENLITLCKTCHDRLHNGEIKLKLNGKKKGQLKHATQMNSIRQQLLKLLPEAEETFGFITKEHRQLMDLPKEHYYDAVAIACLHNIQNDGLVSVDFKTRNILFKKCIADGDYQQTKGVRSEQRIPTGKIQGFKKFDKVRYLGEEYFIKGRMSTGYAILMDIEGNKINLKPIPKLNKMERISARKSWIMTYAFISHL

SEQ ID NO: 10710 - protein, 418 aa, unidentified; identical to SEQ ID NO: 5294

SEQ ID NO: 10711 - protein, 455 aa, unidentified
MSVFVISKNGKRLMPTTRFGHVRHMLKDGRAVIYCRKPFTIQLTYVSSKYIEPLELCIDTGAQHIGISLKSSKKEFISEQRDLLKDEKEKHDDQRMYRRTRRNRLRYRKPRFNNRISNKKEGWFAPSLKNKADQHIMLIQRLATVAPIKDIYLEVGSFDTQLLDAIAKGLPIQEGTDYQQGALYGEETLRKAVFQRDNYTCQVCGRTIKDGAKLHTHHFLYWKGRHGNRLDELCTVCEKCHTSANHQKGGKLYGWGADKKFKSYVSAAFMNTVRWYIVNQVKDLVSDTEVHTTYGAATKLARKDFQFEKSHVNDAYAMGKLHPNIRCKTEYYKKVRRNNRCLEKFYDAKYIDIRDGKKKSGKELGCQRTNRREPRMSENNLRIYHGQKVSKGRRSIRKQRYSIRPGDVVLFNGQKYISKGCGSYGTQVLLDTGKSVSIKKVQIIRHTGGWINLNI

SEQ ID NO: 10712 - protein, 480 aa, unidentified; identical to SEQ ID NO: 2726

SEQ ID NO: 10713 - protein, 413 aa, unidentified
LKVFVLNMRGQPLMPCSPAKARHLLKAGKAVVKRRTPFTIQLRIATGETKQNVTLGVDAGAKHVGLSATTEKEEVFASEVELRQDITGLLAARLSLRRDRRHRKTRYRAPRFLNRVRSKHKGWLAPSVENRIQAHMSRIDAVCRLLPVTKIVIETASFDVQKIKNPTIEGTDYQQGDQLGFWNVREYVLFRDGHICQHCRGRSKDPILNVHHLESRKTGGDAPNNLITLCETCHKAYHAGKIKLKVKRGQSFRAEAFMGIMRWTLLDRVRKTHPKLPVENTYGYLTKHKRIALGLPKTHCADAFCIAGNLKALRRGDFLFQQQTRKHNRQIHKCSILKGGVRTLNQAPFLVKGFRLFDKVRIGGQIGFVFGRRVRGTFNIRRLDKTVIGTDINCKKLSLLETRKTFLTELRKE

SEQ ID NO: 10714 - protein, 425 aa, unidentified
MFVYVLDMNGQPLMPTSRFGKVRRMLRDKKAKVVKSCPFTIRLLYEPETKIVHDIVLGVDTGSKYVGVSCVGNNKVLYQAQVELRDDIKKKMDSRRVYRRSRRNRKTRYRKPRFLNRRNSIKKDRLPPSVKHKVQAHIDEIEFCKKILPISDENIILEVSQFDTALMKTPNLIHEKIRHWGYQQGFNYGHSSRRKAVLHRDNYTCQCCGKKNCQLQTHHIIFRSCGGSDDENNMITLCKECHKGVHDGTIVLNKKPKAKRLKHTTHMSIIRSRLLKEYPNAIETFGFVTSENRNHLKLEKDHYIDACVIASGGLEFELSDVLYRKRCVPVQNRVLTRGIRSERKIPTGKVHGFKRYDKVEYLGKVCFVKARRTKGDFVLMDIGNNSIDFRVIGGCQNPSHKKIKRLNTRRGVICIIQKVQNREER

SEQ ID NO: 10715 - protein, 461 aa, unidentified
GKYKHKGGQLMSVAVISKTGERLMPTSEYRARKLLKSGKAIKYSYHPFTIQLTERKTGNIQPIELCMDTGYIHIGISVKSEKHEYLTEQIDTLTDERSRHNARRMYRSQRRNRKRYRQPRFNNRKKDKGWIAPSLEHKKNIHVQAISRINNVMPLTDITMEMGNFDTQVLKAKEEGRPLPQGVDYQHGERYSIATLREAVFARDGYKCQCCGRTIKDGAILHVHHIKYRSQGGTNSISNLATVCDKCHTPKNHKPGGKLYGWKPKLPSFKGATFMTTIRWQLYNEAKALFPDIDIHITYGAATKERRRELNIDKSHINDAFVMGQFHPRHRIKAVLYKKKRRNNRCLEKFYDAKYIDSRDGKKRSGQELFNGRINRNHKKDSENLHQYRLQKVTAGKRTVRKQHYSVQPHDIIIYESRKRETTGCHCNGARVMLLPDKKSVSIKKIKIYRYAGGYFKSTFN

SEQ ID NO: 10716 - protein, 371 aa, unidentified
VDAGYKHVGLSASTEKAELYASEVELRQDITDLLSARRALRQSRRNRKTRYRAPRFNNRLCTKRKGWLAPSVENRINAHLSRIEAVLRLLPVTKITVETASFDLQLLKNPDISGKEYQEGEQLGFWNIREYVLCRDGHVCQHCYGRSKDPVLNVHHLESRRTGGDSPGNLITLCETCHKALHRGEITLKAKRGQSFRAEAFMGIMRSEVLNRLKASHPELEVNNTYGYRTKHARIANDIAKSHCADAFCIAGNLGAERLGEFFFQKQTRRNNRQIHKLSILKGGIRKRNQAPFEVNGFRLFDKVACKGEEGFIFGRRSSGFFDVRKLDGTCISAGISYKKLHLLEKRRTYLTEIRKEEALPPLPEGRGLRA

SEQ ID NO: 10717 - protein, 414 aa, unidentified
MPCSPAKARLLLKEKKAIVKRRTPFTIQLTIATGETKQPVSLGVDAGYKHVGLSASTEKAELYASEVELRQDITDLLSARRALRQSRRNRKTRYRAPRFDNRIRTKRKGWLAPSVENRINAHLSRIEAVLRLLPVTKITVETASFDLQLLKNPDISGKEYQEGEQLGFWNIREYVLCRDGHVCQHCYGRSKDPVLNVHHLESRGTGGDSPGNLITLCETCHKALHRGEITLKAKRGQSFRAEAFMGIMRSEVLNRLKASHPELEVNNTYGYRTKHARIANDIAKSHCADAFCIAGNLGAERLGEFFFQKQTRRNNRQIHKLSILKGGIRKRNQAPFEVNGFRLFDKVACQGEEGFIFGRRSSGFFDVRKLDGTRISAGISYKKLRLLEKRQTYLTEIRKEEALPPLPEGRGLRA

SEQ ID NO: 10718 - protein, 432 aa, Lactobacillus sp.; identical to SEQ ID NO: 6011

SEQ ID NO: 10719 - protein, 440 aa, Lactobacillus sp.; identical to SEQ ID NO: 5150

SEQ ID NO: 10720 - protein, 442 aa, unidentified
MSTSVFVLDKKHRPLMPCRPARARRLLRAGRARVVKRFPFVIRLVDRTVEQSEVQPVLIKLDPGSRETGAAVVRDDGKKRHHALAFFVIEHRGGAIRDALKARSAFRRRRRSQNFRCRSPRFLNRVKPKGWLPPSLRHRVETTLSFVRRMCRYLPVSGIATELVKFDSQKLQNPEVSGVKYQQGTLFEYEVREYLLEKFGRKCVYCGAEGVPLNIDHVVPRAKGGSNRVSNLVLACVSCNQKKGARSLEDFLKGKPEVLARVRRELKTPLRDAAAVNATRWVLFNELKATGLPVETGSGALTKLNRHAFGVEKEHWLDALCVGRLNGVVTRKGLNVLEIRCMGRGSRQRTRLTKYGFPRGYLMRQKCVHGFATGDMVEANVPKGKKAGLWRGRVAVRVSGSFNIQTPKGVIQGVGWKHCRLISHNDGYGYAWLGHAPHSSPA

SEQ ID NO: 10721 - protein, 427 aa, Nostoc sp.; identical to SEQ ID NO: 2670

SEQ ID NO: 10722 - protein, 442 aa, unidentified
MVTVQQSTHHLPFGRVFIRRNLFMVYVISQDGKPLMPCSDPIARLLLKQGKAKVKKRDPFTIKLTYETTNYTQGLTLGVDTGSGTIGTAVSKDNGDIVYMSEVVVRNDITDKMTQRAKYRRNRRNCKTRYRKARWLNRASSIKKDRFSPTMQSKLHSHVREIEYIQSILPITEMVFETGQFDMQLMKNPSLANPKVRPWGYQKGANYGFENTKAMVLNRDNYTCQCCKGKHKDSKLEVHHIVFRSQGGSDEESNLLTLCHTCHKDLHSGKINPKLSGKVKGNLKYATQMNSIRKQLFRFYPNAIETFGYVTKANRLHLGVDKEHYYDACTIATQGNTFNVKSNLYKKKCVSDGDFQKTKGIRSEQPIVTDKICGFRKFDKVRYFGNDYFIKGRMSTGYAILMDIDGNKIDFSTMPRGYKTPKLSNCKRITARSTVMTQVKVV

SEQ ID NO: 10723 - protein, 442 aa, unidentified
LMPTFRLGKVRHLLKDGKAKIVKHHPFTIQLLYDSKTNTQPIEICEDVGYNYIGISVKSQSHEYVSAQYDTLQDEKACHDSCRKYRRTRRNRLRYRKPRFDNRKRSEGWLAPSLRHKKELNVNVVKMYCAVMPITHATVEVGSFDTMLVKAIQEGKAIPEGADYQKGPRYNLATLREAVFYRDNYVCKVCGRKATEGAILHVHHMFYWKGRHGNSLSELITVCEKCHTPANHQKGGKLYGFGENVKFADLSGAAFMNTVRWQIVNELYAAFGKDFVTVTYGAMTKEKRIALHLEKSHNNDAYAMGNCHPAHRCEFGHYQKRCRNNRVLEKFYDATYIDTRTGDKAKGKELFNGRISRNHKKDSEDLHKYRSKKVSKGRRSIRRQRYAIQPYDTVRLESKSYITSGCHNKGTRLLIPANGKSKSVAISKVQVVCHAGAWIQII

SEQ ID NO: 10724 - protein, 512 aa, unidentified
MSTVYVLNKDGKPLMPTTRGGHVRHLLKEQKARVVRTKPFTIQLLYETDDVVQLLYLGIDPGRTNIGVAVVKTDGTAVFTAHLETRNKEIPKLMKKRKNSRRARRTNGRRCRRQRRAKANGTISKKCVKQDTAQNGSVSKRAKKIGVIKRHLPGCEKEVLCIGIKNKEAKFSNRVRPEGWLTPTANQLLQTHINLVKKIQKFLPISDVVLEVNKFAFMQLDNPNIQKWQYQQGPLYQKANLEEAVSEMQEHHCLFCKKPIDHYHHVVPQHKNGSNTIGNIVGLCTKHHDLVHKEAAWQEKLAKKKTGLNKKYGALSVLNQIIPALTKELSSLFPKHFFATNGKSTYDYRAAHGVSKDHWLDAYCIACSVLADDVCDNNINSHVPYELKQFRRHDRRALHKENMSRVYTLNGKSVATNRHKATEQTTDSLEEFRQCQPDDVCKLKVKEHYPEYRNPKRNFPGCVFLVGKHTHVMQGTSGSHNGKADGYYDTNGNSYSSGECKFVAKNEGIVFA

SEQ ID NO: 10725 - protein, 461 aa, Parasutterella sp.; identical to SEQ ID NO: 3646

SEQ ID NO: 10726 - protein, 362 aa, unidentified; identical to SEQ ID NO: 4544

SEQ ID NO: 10727 - protein, 465 aa, unidentified
MNTCVCVLGNNGERLMPTFRLGKVRRLLKDGKAKIVKHHPFTIQLLYDSKTNTQPIEICEDVGYNYIGISVKSKSHEYVSAQYDTLQDEKEHHDDCRMHRRTRRNRLRYRKPRFDNRKRGEGWLAPSLMHKKELNVNVVKMYCAVMSITHATVEVGSFDTMLVKAIQEGKVIPEGADYQKGPRYNLATLREAVFYRDNYVCKICGRKATEGAILHMHHMFYWKGRHGNSLDELLTVCEKCHTPANHQKGGKLYGFGEDVKFADLSGAAFMNTVRWQIVNELYVAFGKPFVTITYGAMTKEKRIALQLEKSHNNDAYAMGEFHPNLRCMFEHYEKARRNNRILEKFYDSRYIDIRTGEIATGKELFNGRINRNHKKDSENLHKYRGKRTYAGHRALLRKKVNLNPGDLVSLNGENLIVHSTHTKKNGAVNVEFETPAKSGQKSASLKKLKIVKAANSIHPAWKKIS

SEQ ID NO: 10728 - protein, 431 aa, unidentified; identical to SEQ ID NO: 8350

SEQ ID NO: 10729 - protein, 434 aa, Mitsuokella sp.; identical to SEQ ID NO: 7534

SEQ ID NO: 10730 - protein, 424 aa, unidentified; identical to SEQ ID NO: 3434

SEQ ID NO: 10731 - protein, 413 aa, unidentified; identical to SEQ ID NO: 2636

SEQ ID NO: 10732 - protein, 349 aa, unidentified
VSYCKPLINIGEGVIYSSICTGLSLQTYQKRKEVPYMVYVLDIDGQPLMPTTRHGKVRRLLNSHLAKVVKRCPFTIQLLYQSTKETQPVSLGVDAGSKHIGMAATTEKKVVYQEELSPRNDVVKLLSARRTLRRTRRNRKTRYRKPRFNNRVHSKHKGWLAPSVEVKIQEHITAIKRICQILPISDIHVETAEFDLQRLKAMEEGRPLPVGTDYQLGEQYDFYNTRQYVLHRDEYTCQCCGTHDNNVKLHVHHIESRQTGGDAPNNLITLCEHCHKLLHAGKTILPKGKKRGKSYRDATFMGIMRKTLLERLRKEVDVPVSWTYGYITKYWREKTDLEKSHINDAICIS

SEQ ID NO: 10733 - protein, 442 aa, unidentified; identical to SEQ ID NO: 2903

SEQ ID NO: 10734 - protein, 456 aa, unidentified
MSTCVCVLSNNGERLMPTFRLGKVRRLLKDGRAKIVKHHPFTIQLLYDSKTNTQPIEICEDVGYNYIGISAKSKSHEYVSAQYDTLQDEKEHHDDCRKMRRTRRNRLRYRKPRFDNRKCDKGWLAPSLEHKKQLNISLIERYVSVIPITHATVEVGSFDTMLLQAIQKGKAKPESADYQKGPHYNLATLREAVFYRDNYTCQVCKRKIADGAILHMHHMFYWKGRHGYQLDELATVCEKCHTPANHQKGGKLFGFGEGKEFADLSGAAFMNAVRWQIVDALYTTYDKEFVTITYGAMTKEKRIALQLEKTHNNDAYAMGDYHPACRCKFRHYQKRRRNNRVLEKFYDATYIDARTGNKAKGKELFNGRINRNHKKDSENLHKYRSKKVSKGRRSIRRRRYAIQSYDTVRLEGKTYITSGCHNKGTRLLIPVNGKSKSVAISKVQVVCHAGAWIQIS

SEQ ID NO: 10735 - protein, 413 aa, Blautia sp.; identical to SEQ ID NO: 3119

SEQ ID NO: 10736 - protein, 457 aa, unidentified
MGDGYFTAERLSGLIFSRNLEKEEGIMQNKVYVINKHGRPLMPCSPAKARHLLDDGKAKVKKRTPFTIQLLFGSTGYTQEVILGVDAGSKTIGLSASTETEELFSAEVKPRNDVVDLLSTRREFRRARRNRKTRYRKPRFDNRVRSKHKGWLAPSVEVKIQEHMTAIRRICRILPVSKVVVETAEFDLQLIKAVEEGKPVPQGEDYQKGEMYGHYNVRQYVLWRDGYTCQCCGAHATQKKEVRLHVHHLESRKIGGDAPSNLIALCESCHEKFHKGIITTADFKKRKRKSTRDATFMGIMRKTLIQRLRAELTIPVIETRGYITKATREKLLVLPKSHTNDALAIAQGPQGFHTGYLPGIRQATHIYTIRSVRHHNRQLHRATILKGGVRKANQAEKYVYGFRLYDKVLYNGTECFVWGRRASGSFLLRKLDRAKVKDGVSYKHLKLLERSQNYLIA

SEQ ID NO: 10737 - protein, 512 aa, unidentified; identical to SEQ ID NO: 7352

SEQ ID NO: 10738 - protein, 415 aa, Bacillus sp.; identical to SEQ ID NO: 5517

SEQ ID NO: 10739 - protein, 413 aa, unidentified; identical to SEQ ID NO: 2636

SEQ ID NO: 10740 - protein, 507 aa, unidentified
MSEYIYVIGMDGDPQMPTKRKRHVEKLLQTGRARVFRQVPYTIQLTYKNQPVLQPVTIAEDPGRSNIGMAVVSLSGELLSAAVVQTRNKEIVKLMEKRKQHRRASRNGERKARQRLAKKCHTMIKTGFLMRKLPMYRKDKRVKCLVIRNTEARFCNRKREDGWLTPSAEHLVRTHINLIHKMQKFLPITDVAIEINRFAFLSLEDQSISGVDFQKGPLKGYDDLNAAVEDLQDGHCLMCDSPIEHRHHIVPRSMQGSNTIGNIAGLCCKCHERVHKDARFEDRLKKKKAGLDKRYAAVSVLNQAIPFICKRLEQEFGKEHVHYCSGRDTSMVRRSLGYHKTKEEQLHEVDAWCIAVLALQHVPEKAPKFDHVHEILQFRRQDRSRIKAQTSRAYYYEGKKIAKNRKKAEGQREDSLQEWRKRQVERYGKEQTRKMISQLEVKESIRRYNRLDRLMPGAVFYYQGVRYVMRGQHSNGQYLQAVGMGDKDFPAKKCKIVVHNQGLVFVS

SEQ ID NO: 10741 - protein, 545 aa, unidentified
MVYVQDINGKPLMPTTRHGKVRRLLKENKAVVVNLCPFTIRLTYVTSDYKQEIVLGVDAGTKHVGLSATTKSKELYSSEVILRNDIVDLLSTRRELRRARRNRLRYRKPRFNNRIKSKRPGWIAPSVKYKIDAHIRVVENVCSILPISRIVIEVAQFDTQKIKNPNISGKEYQEGDQLGFWNTREYVLARDGHKCQYCKGKSKDKILNVHHIESRKTGGDSPSNLITLCETCHKEYHKGNIDLKIKRGKSLRDAAVMGIMKWRLYEEIKSKYDRVSMTFGYVTKYNRINHGFEKSHVSDAFVISKNFNAIRSGYYYKVRLVRRHNRQIHKQKIQKGGIKRLNQSPFEVFGFRLFDRVMFENSYYFIFGRRKTGSFDIRYIDGKNQKNVTYKKLKLSRCKRFMIQMELNKKHGHVLKMKEILAETLRKSGAAVCDKIKAMFLNGECDHLTANDLETWMQLANPAKYYTGEEAVSYLNVTSKRFYEYRKAKLVPDPVKIKGFPKPLYTKVMLDEAIKTISGMSERDIYMRILNAKSRESRAKERRGA

SEQ ID NO: 10742 - protein, 442 aa, unidentified
MSTTVFVLDKKHRPLMPCRPARARRLLRAGRARVVKRFPFVIRLVDRTVEQSEVQPVLIKLDPGSRETGAAVVRDDGKKRHHALAFFVIEHRGGAIRDALKARSAFRRRRRSQNLRCRSPRFLNRVKPKGWLPPSLRHRVETTLSFVRRMCRYLPVSGIATELVKFDSQKLQNPEVSGVEYQQGTLFEYEVREYLLEKFGRKCVYCGAEGVPLNIDHVVPRAKGGSNRVSNLVLACVSCNQKKGARSLEDFLKGKPEVLARVRRELKTLLRDAAAVNATRWVLFNELKATCLPVETGSGALTKFNRHAFGVEKEHWLDALCVGRLNGVVTRKGLNVLEIRCMGRGSRQRTRLTKYGFPRGYLMRQKCVHGFATGDMVEANVPKGKKAGLWRGRVAVRVSGSFNIQTPKGVIQGVGWKHCRLISHNDGYGYAWLGHAPHSSPA

SEQ ID NO: 10743 - protein, 419 aa, unidentified; identical to SEQ ID NO: 8591

SEQ ID NO: 10744 - protein, 470 aa, unidentified; identical to SEQ ID NO: 2825

SEQ ID NO: 10745 - protein, 512 aa, unidentified; identical to SEQ ID NO: 5811

SEQ ID NO: 10746 - protein, 494 aa, unidentified
MDMVYVLNKDGKPLMATTRGGRVRYLLKEKKARVVSSTPFTIQLNYDTPDATQDLILGIDPGRTNIGVAVVKEDGSCVFSAHLETRNKDVPLLMKKRAAFRRNHRTLDRRRKRQRRAKAAGTTIAEGSVERLLPGYEKPIMCHHIRNKEARFNNRSRPAGWLTPTANHLLQTHINLIAKVAKFLPITKVVVELNRFAFMAMANPNIRRWEYQQGPLCGLGSVEDAVYAQQDGHCLFCKKPIDHYHHVIPRHKRGSETLANRCGLCAKHHDLVHTDKAWADKLVTRKEGMNKKYHALSVLNQIIPHLMEYIGSETLYDAYATDGRSTKGFRIAKNVPKEHYTDAYCIACSILDTDIEVSAPVEPFEMKQFRRHDRQACIRQMVDRKYILDGKVVATNRHKTIEQKSDSLEEFREAHGNAAVSQLTVKPHHPQCKDMARIMPGAVMVFDGAVGVFQGSSGRNNGTPNYYNSTKGERFLTRSCVLLAQNAGMVFIPA

SEQ ID NO: 10747 - protein, 409 aa, unidentified
EPLMPCSPGKARLLLKQQKACVVKRTPFTIKLLFGSAGYKQPITLGVDAGSKHVGLSASTEKRELYSEEFTPRSDVVELLSTRRQNRRSRRNRKTRYRVPRFDNRVHSKHKGWLAPSVEVKIQEHITVIKHICKILPISLVRVETAEFDTQRLKAMLAGKPLPVGTDYQLGEMYDEYNVRQYVLKRDHYTCQCCGTHNTAKKVVKLHVHHLESRKVGGNAPSNLITLCTTCHDALHKGKVSLDGKERGKPLRDAAFMGIMRKALMARLREELPIPVQGTYGYITKMRREQNDIKKSHVNDARCISKHPLAEPCSVCYRTKAIRHHNRQTHKVNFSKKGIRKRSQMPYLVEGFRLWDKVLYKGQECFVSGRRASGSFTLKKLDGTRISKGVTFKKLRLLEPATNYLIERM

SEQ ID NO: 10748 - protein, 327 aa, unidentified
MAVFVLDKKKQPLMPCSEKRARLLLARGRAVVHKRYPFTIRLKNRVGGEAQPLRLGIDPGSKTTGLALIREPDSQQRHVLCLFELIHRGFQIKKALQQRAAFRRRRRSANLRYRAPRFNNRIKPKGWLAPSLQHRVDTVMAWVNRLSKSAPITGISQELVRFDTQKLESPEISGVEYQQGTLLGYEVREYLLEKWGRECAYCGTADTPLEIEHVVPRSRGGSNRVSNLTLSCHPCNQSKDALSLVDFFATDKGLKKRLKANGHTANARLERVQRQLKQPLRDASAVNATRWALFSALNATGLPVTVASGGRTKYNRQRLNIPKSHAL

SEQ ID NO: 10749 - protein, 413 aa, unidentified; identical to SEQ ID NO: 2636

SEQ ID NO: 10750 - protein, 406 aa, unidentified; identical to SEQ ID NO: 2874

SEQ ID NO: 10751 - protein, 395 aa, unidentified
LVYVLNPFGQPLMPTDDHRKVRILLKEKKATVVRRSPFTIRLLHRTKQYVQPVTLGVDAGSKHVGVSACTPEKELFRAELMPRNDVVDLMSTRRELRRSRRNRTTRYRAPRFENRVHSKRKGWLAPSVEVKIHNHNQLIEFACKILPVSLIRIETAEFDLQRLKAMEEGKPLPEGEDYQHGEMYDQYNVRQYVLFRDNYSCQCCGAHPTDKKPVKLHVHHKESRKVGGDAPNNLITLCEDCHDLLHKGIVELPDDKKRRGKSTRDATFMGIMRKTLLQRLRDKMGIPIQNTYGYITKAIRESNGIEKTHTSDAQCIARCPKAKPAAEEYLIKPVRRHNRRLHKNAILKGGYRKANQAPTFVFGFKLFDMVDYNGEECFVYGRRSSGSFDVRHLDG

SEQ ID NO: 10752 - protein, 451 aa, unidentified; identical to SEQ ID NO: 7526

SEQ ID NO: 10753 - protein, 345 aa, Bacillus sp.
MVSYCFVLDICGKNLSPTNENKGWYLIRKKKAKLIHKFPMVIQLFKEVSEGEIDQTLIHFNIDDGSKYTGVALVQEGKTKNKPLFKGTIEHRTDVKEKMDVRRGYRRYKRSHKKYRPARFSNRSSSKGKRRIAPSIKQKKEATLRVLNQLKKWIRVDSIYLENVLIDIRKLEKGSQPYRFEYQQSNRLDENLRKATLMRDTFTCQDCGKRDGRLEAHHIIPRRVKGPDSIHNLITLCPSCHEQVTGKEMTHVERFLRKIDGKVIYFQDAMHVMQGKTYLQEELQKLAPVTLTSGGDTANRRIDWCIEKSHSNDAIVLSQLKVSPEQCQIKDWLIKPMRRRARFSP

SEQ ID NO: 10754 - protein, 452 aa, Pseudoalteromonas sp.; identical to SEQ ID NO: 5364

SEQ ID NO: 10755 - protein, 428 aa, unidentified
LKVFVLNMRGQPLMPCSPAKARHLLKAGKAVVKRRTPFTIQLRIATGETKQNVTLGVDAGAKHVGLSATTEKEEVFASEVELRQDITGLLAARLSLRRDRRHRKTRYRAPRFLNRVRSKHKGWLAPSVENRIQAHMSRIDAVCRLLPVTRIVIETASFDVQKIRNLEVEGTGYQQGDQLGFWNVREYVLFRDGHVCQHCHGYSKDKILNVHHLESRQTGGDAPNNLITLCETCHKACHAGKIKLKVKRGQSFRAEAFMGIMRWTLLDRVRKAHPGLPVENTYGYLTKHTRITHGLPKTHCVDAYCIAGNLKAVRRGVYLHQRQMRKHNRQIHKFTVLSKRLEDGTKIGYRKLNQSPYLVHGFRLFDKVRCLGQIGFIFGRRSSGYFDVRRLDGVKLSSGISYRKLTLLEKRSTYLTELRKQDGASSPV

SEQ ID NO: 10756 - protein, 459 aa, Ktedonobacter sp.
MHRHSGVAFQSRTLRRVVKQRDGVSIAVRLASKGNLRRSWTRKTLPGACRRPERARTEDSAMSYVFVIDQEKRPLDPVHPGRARKLLSSGKAAVYRRFPFVLILKHPVSEAHPQPLRLKIDPGSKTTGLAVLNDTSGQVLWAAELVHRGEEVHQALQKRAGVRRGRRSRHTRYRAARFSNRRRKRGWLAPSLCSRMQNVQTWTRRLMRWCPLGAISYEAVRFDTQAIQNPEIKGVAYQHGTLAGLEVKEYLLLKWRHKCVYCQKGDIPLEVEHIVPKRRGGSDRITNLTLACEACNQQKGSQTAQAFGFPHLQAQALQPLKDAAAVNSTRWALYERLKATGLPIEVSTGGQTKWNRKQRGIPKSHWLDAVCVGPSTPERVQWQHVIPLLITARGRQCRQLCNVDGWGFPRSRPKGPSKVFGFQTGDMVQAVVTRGKRMGTYVGRVAIKTDGYFKITGTH

SEQ ID NO: 10757 - protein, 494 aa, unidentified
MTMVYVQNKDGKPLMPTTRYCYVRLLLKEKKARVVCTTPFTIQLNYDTPDITQDLILGIDPGRTNIGVAVVKEDGQCVFSAHLETRNKEVPLLMKKRAAFRRQHRTQDRRRKRQRRAIAAGTTVESNTIERLLPGYEKPVVCHYIRNEEARFNNRSRPQGWLTPTANHLLQAHINLIAKIAKFLPITKVVVELNRFAFMAMDNPNIHRWEYQQGPLYGLGSVDDAVYAQQDGHCLFCKKPIDHYHHVVPRHKGGSETLANRCGLCEKHHALVHKDKAWAEKLVTRKGGMNKKYHALSVLNQIIPFLMEYLGRETPYDVYATDGKSTKGFRIAKNVPKEHYTDAYCIACSILDANTKVSTPAEPFELKQFRRHDRQACIRQMVDRKYLLDGKVVAANRHKAIEQRSDSLEEFREAYGDAAVSQLTVRLHSPQYKDMARIMPGAVMDFDGIVGVFQGSEGFHNGKPDYYKSTKGAKVLTKRCALLAQNAGMVFIPA

SEQ ID NO: 10758 - protein, 406 aa, unidentified; identical to SEQ ID NO: 4082

SEQ ID NO: 10759 - protein, 420 aa, unidentified
LYDSKTNTQPIEICEDVGYNYIGISVKSQSHEYVSAQYDTLQDEKACHDSCRKLRRTRRNRLRYRKSRFDNRKRGEGWLAPSLRHKKELNVNVVKMYCAVMPITHVTIEVGSFDTMLLKAVQEGKAIPEGADYQKGPRYNLATLREAVFYRDNYVCKVCGRKATEGAILHMHHMFYWKGRHGNSLSELITVCEKCHTPANHQKSGKLYGFGENVKFADLSGAAFMNTVRWQIVNELYAAFGKDFVTITYGAMTKEKRIALRLEKSHNNDAYAMGEFHPNHRCTFEHYEKVRRNNRTLEKFYDSRYIDIRTGEIATGKELFNGRINRNHKKDSENLHRYRGKRTYAGHRALLRKKVKLNPGDLVSLNGEVLIVHGTHTNKKGAVNVEFKVPAKNGQKSASLKKLKIVKTTDSMHSAWEKIS

SEQ ID NO: 10760 - protein, 475 aa, unidentified
DSLFTKGVPCMSTCVCVLSNNGERLMPTIRLGKVRHLLKDGKAKIIKHHPFTIQLLYDSETNIQPIEICEDVGYNYIGISVKSQSHEYVSAQYDTLQDEKDCHDSCRKMRRTRRNRLRYRKPRFDNRKHDKGWLAPSLEHKKELNVNVIKMYCEVMPITHATVEVGSFDTMLVKAIEEGKATPESTDYQKGPRYNLASLREAVFYRDNYTCQVCGRKANEGAILHVHHMFYWKGRHGNSLNELVTVCEKCHTPANHQKGGKLYGFGENIKFANLSGAAFMNTVRWQIVNELYAAFGKPFVTFTYGAMTKEKRIALHLDKSHSNDAYAMGNFHPVDRCAFEHYEKVKRNNRILEKFHDSRYIDIRTGKEAKGKELFNGRISRSHKKDSENLHKYRGKRIRKGYRALRRKKVALNSGDLVSLNGETLIVHGTHTNKKGNVRVEFKVAALNGKKSASLKKLKIVKTSTPMHSAWAKVS

SEQ ID NO: 10761 - protein, 459 aa, Burkholderia sp.
LAVFVLDKTGKALMPCTEKRARLLLARGRARVHRVMPFIIRLVDRGAAASNLQPLRIKLDPGSKTTGGALVRDTDVLAPSTGEMQRGAAVLNLFGLVHRGRQISAALTARRAMRRRRRGNLRYRAPRFLNRTRTEGWLPPSLQHRVDTIMAWVRRISRWAPVTALSSELVRFDMQALDNPDIEGAEYQQGTLADYEVREYLLEKWGRVCAYCDTTNVPLQTEHIVARARGGSNRVSNLTLGCAPCNQKKAALPVEVFLAKDLKRLSAILAKAKRPLKDAAAVNTTRWVLANALKTTGMPVELASGGQTKFNRTRFAIPKTHALDAVCVGAVAAVSGWRAPTLVVKCAGRGSYQRTRLDRYGFPRGHLTREKRVHGFQTGDLVRAKVPSGQKAGTHIGRVAVRATGYFNIQSAGEVVQGVAHRHCQLVQRSDGYGYSRQLYPKETQEKAVLRTARYPFPA

SEQ ID NO: 10762 - protein, 436 aa, unidentified
MTKTLTKQTTQACVLDQHGKPLMPTTRLGKVYRLLKTKKAHIVSYEPFTIQLDYEPDTHIIQPMTLGVDSGAIHSGYSIANKQREYYSAEVIARDDISKRLSDRRMYRQNRRSRKTRYRKPRFKNRKNKKKGWLPPSLEQKIAVQVNEINHLHRYFPIETIIIEVAEFDIQKIKNPDISGVEYQQGTLQGYNIRNYLLEKHGRKCFYCGKTVSKFEVEHMLPKSRGGSNRIDNLTLSCHECNQKKDTLTAEEFIRQTLPAKKAATKLKQLPNEKRLFKYMAHMNATRWALYNAIDKKYANVKMTYGYITKHDRIQAGLPKAHHIDAKCITGFTTVPAMNQTIVKVKMRRHNRLLHRATFSKGHIRKAASLPTITFGFQLYDLVLFDNHYYYIKGRRSSGYFDLVSIEGLEDTNRSYKKLTQLAHTNAYLINHYVNL

SEQ ID NO: 10763 - protein, 458 aa, Lactobacillus sp.; identical to SEQ ID NO: 8256

SEQ ID NO: 10764 - protein, 442 aa, unidentified
MVTVQQSTHHLPFGRVFIRRNLFMVYVISQDGKPLMPCSDPIARLLLKQGKAKVKKREPFTIKLTYETTNYTQGLTLGVDTGSGTIGTAVSKDNGDIVYMSEVVVRNDITDKMTQRAKYSRNRRNRKTRYRKARWLNRASSIKKDRFSPTMQSKLHSHVREIEYIQSILPVTEMVFETGQFDMHLMKNPSLANPKVRPWGYQKGANYGFENTKAMVLNRDNYTCQCCKGKHKDSKLEVHHIVFRSQGGSDEESNLLTLCHTCHKDLHSGKINPKLSGKVKGNLKYATQMNSIRKQLFRCYPNAIETFGYVTKVNRLHLGVAKEHYYDACTIATQGNAFNVKSNLYKKKCVSDGDFQKTKGIHSEQPIVTDKICGFRKFDKVRYFGNDYFIKGRMSTGYAILMDIDGNKIDFSTMPRGYKTPKLSNCKRITARSTVMTQVKVV

SEQ ID NO: 10765 - protein, 408 aa, unidentified; identical to SEQ ID NO: 4142

SEQ ID NO: 10766 - protein, 512 aa, unidentified
MSTVYVLNKDGKPLMPTTRGGHVRHLLKEQKARVVRTNPFTIQLLYETDNLVQPLYLGIDPGRTNIGVAVVKTDGTAVFTAHLETRNKEIPKLMQGRKKARRARRTNGRRCRRQRRAKANGTISKKCVKQATAQNGSVSKRANEIGVIKRHLPGCEKEVLCIGIKNKEAKFSNRTRPEGWLTPTANQLLQTHINLVKKIQKFLPISDVVLEINKFAFMRLDNPNVQKWQYQQGPLYQKASLEEAVSEMQEHHCLFCKNTIDHYHHVVPQHKNGSNTIGNVVGLCAKHHNLVHKDTSWQEKLAKKKTGLNKRYGALSVLNQIIPALTKELSSLFPKHFFATNGKSTYDYRAAHGVSKDHWLDAYCIAGSVLPNDACDNNINNRVPYELKQFRRHDRRALHKENMSRVYTLNGKSVATNRHKAIKQTTDSLEEFRQRQPNDVCKLKVIEHHPEYRNPKRNFPGCVFLVGKHTHVMQGTSGSHNGKADGYYDTNGNSYSSGKCKFVVKNEGIVFT

SEQ ID NO: 10767 - protein, 413 aa, unidentified; identical to SEQ ID NO: 2636

SEQ ID NO: 10768 - protein, 410 aa, Tissierella sp.; identical to SEQ ID NO: 4081

SEQ ID NO: 10769 - protein, 417 aa, unidentified
MPCSPAKARLLLKEKKAIVKRRTPFTIQLTIAMGEAKQPVTLGVDSGYKHIGLSATTEKAELYASQVELRQDITDLLSARLALRRSRRSRKTRYRAPRFNNRVASKHKGWLAPSVENRIAAHLSRVEAVMRVLPVTAITVETAAFDTQLLKDPDIAGGAYQQGEQLGFWNVREYVLFRDGHVCQHCRGKSKDPVLNVHHIESRRTGGDAPNNLITLCETCHKAFHRGEIELKVKRGKSFKAETFMGIMRWTLFERLKKAHPELSVRNTYGYLTKHKRISHGIAKSHCADAYCIADNLGAKRLEGFFFQKQTRKHNRQIHKLSILKGGLRKKNQAPYEVKGFRLFDKVICKSEEAFIFGRRTSGSFDVRRLDGTRISAGISYKKLRLLEPRTTYLTEFRKEAALPPLHKCRGFCAEFL

SEQ ID NO: 10770 - protein, 413 aa, unidentified; identical to SEQ ID NO: 7541

SEQ ID NO: 10771 - protein, 431 aa, unidentified; identical to SEQ ID NO: 2952

SEQ ID NO: 10772 - protein, 456 aa, unidentified; identical to SEQ ID NO: 4017

SEQ ID NO: 10773 - protein, 442 aa, unidentified; identical to SEQ ID NO: 4522

SEQ ID NO: 10774 - protein, 368 aa, Pseudanabaena sp.
  source 1..368: note = isolate UBA1465
LAKQTLQAIRKDATMSNQIFVLDTNHKPLTPCTAGMARSLLKAGRADVFRQFPFTIILKKEVTATPEPIEIKIDAGSKTTGLALVQKEEAIFGAELSHRGQAIKNNLESRRSLRRGRRNRKTRYRQARFLNRTRPKGWLAPTLEHRVLTIMTWVRKFIKLAPIGSIVSELVRFDLQQIENPEISGIEYQQGELQGYEVREYLLEKWDRKCAYCGAENVPLQVEHIHPKSKGGSNRISNLALACEPCNTKKGVQSITDFLAKKPEVLKKVVTQTKRSLKDAAAVNSTRWALLNALKTNGLPVGTGSEGFQTGDIVKAIVTTGKKIGEYVGRVAVRSTGSFNISASTLIQGISHKYCKTIHRKDGYSYGF

SEQ ID NO: 10775 - protein, 350 aa, unidentified; identical to SEQ ID NO: 10552

SEQ ID NO: 10776 - protein, 338 aa, unidentified
LVWNKRGKPLMPCSPAKARLLLKEKKAIVKRRTPFTIQLTIATGETKQPVSLGVDAGYEHVGLPASTEKAELYASEVELRQDITDLLSARRALRQSRRNRKTRYRAPRFDNRIRTKRKGWLAPSVENRINAHLSRIEAVLRLLPVTKITVETASFDLQLLKNPDISGKEYQEGEQLGFWNIREYVLCRDGHVCQHCYGRSKDPVLNVHHLESRRTGGDSPGNLITLCETCHKALHRGEITLKAKRGQSFRAEAFMGIMRWEVLDRLKASHPELEVQNTYGYRTKHVRIANGIAKSHCADAFCIGGNLGAERLGEFFFQKQTRRNNRQIHKLSILKGAL

SEQ ID NO: 10777 - protein, 421 aa, unidentified; identical to SEQ ID NO: 4757

SEQ ID NO: 10778 - protein, 413 aa, unidentified
MTSYSFVLDADGKQLAPTKEQKAWFLIRKKRATLVSKYPMVIQLNKGIPDDEICKDEIRCGIDDGSLHTGLALVQKCQTKSKVFLKAVIEQRNDVKHLMDVRRGYRRYHRYHKRYRQARFNNRTSLKREGRIAPSILQKRQAIIRVINQLNKWINITNYWLEDVAIDIRALTDGYKSYRWQYQKSNRLDENIRKAVILRDGCKCMECGKFNCRLEVHHIKPRRLKGSSTLGNLITLCTKCHQKTEGVEELYMGRHFALLNFPDNKDLNYAQHVMIGKKWLREQISNLGILHLTNGGDTANKRIDWNIEKSHSNDAICITDLQPDTCNIKEWTIKPMRRQSKAKNDNILGINHRDLVEYTFKNGETHRGYVTALYPKQNALNFQSPIKHCKKVNAKKCRLLWKFNKIYWLDNVL

SEQ ID NO: 10779 - protein, 319 aa, unidentified
APRFDNRIRTKRKGWLAPSVENRINAHLSRIEAVLRLLPITKITVETASFDMQRLKNPDISGKEYQEGEQLGFWNVREYVLFRDGHVCRHCHGRSKDPVLNVHHLESRRTGSDSPDNLITLCETCHKALHRGEITLKAKRGQSFRAQAFMGIMRREVLNRLKASYPELKVHETYGYLTKHARIANGIVKSHGADAFCIAGNLGAERLGEFFFQKQTRRNNRQIHKLSILKGGIRKRNQAPFEAKGFRLFDKVACQGKEGFIFGRRSSGSFDVRKLDGTRISAGISCKKLRLLEKRRTYLTEIRKEEALPPLPEGRGLRA

SEQ ID NO: 10780 - protein, 537 aa, unidentified; identical to SEQ ID NO: 9239

SEQ ID NO: 10781 - protein, 480 aa, unidentified
LYTKPLDNIGEGSLPPSGEINLKGMTFMVYVKSIDGKALMPTSNAKARKLLKQKKAKVVSLRPFVVKLTYKTKTEYIQKLNLGVDSGYSNIGFSVIDAKQEYIAGEVKLLEGMKKRLLEKASYRRIRRSRLRYRKARWNNRVKSKKKGWLAPSLKHKLDTHIKFIDYLKNILPIGKITIEVANFDIQKMKDDLISGIDYQNGDMFGFWNVREFVLHRDGHKCQNPNCKHKDKKEQILKVHHIRYRSEGGSDRPENLITLCSKCHTPANHKKGKFLYDWCVNGKKVRGFKDATFMSMIRWHLVNELKSKHNNVSITYGYITKNHRIQNGIEKSHLNDAFAIAKGTNQARTKDRFLVIQDRLKNRSLEKFYDSKIIDIRTEKKVSGGDLNCGRSTRNKNLNTENLRKYRGVKISKGQRRIRKQKYFYQPNDLVKYDRKVYTVKGTQNEGKYIALKEIKKVPKVELLIPYVFKKGINWSYGLC

SEQ ID NO: 10782 - protein, 552 aa, Streptomyces sp.
MTTFPAGEQTHPGVLPQRQALESVGADTLGSRDETAHGHPATARGTGREHGRGETDGRGTRPRRRHAETGASAAETAEDGSGDAPTHTQEYAGGIGASRVFVLSKDGQPLMPCHPARARELLAKGRAVVARQVPFTIRLKDRTLAESEVDGVQLRIDPGSKGTGLALTDEKKETGEDGATVTVRRGLVSVELQHRGDQIRMCMQQRAGYRRRRRSANCRYRAPRSDNRTRPEGWLPPSLRHRVDTTVSLARRMCRYAPITEIHVERVAFDTHSMSAGRSLTGVEYQQGTLAGTEARAYLHAKWNRACAYCDATGVPLNIDHLRPRSRGGSDRISNLVLACVPCNQAKGSTPVDVFLAQRPDRLAKILQQVKTPLHDAAAMNTTRWRLTEALETLGRPVHAWSGGRTKWNRTAMGLDKTHTLDAFSVGRLDHEDGDAIVRFPEQVLVVKATGRGSYARTTPDRFGFPRLRRARAKQHYGYVTGDLVRATVPSGKWAGTWTGRISVRARGQHSLMTPVGRFNVSYRNLRLVQRGDGYAYATRRELVRSTSRKTS

SEQ ID NO: 10783 - protein, 524 aa, unidentified
VLRQPTALQPKGDIRPKVKNPLRGMGEATGRNPDSHPGSSPYNQGLQPKTGVTTLARHISPHNQTSVPVLDKDGIPVAPTRPSRARRLLDQGRAAKTWKHGRFAIRLSDISKADCSVPDVTLGIDPGARTTGMAVTVTTPDGEKIVHGCQVRHRGHRISQAMLSRRSYRRNRRSRIRRRPARFNNRTRRQGWLPPSLESIRANIRTNVSHLTELFPVSVINVETCRFDPRLIADPDVYGDGYQTSERANMQVREYVLQRDRRTCQYCGKTGVRLEADHIVPRSRGGAYRIANLIAACHDCNQAKSNLPVEHFLKDRPETLRKLRQQMRSSLQSAAHMNALVPFVITDVESLGIPVRETDAVNTAFTRTQLGIEKSHVNDAACLGEPPALLNVPTSITVISATGHGKRQMLTQMSKHGTPRFQTGAAGKYHGYRAWSRLPRQRQGFTTMPGHKLRQRRSHGIASGDLIAYRHPTDGKVTGYAVLANRKTRARASGMKSVRVTETRLIARNNGYQYQKQTNSNQEN

SEQ ID NO: 10784 - protein, 512 aa, unidentified
MSTVYVLNKDGKPLMPTTRCGHVRHLLKEQKARVVTSKPFTIQLLYEADDVVQSLCLGIDPGRTNIGVAAVKADGTAVFTAHLETRNKEIPKLMKKRKESRRARRTNGRRCRRQRRAKANGTISKKCVKNDTAQNGSVSKRAKEIGVIKRHLPGCEKDVLCIGIKNKEAKFSNRTRPEGWLTPTANQLLQTHINLVKKIQKFLPISDVVLEINKFAFMRLDNPNVQKWQYQQGPLYQKANLEETVSEMQEHHCLFCKKKIDHYHHVVPQHKNGSNTIDNIIGLCTQHHDLVHKDATWQKRLAKKKTGLNKKYGALSVLNQIIPALTKELSSLFPKHFFVTNGKSTYDYRAAHGVSKDHWLDAYCIACSVLPNDTCDKTINSRVPYELKQFRRHDRRALNNENMSRVYTFNGKMVATNRHKATEQTTDSLEEFRQRQPNDVCNLKVKEHHPTYRNMNRNYPGSVFLVGNQVHVMQGIAGSKDGEATTYKDTNANSIAAGKCKFVAKNSGILFV

SEQ ID NO: 10785 - protein, 413 aa, unidentified
MTSYSFVLDANGKQLAPTKEPKAWFLIRKKRAALVSKYPMVIQLKKKIQENEICKDEIRCGIDDGGLHVGIALVQKCKSKNKVVFKGTIEQRNDVKHLMEVRRNYRRYHRYHKRYRQARFDNRKSSKRKGRIAPSILQKRQATIRVINRLNKWINITNYWLEDVSIDIRVLTDGYKSYSWQYQKSNRLDENIRKATILRDGGKCMECGKSNCRLEVHHIKPRRRNGSNTLDNLITLCESCHQKTEGQEELYMDRYFSLLKSSDNKNLNYAQHVMIGKMWLRKQLSGLGALYLTSGGDTANKRIDWNIEKSHTNDAVCITDLQPDTCDIKEWAIKPMRRQSKAKTDHVLGIHHRDLVEYTFKNGETHRGYVTALYPDQKAINFQSQTKHCKKVNARKCKLLWNYSKIYWFENAS

SEQ ID NO: 10786 - protein, 529 aa, unidentified
MSTVYVLNKDGKPLMPTTRGGHVRHLLKEQKARVVQSNPFTIQLLYETDDAVQPLYLGIDPGRTNIGVAVVKADGTAVFTAHLKSRNKEIPKLMQDRKRARRARRTNGRRHRRQRRAKANGTISKKCVKQTTTQNGSVSKRAKEIGIIKRHLPGCEKDVLCIGIKNKEAKYTNRERPEGWLTPTANQLLQTHVNLVKKVQKLLPISDVVLEVNKFAFMRLDNPDIQKWQYQQGPLYKKESLESAVSEMQEHHCLFCKKPIDHYHHVVPKSENGSNTIANIVGLCAEHHNLVHKDVAWQEKLAEEKTGLNKKYGALSVLNQIIPALTNKLSVLFPKHFFVTAGKSTHDYRAAHSVSKDHWLDAYCIACSVLPSNVCDSNINNHVPYELKQFRRHDRRVLHKANMSRVYTLNGKAVATNRHKAIKQTTDSLEEFRQNYPDDVYKLKVKEHHPAYRNLNRNYPGSVFLVGEQAHVMQGIASSKDGKTTKYNDTNATTIIAGKCKFVAKNSGILFVQCKFRKALSDGTTKKLQ

SEQ ID NO: 10787 - protein, 520 aa, unidentified
MNYLDFVLMVDKNKVPCIPIKESTAAYLLRHNKAKIINHDPTVIQRFDEYSADYEIRNIFELKIDSGYLNIGFSVSDSEHEYLAGQVNLLQGMSERLTVRASNRKFKRARLRYRKNKNVDYKIVHNPTYKNGNQDGWIAPSIQHKIDSHIRLIKKIAQWVPIDRIIIEVAKFDIQKMIADLDGRIISGKDYQNGEMKGYENVTAYVRDRDKHICQMCLSSGKVKNKNNDTIEVHHIIPRAAGGTNRPSNLICLCHHHHRLVHSNNNNNKYFRELQNKKMPDTYKDSTFMNIVRYKIYNALCADFKDVELAYGYETKINRKLIGLPKFHYTDAVCLKEWKNISLTKFIYIVDQKRCNDRKMESFFDAKYIDIRDGKTKSGTELCYTRLDNASSWRTTCKNEVDNLRQYREKKVEKGKQRRECHFYCLKAGDLIFIKSGNHKGNLAEVKTMQIHKGKYKIFFTYKNQKVDNPTISLSPEEYGQLKKNECSKVKIVRTRRGMIWRKYNRLEYENTYKDQYDKK

SEQ ID NO: 10788 - protein, 512 aa, unidentified
MSTVYVLNKDGKPLMPTTRCGHVRHLLKEQKARVVASKPFTIQLLYKTNDVVQPLYLGIDPGRTNIGVAVVKADGTAVFTAHLETRNKEIPKLMKKRKDSRRARRTNGRRCRRQRRAKANGTISKKCVKHDTAQNGSVSKRAKEIGIIKRHLPGCEKDVLCIGIKNKEAKFSNRTRPEGWLTPTANQLLQTHINLVKKIRKFLPISDAVLEINKFAFMQLDNPNIQKWQYQQGPLYQKANLEEAVSEMQEHHCLFCKKPIAHYHHVVPQSENGSDTIGNIVGLCTKHHDLVHKDTAWQKKLAKKKTGLNKKYGALSVLNQIIPALTKELSSLFPKHFFATNGKSTYDYRSAHGVSKDHWLDAYCIACSVLPNDVCDSGINNRVPYELKQFRRHDRRALNNENMSRVYTLNDNVVATNRHKATKQTTDSLEEFRQNHPDDVCKLKVKEHHPTYRNMNRNYPGSVFLIGKQVHVMQGIAGSKDGEATTYKDTNANSIAAGKCKFVAKNSGILFV

SEQ ID NO: 10789 - protein, 495 aa, unidentified; identical to SEQ ID NO: 7170

SEQ ID NO: 10790 - protein, 442 aa, unidentified
MGEGLQPTERSRRQNLRVFVLNKRGQPLMPCSPAKARLLLKEKKAVVRHRTPFTIQLTQATGETVQPVTLGVDAGSKFIGLSASTEKAEHYASEAELRTEVVDLLFSRREMRRARRNRKTRYRAPRFDNRIHSKNKGWLTPSVENKINTHLSCVDNVRKCLPVTKIVVETAAFDIQKIKNPDIEGTDYQQGDQLGFWNVREYVLCRDGHQCCHCHGKSKDPILNVHHLESRKTGGNAPNNLITLCETCHKAYHDGKITLKQKRGQVFRDAAFMGIMRWTFFNRLKAQCPEIEVRNTYGYLTKNTRIRHGLEKSHHTDAFCIAGNLEAKRLGVYFFQKQTRKHNRQIHKMSILKGGVRKLQQAPYEVKGLRLFDKVRYDGREAFIFGRRSSGYFDIRLLTGEKVSAGVSYKKLVLLEKRKTFLTQLIKENAIPPATEVAGFLA

SEQ ID NO: 10791 - protein, 462 aa, unidentified
MSVLVIGRNGRALMPTNPRKARLLLKKKTASVVCRHPFTIQLLYKTGCATQEGCIGIDTGSQHIGVGITCGDRVILKDEHALRSSMEKRSLLATRAVMRRGRRYRKVRYRKPKWRHHTKRMYFEKANRRGQHWRKVKTTTQSPRLKGWLPPSLQSKCDHHFRIIDRYLKYLPDPITRNLVIEAGRFDMARMNDPTIHGEMYQRGPMYDAENLRAYIFARDNYQCACCKAKAGTTRKADGTTVKLVAHHILFRSRGATDNPKYIISVCDHCHTTKAHQPGGILYSWMENNKKVARGLRDATFMNILRKRLFARYPQAAFTYGNITAADRKQLRLPKSHANDAVAISLFGKEASTVKNICQTMHYKQIRKSKRSLHEAIPRKGRKNPNTKAVRNKKNTTQVNGFKLWDSVLADGKKLFICSFTGTSAYLIDKNGCYISQPGKTYKQWPLSKLKRLHPNGNWLMA

SEQ ID NO: 10792 - protein, 423 aa, unidentified
MPIMVYVLNINGQPLMPTNRHGKVKCLLKQGKAKVIRRCPFTIKLLYQSTAYTQNLTLGVDTGSGIIGTAVSKDNGNIVYMSETIVRNDITDKMTQRAKYRRNRRNRKTRYRKTRWLNRKNSIKTDRFSPTMQSKLHSHVKEIEYIKSILPVTTMVLETGQFDTHLMKNPSLANPNVKHWGYQKGANYGFENTKAMVLNRDNYTCQCCKGKHKDSKLEVHHIVFRSQGGSDEESNLITLCHTCHKDLHSGKINPKLKGKVKGTLKYATQMNSIRKQLFRVYPDAIETFGYVTKANRLALGIDKKHYYDACTIATQGNIFIVKSNLYKKKCVSDGDFQKTKGIRSEQSIVTDKICGFRKFDKVKYFGKEYFIKGRMSTGYAILMDIDGHKINFSTMPKGYKIPKLSNCKRVTARTSQMLQAVVI

SEQ ID NO: 10793 - protein, 418 aa, unidentified
  source 1..418: note = Prevotellaceae bacterium UBA4334
MVYVLNKNGEPLMPTERHGKVRRMLRDGKAHVVRLVPFTIQLNYSSEEVVQEVSLGVDAGSKHIGVSATMEGRELLAMQVEERDDIVELIATRRETRRTRRSRKFRYRASRFDNRRRKDGWMTPSTEYRISAHLCIIRLVCSILPITKTTIEVAQFDSQKIKNDKISGVEYQQGEQLGFWNVREYVLARDGHVCQHCKGKSKDKILNVHHIESRKTGGNAPNNLITLCETCHKAYHDGEITLKLRRGTSLRDAAAMSIMRWEVYNRAKQEFKNVNLTYGYVTKHTRIHNNIAKTHCADALCISGNVRAERLSWFYGVRLTRRHNRSLHLFKPKKGGIRQGNLAPHWIGKSRLQQYDYVEWNGQRAFVSGSSNGRPYLKNFDDKYIMTPKASVNPKTVKFIRRKRGSMIIDKINQTKIS

SEQ ID NO: 10794 - protein, 482 aa, unidentified
LYIKMTSCTCTVFPAYNYAKASSSQGKHNLLLRQGRLIVKEVAYMSTVYVLNKDGKPLMPTTRGGHVRHLLKEQKARVVRTKPFTIQLLYEADDVVQSLYLGIDPGRTNIGVAVVKTDGTAVFTAHLETRNKEITKLMKKRKNSRRARRTNGRRCRRQRRAKANGTISKKCVKQDTAQNGSVSKRAKEIGVIKRHLPGCEKEVLCIGIKNKEAKFSNRVRPEGWLTPTANQLLQTHINLVKKIRKFLPISDAVLEINKFAFMQLDNPNIQKWQYQQGPLYQKANLEEAVSEMQEHHCLFCKKPIAHYHHVVPQSENGSDTIGNIVGLCTKHHDLVHKDTAWQKKLAKKKTGLNKKYGALSVLNQIIPALTKELSSLFPKHFFATNGKSTYDYRSAHGVSKDHWLDAYCIACSVLPNDVCDSGINNRVPYELKQFRRHDRRALNNENMSRVYTLNDNVVATNRHKATKQTTDSLEEFRQNHPD

SEQ ID NO: 10795 - protein, 470 aa, Blautia sp.; identical to SEQ ID NO: 2925

SEQ ID NO: 10796 - protein, 419 aa, unidentified
MLVYVLKQNGQPFMPTSRFGKVRRLLKKKKAKVVRREPFTIKLLYEPETDVVQDCYCGVDTGSRHIGVAVVSNDKVLYQSQTELRDDISRKMERRRDFRQNRRSRKTRYRKCRFLNRRNSIREDRLPPSVKHKVQAHIDEIEFCKKILPMSDLILEVSQFDTALMKNPSLINEKVRHWGYRQGFDYGYSSRRSAILHRDNYTCQCCGKKNCRLEVHHINFRSNGGTDDEENLITLCKECHKGVHAGAVVLNKKPKKSKNLKHATHMSIIRTQLLKKYPEAIETFGFVTSENRNHLNLEKAHYIDACVIASGGLEFEPSATVYYKRRMSKGEYQLIRKCCGKEYVCKGKILGFKSFDKVEYFGVKCFIWKRRNNGYATLGDIFNNILDFSYLPRGYKTPKMALLKRISSRKTVNIICYTR

SEQ ID NO: 10797 - protein, 542 aa, Streptomyces sp.; identical to SEQ ID NO: 2629

SEQ ID NO: 10798 - protein, 442 aa, unidentified; identical to SEQ ID NO: 2903

SEQ ID NO: 10799 - protein, 366 aa, unidentified
MYVTSDYKQEIVLGVDAGTKHVGLSATTKSKELYSSEVILRNDIVDLLSTRRELRRSRRNRLRYRKPRFDNRIKSKRPGWVAPSVKYKVDAHIRVIDNVCSILPISRIVIEVAQFDTQKINNPNISGKEYQEGDQLGFWNVREYVLARDGHKCQHCKGKSKDPVLNVHHIESRKTGGDSPSNLITLCETCHKEYHKGNIDLKIKRGSSLRDAAVMGIMKWRLYEELRSKYNRVSMTFGYVTKYNRIKHGIEKSHVFDAFVISKNFDAIRLGYYYKVRLVRRHNRQIHKQKIPKGGIKRPNQSPFEVFGFRLFDRVMFENSYYFIFARRKTGSFNIRDIDGKNQRDITYKKLKLSRCKRFMVQKEMD

SEQ ID NO: 10800 - protein, 431 aa, Lyngbya sp.
MSNYVLVLDTNKNPLTPCKPSMARSLLKAGKAAVFRQYPFTIILKKKVADTPENCKLKIDPGSKVTGLALLLNDSVIWAAELTHRGQQIKDANWRRRQLRRGRRNRKTRYRQARFFNRKRRDSWLAPSLNHRVQTTMTWVNRLTRFCPINSIYQELIRFDTQKVQNPEVSSIEYQQGELHGYEIREYLLEKWGRKCAYCGAENTPLEVEHIQAKSKGGSNRISNLTLSCHSCNQAKSNLDIKDFLSGKPDLIKRIISQAKAPLKDAAAVNSTRWKLYNDLKTTGLEVCTSSGGMTKYNRCRLGLPKAHWIDAACVGKTESLKLETNQPLLIKSTGHGNRQMCGTNKYGFPTRHRSRQQVHQGFKTGDIVKAVVTKGKKIGTYKGRVLVRASGSFDISTAKVRVSGISHKYCVPIYKKDGYQYEFNSQFNGN

SEQ ID NO: 10801 - protein, 406 aa, unidentified; identical to SEQ ID NO: 2752

SEQ ID NO: 10802 - protein, 406 aa, unidentified
MVYVQDIDGRPLMPTTRHGKVRRLLKSKKATVVNLCPFTIRLLYDTTGYKQEITLGVDTGTKHVGLSATTKSKELYASEVILRSDVVDLLSTRRELRKIRRYRLRYRKPRFMNRIKSKKRGWIAPSIRQKIDSHIRIIGFVYSILPVSKLIIEVAQFDTQKIKNPEISGKEYQEGEQLGFWNVREYVLARDEHKCQHCKGKSKDPVLNVHHIESRKTGGDSPSNLITLCKTCHKEFHKGNIKLKVNRGESLRDAAVMGIMKWELYDELKSLYPNVKMTFGYITKYNRINHGIEKSHVSDAFVISRNFDSERLGYYYKRKLVRRHNRQIHKMKAPKGGNKRMNQSPFKVFGFRLFDKVMFQGKERFIYARRLRGIFNIRDINGENKKDISYKKLEYVSHGLISIVAG

SEQ ID NO: 10803 - protein, 465 aa, unidentified; identical to SEQ ID NO: 2709

SEQ ID NO: 10804 - protein, 513 aa, unidentified
LKKEAAGHQQGKDCRLVRYGPPYRAGMPDGRRKPERKHMVAVVTSTGKPLMPTSAYRARKLLKKGRAVIFKYRPYFTIQLVDRADGEVQEVEYKSDTGSVHVGISVCTEKKELLSEQRDLLENEPEHHNDRKKNRRTRRNRKRYRKPRFDNRKKKPQVGHEKWLPPTLLHKMEVQVRLYREFCRVVPVTSACFEMGKFDTQALKAVLKGDPVPEGEGYQKGERYGTDTLRAAVFLRDGHTCRFCGRSVKDGAVLHVHHVGYWKRDRTNRPANLASACEQCHTPANHGKNGLLYGKEPEFKTLKDASYMTSVRWIMLDEIKKAAPGVRVSVTYGVTTKKKRQELRLPKSHVNDAFSMASFHPKKRADTEYWKKIPRHDRVLQKFYDAVYLDTRDGSKKKGSELSNGRISRNHKKDSENLHQYRGHKVLKGHDSIRRGASSLKPGSIVMYKGEKMTVHGTHTRYVTDKDGKTVKKVNVQFTCPASDGRKSASMNKCTPVSRVYNTGWKRYWPDKK

SEQ ID NO: 10805 - protein, 450 aa, unidentified; identical to SEQ ID NO: 4205

SEQ ID NO: 10806 - protein, 428 aa, unidentified; identical to SEQ ID NO: 8823

SEQ ID NO: 10807 - protein, 415 aa, unidentified
MIYVRSKDGKALMPSERGGRIGYLLRHGKAHVVSRVPFVVQLDYESTTYTQEVSLGIDAGSKHIGVSASSEKKELLAAQVELRNDVVNLLSTRRELRRTRRNRKTRYRKVRFDNRKKKDGWLAPSVKQKVESHLKVIRLVRKLLPITKTTIEVAQFDAQKIKRPDIQGEEYQQGEQMGFWNVREYVLARDGHRCVHCKGKSKDHILNVHHLESRKTGGNSPSNLVTLCETCHKAYHRGEFELKIKRGNSLRDAAVMNIMRWVVYERAKEEFENVHLTYGYVTKHTRIENGIAKTHAADAFCIAKNVHAMRLSSFFMCRCVPRHTRVLHVAKPKKGGIRRSTIASHKIGKSRFQRFDMVRWRGKECFIFGSTHGNVVLRKIDGVKVHETQAVSAKTIKFLKRIRNNILVEEIVSIS

SEQ ID NO: 10808 - protein, 442 aa, Blautia sp.; identical to SEQ ID NO: 8927

SEQ ID NO: 10809 - protein, 512 aa, unidentified
MSTVYVLNKDGKPLMPTTRCGHVRHLLKEQKARVVTSKPFTIQLLYETDDVVQPLYLGIDTGRTNIGVAVVKADGSAVFTAHLETRNNEIPKLMKKRKESRRARRTNGRRCRRQRRAKANGTISKKCVKQATAQNGGASKRAKEIGVIKRHLPGCEKEILCIGIKNKEAKFNNRTRPEGWLTPTANQLLQTHVNLVKKIQKFLPISDVVLEINKFAFMQLDNPNIQKWQYQQGPLYQKANLESAVSEMQEHHCLFCKKPIDHFHHVVPQHKNGSNTIDNIVGLCTKHHDFMHKDTAWQEKLAKKKTGLNKKYDALSVLNQIIPALTKELSFLFPKHFFATNGKSTYDYRAAHGVSKDHWLDAYCIAGSVLPNDVCDNNINSRVPYELKQFRRHDRRALHKENMSRVYTFNNKVVATNRHKAIKQTINSLEEFRQCQPNDVSKLKAKEHYPEYRNPKRNFPGSVFLVGKHTHVMQGTSGSHNGKADGYYDTNGDSYSTGKCKFIAQNEGIVFA

SEQ ID NO: 10810 - protein, 494 aa, unidentified; identical to SEQ ID NO: 7425

SEQ ID NO: 10811 - protein, 456 aa, unidentified; identical to SEQ ID NO: 4922

SEQ ID NO: 10812 - protein, 420 aa, unidentified
MQYVYVLNKHGEPLMPCSPGKARLLLKQQKAHVVKRTPFTIKLLYGSTGYKQPITLGVDAGNKHVGLSASTEKREFYCEEFTPRNDVVDLLSTRKQSRRSRRNRKTRYRAPRFDNRVHSKHKGWLAPSVEVKIQEHITVIKRICRILPVALIRVETAEFDTQRLKAMLEGKPLPVGTDYQLGEMYDEYNVRQYVLKRDHYTCQCCGAHTTTKKTVKLHVHHLESRKVGGNAPSNLITLCTTCHDALHKGKVSLDGKERGKPLRDAAFMGIMRKALMARLREELPIPVQGTYGYITKMRREQNDIKKSHVNDARCISKHPLAEPCSVCYRTKAIRHHNRQTHKANFSKGGIRKRSQMPYVVEGYRLWDKVLYKGQECFVSGRRASGSFTLKKLDGTRISKGVTFKKLRLLEPATNYLIERM

SEQ ID NO: 10813 - protein, 420 aa, unidentified; identical to SEQ ID NO: 6212

SEQ ID NO: 10814 - protein, 437 aa, Clostridium sp.
MVYVLNKEGKPLMPTNRYAKIRVLLKSKKAIVVSSKPFTIKLLYDTKNFTQSITLGIDSGYLNIGFSTITKEKELISGEVKLLKGMSERLREKAMYRRQRRSRLRYRKPRFDNRKRSKDWLAPSVQHKYDSHIRFIDKLKKLLPITNTIIEVANFDTHKLKDSSIEGAAYQNGEQKDFFNLREYILHRDGHKCQNPNCKNKSSESILQVHHIGFWKQDRSDRPGNLITLCNKCHTPKNHKKNGFLYGWQPKVKSFKEATFMSMIRWRLVNTLDCNHTYGYITKSNRIILKLDKTHYNDAFCIAGGSNQNRVKPLIFEQIKRNSRSLEKFYDAKVIDIRTNTKVSGVELFNGRRTRNKSLNSENLRKYRGAKISKGQRRIRTKRYFYQPGDLVKYEDKVYIVKGTQNKGKYIALKELKKVPKVELLTPYKFRKGLVCV

SEQ ID NO: 10815 - protein, 420 aa, unidentified
MVYVLSLDGQPLMPIRRHGKVRRLLNSKKAKVICKEPFTIQLLFDTEENVSHLTLKVDTGSKHVGAGVTDDNACVYYASEVEIRNDIHTKMERRAMYRRARRNRKLRYRKARWLNRHNSIKKDRFSPTMASKFNSHIREIEYVKSILPISKLVIETGTFDPNLLNYEDKAFNRHWGYQKGPNYRFKNSQEACFNRDNYKCQCCKTKKSALNAHHIIYRSNGGADMLDNLITLCEDCHKKLHRGELCEFESKLVGKKKGQLKHTTQMNSIRIQLLKYYTNAIETFGFITKANREWLALEKTHWMDAVSMGLTTQPIFLVDRVYKKKHVAKGRYQLYRGQNSDKKLPRGKVYGFLNRDIVKYRNQLYLIKGLMSTGYCKLSDINGIEQKFENPKTVKLSACKRVSARRTTRCISQKIIPNIA

SEQ ID NO: 10816 - protein, 443 aa, Anoxybacillus sp.; identical to SEQ ID NO: 2800

SEQ ID NO: 10817 - protein, 431 aa, unidentified
MDAWDIIVVLNKRGKPLMPCSPAKARHLLKEKKAIVVRRTPFTIKLTIATGESKQPVSLGVDAGYKHVGLSASTEKAELYASEVELRQDITDQLSARLALRRSRRNRKTRYRAPRFDNRIRTKRKGWLAPSVENRINAHLSRIEAVLRLLPVTKITVETASFDMLLLKNPDIAGKEYQEGEQLGFWNVREYVLFRDGHVCQHCYGRSKDPVLNVHHLESRRTGGDSPGNLITLCETCHEALHRGEIALKTKRGHSFRAEAFMGMMRWEVLNRLKASHSELEVNNTYGYRTKHARIVNGIDKSHCADAFCIAGNLGAERLCEFFFQKQTRRNNRQIHKLSILKGGIRKRNQAPFEIKGFRLFDKVACKGEESFIFGRRSSGYFDVRKLDGTRISAGISYKKLRLLEKRRTYLTEIRKEEALPPLPEGRGLRA

SEQ ID NO: 10818 - protein, 431 aa, Escherichia sp.
MNRVFVLGKTGQALMPCHPARARQLLQSKKARVKRLYPFTIQLTQRSDGYIQPVELKFDPGSKQTGVGLVLHGKNRLSAIYAAVLTHRGQEIKSNLDSRRMIRRARRNRKTRYRQERFLNRVRIKHKGWLAPSVHSRVDNIVEWSKRFMRLSHVDFITVESVKFDMQKMESAAVEGLEYQRGTLFDYEVKEYLLEKYHYSCVYCGIKNVPFEKEHVVPRSRGGSNRISNLVLSCRSCNEKKDNLPIEEFLKDNPALLKKIKAQLKSSLKDAAAVNITRKQIVKELSDLNVPVLTGIGAETKYNRVSQGYGKEHYIDALCAGTTGTKVYIPSKLKPLLIKKERRNNRQMCLVDKYGFPRGKAKGSKIVHGFKTGDIVKAVVLKGKKKGVYKGKVVVRSSGSFNINVKQGRIEGIGWKNCVMLHRFDGYSYTY

SEQ ID NO: 10819 - protein, 443 aa, Anoxybacillus sp.; identical to SEQ ID NO: 10273

SEQ ID NO: 10820 - protein, 453 aa, Anaerotruncus sp.; identical to SEQ ID NO: 7123

SEQ ID NO: 10821 - protein, 422 aa, unidentified
LNKRGKPLMPCSPAKARLLLKEKKAIVVRRTPFTIQLTIATGESKQPVSLGVDAGYKHVGLSASTEKAELYASEVELRKDITDLLSARRALRQSRRNRKTRYRAPRFDNRIRTKRKGWLAPSVENRINAHLSRIEAVLRLLPITKITVETASFDMQRLKNPDISGKEYQEGEQLGFWNVREYVLFRDGHVCRHCHGRSKDPVLNVHHLESRRTGSDSPDNLITLCVTCHKALHRGEITLKAKRGQSFRAQAFMGIMRREVLNRLKASYPELKVHETYGYLTKHARIANGIVKSHGADAFCIAGNLGAERLGEFFFQKQTRRNNRQIHKLSILKGGIRKRNQAPFEAKGFRLFDKVACQGEEGFIFGRRSSGSFDVRKLDGTRISVGISCKKLRLLEKRRTYLTEIRKEEALPPLPEGRGLRA

SEQ ID NO: 10822 - protein, 460 aa, unidentified; identical to SEQ ID NO: 7234

SEQ ID NO: 10823 - protein, 415 aa, unidentified
MVYVLANDGQPLMPTERHGKVCRMLKSGIAKVVKKCPFTIQLQYESERNVQPVALGIDAGSKHVGVSATTKAKVLYESDVELRDDIVKLLATRRQLRRRRRSRKTRYRPARFDNRRRKEGWLTPSIRQKIESHLTVVANVCKILPVSQIIVETASFDIQKIKNPDIQGIEYQQGEQMDFWNIREYVLFRDGHTCQCCKGKSKDKVLNVHHIESRKTGGNAPNNLITLCETCHKGYHNGTVTLPKNIKRGMKFKDAAFMGIMRWTFYNTLKEQYEPDIPVSMTYGYLTKNTRIEHGLPKEHYIDARCISGNPDAVSDGTYYYQKKVRCHNRQIHKQTILKGGIRKSNQAEYLVRGFRLFDKVRYQGREYFIFGRRKSGFFDIRTLSGEKVNKGSISVKKLTFADTRKNYLIERRTV

SEQ ID NO: 10824 - protein, 442 aa, unidentified; identical to SEQ ID NO: 3218

SEQ ID NO: 10825 - protein, 434 aa, Anoxybacillus sp.; identical to SEQ ID NO: 3421

SEQ ID NO: 10826 - protein, 424 aa, Anaerostipes sp.; identical to SEQ ID NO: 3434

SEQ ID NO: 10827 - protein, 456 aa, unidentified
MSTCVCVLSNNGERLMPTFRLGKVRRLLKDGKAKIVKHHPFTIQLLYDSKTNKQPIEICEDVGYNYIGISVKSESHEYVSAQYDTLQDEKEHHDDCRKMRRARRNRLRYRKPRFDNRKRSEGWLAPSLEHKKQLNISLVERYVSVIPITHATVEVGSFDTMLLQAIQKGETKPEGADYQEGPRYNLATLREAVFYRDNYTCQVCGRKITDGAILHMHHMFYWKGRHGYKLDELVTACEKCHTPANHQKGGKLFGFGEDKEFADLSGAAFMNAVRWQIVNALHTTYSKEFVTITYGAMTKEKRIALQLEKSHNNDAYAMGDFHPVHRCGFRHYQKRRRNNRVLEKFYDATYIDARTGNKAKGKELFNGRISRNHKKDSENLHKYRSEKVSKGRRSIRKRRYAIQPYDTVRLKGKTYITSGCHNKGTRLLIPVNGKSKSVTISKVQVVCHAGPWIQII

SEQ ID NO: 10828 - protein, 518 aa, Erysipelotrichaceae sp.; identical to SEQ ID NO: 7410

SEQ ID NO: 10829 - protein, 411 aa, unidentified; identical to SEQ ID NO: 8372

SEQ ID NO: 10830 - protein, 323 aa, unidentified; identical to SEQ ID NO: 7431
  source 1..323: note = Cyanobacteria bacterium UBA11368

SEQ ID NO: 10831 - protein, 420 aa, unidentified
MQYVYVLNKHGEPLMPCSPGKARLLLKQQKAHVVKRTPFTIKLLYGGAGYKQPITLGVDAGSKHVGLSASTEKRELYREEFTPRNDVVDLLSTRKQNRRSRRNRKTRYRASRFDNRVNGKHKGWLAPSVEVKIQEHITVIKRTCRILPVALVRVETAEFDTQRLKAMLEGKPLPVGTDYQLGEMCDEYNVRQYVLNRDHYTCQCCGAHTTTKKTVKLHVHHLESRKVGGNAPSNLITLCTTCHDALHKGKVSLDNKKRGKPMRDAVFMGIMRKTLMARLREELPIPVQGTYGYITKMWREQNDIKKSHVNDARCISKHPLAEPCSVCYRTKAIRHHNRQTHKANFSKGGIRKRSQMPYVVGGYRLWDKVLYKGQECFVSGRRTSGSFTLKKLDGTRISKGVTFKKLRLLEPATNYLIERM

SEQ ID NO: 10832 - protein, 576 aa, Parasutterella excrementihominis
  VARIANT 11..118: note = X can be any naturally occurring amino acid
  VARIANT 496..559: note = X can be any naturally occurring amino acid
LFGDYVGREPXXXXXXXXXXXXXXXXXXXXXXXXXXXXXXXXXXXXXXXXXXXXXXXXXXXXXXXXXXXXXXXXXXXXXXXXXXXXXXXXXXXXXXXXXXXXXXXXXXXXXXXXXXXXTGRKTEETNLRVLVWNKRGKPLMPCSPAKARLLLKEKKAIVVRRTPFTIQLTIATGESKQPVSLGVDAGYKHVGLSASTEKAELYASEVELRQDITDLLSARRALRQSRRNRKTRYRAPRFDNRIRTKRKGWLAPSVENRINAHLSRIETVIRLLPVTKISVETTSFDMQLLKNSDIAGKEYQESEQLGFWNVREYVLFRDGHVCQHCHGRSKDPVLNVHHLESRRTGGDSPGNLITLCETCHKELHRGEITLKAKRGQSFRAETFMGIMRWEVLDRLKASHPKLEVQNTYGYRTKHARIVNGIAKSHCADAFCIAGNLGAERLGEFLFQKQTRRNNRQIHKLSILKGGIRKRNQVPFEVKGFRLFDKVACKGEEGFXXXXXXXXXXXXXXXXXXXXXXXXXXXXXXXXXXXXXXXXXXXXXXXXXXXXXXXXXXXXXXXXPVSAIKSCVCWKRDKPI

SEQ ID NO: 10833 - protein, 445 aa, unidentified
MSVFVVGLNGCRLMPVSERKARLLLKGGKASIYRKVPFTIKLNYKTGSTVQPGYLGIDTGSQHIGVSVVQKDGTVLHKEEIGLRDSMSKRKLLESRASSRRGRRYRKTRYRHPKWKPKTKRTYNEKADRKGRHWKKQKNTFTSKRQAGWLPPSLQSKTDHHIQWIRKLLDLLPEGYRLSIELGRFDPARMKDPEIHGELYQKGPQYDYENVRAYVLARDGYTCRVCKKKGGKLHVHHILYRSRGASDNPKYMAAVCSKCHTTENHLPGGILYQWMQDQKKFTRGLRDATFMNILKKRLRKAFPDAVFTYGNITKADREKLELPKSHGNDATAIALVKTEVKSVKDEEPVIHIQQVRRKKRSLHEETPRKGRKEPNRTASRSDKNTKSVTVTKGSGEKKASMTACLFDRVELDGKKGWITGFTGTSCYVKDKEDNYVNIRYFGIAN

SEQ ID NO: 10834 - protein, 320 aa, unidentified
VTTILKTCFAAFNLAKVVVLMDAWDIIVVLNKRGKPLMPCSPAKARLLLKEKKAIVVRRTPFTIQLTIATGETKQPVSLGVDAGYKHVGLSASTEKAELYASEVELRQDITDLLSARRALRQSRRNRKTRYRAPRFDNRIRTKRKGWLAPSVENRINAHLSRIEAVLRLLPVTKITVETASFDLQLLKNPDISGKEYQEGEQLGFWNIREYVLCRDGHVCQHCYGRSKDPVLNVHHLESRRTGGNSPGNLITLCETCHKALHRGEITLKAKRGQSFRAEAFMGIMRWEVLNRLKASHPELEVNNTYGYRTKHARISNGIA

SEQ ID NO: 10835 - protein, 421 aa, unidentified
MRGRPLMPCSPAKARHLLKAGKAAVRRRTPFTIQLRIATGETKQSVTLGVDAGAKHVGLSAATEKEEVFASEVELRQDITGLLAARLSLRRERRQRKTRYRAPRFLNRVRSKHKGWLAPSVENRIQAHLSRIDAICGLLPVTKIVIETASFDIQKIKHPDVEGTDYQQGDQLGFWNVREYVLFRDGHVCQHCHGHAKDKILNVHHLESRQTGGDAPNNLITLCETCHKACHAGKIKLKVKRGQSFRAEAFMGIMRWTLLDRVRKAHPGLPVENTYGYLTKNTRITLGLPKAHCVDAYCIAGNLKAVRRGVYLHQRQVRKHNRQIHKCTVLSKTLKDGTKIGYRKFNQTPHLVKSFRLFDKVRCLGQTGFIFGRRSSGYFDVRRLDGVKISSCISYRKLTLLEKRSTCLTELRKEDGASSPV

SEQ ID NO: 10836 - protein, 386 aa, unidentified
  source 1..386: note = Clostridiaceae bacterium UBA6085
KVVRRTPFTIQLLYDSPEYTQPITLGVDAGSKVVGLSATTEKKELFVSEITLRDDITELLSTRRQNRRARRNRLRYRMSRFLNRTSSKKEGWLAPSVKHKVDSHLKVIENVHRILPISRIVIETASFDIQKIRNPEISGEGYQQGVKLSFWNTREYVLWRDNHQCQHCHGKSKDRILNVHHKESRKTGGDSPDNLVTLCETCHKNHHAGRIQLKLTPNKSYRDASFMGIMRWYVYNSLQELYPDVSMTYGYITKNNRIKNNIEKNHSADAYCISGNMSAVRSNEIYVQTFKRKHNRQIHKANFLKGGKKKLNQSQYEVKGFRLFDHVRYREEDCFIFGRRASGYFDLRKLDGTVVHRSANYKELKLLKRQNVILIERKGCNGVLLS

SEQ ID NO: 10837 - protein, 447 aa, unidentified
LEVVDTEGVSHPGLPGKYKHKGGQLMSVAVISKTGERLMPTSEYRARKLLKSGKAIKHSYHPFTIQLTERETGDIQPIELCMDTGYIHIGISVKSEKHEYLAEQIDTLTDERGRHDACRMYRRQRRSRRRYRQARFNNRKRDQGWIAPSLEHKKKIHIQAISRINNVMPITDITLEMGNFDTQVLKAKEEGKPLPQGADYQHGERYSIATLREAVFSRDSYKCQYCGRTIKDGAILHIHHIKYRSQGGTNSMSNLATVCDKCHTPKNHKPGGKLYNWKPKLSFFKGATFMTVIRWQLYNEVKALFPDIDIHITYGAATKERRRELDIDKSHVNDAFVMGQFHPKHRIKAVLYKKKRRNNRCLEKFYDAKYIDSRDGKKRSGQELFNGRINRNHKKDSENLHQYRLQKVTAGKKKLLGNNITVSSLTISSYTKAESVKLQDVTVMEHG

SEQ ID NO: 10838 - protein, 418 aa, unidentified
MVYILNKHNEPLMPCSERKARLLLKDGMAIVYRKDIFTIKLINGSYGYKQHITLGIDCGSKHIGVSATTDKQELFSANAELRNDVVKLLSDRRMLRRNRRSRKTRYRKPRFNNRIVKNGWIAPSIKQKIQSHFNLVGFLHKLLPITNIVVETAAFDIQKINNPSISGSEYQQGEQLDFFNVREYVLFRDNHICQHCKGKSKDKVLNVHHIESRKTGGNSPNNLITLCETCHKAYHRGEFELNVKRGKSFRDSAFMGIMRWELYDELKLRYDNVSMTFGYITKYKRIKLGLDKEHYNDAYCICGNLAAKMLSAHHFIRFIPRHSRVLHIQKFSKGGVRRSASAPYWLNGGKPSKSGAMFTMFDKVKFNGIVCFISGSSNGYAALRDINWNKIDGCKTVVTVNKLLLISRKYGGFIVEKK

SEQ ID NO: 10839 - protein, 421 aa, unidentified
MVYVLNMNGQPLMPCKEAKARKLLKNHCAKPVKKEPFTIQLLFDCENQVQNITLGIDAGSKHIGLSATTEQKELYAADVELRNNVVELLSTRKQYRRARRSKLRYRAPRFYNRVHSKNKGWLAPSIEQKISTHLRVVCDVYKILPVSKIIVETASFDIQRIENPDISGKEYQQGSQLSFWNVREYVLWKDNHECQCCHGKSKDNILNVHHIESRKTGGDSPNNLITLCRYCHDKYHKGKIEMDLKRRLSLRDAAFMGTMRWSFYHRLKEKFPDVSMTYGYITKNTRIQYGLPKTHYTDARCISGNLLAEPLGYYFFQKKVRCHNRQIHKINIQKGGKRKRNQAKYLVKGFRLFDKVRYKNQIGFVLGRRASGYFDIRTLNGEVIHRSALYKKLELIDTRKALLTERRQAVLLMALNVSIPA

SEQ ID NO: 10840 - protein, 426 aa, Nostoc sp.
MSKVFVLDTEKRPLNPIHPGQARQLLRNKKAAVFRRFPFTIILKESRSDSLISPLRLKIDPGAKHTGIALVNDATGEVVFAAELKHRGFAIRDALTSRRQLRRSRRDRKTRYRQPRFLNRTRPEGWLTPSLRSRVDHIKTWVERLRKLAPIQAISQELVRFDMQLMLHPDIQGKEYQQGTLAGYETREYLLEKWGRQCAYCGVKDVPLQIEHIHPRAKGGSNSITNLTLSCEKCNTKKGTRDIKEFLKKDPSRLERILKQAQRPLADAAAVNTTRFALLNTLKETGLPIETGSGGLTKYNRNNQNLPKTHWLDAACVGTSTPILNIKGIKPLFITANGHGTRQMAGTDKFGFPTRHRSNKQIHYGFSTGDIVKAVVTNGKKVGEYLGRVLCRATGSFDIATKMGRIAGISYKYCSVIHKKDGYSYS

SEQ ID NO: 10841 - protein, 465 aa, unidentified; identical to SEQ ID NO: 10382

SEQ ID NO: 10842 - protein, 430 aa, Oribacterium sp.
MEGVPHMVYVISKDGHPLMPTMRYGKVRRMLKSGLAKVISRCPFTIQLLYETTDITQDISLGVDAGSKDIGLSATTNLKVLFEAKVILRNDIVELISTRREHRHARRNRKTRHRKPRFDNRTRHEGWLAPSVRQKAESHITMVQKAHKILPVSHIKVETASFDIQKIKNPNISGTNYQNGEQTDFWNVREYVLWRDGHVCQCCKGKSKDKILNVHHIESRKTGGDSPNNLITLCEYCHKQYHLGKIKLPKTIHRGMSFRDAAFMGITRWAIYEKLKELYSDVNLTYGYITKNTRIENSLPKDHHIDARCISSNPKAESDGTVYFYKKVRCHNRQIHKSTINKGGIRKRNQAPYEVHGFRLYDKVTVNSVEAFVFGRRLDGRFAIRMLDGTKINEQLSYKKIKLLEMRKNYICERRTPLLIGASPDVPVAI

SEQ ID NO: 10843 - protein, 413 aa, unidentified; identical to SEQ ID NO: 3476

SEQ ID NO: 10844 - protein, 424 aa, unidentified; identical to SEQ ID NO: 3434

SEQ ID NO: 10845 - protein, 428 aa, Oblitimonas sp.; identical to SEQ ID NO: 4442
  source 1..428: note = isolate UBA2430

SEQ ID NO: 10846 - protein, 440 aa, Clostridium sp.
VPLMVYVLNKEGKPLMPTNRYAKIRVLLKFKKAVVVNSKPFTIKLLYDTKNFTQSITLGIDSGYLNIGFSAITKEKELIAGEVKLLKGMSERLKEKAMYRRQRRSRLRYRKPRFDNRKRSKDWLAPSIQHKYDSHIKFIDKLKKLLPITNIIIEVANFDTHKLKDPSIEGAAYQNGEQKDFFNLREYILHRDGHKCQNPNCKNKNAESILQVHHIGFWKQDRSDRPGNLITLCNKCHTPKNHKKNGFLYGWQPKVKSFKEATFMSMIRWRLVNTLDCNHTYGYITKHNRISLNLQKTHYNDAFCIAGGSSQSRVKPLIFEQIKRNSRSLEKFYDAKIIDIRTNTKVSGVELFNGRRTRNKNLNSENLRKYRGVKVSKGQRRIRTKRYFYQPGDLVKYEDKVYTVKGTQNKGKYIALKELKKVPKVELLAPYKFRKGLVCV

SEQ ID NO: 10847 - protein, 397 aa, unidentified
MTNYAFVLDANNKQLAPTKEQKAWFLIRKKRATLVSKYPMVIQLKKKIPDKKICKDEVRCGIDDGGLHVGIALVQKCQTRNKVVFKGTIEQRNDVKHLMDIRRGYRHYHRYHKRYRPARFNNRNSSKREGRVAPSILQKRQATIRVINQLNKWINITNYWLEDVAIDIRALTDGYKPYWWQYQKSNRLDENIRKAVILRDGCKCMECGKSNCRLEVHHIKPRRLKGSSTLDNLITLCTKCHQKTEGVEKLYMDRYFALLNSSDNKNLNYAQHVMIGKKWLREQLSNLGMLYLTNGGDTANKRIDWDITKSHSNDAICITDLRPDTCGIKEWVIKPMRRQSKAKTNNVLGIKHRDLVEYTFRNGKTHRGYVTALYPEQNAINFQSPTKHCKKVNAKKM

SEQ ID NO: 10848 - protein, 423 aa, unidentified
  source 1..423: note = Microcoleaceae bacterium UBA10368
MSNFIFVLDTNKRPLTPCKPSMARKLLTAGKAAVYRRFPFTIILKKVVTATIKSIDLKLDPGSKTTGIALLEGEKVIFGAELTHRGQAIKASLDSRRALRRGRRNRHTRYRQARFLNRTRKKGWLAPSLQHRVETTLTWVNKLRKLAPINSIVQELVRFDLQQLENLEISGVEYQQGELQGYEVREYLLNKWNRKCAYCSVENIPLQIEHIQPKAQGGSNRISNLCLACEKCNQKKGTQDIQRFLAKKPDILKHILAQAKRPLKDAAAVNSTRWALFSRLKETGLPVATGSGGLTKFNRTRLQLPKTHWLDAACVGQLESLSVVTSKPLLIKATGHGTRQMCRTDKFGFPSRYVPRNKFVKGFQTGDIVKAVVTSGKKIGEYVGRVAVRSTGSFNISASELVQGISHKYCKIVHHKDGYSYSF

SEQ ID NO: 10849 - protein, 544 aa, Streptomyces sp.
MTTFLIGEQTHQAVLPQQPALESASADTPGSRDETAHGLPATMPGTGVEHGRGETGEVRTGTRRRHARSAASAAETAETRSGDAPRAAASRVFVLAKGGEPLMPCHPARARELLAGGRAVVARRAPFTIRLRQRTRADSAVEGVQLRLDPGSKATGIALTDEHHRIGPKGRVVVARRGLITLELRHRGQQIHGGMMRRAAHRRRRRSANLRYRAPRHDNRARPDGWLPPSLRHRIDSTMSVVARLCRYAPVVEIHVEHVAFDTTAFTGDIRSGTQETIEPTYGASEVRAFLRAKWMRSCAYCDATGVPLNIDHVRARSRGGTDRVSNLVLACVPCNQTKGTTPVQEFLADRPARLERVITQLRRPLQDVAATNTTRLQLVKALAAHNVPVHAWSGGRTHWNRFAMGLPKSHTLDALATGVIDHERGDTLVRVPSQILVVTSTGRGSYARTTPDRFGFPRLQRPRGKVHHGYSTGDLVAAVVPKGKWAGRWVGRVAVRTSGQHRITTLTSRFDVSHRNLRLLQRADGYSYGFADEIRLSGRHGPA

SEQ ID NO: 10850 - protein, 449 aa, unidentified; identical to SEQ ID NO: 5214

SEQ ID NO: 10851 - protein, 432 aa, unidentified
MSSTRPWHEEKFSERKVSEMTGYAFVLDVNGKQLAPTKEQKAWFLIRKKRVILVSKYPMVIQLNKEIPDEEICKDEIRCGIDDGGLHVGIALVQKCQTKNKVIFKGIIEQRNDVKHLMEVRRDYRNYHRYHKRYRQARFNNRSSSKREGRIAPSILQKRQAIIRVINRLNKWINITNYWLEDVSIDIRALTDGYKSYSWQYQRSNRLDENIRKAVILRDNCECKECGKGNCRLEVHHIKPRRLNGSNTMDNLITLCENCHQKTEGQEELYMSRYFDLLKSSDNKRLNYAQHVMIGKKWLREELSNLGILYLTNGGDTANKRIDWGIEKSHSNDAICITDLQPDICNIKEWTIRPMRRQSKAKTDNVLGIKHRDLVEYTFKNGETYKGYVTALYPEQKAINFQSPTKHCKKVNARKCKLLWKYSKIYWLENAG

SEQ ID NO: 10852 - protein, 465 aa, unidentified; identical to SEQ ID NO: 3856

SEQ ID NO: 10853 - protein, 493 aa, unidentified; identical to SEQ ID NO: 2644

SEQ ID NO: 10854 - protein, 512 aa, unidentified; identical to SEQ ID NO: 3720

SEQ ID NO: 10855 - protein, 431 aa, Escherichia sp.; identical to SEQ ID NO: 10818

SEQ ID NO: 10856 - protein, 440 aa, unidentified; identical to SEQ ID NO: 5150

SEQ ID NO: 10857 - protein, 431 aa, unidentified
MPNKVYVINKHGRPLMPCSPAKARHLLDAGKAKVKKRTPFTIQLVYGSSGYTQEVILGVDAGSKTIGMSASTTKEELLSAEVKPRNDVVDLLSTRREFRRARRNRKTRYRKPRFDNRVRSKHKEWLAPSVEVKIQEHITSIKRVCRILPVSKVVIETAEFDLQLLKAIADGKPVPQGEDYQQGEMYGHYNVRQYVLWRDNYTCQCCGAHATKKKEVRLHVHHLESRKVGGDAPDNQVTLCESCHEKLHKGLIAEKDFKKRKRRSTRDATFMGIMRKTLMQRLCSELPIPVIETRGYITKATREKLLVLPKSHTNDALAIAQGKHGFNVGYLPEIAQIDKIYTIRPVRHHNRQLHKATILKGGIRKSNQTEKYVFGYRLFDKVQFNGQDCFIWGRRTTGIFTIKTINGKMIKDGISFKKLKLVEKSTSYLIA

SEQ ID NO: 10858 - protein, 308 aa, unidentified
LKVFVLNMRGQPLMPCSPAKARHLLKAGKAVVKRRTPFTIHLRIATGETKQNVTLGVDAGAKHVGLSATTEKEEVFASEVELRQDITGLLAARLSLRRDRRHRKTRYRAPRFLNRVRSKHKGWLAPSVENRIQAHMSRIDAVCRLLPVTKIVIETASFDIQKIKDPSVEGTDYQQGDQLGFWNVREYVLFRDGHVCQHCHGRSKDKILNVHHLESRQTGGDAPNNLITLCETCHKAYHAGKIKLKVKRGQSFRAEAFMGIMRWTLLDRVRKAHPGLPVENTYGYLTCKSSKDHSKPRNEVDTSLKSPV

SEQ ID NO: 10859 - protein, 406 aa, unidentified
MVYVQDINGKPMMPTTRHGKVRRLLKDKKAVVVNLCPFTIKLMYVTSDYKQEIVLGVDAGTKHVGLSATTKSKELYSSEVILRNDIVDLLSTRRELRRTRRNRLRYRKPRFDNRIKSRRPGWVAPSVKYKVDAHIRVVENVCSILPISRIVIEVAQFDTQKIKNPNISGKEYQEGDQLGFWNVREYVLARDGHKCQYCKGKSKDHVLNVHHIESRKTGGNSPSNLITLCETCHKEYHKGNIDLKIKRGSSLRDAAVMEIMKWRLYEELRSKYDRVSMTFGYVTKYNRINHDIEKSHVSDAFVISKNFNAIRLGYYYKVRLVRRHNRQIHKQKIPKGGIKRLNQSPFEVFGFRLFDRVMFENNCYFIFARRKTGSFNIRDINGKNKRDITYKKLKLSRCKRFMIEKS

SEQ ID NO: 10860 - protein, 442 aa, unidentified; identical to SEQ ID NO: 3234

SEQ ID NO: 10861 - protein, 434 aa, Lactobacillus sp.; identical to SEQ ID NO: 2383

SEQ ID NO: 10862 - protein, 450 aa, unidentified; identical to SEQ ID NO: 4205

SEQ ID NO: 10863 - protein, 431 aa, unidentified
MPDKVYVISRLGHPLMPCSPAKARHLLDDKKAKVVKRMPFTIRLLYGSTKYIQPIILGVDAGSKTIGLSASTAKEEVFAAEVMPRNDVVENLSTRREFRRARRNRTTRYRKPRSDNRVRSNHERWLAPSVKVKIQEHITSIKRVCTILPISKVVIETAEFDLQLLKAIQEGKPIPEGEDYQKGEMYGSYNVCQYILWRDNYTCICCGVRGTPKNPVRLHVHHFESRKYGGNAPDNHGTLCDDCHKKFHLGIITDVKLKTRRRQSTRDAAFMGIMRKTLMWRLRTELFIPVAGTKGYITKATREKLLVLPKSHTRDALAIAQGRHGFGIKEYAYEEPANHIYTVRPVRHHNRQLHKASILKGGIRKRNQASKYVFGFRLYDKVLYQGKACFVWGRRTSGTFLLRTIDGIKVKDGVSYRNLTLLERSSNYLIA

SEQ ID NO: 10864 - protein, 451 aa, Ruminococcus sp.; identical to SEQ ID NO: 10328

SEQ ID NO: 10865 - protein, 428 aa, unidentified
LKVFVLNMRGQPLMPCSPAKARHLLRDKKAVVKRRTPFTIQLTIATGETKQDVTLGVDAGAKHIGLSATTEKEEVFASEVELRQDITGLLAGRLAFRRARRHRKTRYRAPRFLNRVHSKHKGWLAPSVENRIQAHMSRIDAICGLLPVTKIVIETASFDIQKIKNPDVKGTDYQQGDQLGFWNVREYVLLRDGHVCQHCRGRSKDKILNVHHIESRKTGGDAPNNLITLCETCHKAYHAGKIKLKVKRGQSFRAEAFMGIMRWTLLDRVRKAHPDLPVENTYGYLTKNTRITLGLSKTHCVDAYCIAGNLNARRRGVFRYQRQMRKHNRQIHKCKVLSKTLKDGTKVGYRKLNQTPYLVKNFRLFDKVRCFGQTGFIFGRRTSGHFDVRTLNRTRISDCVNSKKLTLLEKRRTYLTELRKEDGASSPV

SEQ ID NO: 10866 - protein, 397 aa, unidentified
MKVFVQDRNGKPLDPTAPVRARILLKRGRAEVVQREPFTIRIVDREGGYTKNTVLGIDAGYSQIGFSAVTEKEELIAGVVKLRNDIPKKLEQRKSYRRCRRCRNTRYRKPRFNNRKRTKGWLAPSIRQKKDAHIRLIKKIREILPVTKTIVEVATFDTQKMQNPEISGMEYQQGTLQGYQVREYLLEKFGRKCVYCGAEDVPLQVEHIIPKARGGTSRVSNLTIACEKCNQKKGNKTAEEFGYPEVQKQGRESLKATAFMNQVRWKIVNKLNCDYTYGYITKKDRIELNLEKSHVNDAFVIANGDNQVRSKPFELSFRRRNNRAIQTNRKGYGRSIRRKRYHLQPGDLVRKEGILCQVKGMFNYGKWVRLANPFGDIVNSNVRKVELVKYGKGLSFT

SEQ ID NO: 10867 - protein, 529 aa, unidentified
MSTVYVLNKDGKPLMPTTRGGHVRHLLKEQKARVVQSNPFTIQLLYETNDVVQPLYLGIDPGRTNIGVAVVKADGTAVFAAHLETRNKKIPKLMQDRKKARRARRTNGRRCRRQRRAKANGTISKKCVKQDTAQSKNPSKRAKEIGVIKRHLPGCKKDVLCVGIKNKEAKYTNRARLEGWLTPTANQLLQTHINLVKKIQKFLPISDVVLEVNKFAFMQLDNPNIQKWQYQQGPLYKKESLERAVSEMQEHHCLFCDKPIDHYHHVVPQSENGSNTIANIVGLCAEHHNLVHKDAAWQKKLAEEKVGLNKKYGALSVLNQIIPALTKELSFLFPEHSFVTNGKSTYDYRATHGVSKDHWLDAYCIACSVLPSDVCDSNINNHMPYELKQFRRHDRRVLHKANTSRVYTLNGKKVATNRHKAAKQTADSLEEFRQSHPDDVCKLKVKEHHPAYRNLNRNYPGSVFFVGKQVHVMQGIASSKDGKATKYNDTSATTIAAGKCEFVAKNSGILFVQCKFRKVFSDETTKKLQ

SEQ ID NO: 10868 - protein, 420 aa, unidentified; identical to SEQ ID NO: 3685

SEQ ID NO: 10869 - protein, 394 aa, unidentified
MPDKVYVISRLGHPLMPCSPAKARHLLDDKKAKVVKRMPFTIRLLYGSTKYIQPIILGVDAGSKTIGLSASTAKEEVFAAEVMPRNDVVENLSTRREFHRARRNRTTRYRKPRSDNRVRSNHERWLAPSVKVKIQEHITSIKRVCTILPISKVVIETAEFDLQLLKAIQEGKPIPEGEDYQKGEMYGSYNVCQYVLWRDNYTCICCGVRGTPKNPVRLHVHHFESRKYGGNAPDNHGTLCDDCHKKFHLGIITDVKLKTRRRQSTRDAAFMGIMRKTLMWRLRTELFIPVAETKGYITKATREKLLVLPKSHTRDALAIAQGRHGFGIKEYAYVEPANHIYTVRPVRHHNRQLHKASILKGGIRKRNQASKYVFGFRLYDTRGQFNRFSMTSHE

SEQ ID NO: 10870 - protein, 489 aa, unidentified
MDMVYVLNKDGKPLMATTRGGRVRYLLKEKKARVVSSTPFTIQLNYDTPDITQDLILGIDPGRTNIGVAVVKEDGQCVFSAHLETRNKDIPLLMKKRAGFRRQHRTLDRRRKRQRRAKAAGTTIVDGSVERLLPGYEKPVMCHYIRNKKARFNSRKRPKGWLTPTANHLLQTHINLIAKVAKFLPITKVVVELNRFAFMAMDNPNIRRWEYQQGPLCGLGSVEDAVYAQQDGHCLFCKKPIDHYHHVVPRHKNGSETLANRCGLCAKHHDLVHKDKAWADKLVTRKEGMNKKYHALSVLNQIIPFLMEYLGSETLYDVYAIDGRSIKGFRIAKNVPKEHYTDAYCIACSILDTDNKASAPVEPFELKQFRRHDRQACIRQMVDRKYLLHGKVVAANRHKAFEQKSDSLQEFREAYSDVAVSQLTVKPHPPQYKDMSRIMPGAVMDFDGIVGVMQSSIVGQFYKSTKGHKATPKRCALLSQNAGMVFIPT

SEQ ID NO: 10871 - protein, 425 aa, Anaerostipes sp.
MLVYVVTKDKQPLMPCTPVIARLLLKQERVKVKRRKPFTIQLLYETTKYKQDLELAVDTGSGKLATAVRTEQDEIVYLSEVAVRNDITGKMTERRTKRRSRRHRKTRYRKPRFDNRRNLKRKNRFSPTMQSKIHSHVKEIEYIKSILPITRIILETGQFNPHRMKNPALANPNIRHWGYQKGPNYGYENTRAMVLDRDNHQCQYCHGKRKDRHLEVHHIVFRSQGGSDDAKNLITLCHTCHQALHKGKIRLDLEGMEKGTLKYATQMNSIRKQLLRRYPEAIETYGYITKANRLAMDLPKEHYIDACVIATEGRPFTINSLLYRKKCVSAGDFQQYHGKRSEIRQATGKIMGFRKYDKVRYFGKYYFIKGRMSTGYAVLMDINGDTVKFSDMPWGFKTPKLERMERIQARSTWMVMSEEVTPNIV

SEQ ID NO: 10872 - protein, 431 aa, unidentified
MPNKVYVINKHGRPLMPCSPAKARHLLDAGKAKVKKRTPFTIQLVYGSSGYTQEVILGVDAGSKTIGMSVSTTKEELLSAEVKPRNDVVDLQSTRREFRRARRNRKTRYRKPRFDNRVRSKHKGWLAPSVEVKIQEHITSIKRACRILPVSKVVVETAEFDLQLLKAIADGKPVPQGEDYQKGEMYGHYNVRQYVLWRDDYTCQCCGAHATKKKEVRLHVHHLESRKVGGDAPDNQVTLCESCHEKLHKGLITEKDFKKRKRRSTRDATFMGIMRKTLMQRLCSELPIPVIETRGYITKATREKLLVLPKSHTNDALAIAQGKQGFNVGYLPGILQIDKIYTIRPVRHHNRQLHKAAILKGGIRKSNQAGKYVFGYRLFDKVQFNEQDCFIWGRRTTGIFTIKTINGKMIKDGISFKKLKLVEKSTSYLIA

SEQ ID NO: 10873 - protein, 426 aa, Anoxybacillus sp.
MVFVLDTNKRPLAPCHEAVARKLLKQGKAAIYKRYPFTIILKEIVDNFRPKTPYRLKIDHGSKHTGLAILRGQEVVWLGQLDHRTDIKERMDKRRAFRRARRNRKTRYRKPRFLNRRRKDGWLPPSLESRVQNIQTWVNRLKKLCPIGYISYENAKFDTQLMRNPEINGVEYQQGTLQGYEVREYLLEKFGRKCCYCGKENVPLEVEHIIPKSRGGTDRVDNLCLACYDCNQRKGSKTAEEFGYPHIQKQVKESLKDASAVNSTRWKVYEVLKQSGCEVECGTGARTKMNRIRLDLPKTHYFDACCVGESTPNHLYFKTKEVLFIRAKGRGSRSRTNLDRYGFPRGYLARQKFFFGFQTGDMVKAVIPRGKYQGVWFGEVSCRKTGSFDIKGKDGKRIAQGINYRYVQVIQRFDGYTYRREGMNIA

SEQ ID NO: 10874 - protein, 421 aa, unidentified; identical to SEQ ID NO: 2846

SEQ ID NO: 10875 - protein, 443 aa, Anoxybacillus sp.
MVEENMTCFMQRKGEYPMVFVLDTNKCPLAPCHEAVARKLLKQGKAAIYKRYPFTIILKEIVDNFRPKTPYRLKIDHGSKHTGLAILRGQEVVWLGQLDHRTDIKERIDKRRAFRRARRNRKTRYRKPRFLNRRRKDGWLPPSLESRVQNIQTWVNRLKKLCPIGYISYENTKFDTQLMRNPEISGIEYQQGTLQGYEVREYLLEKFGRKCCYCGKENVPLEVEHIIPKSRGGTDRVDNLCLACRDCNQRKGSQTAEEFGYPHIQKMVKKTLKDASVVNATRWKVYEVLKQSGCEVECGTGARTKMNRIRLDLPKTHYFDACCVGESTPNHLYFKTKEVLFIRAKGRGSRSRTNLDRYGFPRGYLARQKFFFGFQTGDMVKAVIPRGKYQGVWFGEVSCRKTGSFDIKGKDGKRIAQGINYRYVQVIQRFDGYTYRREGMNIA

SEQ ID NO: 10876 - protein, 414 aa, unidentified
MPCSPAKARLLLKEKKAIVKRRTPFTIQLTIATGESKQPVTLGVDAGYKHVGLSASTEKAELYASEVELRQDVSDLLSARRALRQSRRSRNTRYRAPRFDNRIRTKRKGWLAPTVENRINVHLSRIETVLRLLPVTKITVETASFDTQLLKNPDIAGKEYQEGEQLGFWNVREYVLFRDGHVCQHCHGRSKDPVLNVHHLESRRTGGDSPGNLITLCETCHKALHRGEITLKAKRGQSFRAETFMGIMRWEVLDRLKASHPKLEVQNTYGYRTKHARISNGIAKSHCADAFCIAGNLGAERLGEFLFQKQTRRNNRQIHKLSIPKGGIRKRNQVPFEVKGFRLFDKVAYKGEEGFIFGRRSSGYFDVRKLDGTHISAGISYKKLRLLEKRQTYLTEIRKEEALPPLPEGRGLRA

SEQ ID NO: 10877 - protein, 424 aa, unidentified; identical to SEQ ID NO: 8456

SEQ ID NO: 10878 - protein, 433 aa, Candidatus Chloroploca sp.; identical to SEQ ID NO: 8354
  source 1..433: note = Khr17

SEQ ID NO: 10879 - protein, 415 aa, unidentified; identical to SEQ ID NO: 10041

SEQ ID NO: 10880 - protein, 435 aa, Erysipelotrichaceae sp.
MVFVIDTNKQSQPMVHPAEARKLLRDGKAAVFRRVPFTIILKEERPPAEKSYRIKIDYGSKHTGLALLDGNKAVWLGQIEHRTNIKSLLDKRRGYRRRRRSANLRHRKPRFDNRTRPRGWLPPSLESRVGNIETWVRRLCTLAPVGVISYENVKFDTQLVQDDTIDGVQYQQGTLQGYEVREYLLERRGRRCAYCGKEHVPLEIEHIVPRSRGGSSRISNLTLACHECNQAKGAMTAEEFGHPEIQKQAKKPLRDAAIVTATRWRVYDMLVGTGLPVECGTGGRTKYNRTRLGLPKEHYYDACCVGESTPDMLAIKTNEVLVITAKGRGSHCRTNVNASGFPRGYRARQKLFFGFSTGDYCKADIGSGKKAGTYVGRVLCRKTGSFDINTMQGRVQGLNHKWFTVLQRADGYEYHTEKRGATSSPCLKAGASVVQ

SEQ ID NO: 10881 - protein, 451 aa, unidentified
VTTILKTCFAASNLAKIVVLMDAWDIIVVLNKRGKPLMPCSPAKARHLLKEKKAAVVRRTPFTIQLTIATGESKQPVSLGVDAGYKHVGLSASTEKAELYASEVELRQDITDLLSARRALRQSRRNRKTRYRAPRFDNRIRTKRKGWLAPSVENRINAHLSRIETVIRLLPVTKISVETTSFDMQLLKNSDIAGKEYQEGEQLGFWNVREYVLFRDGHVCQHCHGRSKDPVLNVHHLESRRTGGDSPGNLITLCETCHKALHRGEITLKAKRGQSFRAETFMGIMRWEVLDRLKASHPKLEVQNTYGYRTKHARISNGIAKSHCADAFCIAGNLGAERLGEFLFQKQTRRNNRQIHKLSIPKGGIRKRNQVPFEVKGFRLFDKVAYKGEEGFIFGRRSSGYFDVRKLDGTHISAGISYKKLRLLEKRQTYLTEIRKEEALPPLPEGRGLRA

SEQ ID NO: 10882 - protein, 634 aa, Nocardiopsis sp.; identical to SEQ ID NO: 3185

SEQ ID NO: 10883 - protein, 465 aa, unidentified; identical to SEQ ID NO: 8068

SEQ ID NO: 10884 - protein, 442 aa, unidentified
MSTSVFVLDKKHRPLMPCRPARARRLLRAGRARVVKRFPFVIRLVDRTVEQSEVQPVLIKLDPGSRETGAAVVRDDGKKRHHALAFFVIEHRGGAIRDALKARSAFRRRRRSQNLRCRSPRFLNRVKPKGWLPPSLRHRVETTLSFVRRMCRYLPVSGIATELVKFDSQKLQNPEVSGVKYQQGTLFEYEVREYLLEKFGRKCVYCGAEGVPLNIDHVVPRAKGGSNRVSNLVLACVSCNQKKGARSLEDFLKGKPEVLARVRRELKTPLRDAAAVNATRWVLFNELKATGLPVETGSGALTKLNRHAFGVEKEHWLDALCVGRLNGVVTRKGLNVLEIRCMGRGSRQRTRLTKYGFPRGYLMRQKCVHGFATGDMVEANVPKGKKAGLWRGRVAVRVSGSFNIQTPKGVIQGVGWKHCRLISHNDGYGYAWLGHAPHSSPA

SEQ ID NO: 10885 - protein, 419 aa, Moorena sp.
MQNYVFVIDANKQPLNPIHPKKARRLLDKGKAAVFRIYPFTIILKTAYANPVILPCQIKIDPGSKTAGFALVRDGQVIWGMELEHRGGLIKKKLESRRAVRRGRRNRNTRYRKPRFLNRKRPEGWLPPSLEHRILTTETWVKRLIKFCPVSEIWIERVKFDTQKMQNPEISGVEYQQGELVGYEVREYLLEKWGRECTYCGKQNVPLQVEHIHPRSKGGSNRVSNLCLACEKCNQRKGNKPIEEFLKKKPSLLQKIKTKTKQPLTDAAAVNATRNKLVKVLKDSRVVVTGTGAQTKYNRTRLGLPKQHWIDAACVGNIESLALKTLQPLLVTCKGQGGRQKAALNKYGYPIRHNPLKPIKGWMTGDIAKHQKLGIGRVTPRSKGSFGFTPVGMKGYKSCKPQDISAIHRKDGYTYSFCK

SEQ ID NO: 10886 - protein, 414 aa, unidentified; identical to SEQ ID NO: 2588

SEQ ID NO: 10887 - protein, 512 aa, unidentified
MSTVYVLNKDGKPLMPTTRGGHVRHLLKEQKARVVRAKPFTIQLLYETNDVVQPLYLGIDPGRTNIGVAVVKANGTAVFTAHLETRNKEVPKLMQDRKKARRARRTNGRRCRRQRRAKANGTISKKCVKQDTAQSKNPSKRAKEIGIIKRRLPGYKKDVLCIGIKNKEAKYTNRTRPEGWLTPTANQLLQTHINLVRKIQKFLPISDVVLEVNKFAFMRLDNPDIQKWQYQQGPLYQKGSLENAVSEMQEHHCLFCDKPIDHYHHVVPQSENGSNTIANIVGLCAEHHNLVHKDAAWQKKLAEEKVGLNKKYGALSVLNQIIPALTNKLSVLFPKHFFVTAGKSTHDYRAAHGVSKDHWLDAYCIACSVLPSNVCDSNINNHMPYELKQFRRHDRRVLNNENVNRVYTLDNKAVAINRHKATEQEAASLEEFRKEHPNDVCKLKVKEHHPTYRNMNRNYPGSIFLVGKHVHIMQGIAGSKDGKATTYKDSNANSITASKCKFVAKNSGILFV

SEQ ID NO: 10888 - protein, 308 aa, unidentified
  source 1..308: note = Cyanobacteria bacterium UBA11371
MQNYVFVLDTNFQPLNPVSPKRARELLTKQKAAVFRMYPFTIILKHALPNPLPKSLTIKLDPGSRFSGIAVLDGKNVIWVAELEHRSWQIKDSLLTRRSLRRSRRNRKTRYRQARFNNRKRKQGWLAPSLMHRVLTIETWVKRLCRYAPIASIAMELVKFDAQKLQNPEIDGVEYQQGELAGYEVRQYLLEKWGRKCAYCDKERVPLQIEHIHPRAKGGSNRVSNLTLSCERCNTKKGTKSIDEFLKKDGSRLEKIKQQAKQPLKDAAAVNTTRWELFRTLKNILPTTTGTGGQTKYNRTKLELPKQH

SEQ ID NO: 10889 - protein, 213 aa, unidentified
MQYVYVLNKHGEPLMPCSPGKARLLLKQQKACVVKRTPFTIKLLFGSAGYKQPITLGVDAGSKHVGLSASTEKRELYSEEFTPRSDVVELLSTRRQNRRSRRNRKTRYRVPRFDNRVHSKHKGWLAPSVEVKIQEHITVIKHICKILPISLVRVETAEFDTQRLKAMLAGKPLPVGTDYQLGEMYDEYNVRQYVLKRDHYTCQYCGTHNTAKN

SEQ ID NO: 10890 - protein, 427 aa, Scytonema sp.; identical to SEQ ID NO: 3411

SEQ ID NO: 10891 - protein, 419 aa, unidentified; identical to SEQ ID NO: 4877

SEQ ID NO: 10892 - protein, 460 aa, Fischerella sp.; identical to SEQ ID NO: 9149

SEQ ID NO: 10893 - protein, 427 aa, unidentified
  source 1..427: note = Cyanobacteria bacterium UBA8553
MSKLPNYVFVLDTNRKPLTPCKPSIARKLLTACKAKVFRLYPFTIILNKEVTDNPEPLTLKIDPGSKVTGLALLFGSKLLWIAELTHRGQSIKAFLESRRSLRRSRRNRHTRYRQPRFLNRTRPKGWLAPSLQHRVETTLTWVNKLSRFAPINAVSQELVRFDLQRVENPEISGVQYQQGELAGYEVREYLLNKWERKCTYCGVENVPLQIEHIQPKAKGGSNRISNLCLACEKCNIKKGTKDIKVFLAKKPEILKRILAQAKRSLKDTAAVNSTRWALCNRLKETGLMVSTGSGGLTKFNRTRIGLPKTHFFDAACVGDTPEILILANQPLNIKATGHGSRQMCRTDKFGFPCRYVPQFKFIKGFQTGDVVKAIVTSGKKTGTYTGRVAVRSTGSFNISASLGLIQGISHKYCQQIHQKDGYNYGF

SEQ ID NO: 10894 - protein, 465 aa, unidentified
MSTCVCVLSNSGERLMPTIRLGKVRRLLKDGKAKIVKHHPFTIQLLYDSKTNTQPIEICEDVGYSYIGISVKSESHEYVSAQYDTLQDEKEHHDDCRMHRRTRRNRLRYRKPRFDNRKRGEGWLAPSLRHKKELNVNVVKMYCAVMPITHATVEVGSFDTMLVKAIQEGKAIPEGADYQKGPRYNLATLREAVFYRDNYTCQVCGRKVADGAILHMHHMFYWKGRHGDSLNELLTVCEKCHTPANHQKGGKLYGFGENVKFADLSGAAFMNTVRWQIVNKLYAAFGKDFVTVTYGAMTKEKRIALRLEKSHNNDAYAMGEFHPNCRYTFEHYEKVRRNNRILEKFYDSRYIDIRTGEIATGKELFNGRINRSHKKDSENLHKYRGKRIRKGYRALRRKKVALNPGDLVSLNGEILTVHGTHTKKNGSVNVEFKTPSKSGKKSTSLKKLKIIKTISPMRSAWDKVS

SEQ ID NO: 10895 - protein, 472 aa, unidentified
MSTCVCVFSNNGERLMPTFRLGKVRRLLKDGKAKIVKHHPFTIQLLYDSKTNTQPIEICEDVGYNYIGISAKSKSHEYVSAQYDTLQDEKEHHDDCRKMRRTRRNRLRYRKPRFDNRKRGEGWLAPSLRHKKELNVNVVKMYCAVMPITYATVEVGSFDTMLVKAIQEGKVIPEGADYQKGPRYNLATLREAVFYRDNYVCKVCGRKATEGAILHMHHMFYWKGRHGNSLNELLTVCEKCHTPANHQKSGKLYGFGEDVKFADLSGAAFMNTVRWQIVNELYAAFGKPFVTITYGAMTKEKRIALQLEKSHNNDAYAMGEFHPNHRCAFEHYEKVRRNNRILEKFYDSQYIDIRTGEIATGKELFNGRINRNHKKDSENLHKYRGKRTYAGHRALLRKKVNLNPGDLVSLNGEPLVVLGTHTRKNGAVNVEFETPSKSGRKSASLKKLKIVKAADSIHPAWEKVSQIIQRKE

SEQ ID NO: 10896 - protein, 413 aa, unidentified
MTSYSFVLDANGKQLAPTKEPKAWFLIRKKRAALVSKYPMVIQLKKKIQENEICKDEIRCGIDDGGLHVGIALVQKCKSKNKVVFKGTIEQRNDVKHLMEVRRNYRRYHRYHKRYRQARFDNRKSSKREGRIAPSILQKRQATIRVIHWLNKWINITNYWLEDVSVDIRALTDGYQSYRWQYQKSNRLDENIRKAAILRDDGKCMECGKSNCRLEVHHIKPRRRNGSNTLDNLITLCESCHQKTEGQEELYMDRYFSLLKSSDNKNLNDAQHVMIGKMWLRKQLSGLGVLYLTSGGDTANKRIDWNIEKSHTNDAVCITDLQPDTCDIKEWAIKPMRRQSKAKTDHVLGIHHRDLVEYTFKNGETHRGYVTALYPEQKAINFQSQTKHCKKVNARKCKLLWNYSKIYWFENAS

SEQ ID NO: 10897 - protein, 423 aa, Phormidium sp.; identical to SEQ ID NO: 9375

SEQ ID NO: 10898 - protein, 450 aa, Alkalispirillum sp.
MAVLVLDKRKRPLMPCSEKRARLLLDRGRAVVVRVHPFTIRLKDRVGGDTQPTRIKIDPGSRITGMALVREGADGTEHVLWLGEIAHRGHAIRDRLAQRRAFRRRRRSQLRHRAPRFDNRTRPAGWLAPSLQHRLGTTIAWVKRLRRWAPVTAVSQELVRFDTQKMENPGVSGVEYQQGTLQGFEVREYLLHRHQHQCAYCAGRSGDPVLEVEHVHPRRRGGSDRVGNLVIACRCCNQAKGNRTAGEWAEALGQRSMLDRTRKANAERIEAGKRPSLRDASAVNSTRWALFHALKATGLPVAAGTGGRTKWNRQRLGIPKGHALDAACVGTVESVVGWNCPVLAIKASGRGSYQRTRLDRYGFPRGHLMRAKQVRGFQTGDHVRAVVPTGRKVGTHTGRLAVRVSGSFNIQTPKGVVQGISHRHCVLTQRADGYGYTAKPKPMEERERAA

SEQ ID NO: 10899 - protein, 423 aa, Arthrospira sp.; identical to SEQ ID NO: 3469

SEQ ID NO: 10900 - protein, 420 aa, unidentified
MQYAYVLNKRGEPLMPCSPGKARILLKQQKACVVKRTPFTIKLLHGSAGYKQPITLGVDAGSKHVGLSASTEKRELYSEKFTPRNDVVELLSTRRQNRRSRRNRKTRYRAPRFNNRVHSKHKGWLAPSVEVKIQEHITVIKRICRILPITLVRVETAEFDTQRLKAMLAGKPLPVGTDYQLGEMYDEYNVRQYVLKRDNYTCQCCGAHTTAKKTVKLHVHHLESRKVGGNAPSNLITLCTTCHNNLHKGKITLDGKKRGKTLRDAAFMGIMRNTLLTRLRNELNIPVQNTYGYITKLLREQNDIKKSHVNDARCISKHPLAKPCSVCYRTKAIRHHNRQIHKAKILKGGIRKANQAPYIVKGFRLWDKVLYNEQECFISGRRSSGYFALRKFDGTTITNSISFKKLRLLEPATNYLIERK

SEQ ID NO: 10901 - protein, 510 aa, unidentified
TVYVLNKDGKPLMPTTRGGHVRHLLKEQKARVVRAKPFTIQLLYETKDAVQPLYLGIDPGRTNIGVAVVKTDGTAVFTAHLETRNKEIPKLMKKRKESRRARRTNGRRCRRQRRAKANGTISKKCVKQTTAQNRSVSKRAKEIGVIKRYLPGCEKEILCIGIKNKEAKFNNRTRPEGWLTPTANQLLQTHVNLVKKIQKFLPISDVVLEINKFAFMQLDNPNIQKWQYQQGPLYKKESLESAVSEMQEHHCLFCKKPIDHYHHVVPQHKNGSNTIGNIVGLCTKHHDLVHKEVAWQEKLAKKKIGLNKKYGALSVLNQIIPALTKEMGVLFPKHFFVTTGKSTYDYRVAHGVSKDHWLDAYCIACSVLPNDVCDKNINSRVPYELKQFRRHDRRALHKENMNRVYTLNGKKVAANRHKAVEQATDSLEEFRQNHPDDVCKLKVKEHHPEYRNPKRNFPGCVFLVGKRTHVMQGTSGSHNGKADGYYDTNGNSYPFGKCKFVAKNKGIVFA

SEQ ID NO: 10902 - protein, 422 aa, unidentified; identical to SEQ ID NO: 6264

SEQ ID NO: 10903 - protein, 442 aa, unidentified
MSTSVFVLDKKHRPLMPCRPARARRLLRAGRARVVKRFPFVIRLVDRTVEQSEVQPVLIKLDPGSRETGAAVVRDDGKKRHHALAFFVIEHRGGAIRDALKARSAFRRRRRSQNLRCRSPRFLNRVKPKGWLPPSLRHRVETTLSFVRRMCRYLPVSGIAAELVKFDSQKLQTPEVSGIEYQQGTLFEYEVREYLLEKFGRKCVYCGAEGVPLNIDHVVPRAKGGSNRVSNLVLACVSCNQKKGARSLEDFLKGKPEVLARVRRELKTPLRDAAAVNATRWVLFNELKATGLPVETGSGALTKLNRHAFGVEKEHWLDALCVGRLNGVVTRKGLNVLEIRCMGRGSRQRTRLTKYGFPRGYLMRQKCVHGFATGDMVEANVPKGKKAGLWRGRVAVRVSGSFNIQTPKGVIQGVGWKHCRLISHNDGYGYAWLGHAPHSSPA

SEQ ID NO: 10904 - protein, 415 aa, unidentified
MVYVVANDGQPLMPTERHGKVCRMLRSGMAKVIKKCPFTIQLQYESERNVQPVSLGVDAGSKHIGISATTKTKVLYESDVELRDDIVKLLATRRQLRRSRRSRKTRYRPARFDNRKRKEGWLAPSIQQKIGSHLTVVANVCKILPINQIIVETASFDIQKIKNPEIQGIEYQQGEQMDFWNVREYVFFRDGHTCQCCKGRSKDKILNVHHIESRKIGGNAPNNLITLCETCHKGYHNGTVILPKNIKRGMQFKDAAFMGIMRWAFYNALKEQYEPAIPVSMTYGYLTKNTRIEHGLLKEHYIDARCISGNPDAVSDGTYYYQKKVRCHNRQIHKQTILKGGIRKSNQAEYLVKGYRLFDKVRYHGREYFIFGRRKTGFFDIRTLSGEKVNKGSISVKKLTFADTRKNYLTERRTA

SEQ ID NO: 10905 - protein, 414 aa, unidentified
MVYVINKQGQALMPTERFGKVRRLLKNSLAHVVCRIPFTIQLDYDTTDYTQPVSLGVDAGSKHIGISATTSEKEMYAADVELRNDIVDKLSTRREQRRTRRSRLRYRKARFNNRVSSKRKGWLAPSVENKIQTHLTVVEKIHKFLPITNIVVEIASFDIQKINNPIISGSEYQQGEQLDFFNVREYVLFRDNHICQHCKGKSKDKVLNVHHIESRKAGGDSPNNLITLCETCHKAYHRGEFELNVKRGKSFRDAAFMGIMRWSFYDRLKNIYPDVSMTFGYITKNTRITNNLPKDHYVDARCISGNPVAKPLGYYFYQKKVRCQNRQIHKANFLKGGRKKLNQAPFLVKGFRLFDLVEYQKDLYYIFGRRDSGFFDIRKLDGTKVNKGSINCKYLRLVDKRKSILIEKRMQVNL

SEQ ID NO: 10906 - protein, 420 aa, unidentified; identical to SEQ ID NO: 6212

SEQ ID NO: 10907 - protein, 457 aa, Anaerostipes sp.; identical to SEQ ID NO: 5989

SEQ ID NO: 10908 - protein, 372 aa, unidentified
AVVRDDEKKRHHALAFFVIKHRGGAIRDALKARSAFRRRRRSQNFRCRSPRFLNRVKPKGWLPPSLRHRVETTLSFVRRMCRYLPVSGIATELVKFDSQKLQNPEVSGVKYQQGTLFEYEVREYLLEKFGRKCVYCGAEGVPLNIDHVVPRAKGGSNRVSNLVLACVSCNQKKGARSLEDFLKGKPEVLARVRRELKTPLRDAAAVNATRWVLFNELKATGLPVETGSGALTKLNRHAFGVEKEHWLDALCVGRLNGVVTRKGLNVLEIRCMGRGSRQRTRLTKYGFPRGYLMRQKCVHGFATGDMVEANVPKGKKAGLWRGRVAVRVSGSFNIQTPKGVIQGVGWKHCRLISHNDGYGYAWLGHAPHSSPA

SEQ ID NO: 10909 - protein, 509 aa, unidentified; identical to SEQ ID NO: 4834

SEQ ID NO: 10910 - protein, 422 aa, Petrotoga sp.; identical to SEQ ID NO: 6564

SEQ ID NO: 10911 - protein, 311 aa, unidentified
MFVDMVYVQDIDGKPMMPTTRHGKVRRLLKDKKAVVVNLCPFTIRLTYVTSDYKQEIVLGVDAGTKHVGLSATTKSKELYSSEVILRNDIVDLLSTRRELRRTRRNRLRYRKPRFDNRIKSKRPGWVAPSVKYKIDAHIRVIDNVCSILPISRIVIEVAQFDTQKIKNPEILGKEYQEGDQLGFWNTREYVLARDGHKCQYCKGKSKDKILNVHHLESRKTGGDSPSNLITLCETCHKEYHKGNIDLKIKRGSSLRDAAVMGIMKWKLYEELRSRYDRVSMTFGYITKHNRIKYGIEKIPYIRRVCHFYEH

SEQ ID NO: 10912 - protein, 345 aa, Bacillus sp.; identical to SEQ ID NO: 10753

SEQ ID NO: 10913 - protein, 512 aa, unidentified
MSTVYVLNKDGKPLMPTTRGGHVRHLLKEQKARVVRAKPFTIQLLYETNDVVQPLYLGIDPGRTNIGVAAVKANGTAVFTAHLETRNKEIPKLMQDRKKARRARRTNGRRCRRQRRAKANGTISKKCVKQTTAQNGSVSKRAKDIGVIKRRLPGCEKDVLCIGIKNKETKFTNRTRPEGWLTPTANQLLQTHINLVKKIQKFLPISDVVLEVNKFAFMRLDNPNIQKWQYQQGPLYKKESLESAVSEIQEHHCLFCKKPIDHYHHVVPQHKNGSNTIGNIVGLCAKHHDLVHKDSAWEKKLAKKSTGLYKKYGALGVLNQIIPTLTNELSSLFPKHSFVTNGKSTYDYRAAHGVSKDHWLDAYCIACSVLPSNVCDSNINNHMPYELKQFRRHDRRVLNNENMNRVYTLNNKAVAINRHKAKDQKTVSLEEFRKEHPDDVCKLKVKEHHPTYRNMNRNFPGSVFLVGKQIHVMQGIASSKDGKATKYNDTSATAIAAGKCKFVAKNTGILFV

SEQ ID NO: 10914 - protein, 424 aa, unidentified; identical to SEQ ID NO: 3351

SEQ ID NO: 10915 - protein, 462 aa, unidentified
MSVLVIGRNGRALMPTNPRKARLLLKKKTASVVCRHPFTIQLLYKTGCATQEGCIGIDTGSQHIGVGITCGDRMILKDEHALRSSMEKRSLLATRTVMRRGRRYRKVRYRKPKWRHHTKRMYFEKANRRGQHWRKVKTTTQSPRLKGWLPPSLQSKCDHHFRIIDRYLKYLPDPITRNLVIEAGRFDMARMNDPTIHGEMYQRGPMYDAENLRAYIFARDNYQCACCKAKAGTTRKADGTTVKLVAHHILFRSRGATDNPKYIISVCDHCHTTKAHQPGGILYSWMENNKKVARGLRDATFMNILRKRLFARYPQAAFTYGNITAADRKQLRLPKSHANDAVAISLFGKEASTVKNICQTMHYKQIRKSKRSLHEAIPRKGRKNPNTKAVRNKKNTTQVNGFKLWDSVLADGKKLFICSFTGTSAYLIDKNGCYISQPGKTYKQWPLSKLKRLHPNGNWLMA

SEQ ID NO: 10916 - protein, 418 aa, unidentified
MVYVLSKTGQPLMPTENHAKVRVLLKQQKAKIVHRCPFTIQLLYDSTDYTQPVSLGIDAGSRHIGVSATTETKVLYEADVTLRNDIVDLLSTRREARRTRRSRKTRYRKPRFNNRIRKDGWLAPSIQQKVDTHLTVVHKATEILPVNSITVETASFDIQKIKNPDISGTGYQQGEQLDFWNVREYVLFRDGHKCQCCKGKSKDPVLNVHHIESRKTGGNAPNNLITLCETCHKGYHNGTVSLPKNIRRGMKFNDAAFMGIMRWTFFNRVKETYEPLGIMVNMTYGYITKNTRIEHNLPKDHFINARCISGHPDAVSDGTVFYQKKVRCHNRQIHKQKILKGGIRKRNQAPYLVKGFRLFEKVKYHGKQYFIFGRRSSGFFDIRTLDGTKVNKGSVSCKKIRSLDMPRSYLTEERKAIV

SEQ ID NO: 10917 - protein, 430 aa, unidentified
MPKVYVLNRHGRPLMPCTPAKARHLLDAGKAKVRHRTPFTIQLLYGSTGYTQEVILGVDAGSKTIGLSAATETEELFSAEVKPRNDVVELMSARRQFRRARRNRTTRYRKPRFDNRVRSKHKGWLATSVEVKIQEHMTAIRRACAILPVSKVVVETAEFDLQLLKAVAEGKPVPQGEDYQKGEMYGHYNVRQYVLWRDSYTCRICGMHGSVRKGVPLHVHHLESRRVGGDAPDNLVTLCTACHDKLHKGIIMAADIKKRKRRSTRDATFMGIMRMTLLRRLREQLPVPVVETRGYITKATRENLLVLPKSHANDALAIAHGPQGFRAEHLPNIRQADRLYTIRPVRHHNRQLLKATILKGGVRKTNQAEKYICGFRLYDKVLYNGIECFVWGRRTSGSFLLRQLNGEKVKDGVSYKHLKLLERSQSYLVA

SEQ ID NO: 10918 - protein, 414 aa, unidentified
LRVFVLNKRGKPLMPCSPAKARLLLKEKKAIVKRRTPFTIQLTIATGETKQPVSLGVDAGYKHVGLSASTEKAELYASEVELRQDITDLLSARRALRQSRRNRKTRYRAPRFDNRIRTKRKGWLAPSVENRINAHLSRIEAVLRLLPVTKITVETASFDLQLLKNPNISGKEYQEGEQLGFWNIREYVLCRDGHVCQHCYGRSKDPVLNVHHLESRRTGGDSPGNLITLCETCHKALHRGEITLKAKRGQSFRAETFMGIMRSEVLNRLKASHPELEVNNTYGYRTKHARIANDIAKSHCADAFCIAGNLGAERLGEFFFQKQTRRNNRQIHKLSILKGGIRKRNQAPFEVKGFRLFDKVACQGEEGFIFGRRSSGFFDVRKLDGTRISAGISYKKLHLLEKRRTYLTEIRKEE

SEQ ID NO: 10919 - protein, 415 aa, unidentified
MVYVLANDGQPLMPTERHGKVCRMLKSGIAKVVKKCPFTIQLQYESERNVQPVALGIDAGSKHVGVSATTKAKVLYESDVELRDDIVKLLATRRQLRRRRRSRKTRYRPARFDNRRRKEGWLAPSIRQKIESHLTVVANVCKILPVSQIIVETASFDIQKIKNPDIQGIEYQQGEQMDFWNIREYVLFRDGHTCQCCKGKSKDKVLNVHHIESRKTGGNAPNNLITLCETCHKGYHNGTVTLPKNIKRGMKFKDAAFMGIMRWTFYNTLKEQYEPDIPVSMTYGYLTKNTRIEHGLPKEHYIDARCISGNPDAVSDGTYYYQKKVRCHNRQIHKQTILKGGIRKSNQAEYLVRGFRLFDKVRYQGREYFIFGRRKSGFFDIRTLSGEKVNKGSISVKKLTFADTRKNYLIERRTV

SEQ ID NO: 10920 - protein, 406 aa, unidentified
MVYVQDIDGKPMMPTTRHGKVRRLLKANKATVVNLCPFTIQLTYKSTDHKQPVTLGIDAGAKHIGFSATTEKEELFACETTLRTDIVDLLSMRLQNRRTRRSRLRYRKSRFNNRGSSKKKGWVAPSAKQRIDSHLNEVNEIHKILPITKIVIEVAQFDTQKMKNHDISGADYQNGEQLGFWNVREYVLFRDGHKCSHCKGKSKDPVLNVHHLESRKTGGDSPSNLITLCESCHKAFHKGEIELKKKRGKSLRDAAVMGIMKWKLYEELKSRYDNVSMTFGYITKHNRIKYGIEKNHTSDAFVISRNFNAKRIEYQYLKRLVRRHNRQIHKMKILKGGKKKNNQAPFEVFGFRLFDKVLYNNEIFFVYGRRKSGNFNIRDFNGENPKDVSHKKFKLIRGKRHPIILK

SEQ ID NO: 10921 - protein, 411 aa, unidentified; identical to SEQ ID NO: 8372

SEQ ID NO: 10922 - protein, 420 aa, unidentified
MQYVYVLNKHGEPLMPCSPRKARLLLKQKKACVVKRTPFTIKLLYGSTGYKQPITLGVDAGSKHIGISATTEKHELYREEATPRNDVVDLLSARLAFRRSRRNRKTRYRAPRFDNRVHSKHEGWLAPSVEVKIREHITLIKRVCRILPITLVRVETAKFDTQRLKAMLEGKPLPVDTDYQLGEMYDEYNVRQYVLKRDNYTCQCCGAHPTKTKAVKLHVHHIETRRTGGNAPNNLITLCTVCHKALHAGKVTLDGKKRGKPLKDAAFMGVMRKTLMERLRKELKIPVQGTYGYITKYIREKNGIPKSHTNDARCISKNPLAIPCDTCYYTKAVRHHNRQLHKATILKGGIRKANQAPYIVKGYRLWDKVSYNGTECFITGRRTSGYFALKKLDGTVVSNSISYKKLRLLEVATNYITERK

SEQ ID NO: 10923 - protein, 441 aa, Sulfobacillus sp.; identical to SEQ ID NO: 4231

SEQ ID NO: 10924 - protein, 442 aa, unidentified; identical to SEQ ID NO: 8051

SEQ ID NO: 10925 - protein, 325 aa, unidentified
RKTRYRAPRFDNRIRTKRKGWLAPSVENRINAHLSRIEAVLRLLPVTKITVETASFDMQLLKNPDISGKEYQEGEQLGFWNIREYVLCRDGHVCQHCYGRSKDPVLNVHHLESRRTGGDSPGNLITLCETCHKALHRGEITLKAKRGQSFRAEAFMGIMRSEVLNRLKASHPELEVNNTYGYRTKHARIANDIAKSHCADAFCIAGNLGAERLGEFFFQKQTRRNNRQIHKLSILKGGIRKRNQAPFEVNGFRLFDKVACKGEEGFIFGRRSSGFFDVRKLDGTRISAGISYKKLHLLEKRRTYLTEIRKEEVLPPLPEGRGLRA

SEQ ID NO: 10926 - protein, 515 aa, unidentified
MTTLEERLSKTEYIYVLGFDGKPQMPTRRKRHVLKLLKTGRARIAEDIPFTIRLTYRNAPVLQPVTLAEDPGRTNIGAAVLSPLGDLLFAAVIETRNKEIKKLMADRKKSRQASRRGERKARQRLAKRYGSMVKSGMIIRKLPMYAADKFVTCKFIRNTQARFCNRKRCPDWITPTVQHLVQTHLNIIRKISRYLPVTDIAFEVNRFAFMHMENPKAVGVDFQNGPLKGYDDVKEAIRTQQHGKCLMCKKPISHFHHIVPRSRGGSDTIQNMAGLCPECHTKVHTDTAFRKDFDEKKSGQLKKYGALSALNQAVPFICKKLLEEYGEEHVHFCRGMDTSLIRTALGFEKTKMNQMHEVDAYCIGLAALEVNEVAAPAFDHTFQIRQFRRQDRSIIHHQTGRSYYQGKEKVAQNRKPGFEQKTTALSQWYEEQVRIHGEKEAEKLRSQLRVEKSCRHYNDMDRFLPGAVFLYEGKRYVLSGRITNGKYLRACGQGMKNFPAAECTFIRHNAGLVFI

SEQ ID NO: 10927 - protein, 485 aa, unidentified; identical to SEQ ID NO: 6696
  REGION 1..485: note = Ga0373628_0060488

SEQ ID NO: 10928 - protein, 420 aa, unidentified; identical to SEQ ID NO: 9880

SEQ ID NO: 10929 - protein, 524 aa, unidentified
MTHQERRHLMPEYIYVLGMDGRPQMPTTRRRHVQKLLNIGKARIAEHVPFTIQLLYKNDPVLQSVMLAEDPGRTNIGLAVLSLEGDLLLSAVTETRNKEIAKLMLDRRKNRRASRNGERKARQRLAKKFGTVIKAGMLMRKLPKYAADKFVTCNLIRNTESRFCNRKRPEGWLNPTVNHLVETHIHLIHKMQKYLPVTDIAFEVNRFAFLLLEDPSVSGVDFQNGPLKGYDNLKDAVYDLQDGKCLMCGHEIEHYHHIVPRAKDGSNTLGNIAGLCKCCHDKVHKDAEFKKKLKDCKKGLDQKYGALSALNQAIPFICKRLEEEFGKEHIFYCTGRDTARVRNSLGYQKTKESQLHEVDAWCIGLLAVGKAPESLPDFSQTHRIRQFRRRDRSLIQAQVERTYKMNGKTVAKNRKKRMDQRTDSLEEWYQKQVRSVGKKEAERKRSQLTVVKSYRRYNELGRIMAGAILIYQGKRYVLQNRITNGQYYHVFGSEKNIPAKKCMIEKHNEGLVFLSKNMAAISPG

SEQ ID NO: 10930 - protein, 411 aa, unidentified; identical to SEQ ID NO: 4578

SEQ ID NO: 10931 - protein, 423 aa, unidentified; identical to SEQ ID NO: 3513

SEQ ID NO: 10932 - protein, 424 aa, unidentified
MVFVLDRSKKPLDMISHAQARILLKNRLAVVHKIYPFTIRLKDNSCVSKDKTYTVKIDPGSRTTGVAITDDKDSVVMLAEIEHRGHLIKKNLYDRKVLRRFRRNRKTRYRESRFLNRTRPKGWLAPSVKSRADNVVNFVKKYKKLININKVMIENVSFDTAQMTSDIKLWGSDYQQGPLYQKELRSFIFSCSNGKCVYCGAQAEEIDHIIPRSNGGTNSAYNLVASCRACNQMKSNLTLKAFGKLVGKDFSHLEHKKLPKDAAIVQLTRNYMIKEVTKLVSDTTLHDAWLTKYNRDSLGLPKQHYYDALSVGEIPSKLNFLTDKILQISAKGRGSRQMCSMDKYGFPRTKPKGSKLVKGFQTGDIVKAIVPKGLKQGIYLGRVIIKSSGAFKIAYNNCIVDGIRYKYCRFIQRGDGYSYNYKRD

SEQ ID NO: 10933 - protein, 420 aa, unidentified
MQYVYVLSKHGEPMMPCSPGKARLLLKQQKACVVRRTPFTIKLLYGSAGYKQPITLGVDAGSKHVGLSASTEKRELYREEFTPRNDVVELLSTRRQNRRSRRNRKTRYRAPRFDNRVHSKHKGWLAPSVEVKIQEHITIIKRICKILPISLVRVETAEFDTQRLKAMLAGKPLPVGTDYRLGEMYDEYNVRQYVLKRDNYTCQCCGAHTTAKKLVKLHVHHLESRKTGGNAPSNLVTLCTTCHKNLHKGKVTLDGKERGKPLRDAAFMGIMRKTLMARLKEELPIPVQGTYGYITKMRREQNDIKKGHTNDARCISKHPLAEPCSVCYRTKAIRHHNRQTHKANFSKKGIRKRSQMPYLVEGYRLWDKVLYKEQECFVSGRRSSGSFTLKKLDGTSVSKGVTFKKLRLLEPATNYLIERM

SEQ ID NO: 10934 - protein, 498 aa, unidentified
MAVVYVLSAGGEPLMPTTRCGHVRILLKEKKARVVERNPFTIQLAYETEGVTQHLYLGIDPGRTNIGAAVVSEDGECMFTAQLTTRNKDVPKLMKARKQYRMAHRRLKRRCKRQRRAKAAGTISPQKEIQRLLPGCEEPIICKGIQNKEARFNNRTRPAGWLTPTANHLLQTHINLVKRLQKFLPITDVVLEANRFAFMAMENPRIQRWQYQRGPLFCKGSVEEAVYAAQDGHCLFCEKGIDHYHHIVPRRKNGSETLENRVGLCEEHHRLVHTEDAWTKRLAAKKAGMNKKYHALSVLNQIIPSLTERLAELFPQHAFVTTGQDTYYFREDHDIPKDHYLDAYCIACSVLSNAQKVSPPKREPYDIRQFRRHDRQACHKANITRKYYDADGKLVAANRHKAMEQKSDSLVEYRENHSEVEVSQLIVKDHFPQYKEMSRPMPGSLLVNNGGKLFALMRSDGKHNGKADYFVDTQGIKHLAKRCILLQNNQGIIFAGIG

SEQ ID NO: 10935 - protein, 453 aa, Lactobacillus sp.; identical to SEQ ID NO: 4050

SEQ ID NO: 10936 - protein, 418 aa, unidentified
MVYVLDAQGNPLMPTSRHGKVRRLLKEGKAKVIKRCPFVIQLLYNSTKYVQNISLGIDAGSKYIGASASTQTKVMYEAEIELRNDIVNLLSSRKECRRARRYRKTRYRKPRFNNRVSSKKKGWLAPSVKQKVQTHLTVIDNICHILPIKNIIVEVASFDTQKLKNPNISNTEYQHGEQEGFWNVREYVLFRDNHTCQCCKGKSKDQILNVHHIKSRKTGGNSPSNLVTLCKSCHRDYHKGLIKLPNTVCSGKSFRDATFMNVMKKTLILELKKKYSSVQETYGYITKRVRISHNLPKGHYIDARCISGNPNAQSLGYYYFQKKVRCHNRKIHKQKIYKGGLRKNNQAPYFVKGFRLFDKVKYKGEEYFVFGRRNSGYFDIRNLTGIKVNNGSINYKNLLFVSTKTSFLTERRKICGAL

SEQ ID NO: 10937 - protein, 326 aa, unidentified
MDRRRAFRKNRRQRKTRYRKPRFLNRANSTKKDRLPPSVRSKVQSHIDEIEFCKKILPISKIVLEVSQFDTHLMKNPELIDEKVKHWGYQEGFDYGYSSRREAVLHRDNYTCQCCGKKHTRLEVHHIIFRSLGGTDDERNLITLCEKCHKAIHDGILVLTKKPKKLNLKYATQMSIIRSQLLKIYPYAIETFGFVTKTNRENLNLSKQHFIDACVIASAGKEFKQSSWLFKKRRVARQNRQLCKGIRGEIKLPIGKIFGFKRFDKVKYLGEVCFIKSRRNGGFFTLMDVDNNTLDFRDRGGRGTPSYKLLERLNMQRSILCVGQII

SEQ ID NO: 10938 - protein, 477 aa, unidentified; identical to SEQ ID NO: 5307

SEQ ID NO: 10939 - protein, 481 aa, unidentified
MWTTVLRGEKPYGRSSALPVRECVSITKKRRHRMVAVLSKTGIRLMPTSSYRARKLLAKKKAVICGCRPFTIRLTERETGDVQPVELAVDTGYFHVGNSLKTAKHELAAVEIRTLMDEKQRYDDRRRHRRMRRSRLRYRAPRFDNRRRPEGWLAPSIQGRMEQNLAFLRRVLSVVPVTRIVMEMGQFDTQVLKAVEEGRPLPEGADYQQGERYGIATLREAVFTRDNYTCQCCEKTIHDGVILHVHHIVYRSQGGTNRMGNLITVCEKCHTPKNHKPGGKLYKWKPTVKSFKGATFMTAVRWIVYRSVTESFPDVDVRITYGAKTKLQRRTLDITKSHVNDAYVMGDFHPKHRARPVILQKKRRNNRILEKFYDAKYIDTRDGSKKTGQQLFNGRTNRNHNTDTENLRPYRGTKLSKGKRAIRTTRYKIQPHDILVYQGQEMEASGCHNKGTRVMTTAKKSLPIGKVRVRRYSGGYYAVAE

SEQ ID NO: 10940 - protein, 431 aa, unidentified; identical to SEQ ID NO: 6299

SEQ ID NO: 10941 - protein, 449 aa, unidentified
MSVFVLDARKRPLMPCSEKRARLLLLRGRARVVRRYPFTIRLVDRRVENSVLQPVEIKLDPGSKTTGLAVVRAEGGNKPTAVLFLAELTHRGRKISEKLTARRAFRRRRRGNLRYRPARFDNRTRSEGWLAPSLRHRVETVSSWVARLRRLVPVTGLAMELVRFDMQAMENPDIEGAEYQRGTLAGYELRSYLLAKWDHACAYCGAVEVPLNLDHIVPRARGGSNRVSNLACACISCNEEKGARPVEEFLAGRPKILARVKAHAKRPLKDAAAVNATRWALFETLRATGLPVECGSGGRTKWNRARLGVPKTHVLDAACVGVVEALSDWAVPALTIKATGRGAYQRTRLDAYGFPRGYLTRSKRIRGFQTGDMVRATVATGKKAGVHIGRVAVRATGSFNIQTPTGVVQGINAKHCTILSRADGYSYTQQKGAISSPCLKAGVSMAQTR

SEQ ID NO: 10942 - protein, 512 aa, unidentified
MSTVYVLNKDGKPLMPTTRCGHVRRLLKEQKARAVASKPFTIQLLYETDDVVQPLYLGIDPGRTNIGVAVVKTDGTTVFTAHLETRNKEIPKLMKKRKDSRRARRTNGRRCRRQRRAKANGTISKKCVKQNTAQNGSVSKRAKDIGVIKRHLPGCEKEVLCIGIKNKEAKFSNCVKPEGWLTPTANQLLQTHINLVKKIRKFLPISDVVLEINKFAFMQLDNPNIQKWQYQQGPLYQKASLKEAVSEMQEHHCLFCKKPIAHYHHVVPQSENGSDTIGNIVGLCTKHHDLVHKDTSWQEKLAKKKTGFNKRYGALSVLNQIIPALTKELSSLFPKHFFATNGKSTYDYRAAHGVSKDHWLDAYCIAGSVLPNDAYDSNINNRVPYELKQFRRHDRRALHKENMSRVYTLNGKKVATNRHKAVEQTTDSLEEFCQNHPDDICKLKVKEHHPEYRNPKRNFPGCVFLVGKHTHVMQGTSGSHNGKADGYYDTNGNSYSSGKCKFVAKNEGIVFT

SEQ ID NO: 10943 - protein, 465 aa, unidentified
MSTCVCVLSNNGERLMPTIRLGKVRHLLKDGKAKIIKHHPFTIQLLYDSETNIQPIEICEDVGYNYIGISVKSQSHEYVSAQYDTLQDEKSCHDACRRMRRTRRNRLRYRQKRFDNRKRDKGWLAPSLKHKKELNVNVIKMYCEVVPITHATVEVGSFDTMLVKAIEEGRATPEGADYQKGPRYNLATLREAVFYRDNYTCQVCGREASEGAILHVHHMFYWKGRHDNSLSELITVCEKCHTPANHQKGGKLYGFGEDIKFANLSGAAFMNTVRWQIVNELYAAFGKPFVTFTYGAMTKEKRIALHLEKSHNNDAYAMGEFHPNCRCTFEHYEKVRRNNRILEKFYDSRYIDIRTGEIATGKELFNGRINRSHKKDSENLHKYRGKRIRKGYRALRRKKVALNPGDLASLNGEILTVHGTHTKKNGSVNVEFKTPSKSGKKSTSLKKLKIIKTISPMRSAWDKVS

SEQ ID NO: 10944 - protein, 431 aa, unidentified
MPNKVYVINKHGRPLMPCSPAKARHLLDAGKAKVKKRTPFTIQLVYGSSGYTQEVILGVDAGSKTIGMSASTTKEELFSAEVKPRNDVVDLLSTRREFRRERRNRKTRYRKPRFDNRVRSKHKGWLAPSVEVKIQEHITAIKRVCRILPVSKVVVETAEFDLQLLKAIEEGKPVPQGEDYQKGEMYGHYNVRQYVLWRDNYTCQCCGAHATKKKEVRLHVHHLESRKVGGDAPDNQVTLCESCHEKLHKGLIAEKDFKKRKRRSTRDATFMGIMRKTLMQRLCSELPIPVIETRGYITKATREKLLVLPKSHTNDALAIAQGKQGFNVGYLPGIAQIGKIYTIRPVRHHNRQLHKATILKGGIRKSNQAEKYVFGYRLFDKVQFNGQDCFIWGRRTTGIFTIKMINGKMIKDGISFKKLKLVEKSTNYLIV

SEQ ID NO: 10945 - protein, 418 aa, unidentified; identical to SEQ ID NO: 2710

SEQ ID NO: 10946 - protein, 393 aa, unidentified
MVYVQDIDGKPMMPTTRHGKVRRLLKDKKAVVVNLCPFTIRLTYVTSDYKQEIVLGVDAGTKHVGLSATTKSKELYSSEVILRNDIVDLLSTRRELRRARRNRLRYRKPRFNNRIKSKRPGWTAPSVKYKIDAHIRVIDNVCSILPISRIVIEVAQFDTQKIKNPEILGKEYQEGDQLGFWNTREYVLARDGHKCQYCKGKSKDKILNVHHLESRKTGGDSPSNLITLCETCHKEYHKGNIDLKIKRGSSLRDAAVMGIMKWKLYEELRSRYDRVSMTFGYITKHNRIKYGIEKSHTSDAFVISKNINAKRIGCQYLKRLIRRHNRQIHKMKILKGGKKKNNQAPFEVFGFRLFDKVLYNNKILFVYGRRKSGSFNIRDFNGENSKDVSRKKV

SEQ ID NO: 10947 - protein, 456 aa, Halomonas sp.
MAVFVLGKNKQPLMPCSEKRARLLLERGRAAVVNLTPFVIRLRDRCLSDCTLQPTLLAADPGSKETGLALMRLENHATEEKAPATRHVLCLFQLVHRGFQIRQALEQRAGFRRRRRSKNLRHRKPRFDNRTRKKGWLPPSLQHRVDTTMAWVDKLCRWAPVTHLSMELVRFDLQKMENPEISGVEYQQGTLLGYEVREYLLEKWGRECTYCGTGDTPLEIEHVIAKTRDGSSRVSNLTVACHDCNIAKDNQSLADFFATDKGLKRRLKANGLSAEMRLARVQRQLKLPLRDATAVNATRWALSGAMKSTGLPVAGGSGGRTKYNRQRLGIPKTHALDAACVGKFDTLKGWRVPTQVIKAMGRGSYKRTRLDKYGFPRGYLMRQKQVQGFQTGDRVRAIVPAGKKAGTHTGRVAIRKTGSFNIQTEQGAVQGISWPYCTLLQRGDGYGYHQIPTTQH

SEQ ID NO: 10948 - protein, 414 aa, unidentified; identical to SEQ ID NO: 2588

SEQ ID NO: 10949 - protein, 270 aa, unidentified
LQLLKAIADGKPVPQGEDYQQGEMYGHYNVRQYVLWRDGYTCQCCGAHATKKKEVRLHVHHLESRKVGGDAPDNQVTLCESCHEKLHKGLIAEKDFKKRKRKSTRDATFMGIMRKTLMQRLCSELPIPVIETRGYITKATREKLLVLPKSHTNDALAIAQGKQGFNVGYLPEIAQIDKIYTIRPVRHHNRQLYKATILKGGIRKSNQTKKYVFGYRLFDKVQFNEQDCFIWGRRTTGIFTIKTINGKMIKDGISFKKLKLAEKSTSYLIA

SEQ ID NO: 10950 - protein, 413 aa, unidentified
MTNYAFVLDANNKQLTPTKEQKAWFLIRKKRATLVSKYPMVIQLKKKIPDKKICKDEVRCGIDDGGLHVGIALVQKCQTRNKVVFKGAIEQRNDVKHLIDDRRGYRRYHRYHKRYRPARFNNRNSSKREGRITPSILQKRQATIRVVNQLNKWINITNYWLEDVAIDIRALTDGYKPYRWQYQKTNRLDENIRKAVILRDGCKCMECEKSNCRLEVHHIKPRRLKGSSTLDNLITLCTKCHQKTESVEELYMDRYFALLKSSDNKNLNYAQHVMIGKKWLREQLSNLGMLHLTNGGDTANKRIDWDITKSHSNDAICITDLRPDTCEIKEWVIKPMRKQSKAKTDNVLGIKHRDLVEYTFRNGETHRGYVTALYPEQNAINFQSPTKHCKKVNARKCKVLWKYSKIYWLDNVG

SEQ ID NO: 10951 - protein, 410 aa, Bacillus sp.
MTHCFVLDAQGNKLSPTKENRAWYLIRKQKATLKSKFPMVIQLEREIPESAIDSSCIQLGIDDGSKFVGIALVQECKTKNKPVFKGTIELRADVKEKIAIRRGYRRYRRQHKKYRPARFDNRSSSKRDGRIPPSIKQKKDSILRVVKQLQKWIRMDLIFLEDVLIDIRALEKGFKPYKWEYQKSNRLDENIRKAVVLRDHNTCQNCGLTNIRMEVHHITPRRMNGSDSIHNLISLCSTCHGKVTGNELNHCERFYQKVNGRKVSYRDAMHVMQGKTYLQDELKKIAPLSLTTGGDTANKRIDWGIEKTHANDAIVICHSNVWPEQCKIKNWAIKPMRKHSRKKIESVNGYHHRDFVKYTKRNGEKYLAYITALYPEKSQCNMTTIKGKILKRYGLFRLTLLWRFNKVYWL

SEQ ID NO: 10952 - protein, 416 aa, Parasutterella sp.; identical to SEQ ID NO: 10114

SEQ ID NO: 10953 - protein, 464 aa, unidentified
MRKQKKRRHHMVAVISSSGIPLMPTSNYKVRKLLRCGRAKIHRYQPFTIQLLDRENGETQPMELCMDTGYLHIGLSVKSEKHEYLAYQIDTLDDEKKNHQDQLMYRRTRRNRKRYRKPRFCNRLKSKDWIAPSLKHKLEIHEVWIKKICAVMPVTSITLEMGNFDTQVLKAMQEGRPLPEGKDYQQGERYGIATLREAVFFRDNYTCQCCKRTIKDHAILHVHHIVYRSQGGTNRMSNLATVCERCHTPANHQPGGRLWNWRPKLPAFQGAAYMNTVRWMFCENVKQIYPEMQVQNTYGACTKERRRDLSITKSHVNDAYVMGKFQPKHRSEPELFKKRHRNNRCLEKFYDAKYTDSRTGKKTAGKELSNGRISRNHKKDSENLHPYRQKKLSIGRRSIRKQHYKIQPGDIVIVDQKKQKSSGCHNKGSRVMVAGKSYSIKEITVFKYCGGYLHDPINRKEAAG

SEQ ID NO: 10954 - protein, 311 aa, unidentified
RTKRKGWLAPSVENRINAHLSRIGAILRLLPVTKITVETASFDTQLLKNPDISGKEYQEGEQLGFWNVREYVLFRDGHACQHCHGRSKDPVLNVHHLESRRTGGDSPGNLLTLCETCHKALHRREIKLKTKRGQSFRAEAFMGIMRWEVLNRLKASHPELEVHNTYGYRTKHTRIVNGIDKSHCADAFCIAGNLGAKRLGEFFFQKQTRRNNRQIHKLSILKHGLRKRNQAPFEVKGFRLFDKVVCQGEEGFIFGRRSSGSFDVRKLDGTRISAGISYKKLRLLEKRRTYLKEIRKEEALPPLPEGRSLRA

SEQ ID NO: 10955 - protein, 401 aa, Sharpea sp.; identical to SEQ ID NO: 3798

SEQ ID NO: 10956 - protein, 442 aa, Sutterella sp.; identical to SEQ ID NO: 3234

SEQ ID NO: 10957 - protein, 456 aa, unidentified
MSTCVCVLSNSGERLMPTFRLGKVRRLLKDGKAKIVKHHPFTIQLLYDSKTNTQPIEICEDVGYNYIGISVKSQSHEYVSAQYDTLQDEKACHDSCRKLRRTRRNRLRYRKPRFDNRKRGEGWLAPSLRHKKELNVNVVKMYCAVMPITHATVEVGSFDTMLVKAIQEGKAIPEGADYQKGPRYNLATLREAVFYRDNYVCKVCGRKATEGAILHVHHMFYWKGRHGNSLSELITVCEKCHTPANHQKGGKLYGFGKDKKFANLSGAAFMNAVRWQIVDALHATYGKEFVTITYGAMTKEKRIILGIEKTHNNDAYAMGDYHPVHRCVFRHYQKRCRNNRVLEKFYDATYIDTRTGNKAKGKELFNGRISRNHKKDSEDLHKYRSKKVSKGRRSIRRQRYAIQPYDTVRLEGKTYITSGCHNKGTRLLIPANGKSKSVAISKVQVVCHAGAWIQII

SEQ ID NO: 10958 - protein, 456 aa, unidentified
MSTCVCVLSNSGERLMPTFRLGKVRRLLKDGKAKIVKHHPFTIQLLYDSKTNTQPIEICEDVGYNYIGISVKSKSHEYVSAQYDTLQDEKACHDSCRKLRRTRRNRLRYRKPRFDNRKRSEGWLAPSLEHKKQLNIRLIERYVSVIPITRATVEVGSFDTMLLQAIQKGESKPEGVDYQKGPRYNLATLREAVFYRDNYSCQVCGRKIADGAILHMHHMFYWKGRHGYQLDELVTACEKCHTPANHQKGGKLFGFGEDKEFANLSGAAFMNAVRWQIVNALYATYGKEFVTITYGAMTKEKRIALQLEKTHSNDAYAMGDYYLAHRCVFRHYQKRRRNNRVLEKFYDATYIDARTGNKAKGKELFNGRINRNHKKDSENFHKYRSKKVSKGRRSIRRQRYAIQPYDTVRLEGKTYITSGCHNKGTRLLIPANGKSKSVAISKVQVVCHAGAWIQII

SEQ ID NO: 10959 - protein, 424 aa, Microcoleus sp.
MSNQILVLDTNRKPLTPCTPGMARSLLKVRKATVFRRYPFTIIITKEVQNTPQSLTLKLDPGSKVTGIALLKNDKLIWAAELTHRGSAIKHALLSRRQLRRARRNRKTRYRKARFLNRTRHEGWLAPSLQHRVDTIQTWVNRISRYAPVGSLVQELVRFDLQLMQNPEISGVEYQQGELQGYEVKEYLLNKFNRQCVYCGAKDTKLEVEHIHPRSKGGSDRVSNLALACHPCNQWKGNQDIKDFLYGKVDILKRVLAQSKVPLKDAAVVNATRWALFNALRTTGLPVSTGSGGKTKFNRTRLGLPKTHWLDAACVGDTPTLEVLTLQPLLIKSAGHGTRQMCGTNKFGFPIRHRTRVQIHKGFQTGDLVKATVTSGKKIGFYVGRVLCRATGSFDIATVTGRVTGISHKYCTPIHKKDGYNYSY

SEQ ID NO: 10960 - protein, 419 aa, unidentified
MIYIRSKDGKALMPSERGGRIGYLLRHAKAHVVSRVPFTVQLDYESTTYTQEVSLGVDAGSKHIGVSASSEKKELLVAQVELRNDVVNLLSTRRELRRTRRNRKTRYRKARFDNRKKKDDWLAPSVEQKVDSHLKVIRLVHGLLPITNTTIEVAQFDAQKIKRPDIKGEEYQQGEQMCFWNVREYVFARDGHRCVHCKGKSKDPILNVHHLESRKTGGNSPSNLVTLCETCHKAYHRGEFELKIKRGNSLRDAAVMNNMRWAVYKRANEEFGNVHLTYGYVTKHTRIENGIAKTHAADAFCIAKNINAMRLRTFYLCRCVPRHSRALHVANPKKGGIRRSTIASHKIGKSRFQRFDMVRWKGKESFIFGSTNGRPVLRDIEGYKMHENASVNIKTIKFLKRLRNNILVEEKDFRKLNML

SEQ ID NO: 10961 - protein, 294 aa, unidentified
AHLSRIEAVLRLLPVTKITVETASFDMQLLKNPDISGKEYQEGEQLGFWNIREYVLCRDGHVCQHCYGRSKDPVLNVHHLESRRTGGDSPGNLITLCETCHKALHRGEITLKAKRGQSFRAEAFMGIMRWEVLNRLKASHPELEVNNTYGYRTKHARIANDIAKSHCADAFCIAGNLGAERLGEFFFQKQTRRNNRQIHKLSILKGGIRKRNQAPFEVNGFRLFDKVACKGEEGFIFGRRSSGYFDVRKLDGTCISAGISYKKLHLLEKRRTYLTEIRKEEALPPPPEGRGLRA

SEQ ID NO: 10962 - protein, 424 aa, Tolypothrix sp.; identical to SEQ ID NO: 5891

SEQ ID NO: 10963 - protein, 411 aa, unidentified
LVYVISIDGKPLMPCKPVIARLLLKQHKAKVIKKCPFTIKLLYKTKTEYTQPLILGIDTGSSKIGSAVVDGNNNVLYLSQIEVRNDITDKMKQRAKYRRNRRNRKTRYRKPRWLNRKNSIKKDRFSPTMISKINSHLKEIKFVKSILPITNIILETATFDPHALKNPAVLYNKWLYQKGINYGFANTKAYVLNRDNYTCQYCKGKSKDSKLEVHHIIFRCYGGSDESENLITLCKTCHDKLHAEKINLKRNGKVKGQLKHATQMNSIRQQLLRLLPEAVETFGFITKEHRQLMELQKEHYYDAVAIACLKNIENTGLIDVNFKSDFQQTKGVRSEQRIITGKIRGFRKFDKVKYQGKEYFIKGRMSTGYAILMDIAGNKIDLKPIPKFDKMERIQARKSWIISQETIQNIY

SEQ ID NO: 10964 - protein, 442 aa, unidentified; identical to SEQ ID NO: 2637

SEQ ID NO: 10965 - protein, 429 aa, unidentified
RVFVLNKRGQPLMPCSPAKARLLLKEKKAIVKRRTPFTIQLTIATGEAKQPVSLGVDSGYKHIGLSATTEKAELYASQVELRQDITDLLSARLALRRSRRSRKTRYRAPRFNNRVANKREGWLAPSVENRIAAHVSRVETVIRLLPVTAITVETAAFDTQLLKNPDIAGVAYQQGDQIGFWNVREYVLFRDGHVCQHCRGKSKDPILNVHHIESRRTGGDAPNNLITLCETCHRAFHRGEIELKVKRGKSFKAETFMGIMRRTLLERLKKAHPELNVRNTYGYLTKHKRISHGIAKSHCADAYCIADNLGAKRLEGFFFQKQTRKHNRQIHKLSILKGGLRKKNQAPYEVKGFRLFDKVICKGEEAFIFGRRTSGSFDVRRLDGTRISAGINYKKLRLLEPRTTYLAEFRKEAAHPPLHECRGFRAEFL

SEQ ID NO: 10966 - protein, 427 aa, unidentified; identical to SEQ ID NO: 3577

SEQ ID NO: 10967 - protein, 414 aa, unidentified
MVYVINKQGQALMPTERFGKVRRLLKNSLAHVVCRIPFTIQLDYDTTDYTQPVSLGVDAGSKHIGISVTTSEKELYAADVELRNDIVDKLSTRRELRRTRRSRLRYRKARFNNRVSSKRKGWLAPSVENKIQTHLTVVEKIHKFLPITNIVVETAAFDIQKINNPSISGSEYQQGEQLDFFNVREYVLFRDNHTCQHCKGKSKDEVLNVHHIESRKTGGNSPNNLITLCETCHKAYHRGEFKLNIKRGKSFRDSAFMGIMRWSFYDRLKNIYPDVSMTFGYITKNTRTTNNLPKEHYVDARCISGNPVAKPLGYYFYQKKVRCQNRQIHKANFLKGGRKKLNQAPFLVKGFRLFDLVEYQKDLYYIFGRRDSGFFDIRKLDGTKVNKGSINCKQIRLIDTRKSILIEKRTQVNL

SEQ ID NO: 10968 - protein, 450 aa, unidentified; identical to SEQ ID NO: 2935

SEQ ID NO: 10969 - protein, 420 aa, Petrotoga sp.; identical to SEQ ID NO: 5114

SEQ ID NO: 10970 - protein, 532 aa, unidentified
MSTVYVLNKDGKPLMPTTRGGHVRHLLKEQKARVVQSNPFTIQLLYETNDAVQPLYLGIDPGRTNIGVAVVKANGTAVFTAHLKSRNKEIPKLMQDRKRARRARRTNGRRHRRQRRAKANGTISKKCVKQTTTQNGSVSKRAKEIGIIKRHLPGCEKDVLCIGIKNKEAKYTNRERPEGWLTPTANQLLQTHVNLVKKVQKLLPISDVVLEVNKFAFMRLDNPDIQKWQYQQGPLYKKESLESAVSEMQEHHCLFCKKPIDHYHHVVPKSENGSNTIANIVGLCAEHHNLVHKDVAWQEKLAEEKTGLNKKYGALSVLNQIIPALTNKLSVLFPRHFFVTAGKSTHDYRAAHGVSKDHWLDAYCIACSVLPSNVCDSNINNHVPYELKQFRRHDRRVLHKANMSRVYTLNGKAVATNRHKAIKQTTDSLEEFRQNYPDDVYKLKVKEHHPAYRNLNRNYPGSVFLVGKQAHVMQGIASSKDGKTTKYNDTNATTITAGKCKFVAKNSGILFVQCKFRKALSDGTTKKLQYPV

SEQ ID NO: 10971 - protein, 465 aa, unidentified; identical to SEQ ID NO: 3603

SEQ ID NO: 10972 - protein, 459 aa, Clostridium sp.
MVFVLDRKKKPLMPCTEKRARKLLAEGRAVVHRLVPFVIRLKDRATGQAILQPLKLKIDPGYEVTGISVVRVEEGKEVVIFFAEVHHRTDVSEKLLSRRAHRRSRRSRKTRYRAPRFDNRKRPGGWLPPSAETRVDQVLSVVRKLCRWMPITEVVVESAKFDTQKLQNPEISGVKYQHGELFGYELREYLLEKFGRRCAYCGKENVPLEIDHVVPKSRGGTDRVSNLTLACRECNRIKGNRLPQEWLEELKKSRKVVDRKRAENIPKVLAQLKEPLKGAAFMNAARYVLVERLKTLGLPIFTATTAQTKYNRAKFGLPKTHYFDACCVGEVPNRLEVATGYVQVTLAVRRGTRQMANSDRYGFPRGHRSRRKFYFGFMTGDLVVAEIPGGKYAGKHTGFVAVRQSGYFDLKDLSGRRVCQGISWRHFRLIQRFDGWRYEKLKIAALSSPCLKAGASSAA

SEQ ID NO: 10973 - protein, 414 aa, Parasutterella sp.; identical to SEQ ID NO: 3876

SEQ ID NO: 10974 - protein, 247 aa, unidentified
MPNKVYVINKHGRPLMPCSPAKARHLLDAGKAKVKKRTPFTIQLVYGSSGYTQEVILGVDAGSKTIGVSALTKKEELFAANVIPRNDVVDLLSTRREFRRVRRNRKTRYRKPRFDNRVRSKHKEWLAPSVEVKIQEHITSIKRVCRILPVSKVVIETAEFDLQLLKAIADGKSVPQGEDYQKGEMYGHYNVRQYVLWRDNYTCQCCGAHATKKKEVRLHVHHLESRKVLQVSHQLTADSFLTAKPRL

SEQ ID NO: 10975 - protein, 437 aa, unidentified
MVYVIGLNGQALMPTTRYAKIRILLKQKKAKVIQVKPFTVQLLYSTSEYVQPIRLGIDSGYLNIGYSAITESKELLSGEVKLLKGMSEHIKEKAMYRKQKRSRLRYRKPRFDNRKRSDGWLAPSVQHKYDSHIRFIDKLKKILPISSIIIEVANFDTQLLKNALIEGAEYQTGEQLGFYNLREYIFHRDNHKCQNPKCKNKDKNPILQVHHIGFWKNDRSNRPGNLLTLCTKCHTPKEHKEKGFLYGWKPKVKSLKESTFMSMVRWRLVNTFGYEHTYGYETKSKRIALGLEKTHYNDAFCIAGGNRQSRITPLSYEQVKRNNRSLEKFYDAKVIDTRTQEKVSGAELFNGRRTRNKNLNSENLRKYRGEKVSKGKRTIRTKRYFYQPNDLVKYQNRVYTVKGTHNKGARVMLKENGKSIKVEDLKPYKFRKGIVTS

SEQ ID NO: 10976 - protein, 481 aa, unidentified
MDIPEGRRGEAPRYKARKGTYFKEFFMAVWVIDKHKKSLMPSSEKRARLLLDRGRAVVHRRVPFTIRLKDRNSESCETQPVRIKIDPGSKTTGIALVRESTDCGGSQHVLSLIDVQHRGKAIRDALTQRRGFRRRRRTQNLRHRPVRFDNRTKPKGWLAPSLQHRVDTTMAWVDRIRRCVPVASVDQERVRFDTQAMEFPGISDIQYQQGTLMGTEVREYLLHRHSHTCAYCAGGTGDPVLEIEHVVPRSRGGSDRVANLVIACSTCNDEKGNQTAGEWTASIQGQSALANGIRRRAERIHAGQRPALSDAAAVNSTRWALYNRLRGTGLPVYASTGGRTKWNRQQLGVPKTHALDAACVGSVKTLEHWCAPTLSVKATGRGSYQRTRLTRYGFPRGYLMRRKQVRGFQTGDFVQAEVPAGKKAGVHQGRVAVRVSGSFNLQTPQGVVQGISYRHCRRLQRADGYGYSFTPKPEEKRAEAR

SEQ ID NO: 10977 - protein, 542 aa, unidentified
MSRLTPDAEVPFFCETALQQKTKEASELTALEELLSKTEYIYVIGTDGRPQMPTKRKRHVLKLLNTGKARIAEKVPFTIQLKYDNIPVLQPVILAADPGRTNIGVAALSPFGDLMFAAVIETRNKEIKKLMADRKAHRQASRRGERKARQRLAKKYGTMIKAGMIMRKLPQYAADKFVTCNVIRNTEARFCNRKRCSDWLTPTVNHLVQTHLNVIKKISRYLPVTDIAIEVNRFAFMQMENPNASGVDFQNGPLRGFDDVKAAIREQQNGKCLMCKNDIEHFHHMVPLSKGGSDTIQNQVGLCPKCHAKVHTDTSFRKKLEDKKSGLLKKYGALNALNQAIPFICKDLLAEYGKEHVHFCTGKETSLIRTSLGYEKTKDNQMHEVDAYCIGLASLELEDIKSQSFVNTYKIKQFRRQDRSIIHHQTERSYYLDEQKIATNRKPRFEQTGNALSDWYKKQVKACDKAKADKMLSTLKVKKSSRSYNSEGRLMPGAVFSYNGQRHVMSGQLTGGRYLRAYGDTKTNYPVSKCNILRSNEGLVFI

SEQ ID NO: 10978 - protein, 413 aa, Clostridium sp.
  source 1..413: note = isolate UBA6640
MTKNQKDYSFVKDKKGRKLDPCLCNKAWILIRKKKARLLQKYPMAIQLNYEVRPDEETEIICGIDDGSKHVGIALVQKCKTYNKPIFKGTIELRQDVKSLMETRKGYRRYHRNHKRYRKVRFDNRSASKRKGRVAPSILQKKQSTIRIINQLLKFVNIKEFHLEDVVVDIRALSEGKKLYGRQYQESNRLDENIRKAVILRDNCECMECEKSNCMLEVHHIVPRRLKGSNAISNLITLCSGCHQKTEGKEELFIDKYYKTIDGKNIRFDYAQHVMQGKTYLRQELSKLGELLLTTGGDTANKRIDWNIYKTHSNDAICTTDLVVNMNECNIKDWIIKPMRRKSKANIAELNGFKHRDLIKYTKKNGEYYIGYITALYPNKNQCNITTMENKILKRYGIKSCKLLWRFNKIYWF

SEQ ID NO: 10979 - protein, 431 aa, Methylocaldum sp.
VVKTDESSVCFRHPQEAAHALHTVEGKAAVFRRQPFTIILNYDVAPSPVRVEFKADPGSRTTGLALVAEFAKRGRTVIFAANLHHRGQAIRANLESRRSRRRGRRGRKTRYRKARFLNRVRPAGWLPPSVQSRVDNVAVWYGRLNKLSPLSSAAVETVRFDMQALVNPEISGIEYQQGELAGYELREFLLEKWGRRCAYCGKENVPLEIEHIHPKSRGGSDRVSNLTLACRRCNEAKGNRPVEAFLADRPEVLKRILAQAKAPLKDAAAVNSTRFSIGNVLKAWGLPVTFWSGGRTKLNRTKQGYQKDHWIDAACVGETGAAVAIPEGMRPLQIKATGRGIRQVVRTDKHGFPRNKAGRCKRVNGFQTGDWVRLVQPKGKYTGEYFGRLAGVRTDGRFDIKPNGKPVTANWRNFSLIQRGDGYDYAFERAA

SEQ ID NO: 10980 - protein, 512 aa, unidentified
MSTVYVLNKDGKPLMPTTRGGHVRHLLKEQKARVVRTNPFTIQLLYETDNLVQPLYLGIDPGRTNIGVAVVKTDGTAVFTAHLETRNKEIPKLMQGRKKARRARRTNGRRCRRQRRAKANGTISKKCVKQATAQNGSVSKRANEIGIIKRHLPGCEKEVLCIGIKNKEAKFSNRTRPEGWLTPTANQLLQTHINLVKKIQKFLPISDVVLEINKFAFMRLDNPNVQKWQYQQGPLYQKASLEEAVSEMQEHHCLFCKNTIDHYHHVVPQHKNGSNTIGNIVGLCAKHHDLVHKDTSWQEKLAKKKTGLNKRYGALSVLNQIIPALTKELSSLFPKHFFATNGKSTYDYRAAHGVSKDHWLDAYCIAGSVLPNDACDNNINNRVPYELKQFRRHDRRALHKENMSRVYTLNGKKVATNRHKAVEQATDSLEEFCQNHPDDVCKLKVKEHHPEYRNPKRNFPGCVFLVGKHTHVMQGTSGSHNGKADGYYDTNGNSYSSGKCKFVVKNEGIVFT

SEQ ID NO: 10981 - protein, 441 aa, Sulfobacillus sp.; identical to SEQ ID NO: 4231

SEQ ID NO: 10982 - protein, 420 aa, unidentified; identical to SEQ ID NO: 6680

SEQ ID NO: 10983 - protein, 512 aa, unidentified; identical to SEQ ID NO: 6775

SEQ ID NO: 10984 - protein, 413 aa, unidentified; identical to SEQ ID NO: 6529

SEQ ID NO: 10985 - protein, 457 aa, Scytonema sp.; identical to SEQ ID NO: 2728

SEQ ID NO: 10986 - protein, 442 aa, unidentified
LMPTFRLGKVRRLLKDGKAKIVKHHPFTIQLLYDGKTNTQPIEICEDVGYNYIGISVKSESHEYVSAQYDTLQDEKEHHDDCRKYRRTRRNRLRYRKPRFDNRKRGEGWLAPSLRHKKELNVNVVKMYCAVMPITHATVEVGSFDTMLVKAIQEGKAIPEGADYQKGPRYNLATLREAVFYRDNYVCKVCGRKATEGAILHVHHMFYWKGRHGNSLSELITVCEKCHTPANHQKSGKLYGFGENVKFADLSGAAFVNTVRWQIVNELYAAFGKDFVTVTYGAMTKEKRIALQLEKTHSNDAYAMGNCHPAHRCEFGHYQKRCRNNRVLEKFYDATYIDARTGNKAKGKELFNGRISRNHKKDSEDLHKYRCKKVSKGRRSIRRQRYAIQPYDTVRLESKTYITSGCHNKGTRLLIPANGKSKSVAISKVQVVCHAGAWIQII

SEQ ID NO: 10987 - protein, 420 aa, unidentified
MQYVYVLNKHGEPLMPCSPRKARLLLKQKKAYVIKRTPFTVKLLYGSAGYKQPVTLGVDAGSKHIGISATTEKYELYREEATPRNDVVDLLSARRAFRRSRRNRKTRYRAPRFDNRVHSKHEGWLAPSVEVKIREHITLIKRVCRILPITLVRVETAEFDTQRLKAMLEGKPLPVGTDYQLGEMYDEYNVRQYVLKRDNYTCQCCGAHPTKTKAVKLHVHHIETRRTGGNAPNNLITLCTVCHKALHAEKVTLDGKKRGKPLKDAAFMGIMRKTLMERLRKELKIPVQGTYGYITKYLREKYGILKSHTNDARCISKNPLAIPCDTCYYTKAVRHHNRQLHKATILKGGIRKANQAPYIVKGYRLWDKVSCNGTECFITGRRTSGYFALKKLDGTVISNSISYKKLRLLEVATNYITERK

SEQ ID NO: 10988 - protein, 415 aa, Bacillus sp.
MRVFVKNLRGEPLMPCSNRKARLLLKQGKATIIGYTPFTIQLLYATGETMQPVTIGVDSGAKYIGIAITTENKVLAKGTIELRQDVKENLTLRATLRRGRRQRKTRYRKARFLNRKKKEGWLPPSIQSRVDNQIHWIETFKSLLPSPKVIVEVGKFDAQKLKNPDIQGIEYQQGDAFGFWNARYYVFARDNYTCQICKKKGGILHTHHIIERCNGGSDMADNLVTVHEECHQKFHQGKLKHSFKKPKQYKETAFMNILRLQILKRLDCEITYGSYTTPKRKELGLSKTHVNDATAITNLKQLQEYHQSGEFCIQQFRKKKRSLHEATARKGRKTKNTSAKRNNKNTPHVNGIYLGDKVKVFGKVGFVTGFTGKMVYVQDIHGQYIQNPSKSYKQVNISDIERIHHNNNWLFLQVS

SEQ ID NO: 10989 - protein, 524 aa, unidentified
MEILRIDWKDICPTGQSGLPQKESFMRPVYVLDMNGKPLMPTCRFGKVRRMLKSGEAKVVDTLPFTIQLDRPTKTHVVQSVTLGCDPGRTNIGLAAVRSDGTDLYRSHCETRNKEIVDLMDTRRAARRASRRGERLARKRLAAKHETATTFPDGRKLPGYEKPIMLKDIINTEARFNNRVRPAGWLTPTATQILRTHLNLIKRISRILPISDIALEINKFAFMQLDEPDKNKWNIDFQHGPLYGTGGLKAAVRQLQNDTCLLCQENVIEHFHHLVPRSKRGDNTINNIAGLCQKCHEAVHKSADTAEKLSTLKKGQTKRYGGTAVLNQIIPKLVEELGKTYHEHLHLTYGWQTKEFRTKHKLEKTHDTDAYCIAAGTMQTVKPNIRTDVYEIKQFRRHNRANIHHQTERTYKLNGQTVAKNRRKRTDQKTDSLAEWFENTVKQYGQQKAEHLRAGLKVRKSTRYYNSKDRMMPGAVFQYEGNRYVVTGQLSGGQYYRAYGKGNQNFPAQKIRIISLNRGLVYVA

SEQ ID NO: 10990 - protein, 456 aa, unidentified
MSTCVCVLSNNGERLMPTIRLGKVRHLLKDGKAKIIKHHPFTIQLLYDSKTNTQPIEICEDVGYNYIGISVKSESHEYVSAQYDTLQDEKEHHDDCRKYRRTRRNRLRYRKPRFDNRKRSEGWLAPSLEHKKQLNIRLIERYVSVIPITHATVEVGSFDIMLLQAIQKGKSKPEGVDYQKGPRYNLATLREAVFYRDNYTCQVCGRKIADGAILHMHHMFYWKGRHGYQLDELVTACEKCHTPANHQKGGKLFGFGEDKEFANLSGAAFMNAVRWQIVDALHATYGKEFVTITYGAMTKEKRIILGIEKTHNNDAYAMGDYHPVHRCVFRHYQKRRRNNRVLEKFYDATYIDTRTGNKAKGKELFNGRISRNHKKNSEDLHKYRSKKVSKGRRSIRRQRYAIQPYDTVRLESKTYITSGCHNKGTRLLIPANGKSKSVAISKVQVVCHAGAWIQII

SEQ ID NO: 10991 - protein, 472 aa, unidentified
MSTCVCVLSNNGERLMPTIRLGRVRHLLKDGKAKIIKHHPFTIQLLYDSKTNTQPIEICEDVGYNYIGISVKSQSHEYVSAQYDTLQDEKACHDSCRKLRRTRRNRLRYRKPRFDNRKRGEGWLAPSLKHKKELNVNVVKMYCTVMPITHATVEVGSFDTMLVKAIQEGKVIPEGADYQKGPRYNLATLREAVFYRDNYVCKICGRKATEGAILHMHHMFYWKGRHGNSLNELLTVCEKCHTPANHQKSGKLYGFGEDVKFADLSGAAFMNTVRWQIVNELYAAFGKPFVTITYGAMTKEKRIALQLEKSHNNDAYAMGEFHPNHRCAFEHYEKARRNNRILEKFYDSRYIDIRTGEIATGKELFNGRINRNHKKDSENLHKYRGKRTYAGHRALLRKKVNLNPGDLVSLNGEPLVVLGTHTRKNGAVNVEFETPSKSGRKSASLKKLKIVKAADSIHPAWEKVSQIIQRKE

SEQ ID NO: 10992 - protein, 518 aa, unidentified
MANLKLIDELLEKTEYIYVLGIDGKPQMPTNRKVRVRKLFKLGMAKIVDTVPFTMQLLYENKPVLQPITIAENPGRTNIGAAVLTQLGDLVFSAVVETRNKSIKKLMSDRKAHRQASRHGERKARQRLANRHGSMIKAGMIMRKLPQYAADKFVTCKIIKNTEARFCNRKRMPDWLTPTVNHLVQTHINLIKKVEKYLPITDVAIEVNRFAFMQMENPDVSGVDFQNGPLKGFDDVKAAIREQQHGKCLMCKNDIEHFHHIVPRSKGGSDTIQNQAGLCKKCHAKVHTDVEFLAKFKDKKEGLIKKYGALSALNQAVPFICKELLKIYSTEHVHLCTGKDTSLIRSSLGYEKTKDNPMHEVDAYCIGLAAIGADKAKRPGFNNVFKIKQFRRQDRSIINYQRERTYYLEGKKIATNRKPRFEQKGDALSDWYSEQVKLKGKKYADKLTGRITVKKSTRGYNSKDRVMPGTIFYYGGKRLVLSGQTTRGKYYKAYGDPKTNYPAAKCQIYKHNEGLVFI

SEQ ID NO: 10993 - protein, 512 aa, unidentified; identical to SEQ ID NO: 5174

SEQ ID NO: 10994 - protein, 431 aa, unidentified
MPNKVYVINKHGRPLMPCSPAKARHLLDEGKAKIKKRTPFTIQLVYGSSGYTQEVILGVDAGSKTIGLSASAETEELLSAEVKPRNDVVDLLSTRREFRRARRNRKTRYRKPRFDNRVRSKHKGWLAPSVEVKIQEHITSIKRVCRILPVSKVVIETAEFDLQLLKAIEEGKPVPQGEDYQQGEMYGHYNVRQYVLWRDGYTCQCCGAHATKKKEVRLHVHHLESRKVGGDAPDNQVTLCESCHEKLHKGLIAEKDFKKRKRRSTRDATFMGIMRKTLMQRLCSELPIPVVETRGYITKATREKLLVLPKSHTNDALAIAQGKRGFNVGYLPGIAQIDKIYTIRPVRHHNRQLHKATILKGGIRKSNQTGKYVFGYRLFDKVQFNGQDCFIFGRRTSGYFVVKTIDGKVIHNSASFKKLKLVERASNYLIA

SEQ ID NO: 10995 - protein, 434 aa, unidentified; identical to SEQ ID NO: 9304

SEQ ID NO: 10996 - protein, 406 aa, unidentified
MVYVQDINGKPLMPTTRHGKVRRLLKANKAVVVNICPFTIKLMYVTPDYKQEIVLGVDAGTKHVGLSATTKNKELYSSEVILRNDIVDLLSTRRELRRTRRYKLRYRKPRFSNRVKSNRPGWIAPSVRCKIDAHIRVIDNICFILPISRIVIEVAQFDTQKIKNSDISGKEYQEGDQLGFWNVREYVLARDNHVCQNCKGKSKNKILNVHHIESRKTGGNSPSNLITLCETCHKEYHKGNIKLKVRRGASLRDAAVMGIMKWKLLDKLKSLYPNVSMTFGYITKHNRIKHEIKKSHISDAFVISKNFEAKRPGYYFKEKLVRRHNRQIHKMKILKGGKRKMNQAPFKVFGFRLFDKVEFQGNEYFIYARRLSGYFNIRDINSENKKDVTYKKLTYIGHGLISVETG

SEQ ID NO: 10997 - protein, 425 aa, unidentified
LAKDLYRSIDREETNLRVYVLNKRGEPLMPCSAAKARILLKEKKAVVKRRTPFTIQLTIATGETKQPVSLGVDAGYKHIGLSASTEKAELYASEIELRQDVSELLAGRRALRHARRSRKTRYRAPRFDNRKREKGWLAPSVENRIGAHVSRVEAVLRILPVTKIVVETASFDVQRLKNPDIQGVEYQQGEQLGFWNVREYVLFRDGHECQHCHGKSKDKVLNVHHIESRRTGGDAPNNLITLCETCHKAFHRSEIELRVKRGRSFQAEAFMGVMRWTFFERLRASHPEIEVRNTFGYLTKNTRISHGIEKTHCADAFCIAGNLKAKRLGYYFFQKQTRRHNRQIHKLTIKGGVRKRHQTPYEIKGFRLYDKVLYRGKVAFIFGRRSSGYFDIRTLDGERISASVSYKKLRLLEKRRTYLIELRRN

SEQ ID NO: 10998 - protein, 427 aa, unidentified; identical to SEQ ID NO: 5764

SEQ ID NO: 10999 - protein, 512 aa, unidentified
MSTVYVLNKDGKPLMPTTRCGHVRHLLKEQKARVVTSKPFTIQLLYETDDVVQPLYLGIDPGRTNIGVAVVRTDGTAVFTAHLETRNKEIPKLMQERKKARRARRTNGRRCRRQRRAKANGTISKKCVKQDTAQNGSVSKRAKKIGVIKRHLPGCEKEVLCIGIKNKEAKFSNRTRPEGWLTPTANQLLQTHINLVKKIQKFLPISDVVLEINKFAFMRLDNPNIQKWQYQQGPLYQKASLEEAVSEMQEHHCLFCKKPIAHYHHVVPQSENGSDTIDNIVGLCTKHHDLLHKDTAWQKKLAKKKTGLNKKYGALSVLNQIIPALTKELSSLFPKHFFATNGKSTNDYRAAHDVSKDHWLDAYCIACSILPNDTCDKNINGRVPYKLKQFRRHDRRALHKENMSRVYTLDGKKVATNRHKAIKQTTDSLEEFRQRQPNDVCKLKVKEHHPEYRNPERNFPGCVFLVGKHTHVMQGTSGSHNGKADGYYNTNGNSYPSGKCKFVAKNKGIVFA

SEQ ID NO: 11000 - protein, 413 aa, unidentified
MTSYSFVLDANGKQLAPTKEPKAWFLIRKKRAALVSKYPMVIQLKKKIQENEICKDEIRCGIDDGGLHVGIALGPKCKSKNKVVFKGTIEQRNDVKHLMEVRRNYRRYHRYHKRYRQARFDNRKSSKRKGRIAPSILQKRQATIRVINRLNKWINITNYWLEDVSIDIRVLTDGYKSYSWQYQKSNRLDENIRKATILRDGGKCMECGKSNCRLEVHHIKPRRRNGSNTLDNLITLCESCHQKTEGQEELYMDRYFSLLKSSDNKNLNYAQHVMIGKMWLRKQLSGLGVLYLTSGGDTANKRIDWNIEKSHTNDAVCITDLQPDTCDIKEWAIKPMRRQSKAKTDHVLGIHHRDLVEYTFKNGETHRGYVTALYPDQKAINFQSQTKHCKKVNARKCKLLWNYSKIYWFENAS

SEQ ID NO: 11001 - protein, 428 aa, unidentified; identical to SEQ ID NO: 7211

SEQ ID NO: 11002 - protein, 423 aa, unidentified; identical to SEQ ID NO: 3538

SEQ ID NO: 11003 - protein, 362 aa, unidentified
LKVFVLNKRGKPLMPCSPAKARLLLKEKKAIVVRRTPFTIQLTIATGESKQPVSLGVDAGYKHVGLSASTEKAELYASEVELRKDITDLLSARRALRQSRRNRKTRYRAPRFDNRIRTKRKGWLAPSVENRINAHLSRIEAVLRLLPVTKITVETASFDMQLLKNPDISGKEYQEGEQLGFWNVREYVLFRDGHVCQHCHGRSKDPVLNVHHLESRRTGSDSPDNLITLCETCHKALHRGEITLKAKRGQSFRAQAFMGIMRREVLNRLKASYPELKVHETYGYLTKHARIANGIVKSHGADAFCIAGNLGAERLGEFFFQKQTRRNNRQIHKLSILKGGIRKRNQAPFEAKGFRLFDKVGP

SEQ ID NO: 11004 - protein, 461 aa, unidentified; identical to SEQ ID NO: 4910

SEQ ID NO: 11005 - protein, 420 aa, unidentified; identical to SEQ ID NO: 3685

SEQ ID NO: 11006 - protein, 320 aa, unidentified
RAPRFDNRIRTKRKGWLAPSVENRINAHLSRIETVIRLLPVTKITVETTSFDMQLLKNSDIAGKKYQEGEQLGFWNVREYVLFRDGHVCQHCHGRSKDPVLNVHHLESRRTGGDSPGNLITLCETCHKALHRGEITLKAKRGQSFRAETFMGIMRWEVLDRLKASHPKLEVQNTYGYRTKHARISNGIAKSHCADAFCIAGNLGAERLGEFFFQKQTRRNNRQIHKLSILKGGIRKRNQAPYEIKGFRLFDKVACQGEEGFIFGRRSSGYFDVRKLNGTHISAGISCKKLRLLEKRQTYLTEIRKEKALPPLPEGRGLRA

SEQ ID NO: 11007 - protein, 421 aa, unidentified
MQYVYVLNMHGEPLMPCSPRKARLLLKEGKARVVKRTPFVIKLLHGSAGYKQPVALGVDAGSRHVGLSACTEGRELYKEELSPRNDVVELLSVRRQYRRSRRNRKTRYRAPRFNNRVHSKHKGWLAPSVEVKIQEHITVIKRICRILPVTLVRVETAEFDTQRLKAMLAGKPLPVGADYQLGEMYDEYNVRQYVLKRDNYTCQCCGAYPTEKKPVRLHVHHIESRHVGGNAPNNLITLCVACHKALHEGKITLGNSKKRGKPLRDAAFMGIMRNTLLARLKDELNIPVKQTYGYITKLLREENHVEKSHTNDARCIAKAPNAKPCDTMFRTRALRHHNRQIHKAKILKGGTRKKNQAPYLVKGFRLWDKVRYNGEECFITGRRTSGYFAIKKYDGTVISNSASYKKLTLLEAATNYITERS

SEQ ID NO: 11008 - protein, 416 aa, unidentified
MVYVLDKNGQPLMPTDRHRKVRLMLQSGQAKVIKRCPFTIQLNYDSGHQTQEISLGIDAGSKHIGVSATTKIKVLYEADVELRNDIVDLLSSRRELRRGRRNRKTRYRQAKFNNRRRGNGWLAPSIRQKIGTHLTVVENICKILPISRIMVETASFDIQKIKNPDIQGAEYQQGDQLGFWNVREYVLFRDGHTCQCCKGKSKDKILNVHHIESRKTGGNAPNNLITLCETCHTGYHKGTVQLPKAIKRGMRFKDAAFMGIMRWAFYEALKQQYEPVGTPVHNTYGYITKHTRIAYNLPKEHYVDARCISGNPEASSNGEYYYQKKVRCHNRQIHKLTVLKGGIRKQNQATYLVKGYRLFDKVSYQGKGYFVFGRRQSGFFDIRTLSGEKVNKGSLSCKKLKFIATRTYYLTERRAV

SEQ ID NO: 11009 - protein, 493 aa, unidentified; identical to SEQ ID NO: 3154

SEQ ID NO: 11010 - protein, 477 aa, unidentified
MWLNSSEGKEQCCIHGNLGITLGKDSYSLRRGQFCLSLTVTTTRKETTSMYVYVLSQHGEPLMPCSPRKARTMLRDHKATVVRRTPFTIRLLHGCSGYTQRITLGVDAGSKFIGLSACTESKELFAAEVKPRNDVVDLLSTRRELRRSRRNRKTRYRVARFDNRVHSKHKGWLAPSVEVKIQEHITAIKRTCAILPISMVIVETAEFDTQRLKAMLEGKPLPVGTDYQLGEMYDEYNVRQYVLKRDNYTCQCCGIQSTDKAPVKFAVHHKESRHVGGNAPNNLITLCEKCHRLLHAGVITLDEDKRKRGKSFRDAAFMGIMRKTLIQRLRSELSVPAKETYGYITKLLRETHSIQKSHVNDARCIARVPDAKPSDTLYRIRAVRHHNRQLHKTNPIKGGIRKRNQAPYEVFGFHLWDKVLFNGQECFITGRRASGYFALKDFDGKKIHASASYKVLSVVETATSYLIERKTAVSSRD

SEQ ID NO: 11011 - protein, 458 aa, unidentified
MSTSVFVLDKKHRPLMPCRPARARRLLRAGRARVVKRFPFVIRLVDRTVEQSEVQPVLIKLDPGSRETGAAVVRDDGKKRHHALAFFVIEHRGGAIRDALKARSAFRRRRRSQNLRCRSPRFLNRVKPKGWLPPSLRHRVETTLSFVRRMCRYLPVSGIAAELVKFDSQKLQTPEVSGIEYQQGTLFEYEVREYLLEKFGRKCVYCGAEGVPLNIDHVVPRAKGGSNRVSNLVLACVSCNQKKGARSLEDFLKGKPEVLARVRRELKTPLRDAAAVNATRWVLFNELKATGLPVETGSGALTKLNRHAFGVEKEHWLDALCVGRLNGVVTRKGLNVLEIRCMGRGSRQRTRLTKYGFPRGYLMRQKCVHGFATGDMVEANVPKGKKAGLWRGRVAVRVSGSFNIQTPKGRHSRRRLEALPTDFTQRRIWVRVARPRASFLPCLISGPPTRCQAVYRCF

SEQ ID NO: 11012 - protein, 279 aa, unidentified; identical to SEQ ID NO: 5082

SEQ ID NO: 11013 - protein, 430 aa, unidentified
LRVFVLNKRGKPLMPCSPAKARILLKEKKAVVTRRMPFTIRLTIATGETKQPVTLGVDAGYKHVGLSACTEKAELYASEVELRQDITELLSARLALRRARRNRQTRYRAPRFDNRVRSKHKGWLAPSVENRINAHLSRIDAVLRILPISKIVIETAAFDTQLLKDTNIEGATYQQGEQFGFWNVREYVLFRDGHICQHCHGKSKDPVLNVHHLESRRTGGDAPNNLITLCETCHKALHQGKLTLKVKRGFTYKAETFMGIMRWTVQDRLKTAYPDIEIRNTYGYLTKHSRISHGIAKSHCADAYCIAGHLKAKRLAGYYYQKQTRRHNRQIHKLTILKGGLRKRNQAAYEIKGFRLFDKVKVLGEEGFIFGRRASGYFDVRKLDGTRISAGISSKKLTLLEKRKTYLTEYRKEAALPPLNEFRGFLANVL

SEQ ID NO: 11014 - protein, 470 aa, unidentified; identical to SEQ ID NO: 2825

SEQ ID NO: 11015 - protein, 518 aa, unidentified
MTHYERRHLMPDTNYIYVLGADGKPQMPTKRKRHVKRLLNTGKARIACHVPYTIQLLYKNEPVLQPVMLAEDPGRTNIGLAVLSRKGELLLSAVVETRNREIVKLMADRKKARRASRNGERKARQRLAKRFGTMFEAGMLMRKLPMYAADKFVTCNYIKNTESRFCNRKRPDGWLTPTANQLLKTHINLIHKIQKYLPVMDVAIEVNRFAFMSLENPAISGVDFQNGPLKGFDSLHDAVNDLQHGKCLLCGGKIEHYHHIIPRSQRGSNTIGNIAGLCMECHGKVHKDIEYQKELKDLKKGLDKRYGALSALNQAMPFICKSLESEFGKAHVSYCTGRDTAKMRNSFGFQKTKKNQLHEVDAWCIGILAQNNAPDRLPDFEQTHYIRQFRRQDRSLIRCQTERTYKLDGKTVAKNRKKRTDQKDDSLEDWYNKQIALHGKREAECMLSRLTVKKSKRHYNDPIRILPGAVFIYNGKRYVLSGRLSNGKYFRAVGDSKTNYPVGKCRIVKQNEGLVFIY

SEQ ID NO: 11016 - protein, 477 aa, Ferroplasma sp.
MEKNMKERQKLDRRDTYTPTDAPQVRGNCDHALNREETLSVHGLKTPSNNPDVDILQPAGGHKVDMLVFILNDDGKPLMPCKPAKARHLLKEKKARVVSSNPFTLQLLWHCEEYTDPTILGIDAGYKHIGFSAVTEKKELISGEAVIRTNIPKLNQEKSMYRRNRRNRLWYRQPRFINRGNNSKGWFAPSIAHKLQTHIRLIEKLKKILPVSKVIIEVASFDQQKMKNPEISGIEYQQGELQGYDIREYLLEKFHRKCVYCRKTNVPMEIEHLTPRSRNGPDTVDNLAISCHECNQRKNDLTAEEFGYPEVRKRALKSLKDATFMNIVRWKLTQLTEAIHTFGYITKKNRISPGLDKSHANDAFVIAGGTTQARPTVFDVTQRRRNNRSLQINRKGFRPSIRRRRYPLQPGDVVEFGESRYGVVGVHSYGNYVIIMNGEKKMDVNIKKVKLVKYGKGLRFTTQFLPTLSHMDLFGGS

SEQ ID NO: 11017 - protein, 424 aa, Anaerostipes sp.; identical to SEQ ID NO: 3434

SEQ ID NO: 11018 - protein, 406 aa, unidentified; identical to SEQ ID NO: 7944

SEQ ID NO: 11019 - protein, 487 aa, unidentified
MYRHRSDVHPNPPLCDNASLEAEVKPKDAADSNRLRPWGRMHYSPSGERTACFGIAVIPKKGETAMQYVYVVGSNGKPLMPCSPAKARKLLKTKSAAVLQRTPFTIKLLHHAGGYKQPITLGVDAGSKHIGLSACTETKELYKEELTPRNDVVKLLSKRRECRRGRRHRKTRYRTPRFNNRVRSKHKGWLAPSVEVKIQEHITAIHHICRRLPVTKIVVETAEFDTQRLKAMLEGKPLPVGTDYQRGEMYDEYNVRQYILKRDNYTCQHCGKRGSAEKGVKLHVHHLETRQTGGNAPNNLITLCKDCHTALHDGEITLKQGKKKRGKPLRDTAFMGIMRKTLLSSLRKEVDIPVVETQGYITKLLREENHIPKSHTNDARCIAGYPNAQPCDTTYHTKAIRHHNRKIHKTNILKGGVRKLNQAPYKVFGFRIWDKVKYKGQECFITGRRSSGYFALKKLDGTTISNSAKYKEIQFLEPANHYIIERS

SEQ ID NO: 11020 - protein, 414 aa, unidentified; identical to SEQ ID NO: 3759

SEQ ID NO: 11021 - protein, 443 aa, unidentified
LTKDENRPSGRTTGLRAEQAEPAGIRKGDTLKVFVLNMRGKPLMPCSPAKARHMLKAGKAFVVRRTPFTIKLTIATGETKQDVTLGVDAGARHVGISATTEKEEVFASEVALRQDITGLLADRLAFRRARRNRKTRYRAPRFNNRVRSKHKGWLAPSVENRIQAHISRIEAVCRLLPVTKIVIETASFDIQKIRNPEVEGTGYQQGDQLGFWNVREYVLFRDGHICQHCRGRSKDPILNVHHLESRKTGGDAPNNLITLCETCHKAYHAGKIKLKVKRGQSFRAEAFMGIMRWTLLDRVRKTHPKLPVENTYGYLTKHKRIALGLPKTHCADAFCIAGNLKALRRGDFLFQQQTRKHNRQIHKCSILKGGVRTLNQAPFLVKGFRLFDKVRIGGQIGFVFGRRVRGTFNIRRLDKTVIGTDINCKKLSLLETRKTFLTELRKE

SEQ ID NO: 11022 - protein, 406 aa, unidentified; identical to SEQ ID NO: 2874

SEQ ID NO: 11023 - protein, 417 aa, unidentified
MPCSPAKARLLLKERKAIVKRRTPFTIQLTIATGEAKQPVTLGVDFGYKHIGLSATTEKVELYASQVELRQDITDLLSARLALRRSRRSRKTRYRVPRFDNRVASKRKGWLAPSVENRITAHMSRVEAVMRVLPVTAITVETAAFDTQLLKNPDITGAAYQQGEQLRFWNVREYVLFRDGHVCQHCRGKSKDPILNVHHIESRRTGGDAPNNLITLCETCHKAFHRGEIELKIKRGKSFKAETFMGIMRRTLFERLKKAHPELNVRNTYGYLTKHKRISYGIAKSHCADAYCIADNLGAKRLEGFFFQKQTRKHNRQIHKLLILKGGLKKKNQAPYEVKGFRLFDKVICKGEEAFIFGRRTSGSFDVRRLDGTRISAGINYKKLRLLEPRTTYLTEFRKEAALPPLHKCRGVCAEFL

SEQ ID NO: 11024 - protein, 436 aa, unidentified
MTKTLTTRTTQACVLDQQGKPLMPTTRLGKVYRLLKAKKAHIVSYEPFTIQLDYQPDTQVIQPMTLGVDSGAIHSGYSVANEHREYYSAEVIARNDISKNLSDRHMYRRNRRSRKTRYRKPRFNNRKNKKKGWLPPSLEQKVAVQVNEIDHIHRYFPIETIIIETAEFDIQKIKNPDISGIEYQQGTLQGYNIRNYLLEKHGRKCFYCGKAVSDFEVEHMLPKSKGGSSRIDNLTLSCHDCNEKKGTLTAEEFIQQTLPVKKAASKLKQLPNEKRLFKYMAYMNATRWALYDAIKERYPNVKMTYGYITKYNRIQAGLPKTHHIDAKCITGFAAVPSMSQTVVKVKMRRHNRQLHRATFSKGHVRKAACLPTVTFGFQLYDLVCFNNHRYYIKGRRSSGAFVLVSVEGLKNEERNYKKLTLLAHTNAYLTNRYVNA

SEQ ID NO: 11025 - protein, 437 aa, unidentified
MVLVIDRCKRPRNAISEAYARILLYSKQAVIHRRFPFTIRLKNDNAVFNDKAYTVKLDPGANTTGVAVVSNDEVVMLAEIEHRGKVIKSGLDSRRVSRHSRRNRKTRYREARFLNRTRPDGWLAPSVKSRADNIINFIRKYKKLLNVAKVEIERVSFDTAQMSSEVELCGVDYQQGALYRTKLRNFIFSRSKGKCSYCGEKAVEIDHIVPRSKGGTNSVNNLTASCGTCNEKKSNLSLKEFGKLVGKDFSKLEPKKLPKQASIVQSAREYTIKEIIKLVADTKSYDAWLTKYNREELGLPKQHYYDALSVGNVQDYKFLTDKVLIISAKGRGSRQMCRMDRFGFPRTSPKSGKSVKGFQAGDIVKAVIPSGLKVGEYLGRVSVRSSGYFNIETNGKVVQGIGYKYCRIIQRNDGYSYDYRERDFLSAMDNRVSVAES

SEQ ID NO: 11026 - protein, 451 aa, unidentified; identical to SEQ ID NO: 5203

SEQ ID NO: 11027 - protein, 318 aa, unidentified
PRFDNRIRTKRKGWLAPSVENRINAHLSRIGAILRLLPVTKITVETASFDTQLLKNPDISGKEYQEGEQLGFWNVREYVLFRDGHACQHCHGRSKDPVLNVHHLESRRTGGDSPGNLLTLCETCHKALHRREIKLKTKRGQSFRAEAFMGIMRWEVLNRLKASHPELEVHNTYGYRTKHTRIVNGIDKSHCADAFCIAGNLGAKRLGEFFFQKQTRRNNRQIHKLSILKHGLRKRNQAPFEVKGFRLFDKVVCQGEEGFIFGRRSSGSFDVRKLDGTRISAGISYKKLRLLEKRRTYLKEIRKEEALPPLPEGRSLRA

SEQ ID NO: 11028 - protein, 422 aa, unidentified; identical to SEQ ID NO: 5333

SEQ ID NO: 11029 - protein, 453 aa, unidentified
MSVAVVSKTGMLLMPTSEYRARKLLKSKKAIIHGYHPFTIQLTERETGYIQPVELCMDTGYIHIGTSVKSEKHEYLGEQIDTLTDERQKHDACRMYRRQRRNRKRYRQPRFNNRERDDGWIAPSLEHKKTIHIQAISRICKVMPVTDITLEMGNFDTQVLKAREEGKPLPQGLDYQHGERYSVTTLREAVFLRDGYTCQCCGRTIKDGAILHAHHVIYRSQGGTNRISNLITVCDKCHTPVNHKPGGKLYGWKPKVASFKGATYMTTIRWKLYNEVKALFLDIDIHITYGAETKERRRAFDITKSHVNDAFVMGQFHPKHRSKPVCYKKKRRNNRCLEKFYDAKYIDSRDGKKRTGQELFNGRISRNHKKDSENLHQYRQQKISTGKRTIRKQHYAIQPHDIVIFNGGKFETSGCHNNGTRAILLPQKKSVAIKKLNIYRYAGGYFKSAFNQK

SEQ ID NO: 11030 - protein, 451 aa, unidentified
MSVAVISKTGERLMPTSEYRARKLLKLGKAVKYSYHPFTIQLTEREDGDVQPIELCMDTGYIHIGISVKSEKHEYLAEQIDTLTDERARHDACRMYRRQRRGRKRYRQPRFNNRKRDKGWIAPSLEHKKDIHVQAISRINKVMPLTNITMEMGNFDTQVLKAKEEGKPLPHGADYQHGERYGIATLREAVFSRDGYKCQCCGKTISDGAILHVHHIKYRSRGGTNSMTNLATVCDKCHTPKNHKPGGKLYNWKPKLPNFKGATFMTTIRWQLYNEVKSLFLDINIHVTYGAATKEQRRKLNIGKSHVNDAFVMGKFYPKHRANAVLYKKKRRNNRCLEKFYDAKYIDSRDGSKKTGQELFNGRINRNHKKDSENLHQYRLQKIKAGKRTIRKQHYSIQPHDIVIYENRKRETLGCHNNGTRVMLLPDKKSVAIKKIKIYKYTGGYFKSAFN

SEQ ID NO: 11031 - protein, 426 aa, Parasutterella sp.; identical to SEQ ID NO: 3045

SEQ ID NO: 11032 - protein, 463 aa, unidentified
MSKVFVIDSEKRPLDPIHSAQARQLLRNKKAAVYRRFPFTIILSNLPQKNEAGFNKDNSLGQSDKPETSPPHFSRSGSVKESRPDSPVSPLRLKLDPGAKTTGIALVSDYTGEVVFAGELKHRGFAIRDALTSRQQLRRSRRNRKTRYRAPRFNNRTRLSGWLAPSLQSRVDNIKTWVEKLRKFAPIEAISQELIRFDMQLMRNPDIQGKEYQQGTLAGYETREYLLEKWGRQCAYCGVKDVPLQIEHIHPRAKGGSNSITNLTLSCSKCNLKKGTKDIKEFLKKDPNKIQKILRQAKKPASDAAAVNTTRFTLLNTLKATGLPIETGSGGLTKFNRHNQNLEKTHWLDAACVGKSTPILIIKGIKPLLITANGHGSRQSCRTDKYGFPSRYVPRFKFVKGFQTGDIVKAVVTTGKKVGEYVGRVAVRATGSFNISTKNGLVQGINYKFCKTIHKKDGYAYGT

SEQ ID NO: 11033 - protein, 431 aa, unidentified; identical to SEQ ID NO: 2977

SEQ ID NO: 11034 - protein, 420 aa, unidentified
MQYVYVLNKHGEPLMPCSPRKARLLLKQKKACVIKRTPFTIKLLYGSTGYKQPVTLGVDAGSKHIGISATTEKYELYREEATPRNDVVDLLSARRAFRRSRRNRKTRYRAPRFDNRVHSKHEGWLAPSVEVKIREHITLIKRVCRILPITLVRVETAEFDTQRLKAMLEGKPLPVGTDYQLGEMYDEYNVRQYVLKRDNYTCQCCGAHPTKTKAVKLHVHHIETRRTGGNAPNNLITLCTVCHKALHAEKVTLDGKKRGKPLKDAAFMGIMRKTLMERLRKELKIPVQGTCGYITKYLREKYGILKSHTNDARCISKNPLAIPCDTCYYTKAVRHHNRQLHKATILKGGIRKANQAPYIVKGYRLWDKVSCNGTECFITGRRTSGYFALKKLDGTVISNSISYKKLRLLEVATNYITERK

SEQ ID NO: 11035 - protein, 465 aa, unidentified
MSTCVCVLSNSGERLMPTIRLGKVRRLLKDGKAKIIKHHPFTIQLLYDSKANTQPIEICEDVGYNYIGISVKSQSHEYVSAQYDTLQDEKACHDSCRKLRRTRRNRLRYRKPRFDNRKRGEGWLAPSLEHKKQLNIRLIERYVSVIPITHATVEVGSFDTMLVKAIEEGKATPESADYQKGPRYNLATLREAVFYRDNYICKVCGRKATEGAILHMHHMFYWKGRHGNSLSELITVCEKCHTPANHQKSGKLYGFGENVKFADLSGAAFMNTVRWQIVNELYAAFGKDFVSVTYGAMTKEKRIALHLEKSHNNDAYAMGSFHPVNRCAFEHYEKVKRNNRILEKFYDSQYIDTRTGELTNGKSLFNGRISRSHKKDSENLHKYRGKRICKGHRALRRKKLALNPGDLVSLNGEILVVHGTHTKKNGSVNVEFKTPSRGGKKSASLKKLKIVKTSNLMHSAWTKVS

SEQ ID NO: 11036 - protein, 464 aa, unidentified
MYVFVIGLDGTRLMPCKPRKARKLIEAHKAEIYKKQPFTIRLLYKTGCASQPITLGIDTGSQHIGIAVTSENKVLYQAEIELRSTMDKRSLMETRYSYRRSRRYRKTRYRSPKFKFHTKRTYSETLVKRKTTGIMTHWVKHTNSMSTNRPDGWLAPSMQSKVDHHIRWINRFLDVLPPDTKLRLEIARFDMARMKNPEVHNELYQHGPQYDYENLKAYVFDRDHYKCVVCKRKLGSKQPDGHSLKGMMHHITFRSKGATDNPDQLVTVCEYCHTPQAHKEGGVLWDLKEKHKSVQRGLRDATQMNIIRTRLVKAFPDAELTYGNITAADRKKMHLPKSHAGDAVAIAMKGEDVNICEPTVYIKQIRKKKRSLHEATPRKGRKRPNTQAVRNPKNTKSIGIYHIYDTVRFQNETGFISGFTGKSAYVQDFDGNYITMPGKSYKQINLSSLELVKHNNNWIQKTRN

SEQ ID NO: 11037 - protein, 414 aa, unidentified
MPCSPAKARLLLKEKKAIVVRRTPFTIQLTIATGESKQPVSLGVDAGYKHVGLSASTEKAELYASEVELRPDVSDLLSARRTLRQSRRNRKTRYRAPRFDNRIRTKRKGWLAPSVENRINAHLSRIGAILRLLPVTKITVETASFDTQLLKNPDISGKEYQEGEQLGFWNVREYVLFRDGHACQHCHGRSKDPVLNVHHLESRRTGGDSPGNLLTLCETCHKALHRREIKLKTKRGQSFRAEAFMGIMRWEVLNRLKASHPELEVHNTYGYRTKHTRIVNGIDKSHCADAFCIAGNLGAKRLGEFFFQKQTRRNNRQIHKLSILKHGLRKRNQAPLEVKGFRLFDKVVCQGEEGFIFGRRSSGSFDVRKLDGTRISAGISYKKLRLLEKRRTYLKEIRKEEALPPLPEGRSLRA

SEQ ID NO: 11038 - protein, 420 aa, unidentified
MLLREKKAAVHRKSPFTIILKDRTDGDTQPVEFKVDPGSKVTGIVVVADYGKRGKTVIWAEELQHRGQTIKDALDSSRAIRRSRRNRKTRYRAPRFDNRTRPAGWLPPSLMSRVHNVTTWALRLQRFAPLASIAVETVRFDMQKMVSPEISGVEYQQGTLAGYELKEYLLEKWGRKCAYCNKKNLPLHVEHVIPKTRGGTDRVSNLTLSCEGCNHKKDNLTAAEFGHPEVQKPALAPLKDAAAVNTTRYAIGNALKSLGLPVSFWSGGRTKFNRTQQGYPKAHWIDAACVGETGEHVKLDSSAQMIQVKATGHGSHQMCRMDRFGFPRTSAKTTRVVNGFRTGDIVRAVVPYGKKTGTYDGKVAVRTSGSFNVSTAIGVVQGIGYKYCSVVHRADGYSYLTKTGAPLGNELPSIRAQELS

SEQ ID NO: 11039 - protein, 472 aa, unidentified
VVDNRLLSIKPLINIGEGVIYSSICTGLSLQTYQKRKEVPCMVYVLDINGQPLMPTTRHGKVRRLLNSHLAKVVKRCPFTIQLLYQSTKEIQPVSLGVDAGSKHIGMAATTEKKVVYQEELSPRNDVVKLLSARRTLRRTRRNRKTRYRKPRFNNRVHSKHKGWLAPSVEVKIQEHITAIKRICQILPISEIQVETAEFDFQRLKAMKEWKPLPVGTDYQLGEQYDFYNTRQYVLHRDGYTCQCCGTHDNNIKLHVHHIESRQTGGDAPSNLITLCEHCHKALHKGKFELPKGKKRGKTYRDATFMGIMRKTLLERLKKEIDVPVAGTYGYITKYLREKTDLEKSHINDAICISKYPYAKPLDTYYLTKVVRNHNRQIHKSNFSKGGIRKRNQAPYLIKGFRLFDKVLYQGKEYFIFGRRATGYFDIRTLDGTKVNKGSISYKKLRIQDTAKAYLKEARAIPHMNKFTCVLA

SEQ ID NO: 11040 - protein, 428 aa, unidentified; identical to SEQ ID NO: 5055

SEQ ID NO: 11041 - protein, 210 aa, unidentified
VWLYQAVYNLGEGFLPSSEERTAFYWLLIYRKEHGIMQYVYVLNKHGEPLMPCSPGKARLLLKQQKACVVKRTPFTIKLLYGSAGYKQPITLGVDAGSKHVGLSASTEKRELYREEFTPRNDVVDLLSTRRQNRRSRRNRKTRYRAPRFDNRVHSKHKGWLAPSVEVKIQEHITVIKRICRILPVTLVRVETAEFDTQRLKAMLKESLCL

SEQ ID NO: 11042 - protein, 522 aa, unidentified
MGAVFVVDKNGKPLMPTYSKPKVRRMLKDGRAEIFRHEPFTIQLTQRAGGYTQPVHYDTDSGYQYAGVSVKSEKHEFLHMQADMLEDKKGRYDDRRKYRCTRRNRLRHRPPRFDNRRKGEGWIAPSLAHRLENQVRLFQTMCGVCPITEAHIEVGRFDAQALDAVEKGLPLPEGIDYQHGPRYAFDTIREAVFARDQHTCQCCGASPSKKPGTILVVHHALYWKGDHTDRLPGLLTLCTNCHTSANHQKGGKLRGLAPNAATANKAPAAFMNVVRWMMRDRFQADGVPTTITYGAATKRERLSRNVAKTHANDAYCIGEFRPKHRSLEIHIAKRRRNDRRLEKFRDATYIDARDGSIKSGKELSSGRTKRKEPRHGAKDLRRFRLKQLTKGCNAVRRKRYEIRPDDLVRTTDGRVYTVNGTQNRGATLQLRTTKTVLLTALVPKTGKEKELLPVETGQKLALKGRKEKHEVLSVDLASGKAVMRWYMGVKPENVTLLTGTYGGWTVVPAQAVNTCKKGETEK

SEQ ID NO: 11043 - protein, 425 aa, Nodularia sp.; identical to SEQ ID NO: 3165

SEQ ID NO: 11044 - protein, 426 aa, unidentified
LAKDHYRSIDREETNLRVYVLNKRGEPLMPCSAAKARILLKEKKAKVKRRTPFTIQLTIATGETKQPVTLGVDSGYRHVGLSASTEKAELYASEIELRQDIPELLAARRALRGARRSRKTRYRAPRFDNRKRDKGWLAPSVENRIGAHVSRVEAVLRILPVTKIIVETASFDVQRIKNPDVQGVEYQEGEQLGFWNVREYVLFRDGHECQHCHGKSKDWVLNVHHIESRRTGGDAPNNLITLCETCHKAFHRGEFELKVKRGRSFQAEAFMGVMRWTFFERLRARHPEIEVRNTYGYLTKDTRIANKIEKSHCADAFCIAGNLKAKRLGYYFFQKQTRRHNRQIHKLTILKGGVRKRHQTPYEIKGFRLYDKVLYRGKTAFIFGRRSSGYFDIRTLDGERISAAVNSKKLRLLEKRRTFLIELRRN

SEQ ID NO: 11045 - protein, 413 aa, unidentified; identical to SEQ ID NO: 2636

SEQ ID NO: 11046 - protein, 436 aa, unidentified
MSVFVLDKKHEPLMPCHPARARKLLKAGRARVVKTYPFTIRLVDRLLENSAVQPVAVKVDPGSEQSGMAVVRDDGKAHHHALFFINLVHRGKVIRDRLTGRRAFRHRRRSANLRYRAPRFLNRKRRKGWLPPSLQHRVDTTMSWVKKLRKLVPVTALWVENVKFDTQKLQNPEVSGVEYQQGTLFGFEVREYLLEKFGRRCVYCGAENTPLNIDHVVPRAKGGSDRVSNLVLACTECNQKKGAQPLEVFLKGKPEQFERIRRQLKAPLRDAAAVNATRWALFNALKQTGLPVATGTGAQTKFNRKAFGIPKEHWLDALCVGRINGADHPESMGVLQVRCTGRGSYQRTRLNKYGFPRGYLMRQKRVHGFATGDIVKAVKKGVTFQGRVAVRARGSFVLQTPDGKVDGIHWRHCRLISRNDGYGYAWLRPALHSSSV

SEQ ID NO: 11047 - protein, 457 aa, Anaerostipes sp.; identical to SEQ ID NO: 5989

SEQ ID NO: 11048 - protein, 413 aa, unidentified
MTSYSFVLDVNGKPLAPTKEQKAWFLIRKKRAALVSKYPMVIQLKKEIPENEICKDEIRCGIDDGGLHVGIALVQKCKTKNKVVFKGTMEQRNDVKHLMEVRRGYRRYHRYHKRYRQARFDNRKSSKREGRIAPSILQKRQATIRVIHWLNKWINITNYWLEDVSIDIRALTDGYKPYRWQYQKSNRLDENIRKAAILRDGGKCMECGKLNCRLEVHHIKPRRRNGSDTLDNLITLCKSCHQKTEGQEELYMDRYFSLLKSSDHKNLNYAQHVMIGKRWLRKQLSGLGVLYLTSGGDTANKRIDWNIEKSHANDAVCITDLQPDTCDMKEWTMKPMRRQSKAKTDHVLGIHHRDLVEYTFKNGETHRGYVTALYPEQKAINFQSPTKHCKKVNARKCKLLWKYSKIYWFENAS

SEQ ID NO: 11049 - protein, 457 aa, unidentified; identical to SEQ ID NO: 5177

SEQ ID NO: 11050 - protein, 413 aa, Blautia sp.; identical to SEQ ID NO: 3616

SEQ ID NO: 11051 - protein, 518 aa, unidentified; identical to SEQ ID NO: 3878

SEQ ID NO: 11052 - protein, 442 aa, unidentified
MVYVLNKKGQPLMPTNRHGKVRRLLKTKKAKVIKRCPFTIQLLYDTTNHTQDITLGVDAGSKHIGLSATTEDKVLFEADAELRNDISKLLEARYTFRRSRRNRKTRYRKKRFDNRVSSKHKGWLAPSIEHKIQSHFAMVEKVHRILPVTKIVVETASFDTQLLKAQLEGNPIPQGTDYQNGELAGWNIREYIFHRDNYTCQWCRGKSKDPVLVTHHHAYWKGDHTNKSSSLITLCNTCNDSKYHKKEANRLWGWEPKVTNSYKHAVFMGVMRWTFYNRLKEIYPNVSMTYGYITKNTRIKNNLPKTHYVDARCISGHPKAKSNGEYFYYKKVRRHNRQLHKANTLKGGIRKRNQAEYTVKGFRLFDRVEYKNNEYFIFGRRAYGFFDIRTLDGQKVNKGSISFKKLKLKETSKTYLIERRMADTGVSLAPLTTEVTSLRQTG

SEQ ID NO: 11053 - protein, 422 aa, unidentified
LRVFVLNKRGKPLMPCSPAKARLLLKEKKAIVKRRTPFTIQLTIATGETKQPVGLGVDAGYKHVGLSASTDKAELYASQVELRQDITDLLSARRALRRARRNRKTRYRAPRFNNRIRTKRKGWLAPSVENRINAHLSRIEAVLRLLPVTKITVETASFDMLLLKNPDIAGKEYQEGEQLGFWNVREYVLFRDGHVCQHCYGRSKDPVLNVHHLESRRTGGDSPGNLITLCETCHKALHRGEITLKAKRGQSFRAEAFMGIMRWEVLNRLKASHSELEVNNTYGYRTKHARIVNGIDKSHCADAFCIAGNLGAERLGEFFFQKQTRRNNRQIHKLSILKGGIRKRNQAPFEIKGFRLFDKVACKGEESFIFGRRSSGYFDVRKLDGTRISAGISYKKLRLLEKRRTYLTEIRKEEALPPLPEG

SEQ ID NO: 11054 - protein, 442 aa, unidentified; identical to SEQ ID NO: 3218

SEQ ID NO: 11055 - protein, 408 aa, unidentified
MVYVQDIDGKPMMPTTRHGKVRRLLKANKATVVNLCPFTIRLTYATSGYKQEIVLGVDAGTKHVGLSATTKSKEIYSSEVILRSDIVELLSTRRELRRTRRNRLRYRKPRFGNRVKSKHHGWVAPSVRYRIDAHIRVIDNVCSILPISRVIIEIAQFDTQKIKNPDISGNEYQEGDQLGFWNVREYVLARDGHKCQHCKGKSKDPILNVHHIESRKTGGDSPSNLITLCETCHKEYHKGNIDLKVKRGKSLRDAAVMGIMKWKLYEELKSRYPNVSMTFGYITKYNRIKYGIEKYHISDAFVISKNFNALRLEYHYKVRLVRRHNRQIHKQKVLKGGAKKPNQSPFEVFGFRLFDRVMFEGNYYFIFGRRKSGSFNIRDINGGNQRNVTYKKLKLSIGKRFMIQKEIN

SEQ ID NO: 11056 - protein, 430 aa, unidentified
MPKVYVLNRHGRPLMPCTPAKARHLLDAGKAKVRHRTPFTIQLLYGSTGYTQEVILGVDAGSKTIGLSAATETEELFSAEVKPRNDVVELMSARRQFRRARRNRTTRYRKPRFDNRVRSKHKGWLAPSVEVKIQEHMTAIRRACAILPVSKVVVETAEFDLQLLKAVAEGKPVPQGEDYQKGEMYGHYNVRQYVLWRDSYTCRICGAHGSVRKGVPLHVHHLESRRVGGDAPDNLVTLCTACHDKLHKGIIMAADIKKRKRRSTRDATFMGIMRMTLLRRLREQLPVPVVETRGYITKATRENLLVLPKSHANDALAIAHGPQGFRAEYLPNIRQADRLYTIRPVRHHNRQLHKATILKGGVRKANQAEKYICGFRLYDKVLYNGIECFVWGRRTSGSFLLRQLNGEKVKDGVSYKHLKLLERSQSYLVA

SEQ ID NO: 11057 - protein, 395 aa, Succinivibrio sp.
MPTTRHGMVRRLLKERKAKVVKKCPFTIQLDYEGANITQLITLGVDTGYANAGISACTEKKVLFEAKAKIRTDMVKLLSTRRETRRTRRSRKTRYRKARFFNRSIEKGWLPPSIRAKVESHLRLVAKVHEILPIDKIVVEIASFDIQKIKNPDIKGAEYQQGDQLGFKNVKAYVLARDGCTCRYCKGKSKDKVLRVHHLESRLIGGDAPNNLVTLCDSCHTKFHKGLISLDDIKRGKSFKAETFMGLMRNFFFKELCNKYPCVKCTYGYITKHLREKYHLKKDHHVDARCICGTPQALPSDVYLMKKVRCHNRQIHKFITLKGGRRKLNQAPYTVKGFRLFDKVKIDGKVGFIYGRRTRGAFDIRTVYGERINGSISYKKLQLIETRKSWLIEKC

SEQ ID NO: 11058 - protein, 515 aa, unidentified
MTALEERLSKTEYIYVLGFDGKPQMPTRRKRHVLKLLKTGRARIAEDIPFTIRLTYRNAPVLQPVTLAEDPGRTNIGAAVLSPLGDLLFAAVIETRNKEIKKLMTDRQKSRQASRRGERKARQRLAKRYGSMVKSGMVMRKLPMYAADRFVTCKFIRNTQARFCNRKRCPDWITPTVQHLVQTHLNIIRKISRYLPVTDIAFEVNRFAFMHMENPEAIGVDFQNGPLKGYGDVKEAIRTQQHGKCLMCKKPIAHFHHIVPRSRGGSDTIQNLAGLCPECHTKVHKDTAFRKDFDEKKSGQLKKYGALSALNQAVPFICKKLLEEYGEEHVHFCRGLDTSLIRTALGFEKTKKDQMHEVDAYCVGLAALEVNEVETPAFDHTFQIRQFRRQDRSIIHHQTGRSYYQGKEKVAQNRKPGFEQKTTALSQWYEEQVRIHGEKEAEKLRSQLRVEKSCRHYNDMDRFLPGAVFLYEGKRYVLSGRITNGKYLRACGQGMKNFPAAECTFIRHNAGLVFI

SEQ ID NO: 11059 - protein, 420 aa, unidentified
MQYAYVLNKRGEPLMPCSPGKARILLKQQKACVVKRTPFTIKLLHGSAGYKQPITLGVDAGSKHVGLSASTEKRELYSEEFTPRNDVVELLSTRRQNRRSRRNRKTRYRAPRFNNRVHSKHKGWLAPSVEVKIQEHITVIKRICRILPVTLVRVETAEFDTQRLKAMLAGKPLPVGTDYQLGEMYDEYNVRQYVLKRDNYTCQCCGAHTTAKKAVKLHVHHLESRKVGGNAPSNLITLCTTCHNNLHKGKITLDGKKRGKTLRDAAFMGIMRNTLLTRLRNELHIPVQNTYGYITKLLREQNDIKKSHVNDARCISKHPLAEPCSICYRTKAIRHHNRQIHKAKILKYGIRKANQAPYIVKGFRLWDKVLYNGQECFISGRRTSGYFALRKLDGTTITNSISFKKLQLLEPATNYLIERM

SEQ ID NO: 11060 - protein, 443 aa, unidentified
LTKDENRPSGRTTGLRAEQAEPAGIRKGDTLKVFVLNMRGKPLMPCSPAKARHMLKAGKAFVVRRTPFTIKLTIATGETKQDVTLGVDAGARHVGISATTEKEEVFASEVALRQDITGLLADRLAFRRARRNRKTRYRAPRFNNRVRSKHKGWLAPSVENRIQAHMSRIEAVCRLLPVTKIVIETASFDIQKIRNPEVEGTGYQQGDQLGFWNVREYVLFRDGHICQHCRGRSKDPILNVHHLESRKTGGDAPNNLITLCETCHKAYHAGKIKLKVKRGQSFRAEAFMGIMRWTLLDRVRKTHPKLPVENTYGYLTKHKRIALGLPKTHCADAFCIAGNLKALRRGDFLFQQQTRKHNRQIHKCSILKGGVRTLNQAPFLVKGFRLFDKVRIGGQIGFVFGRRVRGTFNIRRLDKTVIGTDINCKKLSLLETRKTFLTELRKE

SEQ ID NO: 11061 - protein, 430 aa, unidentified; identical to SEQ ID NO: 5683

SEQ ID NO: 11062 - protein, 507 aa, unidentified; identical to SEQ ID NO: 2446

SEQ ID NO: 11063 - protein, 431 aa, unidentified; identical to SEQ ID NO: 3801

SEQ ID NO: 11064 - protein, 421 aa, unidentified
MVYVISISGRPLMPTAHCGKVKHLLKDGKAKVVHREPFTIQLLYETTEYTQATTLGVDTGSGTFGAAVVTDDSHKVLYISEVEVRNDISKKMKQRSKYRRNRRYRKTRYRKARFDNRKSSIKNDRFSPTMQSKINAHEREIKFVKSILPVTHLVLETGTFDMALMNNPALADPEIARWGYQKGPNYGFANTKAMVRARDGYTCAICKGRHKNRQLDVHHIIFRNQGGSNEAENLITLCQTCHKKLHNGEITYSGKGKKKGSLSFATQMNSIRKQLLARHPEAIETFGYITSENCQLYGLPKAHCIDAAVIASDVYKPIFATQDVFYKRCIAKGTYQCTKGVRSEKSMPKTKIEGFKQFDKVKYQNGLYFIKGRMSSGYAVLSDIYGTKIDFPHVPKLKEMQRIAARKSIICTTAKIDLKAS

SEQ ID NO: 11065 - protein, 414 aa, unidentified; identical to SEQ ID NO: 2588

SEQ ID NO: 11066 - protein, 418 aa, unidentified; identical to SEQ ID NO: 6835

SEQ ID NO: 11067 - protein, 413 aa, unidentified; identical to SEQ ID NO: 3295

SEQ ID NO: 11068 - protein, 477 aa, unidentified
  REGION 1..477: note = IscB polypeptide
LEGNNVAVFVIDKRKKPLMPCSEKRARKLLDSGRARVHRLIPFSIRIIDCEVDGCVLQSVKIKIDPGSKFTGIAVVRETKSIDVATGKIDIEVHVLNLFELVHRGRQISEALTARRAMRRRRRCNLRYREPRFLNRRNKQRGWLAPSLQHRADTTVAWVNRFQRVVPVTGIAQELVRFDMQLMQNAEISGVEYQQGTLAGYEVREYLLNKWNRECSYCGAKDVPLQIEHIHSKACGGSNRISNLALACQPCNQKKGAQDVHVFLAKDTKRLDRILAQAKRPLKDAAAVNATRWALFNALKAAGVPVMTGSGGLTKYNRVDLEIPKTHALDAVCVGAVSAVTGWQKPILAIKCTGRGSYQRTRLDAFGFPRGYLTREKRIKGFQTGDMVSANVLKGKKMGFYVGRVAVRETGSFNIQTSQGVVQGISHRCCKVIQRADGYGYSIVAKMESEQVSHKARNASRSELYLSGLNAGVSRAI

SEQ ID NO: 11069 - protein, 523 aa, unidentified
VPECNIGEANITLLAGVFSMNKNSVFVLDKNKKQCNPVHPAAARKLLTEGKAAVFRQYPFTIILKDESTDEIKQLRIKIDPGAKTTGLAIVSDTNIVWCAELGHRGFQVRDNLSDRRIKRRSRRSRKTRYRKPRFLNRKRPQAWLPPSSMSRVFNIQSWVKKLCRLAPTTSISMELVRFDMQKMVNPEINGVEYQRGELFGYEVREYLLEKFNRTCVYCNSKDGPFNLDHFHPKSKGGSDQVSNLVLSCVKCNQAKDNQLPADFLSDRPKLLAMIDKQRKQPLADAAAVNATRWKLKEILKTTGLPVEIGSGGLTKFNRKHLGISKSHWTDAACVGKSTPETLNIRGYQPLLIKAMGYSFRQMVKSDKYGFPRGAPKLRQKSFFGFQTGDMVKAVVPKGKYAGTHTGRIAVRKKVSQMTIKSSRKLRSKSVRQMLNWAHYRFELFLKHKAAEYNKIVLDVSEAYTSKTVSWTGEILNNLGGKKVVTGNDGFRLDRDLNGARGILIKSVVEKFSTTLGDTPSVS

SEQ ID NO: 11070 - protein, 420 aa, unidentified
MQYVYVLNKHGEPLMPCSPGKARLLLKQQKACVVKRTPFTIKLLFGSAGYKQPITLGVDAGSKHVGLSASTEKRELYSEEFTPRSDVVELLSTRRQNRRSRRNRKTRYRVPRFDNRVHSKHKGWLAPSVEVKIQEHITVIKHICKILPISLVRVEKAEFDTQRLKAMLAGKPLPVGTDYQLGEMYDEYNVRQYVLKRDHYTCQCCGTHNTAKKVVKLHVHHLESRKTGGNAPSNLVTLCTTCHKNLHKGRVTLDGKERGKPLRDAAFMGIMRKTLMVRLKEELPIPVQGTYGYITKMRREQNDIKKSHTNDARCISKHPLAEPCSVCYRTKAIRHHNRQTHKANFSKKGIRKRSQMPYLVEGFRLWDKVLYKGQECFVSGRRSSGSFALKKLDGTSISKGVTFKKLRLLEPATNYLIERM

SEQ ID NO: 11071 - protein, 459 aa, unidentified; identical to SEQ ID NO: 9064

SEQ ID NO: 11072 - protein, 424 aa, unidentified; identical to SEQ ID NO: 3351

SEQ ID NO: 11073 - protein, 424 aa, unidentified
MRVFVFNMRGVPLMPCTQRKARILLKEGKAVIYKYNPFTIQLTHATGENTQDCHVGIDTGAKHAGVAITSEGKVLFKGEIELRQDVKSNLDTRRIYRRSRRNRKTRYRQPRFLNRRKADKWLPPSLQNRLDHTLHWIDTLRGLVPSPTLHIEVGKFDTAKMIDPKIHGVDYQHGQTYGFFDERYYVFARDNYTCQCCGKSKGKILQTHHIIYRSNGGTDRADNLITVCTDCHTSKNHQKGGILYMWQEQHKKVRQYKEPPFMNTLRRRIFAKYPDAAITYGSETTPKRKEKGLDKTHYNDAIIISGVQTISENPDEWLFIRQFRKKKRSLHEGTPRKGRKEPNRTQKRNSKNTPYYRGYHLNDKVRVLGKTGYISGFTGGAAYVKDSDNQYITLPNKSYKQVGISNLQHVCHNNNWQYITKTTV

SEQ ID NO: 11074 - protein, 413 aa, unidentified; identical to SEQ ID NO: 2636

SEQ ID NO: 11075 - protein, 461 aa, Parasutterella sp.; identical to SEQ ID NO: 3646

SEQ ID NO: 11076 - protein, 427 aa, Nodularia sp.
MCKVFVIDTNKRPINPIHSAQARQLLRNKKAAIYRRFPFTIILKESRPYAPVADLRIKVDPGAKTTGIALVNDATGEVVFAAELKHRGFAIRDALTSRRQLRRGRRNRQTRYRKPRFLNRTRPEEWLAPSLMSRVHNVETWVNRLSKFAPITEISTELVKFDMQLMRQPEIEGKEYQQGTLAGYETREYLLEKWNRQCAYCGVKDLPLQIEHIHPRSKGGSNSITNLTLSCEKCNIKKGTKDIKDFLKKDPSKLQKILAQAKKPLADATAVNATRYKLLEVLKSTGLTIECGSGGLTKFNRTSQQLVKTHWLDAACVGKSTPILNIKGIKPLLITANGHGNRQMCGTDKFGFPSRHRTNKQIHFGFQTGDIIKAVVTSGKKVGEYLGRVLCRATGSFDIATKTGRISGISHKYCSAIHKKDGYSYVF

SEQ ID NO: 11077 - protein, 307 aa, Anoxybacillus sp.
LFVYVINKHGNPLMPCSPRKARILLKNKKAKVVKRTPFTIQLLYGSSGYKQPISLGVDTGTKHVGLSATTKNQVLLEAEVQLRTDIQELLATRRQFRRSRRNRNTRYRKARFLNRKKPNGWLAPSIQHKVDSHIKLVKWVHSLLPITHITVEVAQFDTQKIKNPDIQGAAYQQGEQLGFWNVREYVLYRDGHTCQWCKGKSKDPVLNVHHIESRKTGGDSPSNLMTLCKTCHDMIHREGLEHEIQRRFSSLKDASHMTVMRWFIWNGLKKVYPHANITYGISSSVFALLMDCLNLIWWMLVVLVEIH

SEQ ID NO: 11078 - protein, 436 aa, unidentified
MTKTLTTQTTQACVLDRQGKPLMPTTRLGKVYRLLKTQKAHIVSYEPFTIQLDYQPDTQVIQPMTLGVDSGAIHSGYSVANEHREYYSAEVIARNDISNRLSERHMYRQTRRSRKTRYRKPRFKNRKNKKKGWLPPSLEQKVAAQANEIDHIHRYFPIETIIVETAEFDIQKIKNPDISGIEYQQGTLQGYNIRNYLLEKHGRKCFYCGKAVSDFEVEHMLPKSKGGSNRIDNLTLSCHDCNEKKGTLTAEEFIQQTLPAQKATAKLKQLPKEKRLFKYMAYMNATRWALYDAIKERYPNVKMTYGYITKYNRIQAGLPKAHHIDAKCITGFSTVPSMSQTVVKVKMRRHNRQLHRATFSKGHVRKAASLPTTVFGFQLYDLVLFNNHRYFIKGRRSSGAFALVSVEGLKNEERMYKKLTVLAHTNAYLTNRYVNA

SEQ ID NO: 11079 - protein, 421 aa, Lactobacillus sp.; identical to SEQ ID NO: 5881

SEQ ID NO: 11080 - protein, 515 aa, unidentified
MIPNERRHLMPYIYVIGMDGKPQMPTKRRRHVQKLLDTGKARITERVPFTIQLLYDNDPVLQPVILAEDPGRTNIGLAALDLKGNLLLSAAVETRNKEIAKLMEKRRQCRRASRNGERKARQRLAKKYGTMIRGGMRMRKLPQYAADAFIICKVIRNTQARFCNRRRPDGWLTPSARHLVQTHINLVHKVQKYLPVTDVAIEVNRFAFMQLEDPAICGVDFQTGPLKGYDDRDAAVYDLQDGKCLMCKHEITQYHHIVPRSRNGSNTIGNIAGLCDQCHDRVHKDADFAEQMKEKKEGMDKKYGALSVLNQAIPFICKQLETEFGRGHVHYCTGRETSLVRQSTGYQKTRKNQLHEVDAWCIGALALAEIPENVPDFKEIHLIRQFRRQDRSLVNAQTERVYKLGGKMVAKNRKKRTGQEIYALEDWYNRQVETYGKQEADCMRSRLKITKSRRRYNNPNRMMPGAVFLYEGVRYVMRGQHCNGAYLQAVGMGNRDFPARKCKILTRNTGLVFVS

SEQ ID NO: 11081 - protein, 428 aa, unidentified; identical to SEQ ID NO: 5055

SEQ ID NO: 11082 - protein, 494 aa, unidentified; identical to SEQ ID NO: 5675

SEQ ID NO: 11083 - protein, 420 aa, unidentified; identical to SEQ ID NO: 6067

SEQ ID NO: 11084 - protein, 448 aa, Thiohalospira sp.; identical to SEQ ID NO: 3947

SEQ ID NO: 11085 - protein, 431 aa, unidentified
MPDKVYVISRLGHPLMPCSPAKARHLLDDKKAKVVKRMPFTIRLLYGSTKYIQPIILGVDAGSKTIGLSASTAKEEVFAAEVMPRNDVVENLSTRREFRRARRNRTTRYRKPRSDNRVRSNHERWLAPSVKVKIQEHITSIKRVCTILPISKVVIETAEFDLQLLKAIQEGKPIPEGEDYQKGEMYGSYNVCQYVLWRDNYTCICCGVRGTPKNPVRLHVHHFESRKYGGNAPDNHGTLCDDCHKKFHLGIITDVKLKTRRRQSTRDAAFMGIMRKTLMWRLRTELFIPVAETKGYITKATREKLLVLPKSHTRDALAIAQGRHGFGIKEYAYVEPANHIYTVRPVRHHNRQLHKASILKGGIRKRNQASKYVFGFRLYDKVLYQGKACFVWGRRTSGTFLLRTIDGIKVKDGVNYRNLTLLERSSNYLIA

SEQ ID NO: 11086 - protein, 416 aa, unidentified; identical to SEQ ID NO: 8069

SEQ ID NO: 11087 - protein, 446 aa, unidentified
  REGION 1..446: note = Ga0373626_0000420
MQQFKVKFKNTPRNTPLVPCSVNPVLNRLERVSVQDKVRTLNNLEVDQREQAPGFKSIVFVLSINGKPLMPCTSTKARHLLEGGKAHVVKQNPFVIKLNFECENQVQDCSLGIDSGFKNIGFSAITDKKEIVAGTLLLDQRTSERLIEKRMYRRGRRSRLWYRKPRFNNRKTAIGYLPPSTQRRFNTHITLINKLKKLLPIKNVVIEVGNFDIQKIENPDIAGIQYQQGSLFEYQNMRSFLMFREQGRCQLCGKEFSKGNSFHIHHIISRSNGGIDREKNLALLHERCHKKLHKNKLYDVLKKNKVYKDATFMSIIRNKFRNILSNCKLIYGNETFVKRNILRLEKSHYNDAFVIAGGNEQRKVAPIIFKQKHRNNRVLQLNRKGFKPSIRKQRYSIQPGDFVFIKRKIHIVKGCSTYGKTVCCSDGNFGIKKITTIFHTGSIYLT

SEQ ID NO: 11088 - protein, 451 aa, unidentified
MSVAVISKTGERLMPTSEYRARKLLKSGKAIKYSYHPFTIQLTERKTGNIQPIELCMDTGYIHIGISVKSEKHEYLTEQIDTLTDERSRHNARRMYRSQRRNRKRYRQPRFNNRKKDKGWIAPSLEHKKNIHVQTISRINNVMPLTDITMEMGNFDTQVLKAKEEGRPLPQGVDYQHGERYSIATLREAVFARDGYKCQCCGRTIKDGAILHVHHIKYRSQGGTNSISNLATVCDKCHTPKNHKPGGKLYGWKPKLPSFKGATFMTTIRWQLYNEAKALFPDIDIHITYGAATKERRRELNIDKSHINDAFVMGQFHPRHRIKAVLYKKKRRNNRCLEKFYDAKYIDSRDGKKRSGQELFNGRINRNHKKDSENLHQYRLQKVTAGKRTVRKQHYSVQPHDIIIYESRKRETTGCHCNGARVMLLPDKKSVSIKKIKIYRYASGYFKSTFN

SEQ ID NO: 11089 - protein, 344 aa, unidentified
VVENLSTRREFRRARRNRTTRYRKPRSDNRVRSNHERWLAPSVKVKIQEHITSIKRVCTILPISKVVIETAEFDLQLLKAIQEGKPIPEGEDYQKGEMYGSYNVCQYVLWRDNYTCICCGVRGTPKNPVRLHVHHFESRKYGGNAPDNHGTLCDDCHKKFHLGIITDVKLKTRRRQSTRDAAFMGIMRKTLMWRLRTELFIPVAETKGYITKATREKLLVLPKSHTRDALAIAQGRHGFGIKEYAYVEPANHIYTVRPVRHHNRQLHKASILKGGIRKRNQASKYVFGFRLYDKVLYQGKACFVWGRRTSGTFLLRTIDGIKVKDGVSYRNLTLLERSSNYLIA

SEQ ID NO: 11090 - protein, 413 aa, unidentified
MPCSPAKARLLLKEKKAIVVRRTPFTIQLTIATGEAKQPVSLGVDAGYKHVGLSASTEKAELYASEVELRQDVSDLLSARRALRQCRRNRKTRYRTPRFGNRIRTKRKGWLAPSVENRINAHLSRIESVLRLLPVTKITVETASFDTQLLKNPDIAGKEYQEGEQLGFWNVREYVLFRDGHVCHHCYGRSKDPVLNVHHLESRRTGGDSPGNLITLCETCHKALHRGEITLKAKRGQSFRAEAFMGIMRWEVLNRLKASHPELEVNNTYGYWTKHARIANGIAKSHCADAFCIAGNLGAERLGEFFFQKQTRRNNRQIHKLSILKGGRRKRNQAPFEVKGFRLFDKVACKGEESFIFSRRSSGYFDVRKLDGTRISAGISYKKLRLLEKRRTYLTEIRKEAFPPLPEGRSLRA

SEQ ID NO: 11091 - protein, 474 aa, Halomonas sp.; identical to SEQ ID NO: 6707

SEQ ID NO: 11092 - protein, 529 aa, unidentified; identical to SEQ ID NO: 6786

SEQ ID NO: 11093 - protein, 426 aa, Parasutterella sp.; identical to SEQ ID NO: 3045

SEQ ID NO: 11094 - protein, 465 aa, Marinobacter sp.
MAVLVLDRKKNPLMPCSEKRARLLLTRRRAVVVRVYPFTLRLKDRVGGAVQKVVLKIDPGSKETGLAVSRVSAQGEHVLCLIELIHRGRQISKALDQRRGFRSRRRGKLRYRVPRFNNRTKPKGWLAPSLQHRVDTTTSVIKRLRALVPVTSISQELVRFDLQQMENPEISGVEYQQGILLGYEVREYLLEKWCRECAYCAVTDTPLEIEHIVSKANGGSNRISNLTIACHDCNQEKGSQTLADFFQTSKRLKDKQPRMDNVLIQCKRPLRDAAAVNSTRWTLFQSLKTTELPVNVGTGGQTKFNRQRLGIPKTHALDAACVGIVEQVFDWQKTTLRIKATGRGSYKRTRLTKHGFPRGYLMREKSVHGFQTGDMVRANVPTGKKEGTWLGRVAIRKTGSFNIQTSDGAVQGIHHRHCQLIQRADGYGYHLHHKKEKGNRKVCRADARRALPPRPKRTGFPAQNR

SEQ ID NO: 11095 - protein, 447 aa, unidentified; identical to SEQ ID NO: 5309

SEQ ID NO: 11096 - protein, 421 aa, unidentified
MQYVYVLNMHGEPLMPCSPRKARLLLRGGKARVVKRTPFVIKLLHGSAGYKQSVVLGVDAGSKHVGLSACTKSIELYKEEMMPRNDVVGLLSARRQYRHSRRNRKTRYRAPRFDNRVHSKHKGWLAPSVEVKIQEHITAIKRVCRILPIVLVRVETAEFDTQRLKAMLEGRPLPVGIDYQRGEMYNEYNVRQYVLKRDRYVCQHCGAHPTSEKPVRLHVHHLESRHTGGNAPNNLIILCEHCHRALHEGKIKLRNDKKRGKSLRDAAFMGIMRDALLMRLRYKLSVPIEQTYGYITKLLREENKIAKSHTNDARCIAGFPKATPCDTLYRTRAIRHHNRQIHKAKILKGGIRKRNQSPYLVNGFRLWDKVRYNGEECFISGRRSSGYFAIKKYDGAVVSNSASYKKLTLIETATNYITERG

SEQ ID NO: 11097 - protein, 421 aa, unidentified; identical to SEQ ID NO: 6517

SEQ ID NO: 11098 - protein, 417 aa, unidentified
MPCSPAKARLLLEEKKAIVKRRTPFTIQLTIATGEAKQPVALGVDSGYKHIGLSATTEKAELYASEVELRQDITDLLSARLALRRSRRSRKTRYRAPRFDNRVANKREGRLAPSVENRIAAHMSRVEAVMRVLPVTAITVETAAFDTQLLKNPDITGAAYQQGEQLRFWNVREYVLFRDGHVCQHCRGKSKDPILNVHHIESRRTGGDAPNNLITLCETCHKAFHRGEIKLKVRRGKSFKAETFMGIMRRTLFERLKKAHPELNVRNTYGYLTKHKRISYGIAKSHCADAYCIADNLGAKRLEGFFFQKQTRKHNRQIHKLLILKGGLKKKNQAPYEVKGFRLFDKVICKGEEAFIFGRRTSGSFDVRRLDGTRISAGINYKKLRLLEPRTTYLTEFRKEAALPPLHECRGFRAEFL

SEQ ID NO: 11099 - protein, 418 aa, Exiguobacterium sp.; identical to SEQ ID NO: 2406

SEQ ID NO: 11100 - protein, 413 aa, unidentified
MTSYSFVLDANGKPLAPTKEQKAWFFIRKKRATLVSKYPMVIQLKKEIPEKEICQDEIRCGIDDGGLHVGIALVQKCKTKNKVVFKGTMEQRNDVKHLMEVRRGYRRYHRYHKRYRQARFDNRKSSKREGRIAPSILQKRQATIRVIHWLNKWINITNYWLEDVSVDIRALTDGYQSYRWQYKKSNRLDENIRKAAILRDDGKCMECGKSNCRLEVHHIKPRRRNGSNTLDNLITLCESCHQKTEGQEELYMDRYFSLLKSSDNKNLNDAQHVMIGKMWLRKQLSGLGVLYLTSGGDTANKRIDWNIEKSHANDAVCITDLQPDTCDMKEWTMKPMRRQSKAKTDHVLGIHHRDLVEYTFKNGETHRGYVTALYPEQKAINFQSPTKHCKKVNARKCKLLWKYSKIYWFENAS

SEQ ID NO: 11101 - protein, 591 aa, unidentified
MDTIYVLNRDGRPLMPMHSWGRVQRFLKSGRASVVSSLPFTIRLKKQIEDPELDRCILGIDPGRTNIGLCVTDGKGKRQASRRGERKRRQRRAIHFDKSGETAMTEYWRVLPGTKKAVCQKHIRGQESKFMHRRRPKGWRTPTAEQLYRTHLNAVAKIEKLLPIADIVIEMNRFDFAKMENPGIRNWEYQRGRLFGFKNVQEAVIARQNGKCLLCGRPIEHVHHVRPRSQGGSDHIDNLAGLCCACHQKVHTDPAAKARLASEAKKRLKKYGALSVINQIMPALLDELAYRYLLWITTGWETAKTRRGCGLPEKEKDDGTHYIDAWCIAVSIMENRLYVPDSRDLDDVFHLMRQFRRHDRQKVEATKARSYYLDGRLVAKNRRRRTGQADGKDPKPALSEWRQGHEKDVARLTVRKSTRSYNDLKRVLPGAEVLCDEKRYVVKGKHNDRWIALDAADHTLEKAQSRFTLLHHNTGGMTCENGQIELFFHSATEGYKLELIKNDNRASFEMDCDHTLQYFEDKGYCTFAYESVIGKGHITILEGEEKVDALQKLMDHYHPGKHAYFNPAAIPRTTVYKLTVESVTGKRKKKK

SEQ ID NO: 11102 - protein, 545 aa, unidentified; identical to SEQ ID NO: 3709

SEQ ID NO: 11103 - protein, 466 aa, unidentified
LSIKPLINIGEGVIYSSICTGLSLQTYQKRKEVPCMVYVLDINGQPLMPTTRHGKVRRLLNSHLAKVVKRCPFTIQLLYQSTKEIQPVSLGVDAGSKHIGMAATTEKKVVYQEELSPRNDVVKLLSARRTLRRTRRNRKTRYRKPRFNNRVHSKHKGWLAPSVEVKIQEHITAIKRICQILPISEIHVEISEFDLQRLKAMEEGRTLPVGTDYQLGEQYDFYNTRQYVLHRDGYTFQCCGTHDNNIKLHVHHIESRQTGGDAPSNLITLCEHCHKALHKGKLELPKGKKRGKTYRDATFMGIMRKTLLERLRKEVDVPASGTYGYITKYWRERAGLEKSHINDAICISKYPYAKPLDTYYLTKAVRNHNRQIHKSNFSKGGIRKRNQAPYLVKGFRLFDKVLYQGKEYFIFGRRATGYFDIRTLDGTKVNKGSISYKKLRIQDTAKAYLKEARAIPHMNKFTCVLA

SEQ ID NO: 11104 - protein, 414 aa, unidentified
MPCSPAKARLLLKEKKAIVKRRTPFTIQLTITTGEAKQPVSLGIDAGYKHVGLSASTEKAELYASEVELRQDITDLLSARRALRQSHRNRKTRYRAPRFDNRISTKRKGWLAPSVENRINAHLSRIEAVLRLLPVTKITVETASFDLQLLKNPDISGKEYQEGEQLGFWNIREYVLCRDGHVCQHCYGRSKDPVLNVHHLESRRTGGDSPGNLITLCETCHKALHRGEITLKAKRGQSFRAEAFVGIMRWEVHNRLRALHPGIEVSNTYGYRTKHARIANGIAKSHCADAFCIAGNLGAERLCEFFFQKQTRRNHRQIHKLSILKGGIRKRNQAPFEVKGFRLFDKVACQGEEGFIFGRRSSGFFDVRKLDGTRISAGISCKKLHLLEKRRTYLTEIRKEEALPPLPEGRGLRA

SEQ ID NO: 11105 - protein, 340 aa, unidentified
WGKTKNKVLFKATMQQRQDVNKKMELRSGYRRYRRSHKRYRPKRFNNRSSSKRFGRLPPTIKQKKQAILRVVKKLSKYIRFDKIVLEDVAIDIRVLTEGRKLYEWQYQHSNRLDENLRKATLMRDEYTCQMCGAEDTVLQAHHIIPTRDSGPDSIHNLITLCLDCHDKVTDNEYEYKDQFLDIISGREFSLIPAMHVMQGKTYLREELAKIANLEVTTGGDTANSRIDYEISKSHSNDAICVTGLLPVNMVKIKEWLIKPLRKKKKNRTMSLKGFKHRDIVRYTKRDGTTYIGQITALRVKNDKYNSKVCNFRTFEGETFRGYGLKNLELISRAKGLMFI

SEQ ID NO: 11106 - protein, 416 aa, unidentified
MVYVLDKNGQPLMPTDRHRKVRLMLQSGQAKVIKRCPFTIQLNYDSGHQTQEISLGIDAGSKHIGVSATTKIKVLYEVDVELRNDIVDLLSSRRELRRGRRNRKTRYRQAKFNNRRRGNGWLAPSIRQKIGTHLTVVENICKILPISRIMVETASFDIQKIKNPDIQGAEYQQGDQLEFWNVREYVLFRDGHTCQCCKGKSKDKILNVHHIESRKTGGNAPNNLITLCETCHTGYHKGTVQLPKAIKRGMRFKDAAFMGIMRWAFYEALKQQYEPVGTPVHNTYGYITKHTRIAYNLPKEHYVDARCISGNPEASSNGEYYYQKKVRCHNRQIHKLTILKGGIRKQNQATYLVKGYRLFDKVSYQGKGYFVFGRRQSGFFDIRTLSGEKVNKGSLSCKKLKFIATRTYYLTERRAV

SEQ ID NO: 11107 - protein, 413 aa, unidentified; identical to SEQ ID NO: 2636

SEQ ID NO: 11108 - protein, 426 aa, unidentified
LAKDLYRSIDREETNLRVYVLNKRGEPLMPCSAAKARILLKEKKAVVKRRTPFTIQLTIATGETKQPVTLGVDSGYRHVGLSASTEKAELYASEIELRQDVSELLAGRRALRHARRSRKTRYRAPRFDNRKREKGWLAPSVENRIGAHVSRVEAVLRILPVTKIIVETASFDVQRLKNPDIQGVEYQQGEQLGFWNVREYVLFRDGHECQHCHGKSKDKVLNVHHIESRRTGGDAPNNLITLCETCHKAFHRGEIELRVKRGRSFQAETFMGVMRWSFFERLRASHPEIEVRNTFGYLTKNTRISHGIEKTHCADAFCIAGNLKAKRLGYYFFQKQTRRHNRQIHKLTILKGGVRKRHQTPYEIKGFRLYDKVLYRGKVAFIFGRRSSGYFDIRTLDGERISASVSYKKLRLLEKRRTYLIELRRN

SEQ ID NO: 11109 - protein, 417 aa, unidentified
MPCSPAKARLLLKEKKAIVKRRTPFTIQLTIATGEAKQPVALGVDSGYKHIGLSATTEKAELYASEVELRQDITDLLSARLALRRSRRSRKTRYRAPRFDNRVASKRKGWLAPSVENRIAAHMSRVEAVMRVLPVTAITVETAAFDTQLLKNPDIAGEAYQQGEQLGFWNVREYVLFRDGHVCQHCRGKYKDPILNVHHIESRRTGGDAPNNLITLCETCHKAFHRGEIKLKVRRGKSFKAATFMGIMRWTLFERLKKAHPELSVRNTYGYLTKHKRISHGIAKSHCADAYCIADNLGAKRLEGFFFQKQTRKHNRQIHKLSILKGGLRKKNQAPYEVKGFRLFDKVICKGEEAFIFGRRTSGSFDVRRLDGTRISAGISCKKLRLLEPRTTYLTEFRMEAALPPLHECRGFRAEFL

SEQ ID NO: 11110 - protein, 420 aa, unidentified; identical to SEQ ID NO: 6507

SEQ ID NO: 11111 - protein, 529 aa, unidentified; identical to SEQ ID NO: 5528

SEQ ID NO: 11112 - protein, 468 aa, Petrotoga sp.; identical to SEQ ID NO: 3825

SEQ ID NO: 11113 - protein, 518 aa, unidentified; identical to SEQ ID NO: 7468

SEQ ID NO: 11114 - protein, 346 aa, unidentified; identical to SEQ ID NO: 4983

SEQ ID NO: 11115 - protein, 404 aa, Salipiger sp.
LLRDGKAAVFRRYPFTIILKRKVPDAEPAPVEVKIDPGSKVTGLALVQGDKVIWGGELTHRGHQIRDRLQMRRERRRGRRNKLRYRKPRYRTKAQINNAGRKREKGWLAPSLMHRVETIMTWMDRFCRYAPAASIAMELVRFDLQQMQNPEISGVEYQQGDLAGYEVKEYLLAKWGRKCAYCGAEGRPLEVEHIQPRSRGGSNRVSNLTLACEPCNQKKGNRPVEDFLSGRPDLLARIRKQAKQPLRDAASVNSTRWVLINALKLTGLPVTTGTGGRTKYNRKRMGWPKAHWLDAAAVGRVDALTLRTDKPLLISAKGQGGRQKGVFDKHGQPRRNKAGAAQIRPLKPIHGWRSGDIAKARGLEGRISPRTKGNFELRAAGRKPCSFPLRDFAAIHRNDGYAYQ

SEQ ID NO: 11116 - protein, 406 aa, unidentified; identical to SEQ ID NO: 2703

SEQ ID NO: 11117 - protein, 470 aa, unidentified; identical to SEQ ID NO: 2949

SEQ ID NO: 11118 - protein, 452 aa, Polaromonas sp.
MAVFVLDRSGQPVMPCSEKRARLLLQSKRARVHRVMPFTIRLIDRSQADCLLQPLRLKLDPGSRATGLALVRDIETIEPAMGEVTRGAAVVSLLELEHRGRQISEALTARRQMRRRRRNQLRYRAPRFLNRGNKQKGWLAPSLQHRVDTTAAWVARIQRWAPVTALSSELVRFDMQQLQNTEIEGAEYSQGTLAGYEVREYLLEKWKRTCAYCDAQNTPLQIEHIEPRARGGSHRISNLCLACQPCNQKKAARTLQDFLKKDPKRLARILAQAQRPLRDAAAVNVTRWALANALKTTGFPLELASGGRTKFNRCTLDVPKTHALDAACVGQVEAITGWQQPAFYTLTIKAMGRGSYQRTRLDAYGFPRGYLMRAKSVHGFQTGDRVKAVVPQGKKVGTHVGRVAIRKTGSFNITTPAGVVQGISHKHCRIVQRNDGYGYFFHRADLTQDANR

SEQ ID NO: 11119 - protein, 431 aa, unidentified
MPNKVYVINKHGRPLMPCSPAKARHLLDEGKAKVKKRTPFTIQLVYGSSGYTQEVILGVDAGSKTIGMSASTTKEELLSAEVKPRNDVVDLLSTRREFRRAQRNRKTRYRKPRFDNRVRSKHKGWLAPSVEVKIQEHITAIRRVCGILPVSKVVIETAEFDLQMLKAIADGKPVPQGEDYQQGEMYGHYNVRQYVLWRDGYTCQCCGAHTTKKKEVRLHVHHLESRKVGGDAPDNQVTLCESCHEKLHKGLIAEKDFKKRKRKSTRDATFMGIMRKTLMQRLCSELPIPVIETRGYITKATREKLLVLPKSHTNDALAIAQGKQGFNVGYLPEIAQIDKIYTIRPVRHHNRQLYKATILKGGIRKSNQTKKYVFGYRLFDKVQFNEQDCFIWGRRTTGIFTIKTINGKMIKDGISFKKLKLAEKSTSYLIA

SEQ ID NO: 11120 - protein, 443 aa, Anoxybacillus sp.
MVEENMTCFMQRKGENPMVFVLDTNKRPLAPCHGAVARKLLKQGKAAIYKRFPFTIILKKSVDESENETTYRLKIDYGSRHTGLAILRGQEVVWLGQLDHRTDIKERIDKRRAFRRARRNRKTRYRKPRFLNRKRKEGWLPSSLESRVQNIQTWVNRLKKLCPIGYISYENAKFDTQLMRNPEINGVEYQQGTLQGYEVREYLLEKFGRKCCYCGKENVPLEVEHIIPKSRGGTDRVDNLCLACHDCNQRKGSKTAEEFGYPHIQKQVKESLKDASAINSTRWKAYEVLKQTGLDVECGTGARTKMNRIRLDLPKTHYFDACCVGESTTNHLYFKTKEVLFIKAKGRGSRSRTNLDRYGFPRGYLARQKFFFGFQTGDMVKAVVPRGKYQGVWFGEVACRKTGSFDIKGKDGKRIAQGINYRYVQVIQRFDGYAYGKGGAELA

SEQ ID NO: 11121 - protein, 411 aa, unidentified; identical to SEQ ID NO: 6901

SEQ ID NO: 11122 - protein, 427 aa, unidentified; identical to SEQ ID NO: 3216

SEQ ID NO: 11123 - protein, 432 aa, unidentified; identical to SEQ ID NO: 6070

SEQ ID NO: 11124 - protein, 312 aa, unidentified
SAPRFNNRVHGKHKGWLAPSVEVKIQEHITVIKRICRILPVTLVRVETAEFDTQRLKAMLAGKPLPVGTDYQLGEMYDKYNVRQYVLKRDNYTCQCCGAHTTAKKAVKLRVHHLESRKVGGNAPSNLITLCTTCHNALHKGKVSLDGKERGKPLRDTAFMGIMRKTLMTQLREELPIPVQGTYGYITKMRREQNNIKKSHVNDARCISKHPLAEPCSVCYRTKAIRHHNRQTHKANFSKGGIRKRSQMPYVVEGYRLWDKVLYNGQECFVSGRRASGSFTLKKLDGTRVSKGVTFKKLQLLEPATNYLIERM

SEQ ID NO: 11125 - protein, 423 aa, Moorena sp.; identical to SEQ ID NO: 2845

SEQ ID NO: 11126 - protein, 535 aa, unidentified; identical to SEQ ID NO: 6116

SEQ ID NO: 11127 - protein, 470 aa, unidentified; identical to SEQ ID NO: 2925

SEQ ID NO: 11128 - protein, 431 aa, unidentified
MPNKVYVINKHGRPLMPCSPAKARHLLDAGKAKVKKRTPFTIQLVYGSSGYTQEVILGVDAGSKTIGVSALTKKEELFAANVIPRNDVVDLLSTRREFRRARRNCKTRYRKPRFDNRVRSKHKGWLAPSVEVKIQGHITAIRRVCGILPVSKVVVETAEFDLQLLKAIEKGKPVPQGEDYQQGEMYGHYNVRQYVLWRDDYTCQCCGAHTTKKKEVRLHVHHLESRKTGGDAPSNLITLCDSCHEKLHKGLIAEKDFKKRKRRSTWDATFMGIMRKTLMQRLCSELPIHVVETRGYITKATREKLLVLPKSHINDALAIAQGKHGFNVGYLPGILQIDMIYTIRPVRHHNRQLHKATILKGGIRKSNQTGKYVFGYRLFDKVQFNGQDCFIWGRRTTGIFTIKTINGKMIKDGISFKKLKPVEKSTSYLIA

SEQ ID NO: 11129 - protein, 456 aa, unidentified
MQRVFVLGKNKERLSPCTPARARKLLSKNKAAVFRQFPFTIILKERETGNTQPLYFKIDQGSKTTGISLVSINKNSNKVIYACNLVHRGHAISESLTKRRAIRSSRRSRKTRYRKPKWTNTMSKKQFEHINKRPKGWLAPSIKSRLDNTVNLFNKLNKLTPITNVSIENVRFDMQKINNPTISEIGYQQGDLFGFEVKEYLLYQHKHTCAYCHGLSKDPILEIEHILCKSKGGTNRLSNLSLACRKCNQDKGSLLPNEWLQKLSKSKSALNKKRFTLFSKVLKGVKPSLKDAAAVNSIRNALVNSFNLPIELGSGGLTKYNRKQNNYPKEHWIDAACVGLSGEEIHIPTSLIPVEIKANGRGSRQMCRIDKNGFPRTSAKKASNKFNFKTGDIVIAKVKKGKKQGTYLGRVAVRESGYFNITQKSGVVQGISYQYCQLLHKNDGYSYSNLVNLITT

SEQ ID NO: 11130 - protein, 456 aa, unidentified; identical to SEQ ID NO: 5876

SEQ ID NO: 11131 - protein, 426 aa, unidentified; identical to SEQ ID NO: 3201

SEQ ID NO: 11132 - protein, 461 aa, unidentified
VQPLYLGIDPGRTNIGVAVVKADGTAVFAAHLETRNKKIPKLMQDRKKARRARRTNGRRCRRQRRAKANGTISKKCVKQDTAQSKNPSKRAKEIGVIKRHLPGCKKDVLCVGIKNKEAKYTNRARLEGWLTPTANQLLQTHINLVKKIQKFLPISDVVLEVNKFAFMRLDNPNIQKWQYQRGPLYQKGSLENAVSEMQEHHCLFCEKPIEHYHHVVPKSENGSNTIANIVGLCAEHHNLVHKDVAWQEKLVEEKTGLNKKYGALSVLNQIIPALTKELSFLFPKHSFMTNGKSTHDYRAAHGISKDHWLDAYCIACSVLPIDVCDSTINNCVPYELKQFRRHDRRALNNENMNRVYTLNDKVVATNRHKATEQEAASLEEFRKEHPNDVCKLKVKEHHPTYRNMNRNYPGSVFLVGKQIHVMQGIASSKDGKATKYNDTRATTIAAGKCKFVAKNSGILFV

SEQ ID NO: 11133 - protein, 431 aa, unidentified; identical to SEQ ID NO: 2952

SEQ ID NO: 11134 - protein, 277 aa, unidentified
MPNKVYVINKHGRPLMPCSPAKARHLLDEGKAKVKKRTPFTIQLVYGSSGYTQEVILGVDAGSKTIGMSASTTKEELLSAEVKPRNDVVDLLSARREFRRARRNRKTRYRKPRFDNRVRSKHKGWLAPSVEVKIQEHITSIKRVCRILPVSKVVIETAEFDLQMLKTIADGKPVPQGEDYQKGEMYGHYNVRQYVLWRDNYTCQCCGAHANKKKEVRLHVHHLESRKTGGDAPDNLITLCESCHEKLHKGVIAEGDCKSVSVVPHGMPHSWASCGRL

SEQ ID NO: 11135 - protein, 431 aa, unidentified
MPDKVYVISRLGHPLMPCSPAKARHLLDDKKAKVVKRMPFTIRLLYGSTKYIQPIILGVDAGIKTIGLSASTAKEEVFAAEVMPRNDVVENLSTRREFRRARRNRTTRYRKPRSDNRVRSNHERWLAPSVKVKIQEHITSIKRVCTILPISKVVIETAEFDLQLLKAIQEGKPIPEGEDYQKGEMYGSYNVCQYVLWRDNYTCICCGVRGTPKNPVRLHVHHFESRKYGGNAPDNHGTLCDDCHKKFHLGIITDVKLKTRRRQSTRDAAFMGIMRKTLMWRLRTELFIPVAETKGYITKATREKLLVLPKSHTRDALAIAQGRHGFGIKEYAYVEPANHIYTVRPVRHHNRQLHKASILKGGIRKRNQASKYVFGFRLYDKVLYQGKACFVWGRRTSGTFLLRTIDGIKVKDGVSYRNLTLLERSSNYLIA

SEQ ID NO: 11136 - protein, 414 aa, unidentified
MPCSPAKARLLLKEKKAIVVRRTPFTIQLTIATGETKQPVSLGVDAGYKHVGLSASTEKAELYASEVELRQDITDLLSARRALRQSRRNRKTRYRAPRFDNRIRTKRKGWLAPSVENRINAHLSRIEAVLRLLPVTKITVETASFDLQLLKNPDIAGKEYQEGEQLGFGNIREYVLCRDGHVCQHCYGGSKDPVLNVHHLESRRTGGNSPDNLLTLCETCHKALHRGEITLKTKRGQSFRAETFMGIMRWEVLNRLKASHSELKVHNTYGYLTKHARIENGIAKSHGADAFCIAGNLGAERLGEFFFQKQTRRNNRQIHKLSILKGALRKRNQAPFEVKGFRLFDKVACQGEEGFIFGRRSSGFFDVRKLDGTRISAGISYKKLHLLEKRQTYLIEIRKEEAFPPLPEGRGLRA

SEQ ID NO: 11137 - protein, 450 aa, unidentified
MQKLSVELKNAPWGAPQAPRSASGGLNREVTLSGDRKVLADNGSDVDRQSGKTEQDPRVPVLNMRGEPLMPTTPGKARRLLDQDKAEVVCRKPFSIQLKYATGENKQPLKLGKDPGYEQTGISIVDKENEREVFGAEVRHRTDIPRKMLRRSKYRRNRRNRLWYRKPRFDNPKTEDGWLAPSVEHKLDSNVRLTEKLKELFPITETVIEVAKFDQQKMRNPEIEGIEYQHGTLYGYNVKHYLLEKFDYQCVYCGDEDVPLEVEHIVPKSRGGTDRVDNLTISCPDCNQEKGDQTAEEFGHPEVQERAKETLKETAFMNQVRWKLVDELDAEPTYGHITKKNRTDMDIEKSHINDAFVIAEGTDDMERCKHITSEQVRRNNRSLQITRKRYGRSIRKQRYDLQPNDLVRYESKEHRVKGVHCKGSRVVLDNGKSVSIKDVELVCYGKGLFS

SEQ ID NO: 11138 - protein, 423 aa, Lactobacillus sp.; identical to SEQ ID NO: 5050

SEQ ID NO: 11139 - protein, 425 aa, unidentified
MSNFVFVLDTHKRPLDPIHPGTARHLLNTGKAAVFRRYPFTIILKEACLDVPVQGLELKLDPGSKVTGIAVKRGNKIIFGAELQHRGQQIKDALLSRRQLRRSRRNRKTRYRQARFLNRTRPDGWLAPSLQHRADTVLTWVNQFRRLAPITSIAQELVRFDLQLMQNPEISGVEYQQGELQGYEVREYLLTKWNRKCAYCGAENVPLEVEHIQPRSKGGSDRVSNLALACHPCNQSKGNQDIRDFLSGKPDLLNRILKQAKLPLKDAAVVNSTRWALFNALKATGLPVATGTGGQTKFNRTRLDLPKSHWLDAACVGQVESLEVLTSKPLLIAAKGHGTRQMCRTDKFGFPSRHVPRNKFVKGFQTGDIVKAIVTTGKKVGTYVGRVAVRSTGSFNISTAQGLVQGINHKYCNPIHRKDGYSYAF

SEQ ID NO: 11140 - protein, 428 aa, unidentified
MSKVLVIDPDKKPQNPVHPAQARQLLRDSKAAIYRKFPFTIILKELRPDVSVHPLRIKIDPGAKTTGIAVVNDSTGEVVLAIELQHRGFQIRDALTSRRQLRRSRRNRTTRYRQPRFDNRKRPEGWLPPSLISRVCNIETWVNRLHNFAPISNISQELVRFDTQLMQNPDVQGKEYQQGTLAGYETREYLLEKFDRKCAYCDKKDVPLQIEHIHSRAKGGSNRISNLTLSCEKCNIKKGTQDIKDFLKKEPTRLKKIEQQCKKPLADTAAVNATRFKLLEVLKSTLIPVETGSGGLTKFNRSQRELDKTHWIDAAVVGTSTPEKLIIKNVKPLIVVAVGHGTRQMCRTDKYGFPNRYVPREKKHFGFQTGDIVKAVVKTGKKVGEYIGKVAIRSSGSFNISTKNGLVQGISYKYCKRIHAKDGYSYAV

SEQ ID NO: 11141 - protein, 442 aa, unidentified
MSTSVFVLDKKHRPLMPCRPARARRLLRAGRARVVKRFPFVIRLVDRTVEQSEVQPVLIKLDPGSRETGAAVVRDDEKKRHHALAFFVIKHRGGAIRDALKARSAFRRRRRSQNFRCRSPRFLNRVKPKGWLPPSLRHRVETTLSFVRRMCRYLPVSGIAAELVKFDSQKLQNPEVSGVKYQQGTLFEYEVREYLLEKFGRKCVYCGAEGVPLNIDHVVPRAKGGSNRVSNLVLACVSCNQKKGARSLEDFLKGKPEVLARVRRELKTPLRDAAAVNATRWVLFNELKATGLPVETGSGALTKFNRHAFGVEKEHWLDALCVGRLNGVVTRKGLNVLEIRCMGRGSRQRTRLTKYGFPRGYLMRQKCVHGFATGDMVEANVPKGKKAGLWRGRVAVRVSGSFNIQTPKGVIQGVGWKHCRLISHNDGYGYAWLGHAPHSSPA

SEQ ID NO: 11142 - protein, 933 aa, Streptomyces sp.; identical to SEQ ID NO: 10486

SEQ ID NO: 11143 - protein, 450 aa, unidentified; identical to SEQ ID NO: 2935

SEQ ID NO: 11144 - protein, 414 aa, unidentified; identical to SEQ ID NO: 2588

SEQ ID NO: 11145 - protein, 427 aa, unidentified
LRVFVLNKRGQPLMPCSPAKARLLLKERKAIVKRRTPFTIQLTIATGEAKQPVMLGVDSGYKHIGLSATTEKAELYASEVELRQDITDLLSARLALRRSRRSRKTRYRAPRFDNRVASKREGWLAPSVENRIAAHMSRVEAVMQVLPVTAITVETAAFDTQLLKNPDIIGAAYQQGEQLGFWNVREYVLFRDGHVCQHRRGKSKDPILNVHHIESRRTGGDAPNNLITLCETCHKALHRGEIKLKVKRGKSFKAETFMGIMRWTFFERLKKAHPELNVRNTYGYLTKHKRISYGIAKSHCADAYCIADNLGAKRLEGFFFQKQTRKHNRQIHKLSILKGGLRKKNQAPYEVKGFRLFDKVMCKGEEAFIFGRRTSGSFDVRRLDGTRISAGINYKKLRLLEPRTTYLTEFRKEAALPPLHECRGFRA

SEQ ID NO: 11146 - protein, 415 aa, unidentified; identical to SEQ ID NO: 2674

SEQ ID NO: 11147 - protein, 430 aa, unidentified
MPKVYVLNRHGRPLMPCTPAKARHLLDAGEAKVRHRTPFTIQLLYGSTGYTQEVILGVDAGSKTIGLSAATETEELFSAEVKPRNDVVELMSARRQFRRARRNRTTRYRKPRFDNRVRSKHKGWLAPSVEVKIQEHMTAIRRACAILPVSKVVVETAEFDLQLLKAVAEGKPVPQGEDYQKGEMYGHYNVRQYVLWRDSYTCCICGVHGSVRKGVPLHVHHLESRRVGGDAPDNLVTLCTACHDKLHKGIIMAADIKKRKRRSTRDATFMGIMRMTLLRRLREQLPVPVVETRGYITKATRENLLVLPKSHANDALAIAHGPQGFRAEHLPNIRQADRLYTIRPVRHHNRQLHKATILKGGVRKTNQAEKYICGFRLYDKVLYNGIECFVWGRRTSGSFLLRQLNGEKVKDGVSYKHLKLLERSQSYLVA

SEQ ID NO: 11148 - protein, 420 aa, unidentified; identical to SEQ ID NO: 3247

SEQ ID NO: 11149 - protein, 431 aa, unidentified; identical to SEQ ID NO: 2977

SEQ ID NO: 11150 - protein, 421 aa, unidentified
MIYVRSKDGKALMPSERGGRIGYLLRHGKAHVVSRVPFVVQLDYESTTYTQEVSLGIDAGSKHIGVSASSEKKEQLAAQVELRSDVVNLLSTRRELRRARRNRKTRYRKVRFDNRKKKDGWLAPSIKQKVESHLKVIRLAHKLLPITKTTIEVAQFDAQKIKNPDIKGDEYQQGEQIGFWNVREYVLARDGHRCVHCKGKSKDPILNVHHLESRKTGGNSPSNLVTLCETCHKAYHCGEFDLKIKRGTALRDAAVMNIMRWAVYERAKEEFGNVNLTYGYITKHTRIENGIAKTHAADAFCIAKNVNAMRLSFFFMCRCVPRHTRVLHVANPKKGGIRRSTIASHKIGKSRFQRFDMVRWKGKECFIFGSTNGRPILRYIEGIQVANQLSVNIKAIKFLKRIRYNILVEERTSESWIENES

SEQ ID NO: 11151 - protein, 430 aa, unidentified; identical to SEQ ID NO: 9911

SEQ ID NO: 11152 - protein, 512 aa, unidentified; identical to SEQ ID NO: 4031

SEQ ID NO: 11153 - protein, 426 aa, unidentified
LAKDLYRSIDREETNLRVYVLNKRGEPLMPCSSAKARILLKEKKAVVKRRTPFTIQLTIATGETTQPVTLGVDAGYKHVGLSASTKKAELYASEIELRQDVSELLAGRSALRHARRSRKTRHRAPRFDNRKRDKGWLAPSVENRIGAHVSRVEAVLRILPVTKIIVETASFDVQRLKNPDIQGVEYQQGEQLGFWNVREYVLFRDGHECQHCHGKSKDKVLNVHHIESRRTGGDAPNNLITLCETCHKAFHRGEIELRVKRGRSFQAETFMGVMRWTFFERLRARHSEIEVRNTFGYLTKNTRITHGIEKTHCADAFCIAGNLKAKRLGYYFFQKQTRRHNRQIHKLTILKGGARKRHQTPYEIKGFRLYDKVLFQGKTAFIFGRRSSGYFDIRTLDGERISASVSYKKLRLLEKRRTYLIELRRN

SEQ ID NO: 11154 - protein, 408 aa, unidentified; identical to SEQ ID NO: 10304

SEQ ID NO: 11155 - protein, 418 aa, unidentified; identical to SEQ ID NO: 8891

SEQ ID NO: 11156 - protein, 477 aa, unidentified; identical to SEQ ID NO: 2707

SEQ ID NO: 11157 - protein, 406 aa, unidentified; identical to SEQ ID NO: 2703

SEQ ID NO: 11158 - protein, 465 aa, unidentified; identical to SEQ ID NO: 10623

SEQ ID NO: 11159 - protein, 544 aa, unidentified
MKQKKQKVMVYILNKKGKPLMPTTRCGHVRKLLNSKKAVVVNSNPFTIRLKYDTPNGVQDVFAGIDSGRENIGSGVSNEDGDCLYLGELKTSNKSIKLKMTERAGFRKERRRHDRQNKQRKARKDHTEIQNGNADICRTTISCKSVQISYPAAEKSVTHKIIRGKEGKFANRHRDEGWITPSARQLVQMHMNDLKSMCKILPISHVTLERVAFDFQKLENENIKVWEYGKGKLYGYDSPEEYIHDVQDGKCLVCGKPHIDYLHHIIPRSKGGSDKVSNIAGLCYDCHYGPMGVHNCRETQDRLPELKNEANKQYKVNLLNSVMPVLIEEMDKFCKANSIIFSICEGHDTAKVRDMYDLQKDHCLDGFAISLVGRNVKSVDVMPDRIYQKQRYKKKSKNIIQKRNCREYYDGKKLVAVNRHKGTDQKADSLEEYMNTYAETHTADECKKHFDSLTVKPARRTYTFHKKGCICPFHIGDKVRYEKKNKIKGNTKVETFICESIHFYKDKNKAKVEHNKTKSKRMKFCRVLEAGCTPYIDYRKLALM

SEQ ID NO: 11160 - protein, 512 aa, unidentified
MSTVYVLNKDGKPLMPTTRCGHVRHLLKEQKARAVTSKPFTIQLLYETDDVVQPLYLGIDPGRTNIGVAVVKADGTAVFTAHLETRNREIPKLMKKRKDSRRTRRTNGRRCRRQRRAKANGTISKKCVKQDTAQNGSVSKRAKKIGVIKRHLPGCEKEVLCIGIKNKEAKFSNRVRPEGWLTPTANQLLQTHINLVKKIQKFLPISDVVLEVNKFAFMQLDNPNIQKWQYQQGPLYQKANLEEAVSEMQEHHCLFCKKPIAHYHHVVPQSENGSDTIGNIVGLCTKHHDLVHKDTEWQKKLAKKKTGLNKKYGALSVLNQIIPALTKELSSLFPKHFFATNGKSTYDYRAAHGVSKDHWLDAYCIACSVLADDVCDNNINSHVPYELKQFRRHDRRALHKENMSRVYTLNGKSVATNRHKATEQTTDSLEEFRQRQPNDVCKLKVKEHHPEYRNPKRNFPGCVFLVGKHTHVMQGTSGSHNGKADGYYDTNGNSYSSGECKFVAKNGGIVFA

SEQ ID NO: 11161 - protein, 421 aa, unidentified
MRGQPLMPCSPAKARHLLKAGKAVVKRRTPFTIQLRIATGETKQNVTLGVDAGAKHVGLSATTEKEEVFASEVELRQDITGLLAARLSLRRERRQRKTRYRAPRFLNRVRSKHKGWLAPSVENRIQAHMSRIDAICGLLPVTKIVIETASFDIQKIKHPDVEGTDYQQGDQLGFWNVREYVLFRDGHVCQHCHGHAKDKILNVHHLESRQTGGDAPNNLITLCETCHKAYHAGKIKLKVKRGQSFKAETFMGIMRWTLLDRVRKAHPDLPVENTYGYLTKNTRITLGLRKTDCIDAYCIAGNLNARRRGVFLYQRQVRKHNRQIHRCTVLSKTLKDGTKVGYRKLNQTPYLVKNFRLFDKVRCLGQTGFIFGRRSSGSFDVRRLDRVKLSSNISYKKLTLLEKRRTFLTELRKEDGASSPV

SEQ ID NO: 11162 - protein, 422 aa, unidentified; identical to SEQ ID NO: 5457

SEQ ID NO: 11163 - protein, 431 aa, unidentified
MPNKVYVINKHGRPLMPCSPAKARHLLDAGKAKVKKRTPFTIQLVYGSSGYTQEVILGVDAGSKTIGMSASTTKEELLSAEVKPRNDVVDLLSTRREFRRARRNRKTRYRKPRFDNRVRSKHKGWLAPSVEVKIQEHITSIKRVCRILPVSKVVIETAEFDLQLLKAIEEGKPVPQGEDYQQGEMYGHYNVRQYVLWRDGYTCQCCGAHATKKKEVRLHVHHLESRKVGGDAPDNQVTLCESCHEKLHKGLIAEKDFKKRKRRSTRDATFMGIMRKTLMQRLCSELPIPVVKTRGYITKATREKLLVLPKSHTNDALAIAQGKRGFNVGYLPEIAQIDKIYTIRPVRHHNRQLHKATILKGGIRKSNQTEKYVFGYRLFDKVQFNGQDCFIWGRRTTGIFTIKTINGKMIKDGISFKKLKPVEKSTGYLIA

SEQ ID NO: 11164 - protein, 494 aa, unidentified; identical to SEQ ID NO: 5675

SEQ ID NO: 11165 - protein, 476 aa, unidentified
LEVVGTEGVSHPGLPGKYKHKGGQLMSVAVISKTVERLMPTSEYRARKLLKSGKAIKHSYHPFTIQLTERETGDIQLIELCMDTGYIHIGISVKSKKHEYLAEQIDTLTDERGRHDACRMYRRQRRSRKRYRQARFNNRKRDQGWIAPSLEHKKKIHIQAISRINKVMPITDITMEMGNFDTQVLKAKEEGKPLPQGAEYQHGERYGIATLREAVFARDGYKCQCCGRTIKDGAILHVHHIKYRSQGGTNSMSNLATVCDKCHTPKNHKPGGKLYNWKPKLPSFKGATFMTTIRWQLYSEVKALFSDIDIYIAYGAATKERRRELDIDKSHINDAFVMGQFHPKHRIKAVLYKKKRRNNRCLEKFYDAKYIDSRDGKKRSGQELFNGRINRNHKKDSENLHQYRLQKVTAGKRTVRKQHYKIQPHDIVIYENRKRETAGCHCNGTRMMLLPDKKSASIKKVKIYRYAGGYFKSAFN

SEQ ID NO: 11166 - protein, 419 aa, Bacillus sp.
MVYVLTQDRRPLMPCSSAIARLLLKQGKAKVKRRTPFTIQLRYKTDTEYVQTLTHGVDTGSAKVGSAVADEKGNVLYLSQIEIRNDITDKMKQRSKYRRNRRNRKTRYRKARWLNRKNSIKKNRFSPTMTSKINAHLKEMKFVSTILPITRQIVETATFDPHVLKNPAVLTNKWLYQKGLNYGYANTKAYVLTRDAYRCQHCKGKSKDKRLEVHHIIFRSMGGSDEESNLLTLCKTCHDALHHGKIELKKRGKKKGQLNHATQMNSIRIQLLRQTNAEETFGFITKEHRQLTRLPKEHYFDAVAVATKGVTPTFKSNNILFKKCVSDGDYQQTKGVRSEQKIPMRKLFGFRKFDKVQYKGEKYFIKGRMSSGYAILMDIEGNKVPLKPIPKFSKMQRVSARTSWITIQKTIPSFYLCAT

SEQ ID NO: 11167 - protein, 455 aa, unidentified
MSVFVISKNGKRLMPTVRYGLVRHMLKDGRAVIYCRKPFTIQLTYVSSKYIEPLELCIDTGAQHIGISLKSNKREFVSEQRDLFKDEKEKHDGCRMYRRTRRSRLRYRKPRFNNRVSSKKEGWFAPSLKNKADQHIMLIQRLTALAPIKDIYLEVGSFDTQLLDAIAKGLPIPEGTDYQQGALYGEETLRKAVFQRDNYTCQVCGRTIKDGAKLHTHHFLYWKGRHGDRLDELCTVCEKCHTSANHQKGGKLYGWGTDKHFKSYVAAAFMNIVRWYIVNQVKVLVSDAKVHTTYGAATKLARKDLNIEKSHVNDAYAMGRLHPNIRCKTEYYKKVRRNNRCLEKFYDAKYIDVRDGKKKSGKELGCQRTNRREPRMSENNLRIYHGQKVSKGRRSIRKQRYSIRPGDVVLFNGQKYLSAGCHCNGARTILNTGKSVSIKKVQIICHIGGWIKTKQ

SEQ ID NO: 11168 - protein, 494 aa, unidentified
MTMVYVQNKDGKPLMPTTRYCYVRLLLKEKKARVVCTTPFTIQLNYDTPDITQDLILGIDPGRTNIGVAVVKEDGSCVFSAHLETRNKDVPLLMQKRAAFRRNHRTLDRRRKRQRRAKAAGTTIAEGSVERLLSGYEKPIVCHHIRNKEARFNNRSRPAGWLTPTANHLLQTHINLIAKIAKVLPITKVVVELNRFAFMAMDNPNIRRWEYQQGPLYGLGPVEDAVYAQQDGHCLFCKKPIDHYHHVVPRHKGGSETLANRCGLCEKHHALVHKDKAWAEKLVTRKGGTNKKYHALSVLNQIIPHLMEYLGSETPYDVYATDGKSTKGFRVAKNVPKEHYTDAYCIACSIWDADTKVSAPVEPFELKQFRRHDRQSCIRQMVDRKYLLDGKVVATNRHKSIEQKSDSLEEFREAYGDPAVSQLTVRPHLPQYKDMTRIMPGAVMDFDGIVGVFQGSEGFHNGKPDYYKSTKGAKVSTKRCALLAQNAGMVFIPA

SEQ ID NO: 11169 - protein, 465 aa, unidentified
MSTCVCVLSNNGERLMPTIRLGKVRHLLKDGKAKIIKHHPFTIQLLYDSKTNTQPIEICEDVGYNYIGISVKSEFHEYVSVQYDTLQDEKDCHDGCRRVRRSRRNRLRYRQARFDNRKRDDGWLAPSFEHKKELNVNVIKMYCKVMPITHAIVEVGSFDTMLVKAIEEGKATPESADYQKGPRYKLATLREAVFYRDNYTCQVCGRKANEGAILHVHHMFYWKGRHGNSLSELITVCEKCHTPANHQKGGKLYGFGEDIKFANLSGVAFMNTVRWQIVNVLYAAFGKPFVTFTYGAMTKEKRIALHLEKSHNNDAYAMGSFHPVNRCAFEHYEKVKRNNRILEKFYDSQYIDTRTGELTNGKSLFNGRISRSHKKDSENLHKYRGKRICKGHRALRRKKVALNPGDLVSLNGEILVVHGTHTKKNGSVNVEFKIPSRGGKKSASLKKLKIVKTSNLMHSAWTKVS

SEQ ID NO: 11170 - protein, 419 aa, Moorena sp.; identical to SEQ ID NO: 2658

SEQ ID NO: 11171 - protein, 420 aa, unidentified; identical to SEQ ID NO: 4992

SEQ ID NO: 11172 - protein, 420 aa, unidentified
MQYVYVLNKHGKPLMPCSPGKARLLLKQQKAHVVKRTPFTIKLLYGSAGYKQHITLGVDAGSKHVGLSASTEKLELYCEEFTPRNDVVDLLSTRRAFRRSRRNRKTRYREPRFDNRVHSKHKGWLAPSVEVKIQEHITVIKHICKILPITLVRVETAEFDTQRLKTMLEGKPLPVGKDYQLGEMYDEYNVRQYVLKRDNYTCQCCGVHTTAEKMVKLHVHHLESRKTGGNAPSNLITLCTTCHDALHKGKVSLDGKERGKPLRDAAFMGIMRKTLMGRLREELPISVQGTYGYITKMRREQNDIKKSHMNDALCIAKHPKAQHCENSYRSKAVRHHNRQIHKAKMLKGGIRKLNQAPYIVKGFRLWDKVLYNGQECFISGRRSSGYFALRKLDGTTITNSASFKKLQLLEATSSYLIERM

SEQ ID NO: 11173 - protein, 404 aa, Salipiger sp.; identical to SEQ ID NO: 11115

SEQ ID NO: 11174 - protein, 431 aa, Calothrix sp.; identical to SEQ ID NO: 5518

SEQ ID NO: 11175 - protein, 420 aa, unidentified; identical to SEQ ID NO: 3089

SEQ ID NO: 11176 - protein, 512 aa, unidentified
MSTVYVLNKDGKPLMPTTRGGHVRYLLKEKKARVVTSKPFTIQLLYETDDVVQPLYLGIDPGRTNIGVAVVKTDGTAVFTAHLETRNKEIPKLMQGRKKARRARRTNGRRCRRQRRAKANGTISKKCVKQTTAQNGSVSKRAKKIGVIKRHLPGCEKKVLCIGIKNKEAKFSNRTRPEGWLTPTANQLLQTHINLIKKIRKFLPVNDVVLEINKFAFMQLDNPNIQKWQYQQGPLYQKASLKEAVSEMQEHHCLFCKQSIVHYHHVVPQSENGSDTIGNIVGLCTKHHDLVHKDTAWQKKLAKKKTGLNKKYGALSILNQIIPALTKELSSLFPKHFFATNGKSTHDYRAAHDVSKDHWLDAYCIACSILPNDTCDKNINGRVPYKLKQFRRHDRRALHKENMSRVYTLDGKKVATNRHKAIKQTTDSLEEFRQRQPNDVCKLKVKEHHPEYRNPERNFPGCVFLVGKHTHVMQGTSGSHNGKADGYYDTNGNSYPSGKCKFVAKNKGIVFA

SEQ ID NO: 11177 - protein, 436 aa, unidentified
MNRVFVLSSIKKPLMPCTPARARRLLRDGKAAVYRLQPFTIILRFRADGDTQSIGFKTDPGSKTSGIALVAESQSGRQVIWAANLQHRGQAVRANLAARRALRRGRRSRNTRYRAARFQNRTRPTGWLPPSLESRVGNLRTWYSRLLGFTPITSAEVETVRFDTHALAHPGIQGVEYQQGTLAGTEVREYLLEKWQRTCAYCGKTGVPLQVEHIQPRSKGGSNRISNLTLACEPCNTRKGNRPLAEFLAAKPEQMRRIQTQANAPLRDAAAVNATRYAIGNAIRTFGLPTGFWSGGRTKFNRTCQGYPKDHWIDAACVGETGAAVHVPQGFRPLSIKATGRGTRQVVRTDRYGFPRGAAGRCKRVFGFQTGDLVRLEQPAGKYSGTHVGRLAGIRADGRFDIKTASAQITSTYQRFTLLQRSDGYEYQIKSGERAG

SEQ ID NO: 11178 - protein, 447 aa, unidentified
VPAYRIKHITKKEVPYMVYVLDIDGQPLMPTSRHRKVRKLLNSHLAKVAKRCPFTIQLLYQSTKETQPVSLGVDAGSRHIGLAATTEQKVVYQEELVPRNDVVKLLSARRALRSSRRSRKTRYRKPRFNNRVHSKHKGWLAPSVEVKIQEHITAIKRICQILPISDIHVETAEFDLQRLKAMEEGRPLPVGTDYQLGEQYDFYNTRQYVLHRDEYTCQCCGTHDNNVKLHVHHIESRQTGGDVPNNLITLCEHCHKLLHAGKTIIPKGKKRGKSYRDATFMGIMRKTLLERLKKEIDVPVEGTYGYITKYWRERAGLEKSHIHDAVCISKYPYAKPLDIYYLTKTVRHHNRQIHKSNFSKGGIRKRNQAPYLVKGFRLFDKVLYQGKSYFIFGRRATGFFDIRTLNGAKVNKGSISYKKLRIQDTANAYLKEIKAIPHMNKFTCVLA

SEQ ID NO: 11179 - protein, 470 aa, unidentified; identical to SEQ ID NO: 2949

SEQ ID NO: 11180 - protein, 425 aa, Arthrospira sp.; identical to SEQ ID NO: 5602

SEQ ID NO: 11181 - protein, 428 aa, unidentified; identical to SEQ ID NO: 7211

SEQ ID NO: 11182 - protein, 442 aa, unidentified; identical to SEQ ID NO: 3218

SEQ ID NO: 11183 - protein, 427 aa, unidentified
MRVFVLDKNRKPLDPCHPAKARKLLKSGKAKVLRRYPFTIIIKDLEVENCVTHDHQLKIDPGAKTTGLAIVQGNRVIWGAELTHRGEHIREALTSRRQLRRSRRNRKTRYRQPRFLNRTRSKGWLPPSLMSRVHNVLTWVNKLIKFCPISGISQELVRFDTQKMLNPEISGIEYQQGTLYGYELREYLLEKWDRTCAYCGAKNTRLEIEHIKPRSKGGVNRVSNLAIACHDCNQAKGNLEIEEFLSSKPSILKRILSQAQKPLADAAAVNATRWKLYNELKLIGLPVEVASGGLTKYNRCRQNLPKTHWLDAANVGKVDTLYIEDYQPLLIAAKGHGKRQICGTNKYGFPIRHNSRKKIHKGFQTGDIVRSVVTKGKKIGTYIGRVATRKTGSFDITTALARVSGISYKYCQAIHRKDGYSYQFHGG

SEQ ID NO: 11184 - protein, 373 aa, Moorena sp.; identical to SEQ ID NO: 3006

SEQ ID NO: 11185 - protein, 424 aa, unidentified
MRVFVFNMRGRPLMPCSQRKARLLLRENKAMIYKYHPFTIQLTYTTGETKQDCHIGIDTGSKYIGAAVRSEDKVFWKGEIELRQDIRSNLDTKRIYRRSRRNHKTRYRKPRFLNRKRRDEWLPPSLQSRINHTFHWIDTLSSLVPNPILHIEVGKFDVAKMINPEIHGVDYQHGQTYGFFDERYFVFARDNYTCQCCGKSKNKILNTHHIIYRSNGGTNRVDNLITVCTDCHTLQNHRKGGIFYQWQEQHKKVKQYKEPPFMNTLRKRIFVAYPDAEITYGSETTPKRKAMKLDKTHYNDAIVISGINEIKENPEEWLLIKQFRKKKRSLHEATARKGRKKPNRNQTRNSKNTPYYKGFYLNDKVSVFGKSGYITGFTSNAAYIKDENNDYITLPNKTYKQVSINKMKLECHNNNWQYIIKNAV

SEQ ID NO: 11186 - protein, 355 aa, Arthrospira sp.
  VARIANT 169: note = X can be any naturally occurring amino acid
  VARIANT 350: note = X can be any naturally occurring amino acid
MSNHIFVLDTNRKPLTPCKPGMARSLLKAGKASVFRRYPFTIILNKEVDANPEPLELKLDPGSKVTGIALKQGNHIIFAAELQHRGQQIKEALLSRRQLRRSRRNRKTRYRPARFLNRTRPEGWLAPSWQHRVDTLMTWVHRFRRLAPVGRITQELVRFDLQLMENPEXSGVEYQQGELQGYEIREYLLEKWGRTCAYCGAQNVLLEVEHIQPRSKGGSDRVSNLTMACHSCNQAKGNGDIRDFLSGQPDVLSRLLRQAKSPLKDAAAVNSTRWALFKALKATGLPVTTGTGGQTKFNRLRLNLPKAHWLDAACVGPVESLEVLTSKPLLILAKGHGTRQMCGTNKYGFXTRHRS

SEQ ID NO: 11187 - protein, 531 aa, unidentified; identical to SEQ ID NO: 4135

SEQ ID NO: 11188 - protein, 419 aa, Anoxybacillus sp.; identical to SEQ ID NO: 5328

SEQ ID NO: 11189 - protein, 323 aa, unidentified
TRYRAPRFDNRIRTKRKGWLAPSVENRINAHLSRIEAVLRLLPITKITVETASFDMQRLKNPDISGKEYQEGEQLGFWNVREYVLFRDGHVCRHCHGRSKDPVLNVHHLESRRTGSDSPDNLITLCVTCHKALHRGEITLKAKRGQSFRAQAFMGIMRREVLNRLKASYPELKVHETYGYLTKHARIANGIVKSHGADAFCIAGNLGAERLGEFFFQKQTRRNNRQIHKLSILKGGIRKRNQAPFEAKGFRLFDKVACQGEEGFIFGRRSSGSFDVRKLDGTRISAGISCKKLRLLEKRRTYLTEIRKEEALPPLPEGRGLRA

SEQ ID NO: 11190 - protein, 493 aa, Erysipelotrichaceae sp.
MSMTKLDRELHDADFIYIISADGYPLMPTRRRGHVKRLLNHGKARIVLHVPFTVQLKYKSPEKTQPVYAGIDPGRTNIGVSAVTEDGECIYRAHVSSRNRDVPKKMKKRRECRRASRRGERLRRKRRAKRNGTVTSFPNGRMLPGYEKPVMVKDIINETVRFIYRKRPDGWLTSTARQLVQTHESIVRLVSSILPVTEWTLEVNKFSFMQMDSGRCYGADFRNGRMKGYEGSHEYVYARQGGVCPFCGKPIEHYHHMIPRSMGGSDLPENLIGLCRNCHEEIHLGRLSTKTEGIMKKYGALSVLNQAIPFIVRRLADKYGEEHVHFCTGKDTHAMRTAMHMPKDHDTDVVCIACTGMNVIPSASLPKKFEVMQFRRHDRALIKSQRERTYMLDGETVCKNRHRRFEQKCDSLDEFRKEHPKLVSELNVSKSVRYYNNPDRLMPGAVFLFGGERHVLQSQLTGGKYYRAVGCGKKSFPSAKCTVIRCNSGLVYI

SEQ ID NO: 11191 - protein, 420 aa, unidentified; identical to SEQ ID NO: 6017

SEQ ID NO: 11192 - protein, 431 aa, Klebsiella sp.; identical to SEQ ID NO: 2435

SEQ ID NO: 11193 - protein, 434 aa, Anoxybacillus sp.; identical to SEQ ID NO: 3421

SEQ ID NO: 11194 - protein, 544 aa, unidentified
MKQKKQKVMVYILNKKGKPLMPTTRCGHVRKLLDSKKAVVVNSNPFTIRLKYDTPNGVQDVFAGIDSGRENIGSGASNEDGDCLYLGELKTSNKSIKMKMTERAGFRRERRRHDRQNKQRKARKDQTEIQNGNDDICRTTISCKSVQISYPAAEESVTHKIIRGKEGKFANRHHDEGWITPSARQLVQIHMNDLKSMCKILPISHVTLERVAFDFQKLENENIKVWEYGKGKLYGYDSPEEYIHDVQDGKCLVCGKPHIDYLHHIIPRSKGGSDKISNLAGLCYDCHYGPMGVHNCQGTQDRLPELKNEANKQYKVSLLNSVMPVLIEEMDKFCKVNSIMFSICEGHDTAKVRDVYDLKKGHCLDGFAISLVGRNVKSVGVMPDRIHQKQRYKKKSKNIIQKRNCREYYDGKKLVAVNRHKGTDQKADSLEEYMNTYAETHTADECKKHFESLTVKPAKRTYTFHKEGRICPFHIGDKVRYEKKNKIKGNTKVETFICKGIHFSKDENKSKVEHNKTKSKKMKFCKVLESGCTPYIDYKKLGLA

SEQ ID NO: 11195 - protein, 545 aa, Actinomadura sp.; identical to SEQ ID NO: 8502

SEQ ID NO: 11196 - protein, 416 aa, unidentified
LVYILSKNGNPLMPTSRHGKVKHLLKDGMAKVVRRTPFTIQLLYDSPEYTQPITLGVDAGSKVVGLSATTEKKELFVSEITLRDDIPELLSTRRQNRRTRRNHLRYRMARFLNRTASKKEGWLAPSIKHKVDSHLKVIGNVHRILPISRIVIETASFDIQKIRNPEISGREYQQGEQLGFWNTREYVLWRDKHECQHCHGKSKDRILNVHHKESRKTGGDSPGNLVTLCETCQKSHHEGRIKLKLTPNKSYRHASFMGIMRWYVYNSLQELYPEVSMTYGYITKNNRIRNNIEKTHSADAYCISGNMNAIRIDEIYNQVFKRKHNRQIHKANFLKGGKKKLNQSAYEVKGFRLFDHVRYRDEDCFIFGRRISGYFDLRKLDGSVVHRSASFKELKLLKRQNTILIERKGCNRVLLS

SEQ ID NO: 11197 - protein, 413 aa, unidentified
MVYVLNVNGQPLMPTENHAKVRVLLKQGKAKVVNNCPFTIQLLYSSMNYTQPVTLGVDAGSKHIGLSATTDDRELYAADVELRNDIVKLLAARRASRRSRRNRKTRYRKPRFNNRKRDKGWLAPSIKEKIGTHLKVVDDTCKLLPVSKIIVETASFDIQKIKNPDINGTDYQQGEQLGFWNVREYVLFRDGHKCQCCKGKSKDKILNVHHIESRQTGGNAPNNLITLCETCHTGYHKGIVKLPAKIKRGMKFNDAAFMGIMRWAFYGELKKRYPDVSLTYGYITKNTRIENGLPKEHYVDARCISGHPLARPLGTVFYIKKVRCHNRQIHKFTILKKGVRKRNQTEYEVYGFRLYDKVSWKGQTCFVFSRKSTGYITLRLLDGTRVKESASYKKIKLLRMRSGYLIELRNVID

SEQ ID NO: 11198 - protein, 465 aa, unidentified; identical to SEQ ID NO: 8068

SEQ ID NO: 11199 - protein, 411 aa, unidentified
MVYVQDIDGKPMMPTTRHGKVRRLLKDNKAVVVNTCPFTIKLTYKTSDYKQEIVLGVDAGTKHVGLSATTKSKELYASEVILRSDVVDLLSTRRGLRRTRRSRLRYRKQRFNNRVKSKKDGWIAPSVRHKIDSHVRIISFVYSILPVSKLIVEVAQFDTQKIKNPEISGKEYQEGEQLGFWNVREYVLARDGHKCQHCKGESKDPILNIHHIESRKIGGDSPSNLITLCETCHKEFHKGNIKLKVSRGKSLRDAAVMGIMKWKLYEELKSRYDNVSMTFGYITKYNRINHGIEKSHVSDAFVISRNFNSCRLGYYYKRKLVRRHNRQIHKMKILKGGIRKRNQAPFKVFGFRLFDKVMFQGEEHFIYARRLSGQFNIRDINGENKKDVSCKKLKYVSHGLVSVKTNLFLSQ

SEQ ID NO: 11200 - protein, 346 aa, unidentified
LYSQSKIAQSAQEYGVCRGGIENRRSRRNRKTRYRPPRFDNRVHSKHKGWLAPSVEVKIQEHITVIKRICRILPITLVRVETAEFDTQRLKAMLEGKPLPVGTDYQLGEMYDEYNVRQYVLKRDNYTCQCCGAHTTAKKAVKLHVHHLESRKMGGNAPGNLITLCITCLDALHKGKVSLDNKKRGKPMRDAAFMGIMRRTLMSRLREELPITVQGTYGYITKMQREQNDIKKSHVNDARCISKHPLAEPCSVCYRTKAIRHHHRQTHKANFSKGGIRKRSQMPYVVEGYRLWDKVLYKGQECFVSGRRTSGSFTLKKLDGTRISKGVTFKKLRLLEPATNYLIERM

SEQ ID NO: 11201 - protein, 422 aa, unidentified; identical to SEQ ID NO: 9550

SEQ ID NO: 11202 - protein, 429 aa, unidentified
MLVYILRQNGQPFMPTERFGKVRRLLKEKKAKVVRREPFTIRLLYEPETDVVQECYCGVDTGSRHVGVAVISNDKVLYQSQTELRSDIKRKIDSRRQTRRSRRSRKTRYRKPRFLNRRNSIKKDRLPPSVKHKVQANIDEIEFCKKILPISDLILEVSQFDTALMKNPSLITEKVRHWGYQKGFNYGYSSRREAILHRDGYTCQCCGKKNCRLEVHHIIFRSNGGTDDENNLITLCENCHKGVHAGIVELNKKPKKSKGLKHATHMSIIRSQLLKKYPNAIETFGFVTTENRNHLKLKKDHYIDACVIASGGLEFKVLDVIYRKRRVPVQDRVLTKGIRGEQKLPTGKIFGFKKFDKVEYLGEICFIKGRRSSGAFVLMDIDNNSIDFRDRGGKQNPFYRFVKRVNTRRSVLCISKRIEREVRLIPILS

SEQ ID NO: 11203 - protein, 426 aa, Bacillus sp.; identical to SEQ ID NO: 5544

SEQ ID NO: 11204 - protein, 521 aa, unidentified
MANLKLIDELLEKTEYIYVLGVDGKPQMPTNRKVRVRSLFKSGLAKIVDTVPFTIRLLYENDAVLQPITIAEDPGRTNIGAAVLTQLGDLVFSAVVETRNKSIKKLMTDRKAHRQASRRGERKARQRLAKKHGSMIKAGMMMRKLPQYAADKFVTCKIIKNTEARFCNRKRMPDWLTPTVNHLVQIHINLIKKIEKYLPITDVAIEVNRFAFIQMESPGISGVDFQNGPLKGFDDVKAAIREQQHGKCLMCKNDIEHFHHIVPRSRGGSDTIQNQAGLCKKCHAKVHTDAEFQAKLKDKKEGLIKKYGALSALNQAVPFICKELIKIYGVEHVHFCTGKDTSLIRSSLGYEKTKENQMHEVDAYCIGLAAIGADKINKIKHPSFVNVYKIKQFRRQNRSIINHQYERTYYLDDKKIATNRKPRFEQKGDAFSDWYSKQVELNGKKQADKSAGRVVVKKSRRNYNSRNRVMPGAVFSYDGKRLVLSGQTTRGKYYKAYGDPKTNYPAAKCQIYKHNEGLVFM

SEQ ID NO: 11205 - protein, 420 aa, unidentified
MQYVYVLNKHSEPLMPCSPRKARLLLKQKKACVVKRTPFTIKLLYGSTGYKQPITLGVDAGSKHIGISAATEKYELYCEEATPRNDVVDLLSARRAFRRSRRNRKTRYRAPRFNNRVHSKHKGWLAPSVEVKIQEHITLIKRVCRILPVTFVRVETAEFDTQRLKAMLEGKPLPVGTDYQLGEMYDEYNVRQYVLKRDNYTCQCCGAHPTKTKAVKLHVHHIETRRTGGNAPNNLITLCTACHKALHAGKVTLDGKKRGRSLKDAAFMGVMRKTLMERLLKELKIPVQGTYGYITKYLREKHSIPKSHTNDARCISKNPLAIPCDTCYYTKAIRHHNRQLHKATILKGGICKANQAPYTVKGYRLWDKVSYNGSECFITGRRTSGYFALKKLDGTVVSNSASYKKMRLLEVATNYITERR

SEQ ID NO: 11206 - protein, 415 aa, unidentified; identical to SEQ ID NO: 6534

SEQ ID NO: 11207 - protein, 406 aa, unidentified
MVYVQDIDGKPMMPTTRHGKVRRLLKANKATVVNLCPFTIQLTYKSTDHKQPVTLGIDAGAKHIGFSATTEKEELFACETILRTDIVDLLSTRSQNRRTRRSRLRYRKPKFNNRVFSKKKGWVAPSVKQRIDSHLNEVNEIHKILPITKIVIEAAQFDTHKMKNPNISGIDYQNGEQLGFWNVREYVLFRDGHKCSYCKGKSKDLILNIHHIESRKTGGDSPSNLITLCETCHKEYHKGNIDLKVRRGKSLCGAAIMEIMKWRLYDELKSRYSNVSMTFGYITKYNRIKYGIEKSHTSDAFVISKNFNAKRIEYQYLKRLVRRHNRQIHKMKILKGGKKKNNQAPFEVFGFRLFDKVLYNNEINFIYGRRKSGNFNIRDFNGENPKDVSYKKLKLIRGKRHPIILK

SEQ ID NO: 11208 - protein, 423 aa, Lactobacillus sp.; identical to SEQ ID NO: 5050

SEQ ID NO: 11209 - protein, 414 aa, unidentified; identical to SEQ ID NO: 2588

SEQ ID NO: 11210 - protein, 424 aa, Planktothrix sp.
MSNFVFVIDTNKRPINPVHPAQARLWLTQGKATVFRRFPFTIILKTASTQITKPIQLKIDPGSQTTGIALVSEDAVIWGAELTHRGQAIKANLESRRSVRRVRRNRKTRYRQPRFLNRTRHKGWLAPSLEHRVQTTLTWVNRLRKFVPITGISQELVRFDTQALVNPEISGNEYQRGELAGFEVKEYLLAKWGRKCVYCGAENTPLEIEHILAKSRGGTDRVSNLTLACHPCNQKKGNQPIEKFLKNKPSILRRVLAQAKAPLKDAAAVNSTRWELYQRLQETGLPVSVGTGGRTKFNRVKLGIQKRHYLDAACVGVVEKLTLKTTKPLLITAKGWGMRQMSTTNKYGFPIKHRTRQKAFFGFQTGDIVRAILPSGKFAGAHIGRLTVRATGVFEMVTAKGKISPVRAKYCQIVHRVDGYNYAA

SEQ ID NO: 11211 - protein, 408 aa, unidentified; identical to SEQ ID NO: 8240

SEQ ID NO: 11212 - protein, 397 aa, unidentified
MFTQVRSSKVRRLLKENKAVVVSLCPFTIKLTYVTSDYKQEIVLGVDARTKHVGLSATTKSKELYSSEVLLRNDIVDLLSTRRELRKTRRNRLRYRKPRFNNRIKSKRSGWIAPSVKYKVDAHIRVIDNVCSILPIFRIVIEVAQFDTQKIKNPNISGKEYQEGDQLGFWNTREYVLARDGHKCQYCKGKSKDKILNVHHIESRKTGGNSPSNLITLCETCHKEYHKGNIDLKIRRGKSLRDAAVMGIMKWRLYEELKSKYDNISMTFGYVTKYNRINHDIEKSHVSDAFVISKNFNAIRLGYYYKVRLVRRHNRQIHKQKIQKGGIKRLNQSPFEVFGFRLFDRVMFENSYYFIFGRRKTGSFNIRDIDGKSQKNITYKKFKLSRCKRFMIQKEMN

SEQ ID NO: 11213 - protein, 442 aa, unidentified
MVTVQQSTHHLPFGRVFIRRNLFMVYVISQDGKPLMPCSDPIARLLLKQGKAKVKKREPFTIKLTYETTNYTQGLTLGVDTGSGTIGTAVSKDNGDIVYMSEVVVRNDITDKMTQRAKYRRNRRNRKTRYRKARWLNRASSIKKDRFSPTMQSKLHSHVREIEYIQSILPVTEMVFETGQFDMHLMKNPSLANPKVRPWGYQKGANYGFENTKAMVLNRDNYTCQCCKGKHKDSKLEVHHIVFRSQGGSDEESNLLTLCHTCHKDLHSGKINPKLSGKVKGNLKYATQMNSIRKQLFRFYPNAIETFGYVTKANRLHLGVDKEHYYDACTIATQGNAFNVKSNLYKKKCVSDGDFQKTKGIRSEQPIVIDKICGFRKFDKVRYFGNDYFIKGRMSTGYAILMDIDGNKIDFSTMPRGYKTPKLSNCKRITARSTVMTQVKVV

SEQ ID NO: 11214 - protein, 457 aa, unidentified; identical to SEQ ID NO: 6741

SEQ ID NO: 11215 - protein, 417 aa, unidentified
MPCSPAKARLLLKEKKAIVKRRTPFTIQLTIATGEAKQPITLGVDSGYKHIGLSATTEKAELHASQVELRQDITDLLSARLALRRSRRSRKTRYRAPRFNNRVASKRKGWLAPSVENRIAAHMSRVEAVMRVLPVTAITVETAAFDTQLLKNPDIAGAAYQQGEQLGFWNVREYVLFRDGHVCQHCRGKSKDPILNVHHIESRRTGGDAPNNLITLCETCHKAFHRGEIELKVRRGKSFKAETFMGIMRWTLFERLKKAHPELRVRNTYGYLTKHKRISHGIAKSHCADAYCIADNLGAKRLSGYLFQKQTRKHNRQLHKLSILKGGLRKKNQAPYEVKGFRLFDKVICKGEEAFIFGRRTSGSFDVRRLDGTRISAGINYKKLRLLEPRTTYLTEFRKEAALPPLHKCRGFRAEFL

SEQ ID NO: 11216 - protein, 512 aa, unidentified
MSTVYVLNKDGKPLMPTTRCGHVRRLLKEQKAQVVTSKPFTIQLLYETDDVVQPLYLGIDPGRTNIGVAVVKIDGTAVFTAHLETRNKEIPKLMQGRKKARRARRTNGRRCRRQRRAKANGTISKKCVKQTTAQNGSVSKRAKKIGVIKRHLPGCEKEVLCIGIKNKEAKFSNRARPEGWLTPTANQLLQTHINLVKKIQKFLPISDVVLEINKFAFMRLDNPNVQKWQYQQGPLYQKASLEEAVSEMQEHHCLFCKNTIDHYHHVVPQHKNGSNTIGNIVGLCAKHHDLVHKETSWQEKLAKKKTGLNKRYGALSVLNQIIPALTKELSSLFPKHFFATNGKSTYDYRAAHGVSKDHWLDAYCIAGSVLPNDACDNNINSHVPYELKQFRRHDRRALHKENMSRVYTLNGKSVATNRHKAIKQTTDSLEEFRQRQPNDVCKLKVKEHHPEYRNPKRNFPGCVFLVGKHTHVMQGTSGSHNGKADGYYDANGNSYSSGKCKFVAKNKGIVFA

SEQ ID NO: 11217 - protein, 533 aa, unidentified
MSNVVYVVDKHGKPLMPTKRFGKVRHLLGTGKAVAISNYPFTIRLKYESTHYTQDIYVGIDTGRENIGSGASKEDGTNVYLANTKTHNKSIKKQMSNRACFRRERRRHHRQKKQRKAVSDGNTIQNGDDDTVCTKHACKSVQISYPMAENTVTHKVIRGKEGKFANRKRPDGWITPSARQVVQITMNELKSITKILPVTHMTMERVSFDFQKLENENIKAWEYGKGPLYGYKTYKDYIFDEQHGKCACCGKPITQYHHIVHRANGGIDSVKNIIGLCDDCHKEIHASINAEERLKELKAGVIQRYYIGLLNSVMPALIEEMAIYCEEQGIVFAITDGNTTSKAREQYNIPKDHCFDAYAISLADRDVENIDICDIIYQKRRFKKKSNNIINARNKRVYKLDGKVVAYNRHKATDQKDDSLEEFFVKYRDNHSEKEVQQMMHNIKIEPAKRTYTFHKTGQIAPIHPGDVVRYVKHNKIRGNMKTETLVADNVKMSKDGRVGYGTKNKKLKYCKRIASGCVQIIDVMKAKEHIIN

SEQ ID NO: 11218 - protein, 396 aa, unidentified; identical to SEQ ID NO: 4508

SEQ ID NO: 11219 - protein, 442 aa, unidentified
MSTSVFVLDKKHRPLMPCRPARARRLLRAGRARVVKRFPFVIRLVDRTVEQSEVQPVLIKLDPGSRETGAAVVRDDEKKRHHALAFFVIEHRGGAIRDALKARSAFRRRRRSQNFRCRSPRFLNRVKPKGWLPPSLRHRVETTLSFVRRMCRYLPVSGIATELVKFDSQKLQNPEVSGVKYQQGTLFEYEVREYLLEKFGRKCVYCGAEGVPLNIDHVVPRAKGGSNRVSNLVLACVSCNQKKGARSLEDFLKGKPEVLARVRRELKTPLRDAAAVNATRWVLFNELKATGLPVETGSGALTKLNRHAFGVEKEHWLDALCVGRLNGVVTRKGLNVLEIRCMGRGSRQRTRLTKYGFPRGYLMRQKCVHGFATGDMVEANVPKGKKAGLWRGRVAVRVSGSFNIQTPKGVIQGVGWKHCRLISHNDGYGYAWLGHAPHSSPA

SEQ ID NO: 11220 - protein, 420 aa, unidentified; identical to SEQ ID NO: 5136

SEQ ID NO: 11221 - protein, 413 aa, unidentified; identical to SEQ ID NO: 2636

SEQ ID NO: 11222 - protein, 417 aa, unidentified
MTFVLNEKGEPMMPCDNVVARLLLKNKQAKVVKTYPFVIKMLVETTDFKQDLILGIDTGSSKIGASVVNESNEVVYLSQVEIRNDITEKMKRRAKYRRNKRNRKTRYRKPRFLNRKNSTKTGRFSPTMTSKINAHLKESKFIRKILPITETRIETANFDPHALKNPEVLKDLKLYQEGYNYGFANAKAYVLDRDNYRCQNKKCTSKCKKLEVHHIVFRRNNGSDEASNLITLCKVCHDDLHADKLILNFKGKKKGTLKHATQMNSIRIQLMKMLPNAIETYGFVTKEHRQKMNLPKEHFFDAVAIASKNKDISFRTDEIIYKKCVAKGDYQRTKGVRSQLKIPVAKIKGFRKFDTVKFKGEKYFIKGRFTTGYAILMGIDNQKVDLKPIPKFENLKRISARKTWLIDIKKLNLQTKI

SEQ ID NO: 11223 - protein, 378 aa, Moorena sp.
MQNYVLVIDTNKRPLNPISPKKARRLLDKGKAAVFRMYPFTIILKTAIYNPVVLPCHIKIDPGSNTTGFALVQNNQVIWGMELEHRGELIKKKLEYRKAVRRGRRNRHTRYRKPRFLNRRRKDGWLPPSLEHRILTIHTWVKRLIKFCPVNEIWVERVKFDTQKMPNPEINGIQYQQGELAGYEVREYLLEKWGRECTYCGKQSIPLQIEHIHPKSKGGSNSAKPTLRERVSNLCLACEKCNQRKGNKSIEDFLKKKPNLLQKIKTKAKQPLPDAAAVNTTRNKLVKVLRSIKLVVTGTGAQTKYNRTKLGLPKQHWIDAACVGDIETLVLRTSQPLLVTCKGPGGRQKAALNKYGYPIRHNPLKPIKGACYWGHSQA

SEQ ID NO: 11224 - protein, 431 aa, Escherichia coli; identical to SEQ ID NO: 4170

SEQ ID NO: 11225 - protein, 545 aa, Actinomadura sp.
VLLQRAALESGLADTPRIGNETGLRPPARLGGGTGAGHVRGETTGTSPGPGGVTPDLRGGERRREAHHVFVLDKDGAPLQPCHPARARRLLASGRAVVARHTPFVIRLKDRTAAASEVEGVEVGIDPGSRHTGIAVFTARKGERRGRYAIQLDHRGARIRKKLGQRAAYRRRRRSANLRYRAPRFLNRVRPDGWLAPSLKHRVDTTTSWVERLARWAPVEAVHVELAAFDTHALSAGRSLEGVEYQHGTLYGYQVREYLLEKWGRACAYCGAVNVPLTVDHIHPRSKGGADRVCNLALACVPCNQSKSDRPIELFLAHRPATVVWVLAQAKAPLRDAAAINSTRLGLRHALDRRFPGRVVVGSGGRTRWNRTRSGLPKSHTLDALCVGETGAVTAYPATVLVVACTGRGGHSRTRTDRYGFPRLRLPRSKTVRGFQTGDLVKAVVPGAKRAGTHLGRVAVRATGSFNITTRHGTVNGVGHRYVRLLQRADGYGYTTRPEIAARVHGPDAGRQVPALKAGTSSLQCLAGDPIPPTPDGGGFLEGSP

SEQ ID NO: 11226 - protein, 428 aa, unidentified
LKVFVLNMRGQPLMPCSPAKARHLLKAGKAAVRRRTPFTIQLRIATGETKQNVTLGVDAGAKHVGLSAATEKEEVFASEVELRQDITGLLAARLSLRRERRQRKTRYRAPRFLNRVRSKHKGWLAPSVENRIQAHLSRIDAICGLLPVTKIVIETASFDIQKIKHPDVEGTDYQQGDQLGFWNVREYVLFRDGHVCQHCHGHAKDKILNVHHLESRQTGGDAPNNLITLCETCHKACHAGKIKLKVKRGQSFREEAFIGIMRWTLLDRVRKAHPGLPVENTYGYLTKNTRITLGLPKAHCVDAYCIAGNLKAVRRGVYLHQRQVRKHNRQIHKCTVLSKTLKDGTKIGYRKLNQTPHLVKNFRLFDKVRCLGQTGFIFGRRSSGYLDVRRLDGVKLSSGISYRKLTLLEKRSTYLTELRKEDGASSPV

SEQ ID NO: 11227 - protein, 337 aa, unidentified
MPKVYVLNRHGRPLMPCTPAKARHLLDAGKAKVRHRTPFTIQLLYGSTGYTQEVILGVDAGSKTIGLSAATETEELFSAEVKPRNDVVELMSARRQFRRARRNRTTRYRKPRFDNRVRSKHKGWLAPSVEVKIQEHMTAIRRACAILPVSKVVVETAEFDLQLLKAVAEGKPVPQGEDYQKGEMYGHYNVRQYVLWRDSYTCRICGVHGSVRKGVPLHVHHLESRRVGGDAPDNLVTLCTACHDKLHKGIIMVADIKKRKRRSTRDATFMGIMRMTLLRRLREQLPVPVVETRGYITKATRENLLVLPKSHTNDALAIAHGPQGFRAEYLPNIRQAD

SEQ ID NO: 11228 - protein, 442 aa, unidentified; identical to SEQ ID NO: 4418

SEQ ID NO: 11229 - protein, 374 aa, unidentified
MVIQLKKKIQENEICKDEIRCGIDDGGLHVGIALVQKCKSKNKVVFKGTIEQRNDVKHLMEVRRNYRRYHRYHKRYRQARFDNRKSSKRKGRIAPSILQKRQATIRVINRLNKWINITNYWLEDVSIDIRVLTDGYKSYSWQYQKSNRLDENIRKATILRDGGKCMECGKSNCRLEVHHIKPRRRNGSNTLDNLITLCESCHQKTEGQEELYMDRYFSLLKSSDNKNLNYAQHVMIGKMWLRKQLSGLGVLYLTSGGDTANKRIDWNIEKSHTNDAVCITDLQPDTCDIKEWAIKPMRRQSKAKTDHVLGIHHRDLVEYTFKNGETHRGYVTALYPDQKAINFQSQTKHCKKVNARKCKLLWNYSKIYWFENAS

SEQ ID NO: 11230 - protein, 388 aa, unidentified
VLQAPNPVQHWRRMSTGLRAVQAEPAGIRKGDALKVFVLNMRGRPLMPCSPARARHLLKAGKAVVRRRTPFTIQLRIATGETKQSVTLGVDAGAKHVGLSATTEKEEVFASEVELRQDITGLLAARLSLRRDRRHRKTRYRAPRFLNRVRSKHKGWLAPSVENRIQAHMSRIDAVCRLLPVTRIVIETASFDVQKIRNPEVEGTGYQQGDQLGFWNVREYVLFRDGHVCQHCHGHSKDKILNVHHLESRQTGGDAPNNLITLCETCHKACHAGKIKLKVKRAQSFRAEAFMGIMRWTLLDRVRKAHPGLPVENTYGYLTKNTRITLGLPKAHCVDAYCIAGNLKAVRRGVYLHQRQVRKHNRQIHKCTVLSKTLKDGTKIGYRKLNQT

SEQ ID NO: 11231 - protein, 412 aa, Bacillus sp.
MVSYCFVLDQKGRKLSPTNENRGWVLIRKNKAALINKFPMVIQLFKEVLDEEIDQTPIHFNIDDGSKFTGIALVQECQTKNKPVFKGTIEHRTDVKDKMDTRRSYRRYKRSHKKYRPNRFNNRSSSTREGRIPPSIKQKKEATLRVLRKLIKWIRINHIHLENVMIDIRKLEKGSQPYRWDYQKSNRLDENLRLMRDDFTCQDCRKKQCRLEVHHIIPRRLQGSDSIHNLITLCSSCHENVTGEETNHTKRFFDKIQEKKIFFHDAMHVMQGKTYLQQELKKIAPLTLTTGGDTANRRIDWDIEKSHSNDAIVLSQLHVSSKQCQIKDWVIKPMRKRSKKKTEKVNGFQHRDFVRYTKRNGDVYEGYITALYPKKKQCNFTTTEGKVLKRYGVNRLKLLWRFSHIYFLNKPE

SEQ ID NO: 11232 - protein, 470 aa, unidentified; identical to SEQ ID NO: 2825

SEQ ID NO: 11233 - protein, 420 aa, unidentified; identical to SEQ ID NO: 10478

SEQ ID NO: 11234 - protein, 406 aa, unidentified; identical to SEQ ID NO: 6079

SEQ ID NO: 11235 - protein, 510 aa, Halomonas sp.
MLAKGKAPKVLIAADGNGVGRSRSWTFPRGDGPTGPRHKARKGNDKEEIAMAVFVLDRQKRPLMPCSEKRARLMLARGRAVVHKRYPFTIRLKDRVDGETQPLRLGIDPGSRITGLALMRENSEEREVGKHHVLCLFELVHRGFQIREALDQRRAFRRRRRTKNLRHRAPRFDNRTRRDGWLAPSLQHRVDTLSAWVDRLCRLAPITSLSQELVRFDTQKLDNPEISGVEYQQGTLLGYEVREYLLVKWGHECAYCGATNTPLEIEHIESRSHGGSDRIGNLTLACHDCNQEKGADTLDAFFATARGLKKRLTQHRQSADARYRRVIQQHDRPLRDASAVNATRWALNRNLKRKGLPVAVGTGGLTKYNRQRLGIPKTHALDAACVGQVEALHGWQVPTLTLRAMGRGSYQRTRLDKFGFPRGILMRRKQVHGFQTGDMVKAVVPSGKKAGTHVGRVAIRQTGSFNIQTEHGVVQGISWRHCTLLQRGDGYCYHLTPTRNDKGEAGRAVA

SEQ ID NO: 11236 - protein, 413 aa, unidentified
MTNYAFVLDADNKQLTPTKEQKAWFLIRKKRATLVSKYPMVIQLKKKIPDKEICKDEVRCGIDDGGLHVGVALVQKCHTRNKVIFKGVIEQRNDVKHLMDVRRGYRRYHRYHKRYRPARFNNRNSSKREGRITPSILQKRQATIRVVNQLNKWINITNYWLEDVAIDIRALTDGYKPYRWQYQKTNRLDENIRKAVILRDGCKCMECEKSNCRLEVHHIKPRRLKGSNTLDNLITLCAKCHQKTESVEELYMDRYFALLKSSDNKNLNYAQHVMIGKKWLREQLSNLGMLHLTNGGDTANKRIDWDITKSHSNDAICITDLKPDTCEIKEWVIKPMRRQSKAKADNVLGIKHRDLVEYTFRNGETHRGYVTALYPEQNAINFQSPTKHCKKVNARKCKVLWKYSKIYWLDNVS

SEQ ID NO: 11237 - protein, 442 aa, unidentified
MVYVLNKDGQPLMPTSRHGKVRRLLKTKKAKVIKRCPFTIQLLYDTTNHTQNITLGIDAGSKHIGLSATTEDKVLFEADVELRNDISKLLEARYTFRRSRRNRKTRYRKKRFDNRVSSKHKGWLAPSIEHKIQSHFAMVEKVHRILPVTKIVVETASFDTQLLKAQLEGKPIPQGTDYQNGELAGWNIREYIFHRDNYTCQWCKGKSKDPVLVTHHHAYWKGDHTNKPSSLITLCNTCNDSKYHKKEADRLWGWEPKVTNSYKHAVFMGVMRWTFYNRLKEIYPNVSMTYGYITKNTRIENNLPKAHYVDARCISGHPEAKSNGEYFYYKKVRCHNRQLHKANTLKGGIRKRNQAEYTVKGFRLFDRVEYQNNEYFVFGRRASGFFDIRTLDGQKVNKGSISFKKLKLKETSRTYLIERRMADTGVSLAPLTTEVTSLRQTG

SEQ ID NO: 11238 - protein, 413 aa, unidentified; identical to SEQ ID NO: 2636

SEQ ID NO: 11239 - protein, 416 aa, unidentified
MVYVLNIQGNPLMPCKEAKARRLLKNSLAKIIKRTPFTIQLLFECENKTQDITLGIDAGSKTIGVSASTEKQELYSAEVVLRNDIVDLISTKRQNRRTRRNRLRYRKPRFNNRIKFKKDRWLAPSILQKIETHLNVVKKIHKILPISKIIVETASFDIQKIKNPNITGVEYQQGEQLEFWNVREYVLHRDGHTCQHCKGKSKDKILNVHHIESRKTGGDSPSNLITLCETCHKKYHNGEIKLKVKRGQSFRDSAFMGIMRWAFYEKLKETYQNVKMTFGYITKNTRISNNLPKEHCIDAYCIAGNLKAKLMNSYFYQIKKRCQNRQIHKANFLKGGRKKLNQAPYIVKGFRLFDKVSYQGNPYYIFGRRSSGTFDVRDLSGNKVNKGSINCKYLKLLETRKYYLTEKRERAIPPND

SEQ ID NO: 11240 - protein, 442 aa, Selenomonas sp.; identical to SEQ ID NO: 4776

SEQ ID NO: 11241 - protein, 361 aa, unidentified
LKVFVLNMRGQPLMPCSPAKARHLLKAGKAVVKRRTPFTIQLRIATGETKQNVTLGVDAGAKHVGLSATTEKEEVFASEVELRQDITGLLAARLSLRRDRRHRKTRYRAPRFLNRVRSKHKGWLAPSVENRIQAHMSRIDAVCRLLPVTKIVIETASFDVQKIRNPEVEGTGYQQGDQLGFWNVREYVLFRDGHVCQHCHGRSRDKILNVHHLESRKTGGDAPNNLITLCETCHKAYHAGKIKLKVKRGQSFRAEAFMGIMRWTLLDRVRKAHPGLPVENTYGYLTKHTRITHGLPKTHCVDAYCIAGNLKAVRRGVYLHQRQMRKHNRQIHKFTVLSKRLEDRIPQAQPVTLSRPWLQAL

SEQ ID NO: 11242 - protein, 413 aa, unidentified
MTNYAFVLDANGKQLAPTKEQKAWFLIRKKRATLVSKYPMVIQLKKEISDEQICKDEICCGIDDGGIHVGLALVQKCKTKNKVVFKGTIEQRNDVKHLIEVRKGYRNYHRFHKRYRQARFNNRKSSKRKGRIAPSIFQKRQATIRVIKQLNKWINIANYSLEDVTIDIRALTDGYKSYRWQYQQSNRLDENIRKAVILRDGCKCMECGKSNCRLEVHHIKPRRLNGSNTLDNLISLCEKCHQRTEGQEELYMDRYFSILSSTDNKNLDYAQHVMIGKKWLREQLSELGTLILTTGGDTANKRIDWNIEKSHANDAICITGLQPDACNVKEWTIKPMRRQSKAKTDNVLGIKHRDLVEYTFKNGETHRGYVTALYPKQNAINFQSPTKHCKKVNAKKCKLIWKYSKIYWLDNVL

SEQ ID NO: 11243 - protein, 545 aa, unidentified
LSRTIPLTANTQPRETQPPVSAGETYSKRRVAYMPTVYVLNKDGKPLMPTTRCMHVRHLLKNGKARVVKSKPFTIQLLYETDDVVQPLYLGIDPGRTNIGVAVVKADGAAVFTAHLETRNKEVPKLMKKRKESRCARRTNGRRCRRQRRAKTNGTISKKCVKQTTAQNGSVSKRAKEIGVIKRHLPGCEKDVLCIGIKNKEAKFTNRARPEGWLTPTANQLLQTHINLVKKIQKFLPISDVVLEVNKFAFMQLDNPNIQKWQYQQGPLYQKGSLENAVSEMQEHHCLFCEKPIEHYHHVVPKSENGSNTIANIVGLCTEHHNLVHKDATWQKKLAKEKVGLVKKYSALSVLNQIIPALTKEMNSLFPKHFFVTNGKSTYDYRTAHGVSKDHWLDAYCIACSVLPNDVCDSNINSHVPYELKQFRRHDRRVLHKANMSRVYTLNGKTVATNRHKAIKQTTDSLEEFRQSHPGDVCKLKVKEHHPAYRNLNRNYPGSVFLVDGQVHVMQGVSGSHNGKADGYYNTNGNAYPYYKCKFVVKNEGIVFA

SEQ ID NO: 11244 - protein, 436 aa, unidentified
MTKAFTQTNSQVCVLDQNGNPLMPTKRLGKVYRLLKDKKAHIVNYEPFTIQLEYEPQTHIIQPMTLGVDSGAIHSGYSVANEHREYYNAEVIARDNISKNLSDRHMYRRNRRSRKTRYRQPRFNNRKNKGEGWIPPSLEQKVNVQLNEIEHLHRYFPIETIIIEVAEFDIQKIKNPDISGKEYQQGTLYGYNIRNYLLEKYGRKCFYCDKEVSDFEVEHMIPRAIGGSNRIDNLTLSCHDCNSNKGTLTAEAFIKQTMAPRKAALKLKQLPTEKRLFKYMAHMNATRWALYNAVKDKYPSVQITYGYITKYNRIQAGLPKAHHIDAKCITGFSQVPSFDTTVVKVKMRRHNRQLHRATFSKGHVRKVASLPTVMYGFQLYDIVLYNRHRYYIQSRRSTGSFALVSIEGLKDENRMYNKLTQLAHTNAYLVHHYVEI

SEQ ID NO: 11245 - protein, 428 aa, unidentified
LKVFVLNMRGQPLMPCSPAKARHLLKAGKAVVRRRTPFTIQLRIATGETKQSVTLGVDAGAKHVGLSAATEKEEVFASEVELRQDITGLLAARLSLRRDRRHRKTRYRAPRFLNRVRSKHKGWLAPSVENRIQAHMSRIDAVCRLLPVTKIVIETASFDIQKIKDPSVEGTDYQQGDQLGFWNVREYVLFRDGHVCQHCHGHSKDKILNVHHLESRQTGGDAPNNLITLCETCHKACHAGKIKLKVKRGQSFRAEAFMGIMRWTLLDRVRKAHPGLPVENTYGYLTKNTRITLGLPKAHCVDAYCIAGNLKAVRRGVHLYQRQVRKHNRQIHKCTVLSKTLKDGTKIGYRKLNQTPHLVKNFRLFDKVRCLGQTGFIFGRRSSGYFDVRRLDGVKLSSGISYRKLTLLEKRSTYLTELRKEDGASSPV

SEQ ID NO: 11246 - protein, 442 aa, unidentified; identical to SEQ ID NO: 7213

SEQ ID NO: 11247 - protein, 447 aa, unidentified
VPAYRIKHITKKEAPYMVYVLDIDGQPLMPTSRHRKVRKLLNSHLAKVVKRCPFTIQLLYQSTKETQPVSLGVDAGSRHIGLAATTEQKVVYQEELVPRNDVVKLLSARRALRSSRRSRKTRYRKPRFNNRVHSKHKGWLAPSVEVKIQEHITAIKRICQILPISDIHVETAEFDLQRLKAMEEGRPLPVGTDYQLGEQYDFYNTRQYVLHRDEYTCQCCGTHDNNVKLHVHHIESRQTGSDAPNNLITLCEHCHKLLHAGKTILPKGKKRGKSYRDATFMGIMRKTLLERLKKEIDVPVEGTYGYITKYWRERAGLEKSHINDAICISKHPYARPLETYYLTKAVRHHNRQIHKTKLSKGGIRKRNQAPYLVKGFRLFDKVLYQGESYFIFGRRITGYFDIRTLDGTKVNKGSTSYKKLRIQDTAEAYLTEVRAIPHMNEFTCVLA

SEQ ID NO: 11248 - protein, 476 aa, unidentified
MVFVLDKHKKPLMHCTEKRARLLLRRGRAVVHRLAPFTIRLKDRVLEDSEVQPLRLKLDPGSKVTGVAVLRGNEVVFLGEIRHRTDIEDRLAKRRMIRRNRRNRKTRYRKPRFLNRHPEKCAGCGKNAKHGSRYCRKCGQRPKDNGNRNTWLPPSLGARVDQVIHALRKIRVPIGGISVELVRFDTQKLENPEISGVEYQHGTLFGYEVKEYLLQKFGHRCAYCGGESGDPVLEVEHVVPRSRGGSNRVSNLAIACRTCNEEKDDWMPGEWLAILQRSKRKLDRVRAVNVQKALGQLKVPLRDAAAANTTRWALYRRLLSLGSSVKVGSGGRTKWNRERMGLPKEHYWDAACVGDSTPEKFRDIPAWVQVWEAKGRGNRQVCRTDKQGFPVRHLNRQKRHFGFQTGDMVVAEIPRGKYAGRWRGRVAVRANGWFDLFVGGVRAVQGVSHKHCRVLQRGDGWAYEQMRPAVAAPPHA

SEQ ID NO: 11249 - protein, 447 aa, unidentified
ETPSNIGEGSQPVERPRRQNLRVFVLNKRGKPLMPCSPAKARLLLKEKKAIVVRRTPFTIQLTIATGETKQPVGLGVDAGYKHVGLSASTDKAELYASQVELRQDITDLLSARRALRRARRNRKTRYRAPRFNNRIRTKRKGWLAPSVENRINAHLSRIEAVLRLLPVTKITVETASFDMLLLKNPDIAGKEYQEGEQLGFWNVREYVLFRDGHVCQHCYGRSKDPVLNVHHLESRRTGGDSPGNLITLCETCHEALHRGEIALKTKRGHSFRAEAFMGMMRWEVLNRLKASHSELEVNNTYGYRTKHARIVNGIDKSHCADAFCIAGNLGAERLCEFFFQKQTRRNNRQIHKLSILKGGIRKRNQAPFEIKGFRLFDKVACKGEESFIFGRRSSGYFDVRKLDGTRISAGISYKKLRLLEKRRTYLTEIRKEEALPPLPEGRGLRA

SEQ ID NO: 11250 - protein, 413 aa, unidentified; identical to SEQ ID NO: 3220

SEQ ID NO: 11251 - protein, 442 aa, unidentified; identical to SEQ ID NO: 3161

SEQ ID NO: 11252 - protein, 482 aa, unidentified
LVGNVQAPWDVYPSPTLCGLCLKVLRGRNGDADKKPIPTLTKDENRPSGRTTGLRAEQAEPAGIRKGDTLKVFVLNMRGKPLMPCSPAKARHMLKAGKAVVVRRTPFTIKLTIATGETKQDVTLGVDAGARHVGISATTEKEEVFASEVKLRQDITGLLADRLAFRRARRNRKTRYRSPRFNNRVRSKHKGWLASSVENRIQAHMSRIDAVCRLLPVTKIVIEAASFDVQKIKNPTIEGTDYQQGDQLGFWNVREYVLFRDGHVCQHCHGRSRDKILNVHHLESRKTGGDAPNNLITLCETCHKAYHAGKIKLKVKRGHSFRAEAFMGIMRWTLLNRMRKAHPSLPVENTYGYLTKHKRIALGLPKTHCADAFCIAGNLKALRRGDFLFQQQTRKHNRQIHRCSILKGGVRKLNQAPFLVKGFRLFDKVRIGGQIGFVFGRRVRGIFNIRRLDKTVIGTDINCKKLSLLETRKTFLTELRKE

SEQ ID NO: 11253 - protein, 395 aa, Pseudomonas sp.
LQSLTLKFDPGSKFTGIALVRQKGQRVSVLSLMELAHRGAAIRQAMQQRAAFRRRRRGQNLRHRAPRFDNRTRPEGWLPPSLRHRLDTTLGWVGRMRNWAPISDLAVERVKFDMQAIQNPEISGVQYQQGELAGYEVREYLLEKWGRCCAYCDAENTPLEIEHIVPRSAGGSDRVPNLTLACRPCNQRKGNQPVEVFLKARPELLARIKAKAKAPLRDAAAVNATRNALFRGLLDTGLSVTTGTGAQTKYNRRRLDLPKTHALDAACVGEIRAIEHWHRPTLAIKATGRGDYQRTRLTTHGFPRGYLTRQKRHFGFQTGDQVRAEVPTGKKAGTHLGRVAVRKTGSFNIQTSDGVVQGVHHRHFTLIQRADGYAYSHIQTDSPQSQKEAARAEVR

SEQ ID NO: 11254 - protein, 354 aa, unidentified
CGIDDGSLHVGIALVQKCQTRNKVVFKGIIEQRNDVKHLMDVRRGYRRYHRYHKRYRPARFNNRFSSKREGRIAPSILQKRQAIIRVINRLNKWINITNYWLEDVAIDIRALTDGYKSYSWQYQRSNRLDENIRKAVILRDNCRCKECGKSNCRLEVHHIKPRRLNGPNTLDNLITLCENCHQKTEGKEELYMSRYFGLLKSSDSKRLNYAQHAMIGKKWLREELSNLGMLYLTNGGNTANKRIDWSIEKSHSNDAICITDLQPDTCNIKEWTIKPMRRQSKAKTDNVLGIKHRDLVEYTFRNGETYKGYVTALYPEQKAINFQSSTKHCKKVNARKCKLLWKYSKIYWLENAG

SEQ ID NO: 11255 - protein, 420 aa, unidentified
MQYAYVLNKRGEPLMPCSPGKARILLKQQKACVVKRTPFTIKLLHGSAGYKQPITLGVDAGSKHVGLSASTEKRELYSEEFTPRNDVVELLSTRRQNRRSRRNRKTRYRAPRFNNRVHSKHKGWLAPSVEVKIQEHITVIKRICRVLPITLVRVETAEFDTQRLKAMLAGKPLPVGTDYQLGEMYDEYNVRQYVLKRDNYTCQCCGAHTTAKKTVKLHVHHLESRKVGGNAPSNLITLCTTCHNNLHKGKITLDGKKRGKTLRDAAFMGIMRNTLLTRLRNELNIPVQNTYGYITKLLREQNDIKKSHVNDARCISKHPLAKPCSVCYRTKAIRHHNRQIHKAKILKGGIRKANQAPYIVKGFRLWDKVLYNEQECFISGRRSSGYFALRKFDGTTITNSISFKKLRLLEPATNYLIERK

SEQ ID NO: 11256 - protein, 466 aa, unidentified
MSTCACVLSKSGERLMPTIRLGKVRHLLKDGKAKIIKHHPFTIQLLYDSETNIQPIEICEDVGYNYIGISVKSESHEYVSAQYDTLQDEKDCHDSCRRMRRTRRNRLRYRQKRFDNRKRDKGWLAPSLEHKKELNVNVIKMYCKVMPITHVTVEVGSFDTMLVKAIEEGKAAPEGVDYQKGPRYNLATLREAVFYRDNYTCQVCGREAQKDSAILHVHHMFYWKGRHGNSLSELLTVCEKCHTPANHQKGGKLYGFGENIKFANLSGAAFMNTVRWQIVNELCAAFGKPFVTFTYGAMTKEKRIALHLEKSHNNDAYAMGSFHPVGRCAFEHYEKVKRNNRILERFYDSQYIDIRTGKVTNGKSLFNGRINRNHKKDSENLHKYRGKRIRKGYRALRRKKVALNPGDLVFLNGEILVVHGTHTDKKGAVRVEFKVAAKNGKKSANLKKLKIIKTSNLTYSAWKKVF

SEQ ID NO: 11257 - protein, 419 aa, unidentified; identical to SEQ ID NO: 6355

SEQ ID NO: 11258 - protein, 481 aa, unidentified
MWTTVLRGEKPYGRSSALPVRECVSIAKKRRHHMVAVLSKTGIRLMPTSSYRARKLLAKKKAVICGYRPFTIRLTERETGDVQPVELAVDTGYFHVGNSLKTAKHELAAVEIRTLMDEKQRYDDRRQYRRMRRSRLRYRAMRFDNRRRPDGWLAPSIQGRMEQNLAFLRRVLSVVPVTRIVMEMGQFDTQVLKAVEEGRPLPEGTDYQQGERYGIATLREAVFTRDNYTCQCCKKTVRDGTILHVHHIVYRSQGGTNRMGNLITVCEKCHTPKNHKPGGKLYKWNPTVKSFKGATFMTAVRWIMYRSVKESFPDVDVRITYGAKTKLQRRALDITKSHVNDAYIMGNFHPKHRVRPVILQKKRRNNRILEKFYDAKYIDTRDGIKKTGQQLFNGRTNRNHNTDTENLRPYRGTKLSKGKRAIRTTRYRIQPHDILVYQGQEMEASGCHNKGTRVMTTAKKSLPIGKVRVRRYSGGYYAVAE

SEQ ID NO: 11259 - protein, 456 aa, unidentified; identical to SEQ ID NO: 4017

SEQ ID NO: 11260 - protein, 451 aa, unidentified; identical to SEQ ID NO: 10609

SEQ ID NO: 11261 - protein, 462 aa, unidentified
MSVLVIGSNGRALMPTNPRKARLLLKKKTASVVCRHPFTIQLLYKTGCATQEGSIGIDTGSQYIGVGVTCGDRVILKEEHELRSSMEKRSLLVARAAMRRGRRYRKVRYRKPKWRHHTKRMYFEKPNRRGQHWRKVKTTTQSPRPKGWLPPSLQSKCDHHFRIIDRYLKYLPDSITRNLVIEVGRFDMARMNDSMIHGEMYQRGPMYDAENLRAYIFARDGYQCACCKAKAGTTRKADGTTVKLVAHHILFRSRGATDNPRYIISVCDHCHTTKAHQPGGVLYSWMKNNKKVTRGLRDATFMNILRKRLFARYPQSAFTYGNITAADRKQLRLPKSHANDAVDISLLGKEASTVKNICQTMHYKQIRKSKRSLHEAIPRKGRKNPNTKAVRNKKNTTQVNGFKLGDSVLADGKKLFICSFTGTSAYLIDKNGCYISQPGKTYKQWPLSKLKRLHPNGNWLMA

SEQ ID NO: 11262 - protein, 431 aa, Escherichia coli; identical to SEQ ID NO: 4170

SEQ ID NO: 11263 - protein, 431 aa, Escherichia coli; identical to SEQ ID NO: 3801

SEQ ID NO: 11264 - protein, 427 aa, unidentified; identical to SEQ ID NO: 5461

SEQ ID NO: 11265 - protein, 430 aa, unidentified
VEQNLRVFVLNKRGKPLMPCSPAKARHLLKEKKAIVVRRTPFTIKLTIATGESKQPVSLGVDAGYKHVGLSASTEKAELYASEVELRQDITDLLSARLALRRSRRNRKTRYRAPRFDNRIRTKRKGWLAPSVENRINAHLSRIEAVLRLLPVTKITVETASFDMQLLKNPDIAGKEYQEGEQLGFWNVREYVLFRDGHVCHHCYGRSKDPVLNVHHLESRRTGGDSPGNLITLCETCHKALHRGEITLKAKRGQSFRAEAFMGIMRWEVLNRLKASHPELEVNNTYGYWTKHARIANGIAKSHCADAFCIAGNLGAERLGEFFFQKQTRRNNRQIHKLSILKGGRRKRNQASFEVKGFRLFDKVACKGEESFIFSRRSSGYFDVRKLDGTRISAGISYKKLRLLEKRRTYLTEIRKEAFPPLPEGRSLRA

SEQ ID NO: 11266 - protein, 424 aa, unidentified
MVYVISQKNKPLMPCSSPIARLLLKLGRAKVKKREPFTIKLTYETTNYIQNLTLGVDTGSGTIGTAVSNDNSDIVYMSEVIVRNDITDKMTQRRKYRKNRRGRKTRYRKARWLNRANSTKTDRFSPTMQSKLHSHVKEIEYIKSILPITTMVFETGQFDTHLMKNPNLANPKVKHWGYQKGGNYGFENTKAMVLNRDNYTCQCCKGKHKDSKLEVHHIIFRSQGGSDEESNLITLCHTCHKDLHSGTINFKLKGKLKGNLKYATQMNSIRKQLFRIYPDAIETFGYVTKANRLVLGIDKEHYYDACTIATQGNIFTVKSNLYKKKCVSDGDFQKTKGIRSEQPIVTDKICGFRKFDKVRYFGNDYFIKGRMSTGYAILMDIDGNKADFSAMPKGYKTPKMVKLKRIEARTTWMITTVEVTPNIA

SEQ ID NO: 11267 - protein, 453 aa, unidentified; identical to SEQ ID NO: 4050

SEQ ID NO: 11268 - protein, 420 aa, unidentified
LMQDRKKARRARRTNGRRCRRQRRAKANGTISKKCVKQDTAQSKNPSKRAKEIGIIKRRLPGYKKDVLCIGIKNKEAKYTNRTRPEGWLTPTANQLLQTHINLVRKMQKFLPISDVVLEVNKFAFMRLDNPDIQKWQYQQGPLYQKGSLENAVSEMQEHHCLFCDKPIDHYHHVVPQSENGSNTIANIVGLCAEHHNLVHKDAAWQKKLAEEKVGLNKKYGALSVLNQIIPALTNKLSVLFPKHFFVTAGKSTHDYRAAHGVSKDHWLDAYCIACSVLPSNVCDSNINNHMPYELKQFRRHDRRVLNNENMNRVYTLDNKAVAINRHKATEQEAASLEEFRKEHPNDVCKLKVKEHHPTYRNMNRNYPGSIFLVGKHVHIMQGIAGSKDGKATTYKDSNANSITASKCKFVAKNSGILFV

SEQ ID NO: 11269 - protein, 406 aa, unidentified; identical to SEQ ID NO: 2752

SEQ ID NO: 11270 - protein, 442 aa, unidentified; identical to SEQ ID NO: 2903

SEQ ID NO: 11271 - protein, 433 aa, unidentified
MWVYVLNMNGQPLMPTHNGAKVRVLLKQKRAKVISKCPFTIKLLYTSTEFTQPLTLGVDTGSKYVGSAVVNDETSEVLYESQVELRDDIKLKMDRRRAFRRTRRNKLRYRPTRFNNRKASKRKDRYSPTLIAKFQGHKREIEFIKSILPVTDIVLEVGEFDTQLLQDPTLAYRKWGYQRGELYQQENYKQAARARDNYTCQCCGKKNCRLEVHHLLPRTRGGSNKLANLITLCSDCHQLAHSSEEQLLSFQKKFGKKAKGTLRYATQMNVLRSMLQKEYHNAEITYGFITKEMRRVFNLEKTHTIDACCIASRGVLFTNENSNKYKKKCVPKGNYAKTGVCGCKFVILPKGKIAGFKRYDKVLYNNKEYFVAGRMSTGYVYLIDIDNNRVQVEITRRSTGEKYVSKAKIKVSLIKKVASVGSCVCVKQYGSFL

SEQ ID NO: 11272 - protein, 512 aa, unidentified
MSTIYVLNKDGKPLMPTTRGGHVRHLLKEQKARVVQSNPFTIQLLYETNDVVQPLYLGIDPGRTNIGVAVVKADGTAVFAAHLETRNKKIPKLMQDRKKARRARRTNGRRCRRQRRAKANGTISKKCVKQDTAQSKNPSKRAKEIGIIKRRLPGYKKDVLCIGIKNKEAKYTNRTRPEGWLTPTANQLLQTHINLVRKIQKFLPISDVVLEVNKFAFMRLDNPDIQKWQYQQGPLYQKGSLENAVSEMQEHHCLFCDKPIDHYHHVVPQSENGSNTIANIVGLCAEHHNLVHKDAAWQKKLAEEKVGLNKKYGALSVLNQIIPALTNKLSVLFPKHFFVTAGKSTHDYRATHGVSKDHWLDAYCIACSVLPSDVCDSNINNHMPYELKQFRRHARRALNNENMNRVYTLNDKVVATNRHKATEQEAASLEEFRKEHPNDVCKLKVKEHHPTYRNMNRNYPGSVFLVGKQIHVMQGIASSKDGKATKYNDTRATTIAAGKCKFVAKNSGILFV

SEQ ID NO: 11273 - protein, 353 aa, Arthrospira sp.; identical to SEQ ID NO: 3451

SEQ ID NO: 11274 - protein, 431 aa, Petrotoga sp.
MEKRSVQRVFVLDKNKQPLMPCHSARARELLKKGKAAVFRYHPFTIILKEREGGDTQPIQVKIDPGSKTTGVALVADFKRGKKIIWASVIYHRGHIIKKDLDVRRAVRRFRRNRKTRYRKPRFLNRKRKEGWLPPSLISRAENILTWVKRIRRFSPVTSISMELVRFDTQKLQNPEIKGVEYQRGTLYGYEVKEYLLEKWGRKCAYCGNENVPLEIEHIVPKSKGGSNRVSNLTLACHECNQKKNNQSIDEFLANNPKKLNQIKARAKGPLKDVAAVNITRWYLFNQLKKEKLPIEVGTGGQTKYNRETQGYPKEHWIDATCVGESGYNVQLEPDMQVLEITANGHGMRRMCFVDKYGFPKSYRPKERTYMGYKTGDIVLANVPKGKNKGIHIGRIAIRHRPSFLLNGVGDVHPKYLTLLQKNDGYGYQMS

SEQ ID NO: 11275 - protein, 427 aa, Fischerella sp.; identical to SEQ ID NO: 6171

SEQ ID NO: 11276 - protein, 458 aa, Lactobacillus sp.; identical to SEQ ID NO: 4474

SEQ ID NO: 11277 - protein, 557 aa, unidentified
MIYNLVSIRERSFMKQKKQKVMVYILNKKGKPLMPTTRCGHVRKLLDSKKAVVVSSNPFTIRLKYDTPNGVQDVFAGIDSGRENIGSGASNEDGDCLYLGELKTSNKSIKMKMTERAGFRKERRSHDRQNKQRKARKDHTEIQNGNADICRTTISCKSVQISYPAAEKSVTHKIIRGKEGKFANRHRDEGWITPSARQLVQMHMNDLKSMCRILPISHVTLERVAFDFQKLENENIKAWEYGKGKLYGYDSPEEYIHDVQGGKCLICGKPHIDYLHHIIPRSKGGSNKVNNLAGLCYDCHYGPMGVHNCQDTQDRLPELKNEANKQYKVSLLNSVMPVLIEEMDKFCKANSIIFSICGGHDTAKVRDMYDLQKDHCIDGFAISLAGRNVKSVDVMPDRIHQKQRYKKKSKNIIQKRNCREYYDGKKLAAVNRHKGTDQKADSLEEYMNTYAETHTADECKKHFESLTVKPARRTYTFHKEGRICPFHIGDKVRYEKKNKIKGNTKVETFICEGIRFPKDENKAKVEHNKTKSKKMKFCRVLEPGCTPYIDYRKLVLI

SEQ ID NO: 11278 - protein, 383 aa, unidentified
MYAADRFVTCKFIRNTQARFCNRKRCPDWITPTVQHLVQTHLNIIRKISRYLPVTDIAFEVNRFAFMHMENPKAMGVDFQNGPLKGYDDVKEAICTQQHGKCLMCKKPISHFHHIVPRSRGGSDTIQNLAGLCPECHTKVHKDTAFRKDFDEKKSGQLKKYGALSALNQAVPFICKKLLEEYGEEHVHFCRGLDTSLIRTAFGFEKTKKNQMHEVDAYCIGLAALEVNEVETPAFDHTFQIRQFRRQDRSIIHHQTGRSYYQGKEKVAQNRKPGFEQKTTALSQWYKEQVRIHGEKEAEKLRSQLRVEKSCRHYNDMDRFLPGAVFLYEGKRYVLSGRITNGKYLRACGQGMKNFPAAECTFIRHNAGWCGIKKVDILFSRIS

SEQ ID NO: 11279 - protein, 442 aa, unidentified; identical to SEQ ID NO: 2903

SEQ ID NO: 11280 - protein, 453 aa, unidentified
CVLGNNGERLMPTIRLGKVRHLLKDGKAKIIKHHPFTIQLLYDSKTNTQPIEICEDVGYNYIGISVKSQSHEYVSAQYDTLQDEKACHDSCRKLRRTRRNRLRYRKPRFDNRKRGEGWLAPSLRHKKELNVNVVKMYCAVMPITHATVEVGSFDTMLVKAIQEGKAIPEGADYQKGPRYNLATLREAVFYRDNYTCQVCGRKVADGAILHMHHMFYWKGRHGDSLNELLTVCEKCHTPANHQKSGKLYGFGENVKFADLSGAAFMNTVRWQIVNELYAAFGKDFVTVTYGAMTKEKRIALQLEKRHNNDAYAMGEFHPSCRCKFRHYQKRRRNNRVLEKFYDATYIDTRTGNKAKGKELFNGRISRNHKKDSENLHKYRAHKITKGRRSIRSKHYDIQSGDTVLYAGRKCITTGCFNKGKWLRIPVGSTAKSVAISKVKLINHVGAWKKGSSI

SEQ ID NO: 11281 - protein, 430 aa, unidentified; identical to SEQ ID NO: 4504

SEQ ID NO: 11282 - protein, 408 aa, unidentified
MVYVQDIDGKPLMPTTRHGKVRRLLKDSKAVVVNTCPFTIKLMYKTSDYKQEIVLGVDSGTKHIGLSATTKSKELYSSEVILRSDIVDLLSTRRELRRTRRNRLRYRKPRFENRVKSKRLGWVAPSVRHRIDAHIRVIDNICSTLPISRIIVEIAQFDTQKIKNPDISGNEYQEGDQLGFWNVREYVLTRDGHKCQHCKGKSKDPILNVHHIESRKTGGDSPSNLITLCETCHKEYHKGKIDLRVKRGKSLRDAAVMGIMKWKLYEELRSRYDNVSMTFGYITKYNRIKYGIEKSHISDAFVISKNFNALMLEYHYKVRLIRRHNRQIHKQKVLKGGVKKPNQSSFEVFGFRLFDRVMFEGNCYFIFGRRKSGSFNIRDIDGGNQRDITYKKLKLLRCKRFMIQKETN

SEQ ID NO: 11283 - protein, 420 aa, Moorena sp.
MQNYVFVIDANFQPLNPIIPKKARRLLDKGKAAVFRMYPFTIILKTSINNPTISPCQIKIDPGSKVTGFALVQDGQVIWAMELEHRGGLIKKKLSSRSAVRRGRRNRNTRYRKPRFLNRKRPEGWLPPSLEHRILTTQTWVKRLIKFCPVNEIWVERVKFDAQKMQNPEISGIQYQQGELAGYEVREYLLEKWGRECTYCGKKSVPLQIEHIYPKSKGGSERVSNLCLACEKCNQRKGNKPIEDFLKKKPSLLQKIKTKALSPLKDAAAVNTTRNKLVKVLQKTKPVVTGTGAQTKYNRTKLGFPKEHWIDAACVGNIEALTLKTFQPLLVTCKGQGGRQKAALNKYGYPIRHNPLRPIKGWCSGDIAKNILTGKFGRVNPRSKSNSFNYTVPGEKAISLHVKNLVRIHRQDGYTYGFCQ

SEQ ID NO: 11284 - protein, 275 aa, unidentified
MQYAYVLNKRGEPLMPCSPGKARILLKQQKACVVKRTPFTIKLLHGSAGYKQPITLGVDAGSKHVGLSASTEKRELYSEEFTPRNDVVELLSTRRQNRRSRRNRKTRYRAPRFNNRVHSKHKGWLAPSVEVKIQEHITVIKHICRILPITLVRVETAEFDTQRLKAMLAGKPLPVGTDYQLGEMYDEYNVRQYVLKRDNYTCQCCGAHTTAKKTVKLHVHHLESRKVGGNAPSNLITLCTTCHNNLHKGKITLDGKNVVKRFVMRLLWVSCVTHY

SEQ ID NO: 11285 - protein, 414 aa, unidentified; identical to SEQ ID NO: 4492

SEQ ID NO: 11286 - protein, 415 aa, Eubacterium sp.; identical to SEQ ID NO: 6925

SEQ ID NO: 11287 - protein, 465 aa, unidentified; identical to SEQ ID NO: 3603

SEQ ID NO: 11288 - protein, 408 aa, unidentified
MVYVQDINGKPMMPTTRHGKVRRLLKENKAVVVSLCPFTIKLTYVTSDYKQEIVLGVDAGTKHVGLSATTKSKELYSSEVILRNDIVDLLSTRRELRKTRRNRLRYRKPRFNNRIKSKRSGWIAPSVKYKVDAHIRVIDNVCSILPIFRIVIEVAQFDTQKINNPEISGKEYQEGDQLGFWNTREYVLARDGHKCQHCKGKSKDPVLNVHHIESRKTGGNSPSNLITLCETCHKEYHKGNIDLKIRRGKSLRDAAVMGIMKWRLYEELKSKYDRVSMTFGYVTKYNRINHDIEKSHVSDAFVISKNFNAIRLGYYYKVRLVRRHNRQIHKQKIQKGGIKRLNQSPFEVFGFRLFDRVMFENSYYFIFGRRKTGSFNIRDIDGKSQKNITYKKFKLSRCKRFMIQKEMN

SEQ ID NO: 11289 - protein, 373 aa, Moorena sp.; identical to SEQ ID NO: 3006

SEQ ID NO: 11290 - protein, 431 aa, unidentified; identical to SEQ ID NO: 5232

SEQ ID NO: 11291 - protein, 415 aa, Scytonema sp.
MSNFVFLIDSNKTPMNPIHPSHAKKLLASNKAAVFRYHPFTLIMNRVVENIVTYPITLKIDPGSKVTGIALVNNRDEVIWGMELHHRGQAIKDSLETRKGVRRGNRARHTRYREARFLNRKRPNGWLAPSLRHRVQTTETWVKRLCQFAPIAAIVQELVRFDLQQLENPEISDLEYQQGELQGYEVREYLLNKWERKCAYCGAENVALQVEHIKPKAKGGTNRISNLCLACQKCNEKKGTQDIEKFLAKKPEVLKRILSQAKRPLKDAAAVNTTRSCLFNVLKSTELPVTTGSGGRTKFNRTKLQLPKTHWIDAACVGIAEKLSVLTTKPLLVKSTGKGTRRLCRINKFGFPCSKPRTSYTHGWNTGDIASGKGVAGRVVVQSSTRLEIRVDGKRIGGKLSDFKRLHMKDSYSYG

SEQ ID NO: 11292 - protein, 414 aa, unidentified; identical to SEQ ID NO: 2588

SEQ ID NO: 11293 - protein, 331 aa, unidentified
LLSTRRQNRRSRRNRKTRYRVPRFDNRVHSKHKGWLAPSVEVKIQEHITVIKHICKILPISLVRVETAEFDTQRLKAMLAGKPLPVGTDYQLGEMYDEYNVRQYVLKRDHYTCQCCGTHNTAKKLVKLHVHHLESRKTGGNAPSNLVTLCTTCHKNLHKGRVTLDGKERGKPLRDAAFMGIMRKTLMVRLKEELPIPVQGTYGYITKMRREQNDIKKSHVNDARCISKHPLAEPCSVCYRTKAIRHHNRQTHKANFSKGGIRKRSQMPYVVEGYRLWDKVLYKGQECFVSGRRASGSFTLKKLDGTRISKGVTFKNLRLLEPATNYLIERM

SEQ ID NO: 11294 - protein, 415 aa, unidentified; identical to SEQ ID NO: 3548

SEQ ID NO: 11295 - protein, 406 aa, unidentified
MVYVQDIDGKPMMPTTRHGKVRRLLKANKATVVNLCPFTIQLTYKSTDHKQPVTLGIDAGAKHIGFSATTEKEELFACETTLRTDIVDLLSMRLQNRRTRRSRLRYRKSRFNNRGSSKKKGWVAPSVKQRIDSHLNEVNEIHKILPITKIVIEVAQFDTQKMKNHDISGADYQNGEQLGFWNVREYVLFRDGHKCSHCKGKSKDPVLNVHHLESRKTGGDSPSNLITLCESCHKAFHKGEIELKKKRGKSLRDAAVMGIMKWKLYEELKSRYDNVSMTFGYITKHNRIKYGIEKNHTSDAFVISRNFNAKRIERQYLKRLIRRHNRQIHKMKILKGGKKKNNQAPFEVFGFRLFDKVLYNNEIFFVYGRRKSGNFNIRDFNGENPKDVSHKKFKLIRGKRHPIILK

SEQ ID NO: 11296 - protein, 424 aa, Blautia sp.; identical to SEQ ID NO: 3351

SEQ ID NO: 11297 - protein, 424 aa, unidentified
MIYVRSKEGSVLMPTERCGKIGYLLRHGKAHVVSRVPFVVQLDYDSTTYTQDVSLGIDAGSKHIGVSASSEKKEMLAAQVELRSDIVKLLSTRRELRRTRRNRKTRYRKVRFDNRKKKDGWLAPSVEQKIESHLKVIRLVHKLLPVTKTTIEVAQFDAQKIKNPDIKGDEYQQGEQMGFWNVREYVLARDGHKCLHCKGKSKDPILNVHHLESRKTGGNSPSNLVTLCETCHRAYHRGEFELKIKRGNSLRDAAVMNIMRWAVYERAKAEFGNVHLTYGYITKHTRIENEIVKTHAADAFCIAKNIHARRLSSLFMCRCVPRHTRALQVATPKIGGIRRKTIASHKIGKSNFQRFDMVRWKGMDCFIFGSTNGRLILRDTEGTKMHENASVNIKTVKFLKRLKNNILMEEKDFRKLNNYGKRQN

SEQ ID NO: 11298 - protein, 414 aa, unidentified
MVYVINKQGQALMPTERFGKVRRLLKNSLAHVVCRIPFTIQLDYDTTDYTQPVSLGVDAGSKHIGISATTSEKEMYAADVELRNDIVDKLSTRREQRRTRRSRLRYRKARFNNRVSSKRKGWLAPSVENKIQTHLTVVEKIHKFLPITNIVVETASFDIQKINNPSISGSEYQQGEQLDFFNVREYVLFRDNHTCQHCKGKSKDKVLNVHHIESRKTGGDSPNNLITLCETCHKAYHRGEFELNVKRGKSFRDAAFMGIMRWSFYDRIKNIYPDVSMTFGYITKNTRITNNLPKDHYVDARCISGNPVAKPLGYYFYQKKVRCQNRQIHKANFLKGGRKKLNQAPFLVKGFRLFDLVEYQKDLYYIFGRRDSGFFDIRKLDGTKVNKGSINCKYLRLVDKRKSILIEKRMQVNL

SEQ ID NO: 11299 - protein, 431 aa, unidentified
MVYVLDQEGRPLMPTNRHGKVKHLLREGKAKVVKRTPFTIQLLYESTHYTQDIILGVDAGSKTIGMSATTEKQEVFAAEVTPRNDIVKLMSERRSLRRARRNRKTRYRPARFNNRVRSKHKGWLAPSVEVKIQEHITSIKRVLHLLPITKVIVETAEFDLQLLKAIENGDPLPEGTDYQKGEQLGHYNLRQYILHRDAYTCQACGEHKEGTKLHVHHLESRRVGGNAPDNLVTLCEACHKALHQGLITEDDLKKRKRRSTRDATFMGIMRKTLMTRLRNELTIPVAETRGYFTKYTRVEVLQLPKSHINDAFSICQGSIGFKASKETQANRIEEHYLIKPVRHHNRKLHKLTILKDGIRKSNQSDRYTKGYRLYDKVLFNGQECFIFGRRTSGYFDLRKLDGTKVHASASWKKLALLERQSNYLIEGKVAG

SEQ ID NO: 11300 - protein, 443 aa, unidentified
NIGEGSQPVERPRRQNLRVFVLNKRGKPLMPCSPAKARLLLKEKKAIVVRRTPFTIQLTIATGESKQPVSLGVDAGYKHVGLSASTEKAELYASEVELRKDITDLLSARRALRQSRRNRKTRYRAPRFDNRIRTKRKGWLAPSVENRINAHLSRIEAVLRLLPITKITVETASFDMQRLKNPDISGKEYQEGEQLGFWNVREYVLFRDGHVCRHCHGRSKDPVLNVHHLESRRTGSDSPDNLITLCETCHKALHRGEITLKAKRGQSFRAQAFTGIMRREVLNRLKASYPELKVHETYGYLTKHARIANGIVKSHGADAFCIAGNLGAERLGEFFFQKQTRRNNRQIHKLSILKGGIRKRNQAPFEAKGFRLFDKVACQGEEGFIFGRRSSGSFDVRKLDGTRISAGISCKKLRLLEKRRTYLTEIRKEEALPPLPEGRGLRA

SEQ ID NO: 11301 - protein, 414 aa, unidentified
MLCSPAKARLLLKEKKAIVVRRTPFTIQLTIATGESKQPVSLGVDAGYKHVGLSASTEKAELYASEVELRPDVSDLLSARRTLRQSRRNRKTRYRAPRFDNRIRTKRKGWLAPSVENRINAHLSRIGAILRLLPVTKITVETASFDTQLLKNPDISGKEYQEGEQLGFWNVREYVLFRDGHACQHCHGRSKDPVLNVHHLESRRTGGDSPGNLLTLCETCHKALHRREIKLKTKRGQSFRAEAFMGIMRWEVLNRLKASHPELEVHNTYGYRTKHTRIVNGIDKSHCADAFCIAGNLGAKRLGEFFFQKQTRRNNRQIHKLSILKHGLRKRNQAPFEVKGFRLFDKVVCQGEEGFIFGRRSSGSFDVRKLDGTRISAGISYKKLRLLEKRRTYLKEIRKEEALPPLPEGRSLRA

SEQ ID NO: 11302 - protein, 515 aa, Actinoplanes sp.; identical to SEQ ID NO: 2821

SEQ ID NO: 11303 - protein, 366 aa, unidentified
MYVTSDYKQEIVLGVDAGTKHVGLSATTKSKELYSSEVILRNDIVDLLSTRRQLRRTRRNRLRYRKPRFNNRVKSERPGWVAPSVRYKIDAHIRVIDNVCSILPISRIVIEVAQFDTQKIKNPEISGKEYQEGDQLGFWNTREYVLARDGHKCQYCKGKSKDPVLNVHHLESRKTGGDSPSNLITLCETCHKEYHKGNIDLKIRRGKSLRDAAVMGIMKWRLYEELKSKYDRVSMTFGYVTKYNRINHDIEKSHVSDAFVISKNFDAIRLGYYYKVRLVRRHNRQIHKQKILKGGIKRLNQSPFEVFGFRLFDRVMFENSYYFILGRRKTGSFNIRDIDGKKQKDITYKKLKLSRCKRFMIQKEMN

SEQ ID NO: 11304 - protein, 428 aa, unidentified
LKVFVLNMRGRPLMPCSPAKARHLLKAGKAVVRRRTPFTIQLRIATGETKQSVTLGVDAGAKHVGLSAATEKEEVFASEVELRQDITGLLAARLSLRRERRQRKTRYRAPRFLNRVRSKHKGWLAPSVENRIQAHLSRIDAICGLLPVTKIVIETASFDIQKIKHPDVEGTDYQQGDQLGFWNVREYVLFRDGHVCQHCHGHAKDKILNVHHLESRQTGGDAPNNLITLCETCHKACHAGKIKLKVKRGQSFREEAFIGIMRWTLLDRVRKAHPGLPVENTYGYLTKNTRITLGLPKAHCVDAYCIAGNLKAVRRGVYLHQRQVRKHNRQIHKCTVLSKTLKDGTKIGYRKLNQTPHLVKNFRLFDKVRCLGQTGFIFGRRSSGYFDVRRLDGVKISSCISYRKLTLLEKRSTYLTELRKEDGASSPV

SEQ ID NO: 11305 - protein, 426 aa, unidentified
MLKPNLVFVLDTHRKPLIPCKPSVARRLLNAGKAAAFRRFPFTIILKKEVTDTPESIELKLDPGSKTTGIALKQGNKIIFGAELTHRGQAIKASLELRRSLRRGRRNRHTRYRQARFLNRTRLKGWLAPSLQHRVETTMTWVNRFIRLAPIGSIVQELVRFDLPQLENPEISGIEYQQGELQGYEVREYLLNKWDRKCAYCGAENVPLQVEHIHPRAKGGSNRISNLCLACEKCNLKKGTQSIEQFLVNKPDLLKQILGQAKRPLKDAAAVNSTRWSLFNRLKQSGLPVVTGSGGLTKFNRTRLELPKAHWLDAACAGQVEFIELVTNQPLQIKATGHGTRQMCRTDKFGFPSRYVPRFKFVQGFQTGDIVKAVVATGKKVGEYVGRVAVRSTGSFNISDPSGLVQGISHKYCKPIQRKDGYGYGF

SEQ ID NO: 11306 - protein, 450 aa, unidentified; identical to SEQ ID NO: 2935

SEQ ID NO: 11307 - protein, 456 aa, unidentified
MSTCVCVLSNSGERLMPTFRLGKVRRLLKDGKAKIVKHHPYTIQLLYDSKTNTQPIEICEDVGYNYIGISVKSESHEYVSAQYDTLQDEKEHHDDCRKMRRARRNRLRYRKPRFDNRKRSEGWLAPSLEHKKQLNIRLIERYVSVIPITRATVEVGSFDTMLLQAIQKGESKPEGVDYQKGPRYNLATLREAVFYRDDYTCQVCGRKITDGAILHMHHMFYWKGRHGYQLDELVAVCEKCHTPANHQKGGKLYGFGKDKKFANLSGAAFMNAVRWQIVDALHATYGKEFVTITYGAMTKEKRIILGIEKTHNNDAYAMGDYHPAHRCVFRHYQKRRRNNRVLEKFYDATYIDARTGNKAKGKELFNGRINRNHKKDSENFHKYRSKKVSKGRRSIRRQRYAIQPYDTVRLEGKTYITSGCHNKGTRLLIPVNGKSKSVAISKVQVVCHAGAWIQII

SEQ ID NO: 11308 - protein, 430 aa, unidentified
MVYMLSHTGQPLMPTEDHRKVRLLLKDKKAKVVKRTPLTVQLLSCTHEYKQPVTLGVDAGSRHIGLSACTENRELYAEDLQPRNDIVKNLSDRRQYRRSRRNRKTRYRAPRFENRVHGKHKGWLAPSVEVKIQEHITAIKRICLRLPVTQVIVETAEFDMQLLKAMELGLPLPAGTDYQEGEMLGQYNVRQYVLFRDSYACQCCGAHPTAKKEVKLHVHHIESRKTGGNAPGNLITLCERCHKLLHEGKITLPGKRLHRPMRDAAFMGIMRKTLLARLRNELSVPVYETHGYITKYLREKHGIEKSHTNDARCIAGYPLASPCADIFCTKAVRHHNRQIHKATILKGGIRKRNQLPYLVHGFRLWDKVLCNGKEGFITGRRTSGFFVVKQLNGTTLSVGISHKKLRLLEKRTNYITERRTAIPLRLTLGV

SEQ ID NO: 11309 - protein, 419 aa, unidentified; identical to SEQ ID NO: 4877

SEQ ID NO: 11310 - protein, 373 aa, Moorena sp.; identical to SEQ ID NO: 3006

SEQ ID NO: 11311 - protein, 442 aa, unidentified; identical to SEQ ID NO: 4533

SEQ ID NO: 11312 - protein, 536 aa, unidentified; identical to SEQ ID NO: 2718

SEQ ID NO: 11313 - protein, 426 aa, unidentified; identical to SEQ ID NO: 3614

SEQ ID NO: 11314 - protein, 418 aa, unidentified
MVYVLNIDGQPLMPTNRHGNIRRLLKFGQAKVVKRCPFTVQLQYRSDTNVQEVSLGVDAGSKTIGLSATTKDKVLFEAEVMLRTDIVDLLATRREARRTRRNRKTRYRKARFDNRRKGEGWLAPSIRQKIETHLNVVKKVCQILPVSKITVEVASFDIQKIKNPDIQGEEYQQGEQLGFWNVREYVLFRDNHTCQCCKGKNKDKRLNVHHIESRKTGGDAPNNLITLCETCHTDYHIGKIQLPKSIKRGMVFRDAAFMGIMRWAFYNTLKEKYSDIPVHLTYGYITKNTRISNKLQKTHYIDARCISGNPLAESPSEVYLCKKVRCHNRQLHKFNISKDSKRKNNQAPYVVKGFRLFDKVKFNNIECFIFGRRATGFMDIRTFDGKRISPCAGYKKLKLLETRKNYIIERRQAGPSHI

SEQ ID NO: 11315 - protein, 415 aa, unidentified; identical to SEQ ID NO: 3370

SEQ ID NO: 11316 - protein, 450 aa, unidentified; identical to SEQ ID NO: 2935

SEQ ID NO: 11317 - protein, 440 aa, Clostridium sp.; identical to SEQ ID NO: 5468

SEQ ID NO: 11318 - protein, 479 aa, unidentified
LAKGSNLKDFVLRYICFKEFYLYLQKGVFMIKITNVPVLSCDGKPLMPTTQAYARILLKRNKAKVVDTEIFTIKLLQENKPSAKKHEVTLGLDVGFSNIGYSVRNDEQEFIGGTLEMLEGMSERITKKAMHRKQRNSRKRYRAARFDNRKKETGWLAPTIQHKNNTHDKIIEKLCNLFPVTVKVFEIGNFDTKKMVAPKHDCINYQEAYLEYKGNLRNSILFRDDYTCQLCNKNLFKDANVSLQVHHIIFESKGGTNKPSNLITLCTKCHTQANHKEGGVLYQWMIESKKVTKSLKEATYMNILASRLKEKHDFIQVFGYQTSVKRKNLGLEKSHSNDAFVISGGTTQIRAPHQTNFKQKRRHNRSLETFKDAKYIDIRSAESVDASVLNCGRRRRNKNLNTENLRVFRGKKMRKGVISRRLRTYKFESGDKVRYKGKLYTVRGNQNQGTRMKFKETGDKTYLVKDVVLHKANVGTYVD

SEQ ID NO: 11319 - protein, 428 aa, unidentified; identical to SEQ ID NO: 4442

SEQ ID NO: 11320 - protein, 426 aa, Lactobacillus sp.; identical to SEQ ID NO: 3294

SEQ ID NO: 11321 - protein, 535 aa, Streptomyces sp.; identical to SEQ ID NO: 4636

SEQ ID NO: 11322 - protein, 414 aa, unidentified; identical to SEQ ID NO: 2588

SEQ ID NO: 11323 - protein, 416 aa, unidentified
MVYVLDKNGQPLMPTDRHRKVRLMLQSGQAKVIKRCPFTIQLNYDSGHQTQEISLGIDAGSKHIGVSATTKIKVLYEADVELRNDIVDLLSSRRELRRGRRNRKTRYRQAKFNNRRRGNGWLAPSIRQKIGTHLTVVKNICKILPISRIMVETASFDIQKIKNPDIQGAEYQQGDQLGFWNIREYVLFRDNHTCQCCKGKSKDKILNVHHIESRKTGGNAPNNLITLCEICHTGYHKGAVQLPKTVKRGMRFKDAAFMGIMRWAFYEALKQQYEPVGTPVHNTYGYITKHTRIAYNLPKEHYVDARCISGNPEASSNGEYYYQKKVRCHNRQIHKLTVLKGGIRKQNQATYLVKGYRLFDKVSYQGKGYFVFGRRQSGFFDIRTLSGEKVNKGSLSCKKLKFIATRTYYLTERRAV

SEQ ID NO: 11324 - protein, 594 aa, unidentified
MSEIKRCIETWVFAKTGGLNKAICFYKYHRHMDVCCACRFSQLAVPHEWHCLVQYRSQQTPSQGKHNLLLWQGRLIVREVAYMSTVYVLNKDGKPLMPTTRGGHVRYLLKEKKARVVTSKPFTIQLLYETDDVVQPLYLGIDPGRTNIGVAVVKTDGTAVFTAHLETRNKEIPKLMQGRKKARRARRTNGRRCRRQRRAKANGTISKKCVKQTTAQNGSVSKRAKKIGVIKRHLPGCEKKVLCIGIKNKEAKFSNRTRPEGWLTPTANQLLQTHINLIKKIRKFLPVNDVVLEINKFAFMQLDNPNIQKWQYQQGPLYQKASLEEAVSEMQEHHCLFCKKSIVHYHHVVPQSENGSDTIGNIVGLCTKHHDLVHKDTAWQKKLAKKKTGLNKKYGALSILNQIIPALTKELSSLFPKHFFATNGKSTHDYRAAHDVSKDHWLDAYCIACSILPNDTCDKNINGRVPYKLKQFRRHDRRALHKENMSRVYTLDGKKVATNRHKAIKQTTDSLEEFRQRQPNDVCKLKVKEHHPEYRNPERNFPGCVFLVGKHTHVMQGTSGSHNGKADGYYDTNGNSYPSGKCKFVAKNKGIVFA

SEQ ID NO: 11325 - protein, 431 aa, unidentified
MPNKVYVINKHGRPLMPCSPAKARHLLDAGKAKVKKRTPFTIQLVYGSSGYTQEVILGVDAGSKTIGVSALTKKEELFAANVIPRNDVVDLLSTRREFRRARRNCKTRYRKPRFDNRVRSKHKGWLAPSVEVKIQEHITTIRRVYGILPVSKVVVETAEFDLQLLKAIADGKPVPQGEDYQKGEMYGHYNVRQYVLWRDDYTCQCCGAHATKKKEVRLHVHHLESRKVGGDAPDNQVTLCESCHEKLHKGLIAEKDFKKRKRRSTRDATFMGIMRKTLMQRLYSELPIPVIETRGYITKATREKLLVLPKSHTNDALAIAQGKRGFNVGYLPEIAQIDKIYTIRPVRHHNRQLHKAAILKGGIRKSNQAGKYVFGYRLFDKVQFNGQDCFIWGRRTTGIFTIKTINGKMIKDGISFKKLKPVEKSTSYLIA

SEQ ID NO: 11326 - protein, 410 aa, Geobacillus sp.; identical to SEQ ID NO: 4122

SEQ ID NO: 11327 - protein, 437 aa, unidentified
MSKVFVLDTNCKPLNPVYPGQARRLLSQGKASIFRRYPFTIILNTEVNNCEIEPLRLKIDPGAKITGLAIISDKTGEVIWGAELTHRGFAIRDALTNRRQLRRSRRNRKTCYRQARFLNRKRGEKWLAPSLISRVHNILTWVRRLIKVAPITDISQELVRFDTQIMENPEITGIEYQQGELAGYEVREYLLEKFERQCIYCGAEDTPLEIEHLIPRSKGGSNRVSNLGIACHACNQKKGNKTVQEFLKEKPDLAKKILARAKKPLADTSAVNSTRWELFNQLKQLGLPVEVGTGGLTKYNRCSQNLEKTHWLDACCVGKSTPKLLIKNIRLLQIKATGHGTRQMCRTDKFGFPSRYVPRYKFIYGFQTGDIVKAIVTKGKKIGTYTGKVATRSSGSFNISTTNGLIQGISYKYCQNIQKKDGYCYGLQTPTLHSSHR

SEQ ID NO: 11328 - protein, 423 aa, Scytonema sp.; identical to SEQ ID NO: 2740

SEQ ID NO: 11329 - protein, 424 aa, Anaerostipes sp.
MRVFVFNMRGRPLMPCSQRKARLLLRENKAMIYKYHPFTIQLTYTTGETKQDCHIGIDTGSKYIGAAVRSEDKVFWKGEIELRQDIRSNLDTKRIYRRSRRNRKTRYRKPRFLNRKRRDEWLPPSLQSRINHTFHWIDTLSSLVSNPILHIEVGKFDVAKMINPEIHGVDYQHGQTYGFFDERYFVFARDNYTCQCCGKSKNKILNTHHIIYRSNGGTNRVDNLITVCTDCHTSQNHRKGGIFYQWQEQHKKVKQYKEPPFMNTLRKRIFVAYPDAEITYGSETTPKRKAMKLDKTHYNDAIVISGINEIKENPEEWLLIKQFRKKKRSLHEATARKGRKKPNRNQTRNSKNTPYYKGFYLNDKVSVFGKSGYITGFTSNAAYIKDENNDYITLPNKTYKQVSINKMKLECHNNNWQYIIKNAV

SEQ ID NO: 11330 - protein, 512 aa, unidentified
MSTVYVLNKNGKPLMPTTRCGHVRRLLKEQKARAVASKPFTIQLLYETDDVVQPLYLGIDPGRTNIGVAVVKADGTAVFTAHLETRNKEIPKLMKKRKDSRRARRTNGRRCRRQRRAKANGTLSKKCVKQTTAQNGSVSKRAKKIGVIKRHLPGCEKEALCIGIKNKEAKFNNRTRPEGWLTPTANQLLQTHINLVKKIQKFLPISDVVLEVNKFAFMRLDNPNIQKWQYQQGPLYQKANLEEAVSEMQEHHCLFCKKPIAHYHHVVPQSENGSDTIDNIVGLCTKHHDLVHKETAWQEKLAKKKTGLNKKYGALSVLNQIILALTKGLSFLFPKHFFVTTGKNTYDYRTAHSVSKDHWLDAYCIACSVLPNDVCDSSINSHVPYELKQFRRHDRRALHKENMSRVYTLNGKKVATNRHKAIEQTTDSLEEFRQRQPNDVYKLKVKEHHPEYRNPKRNFPGCVFLVGKRTHVMQGSSGSHNGKADGYYDTNGNSYSSGKCKFVAKNEGIVFA

SEQ ID NO: 11331 - protein, 431 aa, unidentified
MPDKVYVISRLGHPLMPCSPAKARHLLDDKKAKVVKRTPFTIRLLYGSTKYIQPVILGVDAGSKTIGLLASTVKEELFAAEVMPRNDVVENLSTRRAFRRARRNRTTRYREPRSDNRVRSNHECWLAPSVKVKIQEHITSIKRVCTILPVSKVVIETAEFDLQLLKAIQDGKPIPEGEDYQKGEMYGSYNVRQYVLWRDNYTCTCCGVKGTDKKPVKLHVHHFESRKHGGNAPDNYGTLCEDCHKKFHLGIIIDEILKTRKRRSTRDAAFMGIMRKTLMQRLRAELSIPVAETKGYITKATREKLLVLPKSHTSDALAIAQGRHGFGIKAHTYVEPANHIYTVRPVRHHNRQLHKASILKSGIRKRNQASKYVFGFRLYDKVLYQGKECFVWGRRTSGSFLLRTIDGIKVKDGVSCRNLTLLERSSNYLIA

SEQ ID NO: 11332 - protein, 426 aa, Parasutterella sp.; identical to SEQ ID NO: 3045

SEQ ID NO: 11333 - protein, 447 aa, unidentified
MYWLIALNISKKEVSCMVYVLDIDGQPLMPTTRHGKVRRLLNSHLAKVVKRCSFTIQLLYQSTKETQPVSLGVDAGSKHIGLAATTDKKVVYQEELVSRNDVVKLISARRILRRSRRNRKTRYRKARFNNRVHSKHKGWLAPSVEVKIQEHITTIKRICQILPISEIQVETAEFDLQRLKAMKEGKPLPVGTDYQLGEQYDFYNTRQYVLHRDGYTCQCCGTHDNNIKLHVHHIESRQTGGDAPNNLIILCEHCHKALHEGKLELPKGKKRGKSYRDATFMGVMRKTLLERLKKEIDVPVEGTYGYITKCWREKTGLEKSHINDAICISKHPYAKPLDTYYLTKAVRHHNRQIHKSNFSKGGIRKRNQAPYLVKGFRLFDKVLYQGKEYFIFGRRATGYFDIRTLDGTKVNKGSIKYKKLRIQDTAKAYLKEARAIPHVNKFTCVLA

SEQ ID NO: 11334 - protein, 412 aa, unidentified; identical to SEQ ID NO: 6751

SEQ ID NO: 11335 - protein, 427 aa, unidentified; identical to SEQ ID NO: 4977

SEQ ID NO: 11336 - protein, 415 aa, Bacillus sp.; identical to SEQ ID NO: 2431

SEQ ID NO: 11337 - protein, 420 aa, unidentified; identical to SEQ ID NO: 3685

SEQ ID NO: 11338 - protein, 418 aa, Anoxybacillus sp.
KRPLAPCHEAVARKLLKQGKAAIYRRFPFTIILKKSVDESEIKATYRLKIDYGSRHTGLAILRGQEVVWLGQLDHRTDIKERIDKRRAFRRARRNRKTRYRKPRFLNRKRKEGWLPSSLESRVQNIQTWVNRLKKLCPIGYISYENAKFDTQLMRNPEINGVEYQQGTLQGYEVREYLLEKFGRKCCYCGKENVPLEVEHIIPKSRGGTDRVDNLCLACHDCNQRKGSKTAEEFGYPHIQKQVKESLKDASAINSTRWKVYEVLKQTGLDVECGTGARTKMNRIRLDLPKTHYFDACCVGESTTNHLYFKTKEVLFIKAKGRGSRSRTNLDRYGFPRGYLARQKFFFGFQTGDMVKAVVPRGKYQGVWFGEVACRKTGSFDIKGKDGKRIAQGINYRYVQVIQRFDGYAYGKGVAELA

SEQ ID NO: 11339 - protein, 428 aa, unidentified
LKVFVLNMRGKPLMPCSPAKARHMLKAGKAVVVRRTPFTIKLTIATGETKQDVTLGVDAGARHVGISATTEKEEVFASEVKFRQDITGLLADRLAFRRARRNRKTRYRAPRFNNRVRSKHKGWLAPSVENRIQAHISRIEAVCRLLPVTKIVIETASFDIQKIRNPEVEGTGYQQGDQLGFWNVREYVLFRDSHVCQHCHGHSKDKILNVHHLESRQTGGDAPNNLITLCETCHKACHAGKIKLKVKRAQSFRAEAFMGIMRWTLLDRVRKAHPGLPVENTYGYLTKHTRITHGLPKTHCVDAYCIAGNLKAVRRGVYLHQRQMRKHNRQIHKFTVLSKRLEDGTKIGYRKLNQSPYLVHGFRLFDKVRCLGQIGFIFGRRSSGYFDVRRLDGVKLSPSISWRKLTLLEKRSTYLTELRKQDGASSPV

SEQ ID NO: 11340 - protein, 414 aa, unidentified
MPCSPAKARLLLKEKKAIVKRRTPFTIQLTIATGETKQPVSLGVDAGYKHVGLSASTEKAELYASEVELRQDITDLLSARRALRQSRRNRKTRYRAPRFDNRIRTKRKGWLAPSVENRINAHLSRIEAVLRLLPVTKITVETASFDMQLLKNPDISGKEYQEGEQLGFWNIREYVLCRDGHVCQHCYGRSKDPVLNVHHLESRRTGGDSPGNLVTLCETCHKALHRGEITLKAKRGQSFRAEAFMGIMRWEVLNRLKASHPELEVNNTYGYRTKHARIANDIAKSHCADAFCIAGNLGAERLGEFFFQKQTRRNNRQIHKLSILKGGIRKRNQAPFEVNGFRLFDKVACQGEEGFIFGRRSSGFFDVRKLDGTRISAGISYKKLHLLEKRRTYLTEIRKEEVLPPLPEGRGLRA

SEQ ID NO: 11341 - protein, 424 aa, unidentified; identical to SEQ ID NO: 4376

SEQ ID NO: 11342 - protein, 408 aa, Bacillus sp.; identical to SEQ ID NO: 4228

SEQ ID NO: 11343 - protein, 337 aa, unidentified
LRVFVLNKRGKPLMPCSPAKARLLLKEKKAIVKRRTPFTIQLTIATGETKQPVGLGVDAGYKHVGLSASTEKAELYASEVELRKDITDLLSARRALRQSRRNRKTRYRAPRFNNRIRTKRKGWLAPSVENRINAHLSRIEAVLRLMPVTKITVETASFDMQLLKNPDIAGKEYQEGEQLGFWNIREYVLCRDGHVCQHCYGRSKDPVLNVHHLESRGTCGDSPGNLITLCETCHKALHRGEITLKAKRGQSFRAEAFMGIMRWEVLNRLKASHPELEVNNTYGYWTKHARIANGIAKSHCADAFCIAGNLGAERLGEFFFQKQTRRNNRQIHKLSIL

SEQ ID NO: 11344 - protein, 414 aa, unidentified; identical to SEQ ID NO: 5510

SEQ ID NO: 11345 - protein, 418 aa, unidentified; identical to SEQ ID NO: 10024

SEQ ID NO: 11346 - protein, 417 aa, unidentified
MIYVRSKEGSVLMPTERCGKIGYLLRHGKAHVVSRVPFVVQLDYDSTTYTQDVSLGIDAGSKHIGISASSEKKEMLAAQVELRSDIVKLLSTRRELRRTRRNHKTRYRKSRFDNRKKKDGWLAPSVEQKIESHLKVIRLVHKLLPVTKTTIEVAQFDAQKIKNPYIKGDEYQQGEQMGFWNVREYVLARDGHKCVHCKGKSKDPILNVHHLESRKTGGNSPSNLVTLCETCHKAYHRGEFDLKIKRGSSLRDAAVMNIMRWAVYERAKAEFGNVHLTYGYITKHTRIENGIAKTHAADAFCIAKNVHAMRLSSFFMCRCVPRHTRALHVANPKKGGIRRNTIASHKIGKSNFQRFDMVRWMGKECFIFGSTHGRPVLRDIDGLQVANQPSVNIKTIKFLKRLKNNILMEEKNFRRLN

SEQ ID NO: 11347 - protein, 424 aa, unidentified
MRVFVKNMRGEPLMPCTQRKARLLLKAGKARICKYHPFTIQLDYATGETKQDCTVGIDTGSKNIGIAVRSEDKVLFKGEVELRQDVKSNLDTRRIYRRSRRNRKTRYRKPRFLNRKRPDTWLPPSLENRIRHTFRWIDAFCLLVPSPCLHIEVGKFDAAKMIDPKIQGVDYQHGQTYGYYDVRYFVFARDHYTCQVCGKSRDKILRTHHIRYRSNGGTDRTDNLITVCTDCHTGRNHQKGGILYRWQEENKKVRSYKEPPFMNILRQRIFQRYPYAHITYGSETTQRRKELCLGKTHYNDAIAISGIQTITEDPKGWLLIRQSRKKKRSLHEANPRKGRKKPNRTQERSSKNTPSYRNFYLNDKVSVLGRSGYISGFTSGGCYVKDTDGQYITLPGKTYKQVGIANVHRICHNNNWQYITKRAL

SEQ ID NO: 11348 - protein, 421 aa, unidentified
MRGRPLMPCSPAKARHLLKAGKAAVRRRTPFTIQLRIATGETKQSVTLGVDAGAKHVGLSAATEKEEVFASEVELRQDITGLLAARLSLRRERRQRKTRYRAPRFLNRVRSKHKGWLAPSVENRIQAHMSRIDAICELLPVTKIVIETASFDIQKIKHPDVEGTDYQQGDQLGFWNVREYVLFRDGHVCQHCHGHAKDKILNVHHLESRQTGGDAPNNLITLCETCHKACHAGKIKLKVKRGQSFRAEAFMGIMRWTLLDRVRKAHPGLPVENTYGYLTKNTRITLGLPKTHCVDAYCIAGNLKAVRRGVYLHQRQVRKHNRQIHKCTVLSKTLKDGTKIGYRKLNQTPHLVKNFRLFDKVRCLGQTGFIFGRRSSGYFDVRRLDGVKISSCISYRKLTLLEKRGTCLTELRKEDGASSTV

SEQ ID NO: 11349 - protein, 413 aa, unidentified; identical to SEQ ID NO: 3587

SEQ ID NO: 11350 - protein, 431 aa, unidentified; identical to SEQ ID NO: 10509

SEQ ID NO: 11351 - protein, 317 aa, unidentified; identical to SEQ ID NO: 10219

SEQ ID NO: 11352 - protein, 454 aa, unidentified
  REGION 1..454: note = Ga0315273_10104718
MQKLQAKFKNTPKDASLVPCSVNSSLNKEETLSVKDKILTCNNPEENLHQHRGGSSLRVSNIVYVLNMRGQPLMPTTPRKARILLQSKKAKVVKRIPFTIQLTYQTGESKQLIDLCVDSGYKHIGLSAKTSKNEVFSADIKLRDNIKQLLAERSMYRRNKRNRLWYRKSRFNNRGKEGWFPPSIMNKINSHINIIDKICFLLPITNIIVETASFDIQKIKNPDIQGKEYQEGPQKDFDNVKAYVLYRDEYQCQYCKKSDIKLHVHHIESRQTGTNNPDNLITLCEKHHRDLHDGKIKLNVKKPKDFRNQTFMSIARNKMMEMLRKRYNNVQETFGYITKANRLSLGLEKSHINDAFSIGNGNIQTRCFSNIIVQKRRNNRCLQINRNGFKPSIRRKKSKLQPGDLVKVKNILYNVVGMFNKGTYVRVKNNMNKILNFNIKKINWEYSFGGFVWN

SEQ ID NO: 11353 - protein, 462 aa, unidentified; identical to SEQ ID NO: 7335

SEQ ID NO: 11354 - protein, 437 aa, unidentified
  REGION 1..437: note = Ga0315279_10004814
VVYIISKTGKPLMPTNRLGKVRHLLKDGLAKVVQRTPFTIHLLYDSDEYTQPITLGVDAGSKTIGLSATTDKKEVFSAEVQLRTDIVDLLSTRKQNRGTRRSHKTRYRKVRFLNRRIDKGWLAPSIRHKIATHLTMVDKIHKILPITNIIVEVAQFDIQKIKNPDTSGVEYQQGEQLGFFNVREYVLYRDDHKCQLCNGKSKDKILNVHHIESRKTGGNAPNNLITLCETCHKKHHEGDIKLKIKRGTIFKDPAFMGIMRWALYNTLKEKYPNILMTYGYLTKNTRIANNLPKIHRTDALCITGNPTVKWLDTWYFYKKVRCQNRQIHKNTINKGGTRKLNQLPFIIFDIRLFDKVKYNNQECFVFGRRLSGSFDIRLLDGTTVNAGVGYKKVKVLEQRKTILIESRKAIPPTADIDQTQFETDQQPVGFLAEKDHE

SEQ ID NO: 11355 - protein, 427 aa, unidentified; identical to SEQ ID NO: 5428

SEQ ID NO: 11356 - protein, 465 aa, unidentified
MSTCVCVLSNNGERLMPTIRLGRVRHLLKDGKAKIIKHHPFTIQLLYDSKTNTQPIEICEDVGYNYIGISVKSQSHEYVSAQYDTLQDEKACHDSCRKLRRTRRNRLRYRKPRFDNRKRGEGWLAPSLKHKKELNVNVVKMYCTVMPITHATVEVGSFDTMLVKAIQEGKVIPEGADYQKGPRYNLATLREAVFYRDNYVCKICGRKATEGAILHMHHMFYWKGRHGNSLNELLTVCEKCHTPANHQKSGKLYGFGEKIKFADLSGAAFMNTVRWQIVNELYAAFGKPFVTITYGAMTKEKRIALQLEKSHNNDAYAMGEFHPNLRCMFEHYEKARRNNRILEKFYDSRYIDIRTGEIATGKELFNGRINRNHKKDSENLHKYRGKRTYAGHRALLRKKVNLNPGDLVSLNGENLIVHSTHTKKNGAVNVEFETPAKSGQKSASLKKLKIVKAANSIHPAWKKIS

SEQ ID NO: 11357 - protein, 422 aa, unidentified
LNKRGKPLMPCSPAKARLLLKEKKAIVVRRTPFTIQLTIATGESKQPVSLGVDAGYKHVGLSASTEKAELYASEVELRKDITDLLSARRALRQSRRNRKTRYRAPRFDNRIRTKRKGWLAPSVENRINAHLSRIEAVLRLLPITKITVETASFDMQRLKNPDISGKEYQEGEQLGFWNVREYVLFRDGHVCRHCHGRSKDPVLNVHHLESRRTGSDSPDNLITLCETCHKALHRGEITLKAKRGQSFRAQAFMGIMRREVLNRLKASYPELKVHETYGYLTKHARIANGSVKSHGADAFCIAGNLGAERLGEFFFQKQTRRNNRQIHKLSILKGGIRKRNQAPFEAKGFRLFDKVACQGEEGFIFGRRSSGSFDVRKLDGTRISAGISCKKLRLLEKRRTYLTEIRKEEALPPLPEGRGLRA

SEQ ID NO: 11358 - protein, 293 aa, unidentified
SVEVKIQEHITVIKRICRILPITLVRVETAEFDTQRLKAMLAGKPLPVGTDYQLGEMYDEYNVRQYVLKRDHYTCQCCGAHNTAEKVVKLHVHHLESRKTGGNAPSNLVTLCTTCHKNLHKGKVTLDGKERDKPLRDAAFMGIMRKTLMARLKEELPIPVQGTYGYITKMRREQNDIKKSHTNDARCISKHPLAEPCSVCYRTKAIRHHNRQTHKANFSKKCIRKRSQMPYLVEGFRLWDKVLYKGQECFVSGRRSSGSFALKKLDGTSISKGVTFKKLRLLEPATNYLIERM

SEQ ID NO: 11359 - protein, 462 aa, unidentified
MGVLVIGQNGRELMPTTTRKARILLKEDKASVVCRHPFTIHLWYKTGCATQEGSIGIDTGSQHIGVGVTCGSKVILKDEHELRSSMEKRSLMETRATMRRGRRYRKVRYRKPKWRHHTKRMYFEKANRKGQHWRKVKTTTQSPRPKGWLPPSLQSKCDHHFRIIDRYLKYLPDSITKNLAIEVGRFDMARMNDPTIHGEMYQRGPMYDAENLRAYIFARDGYKCACCKAKAGSIRKKDGTSVKLVAHHILFRSRGATNNPRYMISVCDHCHTTKAHQPGGILYSWMENNKKVTRGLRDATFMNILRRRLFDRFPQAAFTYGNITAVDRKRLLLPKSHANDAVAISLFGKDVSVINATCQTLHYKQVRKSKRSLHEATPRKGRKGPNTKAIRNKKNTTHVNGFKLWDSVLANGQKLFICSFTGSSAYLVDQDGHYVLPPGKTYKQWTLSKLDRLHPNGNWLMA

SEQ ID NO: 11360 - protein, 425 aa, Moorena sp.
MSVNFVLVLDTNKKPLTPCKPGVARSLLKAEKAAVFRRYPFTIILKKEVMSQPKQCQLKIDPGSKTTGLALILNSAVVWAGELTHRGQQIKDALTSRRQLRRSRRFRKTRYRLPRFLNRTRPIGWLAPSLNHRVETTMTWVNRLIKFCPINSISQELVRFDTQKLQNPEVSGVKYQQGQLYGYEIREYLLEKWHRKCAYCGATEARLEIEHIKPKSKGGSDRVSNLAIACHDCNQTKGNQDIEQFLSGKPDLLKRILRQAKSPLKDAAAVNSTRSKLYNELKLTRLPVETGSGGLTKYNRCRLGLPKTHWLDAACVGTIDKLIVETNQPLIIKSTGHGNRQMCGTNKNGFPVRHRSNQQVHFGFKTGDIVKANVPKGKKLGSYAGRVLCRAKGSFDISTAKGIVSGINHKYCQSIHKKDGYNYSL

SEQ ID NO: 11361 - protein, 415 aa, unidentified
MFVYVISKDGQPLMPTTRFGKVRRLLKEKKAKVIIRCPFTIKLLYEPETQVVQEVVLGQDTGSKYVGTACVSNNKILYQSEVVLRKDIKKKMDSRRNLRRNRRHRKTRYRKARFLNRANSKKKDRLPPSVKSKVQSHIDEIEFCKKILPISKIILEVSQFDTALMKNPALIDEKVKRWGYQKGFNYGYSSRREAVLNRDNYTCQCCGKKHVRFEVHHIFFRSQGGSDDEKNLITLCKECHNAIHAGTLILNKKPKTLRLKYATQMSIIRSQLLKVYPDAIETFGFVTKENRNSLNLSKEHYIDACVIASSGREFKLNNIIYQKRRVAKGDYKLTRGKQKMPIGKIQGFKRFDKVKYLGQEYFIKSRMSTGFAILGDIFNNKIDFSYMPKCKKTPKLSNLERISARSSCLCISRTA

SEQ ID NO: 11362 - protein, 512 aa, unidentified
MSTVYVLNKDGKPLMPTTRCGHVRHLLKEQKARVVASKPFTIQLLYKTNDVVQPLYLGIDPGRTNIGVAVVKADGTAVFTAHLETRNKEIPKLMKKRKDSRRARRTNGRRCRRQRRAKANGTISKKCVKHDTAQNGSVSKRAKEIGVIKRHLPGCEKDVLCIGIKNKEAKFSNRTRPEGWLTPTANQLLQTHINLVKKIRKFLPISDAVLEINKFAFMQLDNPNIQKWQYQQGPLYQKANLEEAVSEMQEHHCLFCKKPIAHYHHVVPQSENGSDTIGNIVGLCTKHHDLVHKDTAWQKKLAKKKTGLNKKYGALSVLNQIIPALTKELSSLFPKHFFATNGKSTYDYRSAHGVSKDHWLDAYCIACSVLPNDVCDIGINNRVPYELKQFRRHDRRALNNENMSRVYTLNNNVVATNRHKATKQTTDSLEEFRQNHPDDVCKLKVKEHHPTYRNMNRNYPGSVFLIGKQVHVMQGIAGSKDGEATTYKDTNANSIAAGKCKFVAKNSGILFV

SEQ ID NO: 11363 - protein, 442 aa, unidentified
MSTSVFVLDKKHRPLMPCRPARARRLLRAGRARVVKRFPFVIRLVDRTVEQSEVQPVLIKLDPGSRETGAAVVRDDEKKRHHALAFFVIKHRGGAIRDALKARSAFRRRRRSQNFRCRSPRFLNRVKPKGWLPPSLRHRVETTLSFVRRMCRYLPVSGIATELVKFDSQKLQNPEVSGVKYQQGTLFEYEVREYLLEKFGRKCVYCGAEGVPLNIDHVVPRAKGGSNRVSNLVLACVSCNQKKGARSLEDFLKGKPEVLARVRRELKTPLRDAAAVNATRWVLFNELKATGLPVETGSGALTKFNRHAFGVEKEHWLDALCVGRLNGVVTRKGLNALEIRCMGRGSRQRTRLTKYGFPRGYLMRQKCVHGFATGDMVEANVPKGKKAGLWRGRVAVRVSGSFNIQTPKGVIQGVGWKHCRLISHNDGYGYAWLGHAPHSSPA

SEQ ID NO: 11364 - protein, 376 aa, Parasutterella sp.
  VARIANT 18: note = X can be any naturally occurring amino acid
MFIIWKADVRAEIHPATXTEKAELYASEVELRQDITDLLSARRALRQSRRNRKTRYRAPRFNNRLCTKRKGWLAPSVENRINAHLSRIKAVLRLLPVTKITVETASFDLQLLKNPDISGKEYQEGEQLGFWNIREYVLCRDGHVCQHCYGRSKDPVLNVHHLKSRRMGGDSPGNLITLCETCHKALHRGEITLKAKRGQSFRAEAFVGIMRWEVHNRLRALHPGIEVSNTYGYRTKHARIANGIAKSHCADAFCIAGNLGAERLCEFFFQKQTRRNNRQIHKLSILKGGIRKRNQAPFEVKGFRLFDKVACQGEEGFIFGRRSSGFFDVRKLDGTRISAGISCKKLHLLEKRRTYLTEIRKEEALPPLPEGRGLRA

SEQ ID NO: 11365 - protein, 430 aa, unidentified
MPKVYVLNRHGRPLMPCTPAKARHLLDAGKAKVKKRTPFTIQLVYGSSGYTQEVILGVDAGSKTIGMSASTTKEELFSAEVKPRNDVVDLLSTRREFRRARRNRKTRYRKPRFDNRVRSKHKGWLAPSVEVKIQEHITAIKTVCRILPVSKVVVETAEFDLQLLKAIADGKPVPQGEDYQKGEMYGHYNVRQYVLWRDGYTCQCCGAHATQKKEVRLHVHHLESRRVGGDAPDNLVTLCTACHDKLHKGIIMAADIKKRKRRSTRDATFMGIMRMTLLRRLREQLPVPVVETRGYITKATRENLLVLPKSHTNDALAIAHGPQGFRAEYLPNIRQADRLYTIRPVRHHNRQLHKATILKGGVRKANQAEKYICGFRLYDKVLYNGIESFVWGRRTSGSFLLRQLNGEKVKDGVSYKHLKLLERSQSYLVA

SEQ ID NO: 11366 - protein, 330 aa, unidentified
MTQRAKYRRNRRNRKTRYRKARWLNRASSIKKDRFSPTMQSKLHSHVREIEYIQSILPITEMVFETGQFDMQLMKNPSLANPKVRPWGYQKGANYGFENTKAMVLNRDNYTCQCCKGKHKDSKLEVHHIVFRSQGGSDEESNLLTLCHTCHKDLHSGKINPKLSGKVKGNLKYATQMNSIRKQLFRFYPNAIETFGYVTKANRLHLGVDKEHYYDACTIATQGNAFNVKSNLYKKKCVSDGDFQKTKGIRSEEPIVTDKICGFRKFDKVRYFGNDYFIKGRMSTGYAILMDIDGNKIDFSTMPRGYKTPKLSNCKRITARSTVMTQVKVV

SEQ ID NO: 11367 - protein, 453 aa, Erysipelotrichaceae sp.
MSVAVLSSTGRKLMPTSNYRARKLLKGGRATIECYRPIFTIRLTDRKEGETQPIEYACDTGYQHVGVSIKSKKHEFVHAQYDMLSDETERHNNRRKYRRTRRNRLRYRKPRFDKRSKKNKDMASSLRHRKENQIRLFESFCKVLPITSATFEMGKFDTQLLQAIADGKPLPEGKDYQQGSKYLFQTEREAVFARDNYTCQVCGKSIKDGAILHTHHIGFWKNYRSNRISNLLTVCGHCHTAKNHKPGGKLWGLEPKSTDLQDATYMSTVRWSMYRDLMLSHPEVDIHIQYGAKTAVIRKTLHLSKTHANDAYCIGSLHPKHRTTEAVYQKKRRNNRILAKFYDAKYVDVRDGKKKTGATLSCGRTNRRESRRSDKNLRIFRGKKVSKGRTSVRKRRYFYQPGDTVLHRSQRFAVNGTHCNGTRVILSTGKSVKKTDLVCIKKEGGWRFLPTQA

SEQ ID NO: 11368 - protein, 238 aa, unidentified; identical to SEQ ID NO: 7175

SEQ ID NO: 11369 - protein, 442 aa, Sutterella sp.
MSTTVFVLDKKHRPLMPCRPARARRLLRAGRARVVKRFPFVIRLVDRTVEQSEVQPVLIKLDPGSRETGAAVVRDDEKKRHHALAFFVIKHRGGAIRDALKARSAFRRRRRSQNFRCRSPRFLNRVKPKGWLPPSLRHRVETTLSFVRRMCRYLPVSGIATELVKFDSQKLQNPEVSGVKYQQGTLFEYEVREYLLEKFGRKCVYCGAEGVPLNIDHVVPRAKGGSNRVSNLVLACVSCNQKKGARSLEDFLKGKPEVLARVRRELKTPLRDAAAVNATRWVLFNELKATGLPVETGSGALTKLNRHAFGVEKEHWLDALCVGRLNGVVTRKGLNVLEIRCMGRGSRQRTRLTKYGFPRGYLMRQKCVHGFATGDMVEANVPKGKKAGLWRGRVAVRVSGSFNIQTPKGVIQGVGWKHCRLISHNDGYGYAWLGHAPHSSPA

SEQ ID NO: 11370 - protein, 427 aa, Parasutterella sp.; identical to SEQ ID NO: 6030

SEQ ID NO: 11371 - protein, 477 aa, Subdoligranulum sp.
MSTCVCVLSNSGERLMPTFRLGKVRRLLKDGKAKIVKHHPFTIQLLYDSKANTQPIEICEDVGYNYIGISVKSESHEYVSAQYDTLQDEKACHDSCRKLRRTRRNRLRYRKPRFDNRKRGESWLAPSLKHKKELNVNVVKMYCAVMPITHATVEVGSFDTMLVKAIQEGKAIPEGADYQKGPRYNLATLREAVLYRDNYTCQVCGRKVADGAILHMHHMFYWKGRHGDSLNELLTVCEKCHTPANHQKSGKLYGFGENVKIADLSGAAFMNTVRWQIVNELYAAFGKDFVTVTYGAMTKEKRIALRLEKSHNNDAYAMGEFHPNCRCTFEHYEKVRRNNRILEKFYDSRYIDIRTGEIATGKELFNGRINRNHKKDSENLHRYRGKRTYAGHRALLRKKVNLNPGDLASLNGEVLVVHGTHTNKKGAVNVEFKTPGKSGQKSASLKKLKIVKAADSMHSAWEKNLNHLKKGVAGYLR

SEQ ID NO: 11372 - protein, 515 aa, unidentified
MTALEEKLSKTEYIYVLGFDGKPQMPTRRKRHVLKLLKTGRARIAEDIPFTIRLTYRNAPVLQPVTLAEDPGRTNIGAAVLSPLGDLLFAAVIETRNKEIKKLMADRQKSRQASRRGERKARQRLAKRYGSMVKSGMVMRKLPMYAADKFVICKFIRNTQARFCNRKRCPDWITPTVQHLVQTHLNIIRKISRYLPVTDIAFEVNRFAFMHMENPEAMGVDFQNGPLKGYGDVKEAIRTQQHGKCLMCKKPIAHFHHIVPRSRGGSDTIQNLAGLCTECHTKVHTDTAFRKDFDEKKSGQLKKYGALSALNQAVPFICKKLLEEYGEEHVHFCRGLDTSLIRTAFGFEKTKKNQMHEVDAYCIGLAALEVNEVETPAFDHTFQIRQFRRQDRSIIHHQTGRSYYQGKEKVAQNRKPGFEQKTTALSQWYKEQIRIHGEKEAEKLRSQLRVEKSCRHYNDMDRFLPGAVFLYEGKRYVLSGRITNGKYLRACGQGMKNFPAAECTFIRHNAGLVFI

SEQ ID NO: 11373 - protein, 414 aa, unidentified
MPCSPAKARLLLKEKKAIVKRRTPFTIQLTIATGETKQPVGLGVDAGYKHVGLSASTDKAELYASQVELRQDITDLLSARRALRRARRNRKTRYRAPRFNNRIRTKRKGWLAPSVENRINAHLSRIEAVLRLLPVTKITVETASFDMLLLKNPDIAGKEYQEGEQLGFWNVREYVLFRDGHVCQHCYGRSKDPVLNVHHLESRRTGGDSPGNLITLCETCHEALHRGEIALKTKRGHSFRAEAFMGMMRWEVLNRLKASHSELEVNNTYGYRTKHARIVNGIDKSHCADAFCIAGNLGAERLCEFFFQKQTRRNNRQIHKLSILKGGIRKRNQAPFEIKGFRLFDKVACKGEESFIFGRRSSGSFDVRKLDGTRISAGISYKKLRLLEKRRTYLTEIRKEEALPPLPEGRGLRA

SEQ ID NO: 11374 - protein, 430 aa, unidentified; identical to SEQ ID NO: 4504

SEQ ID NO: 11375 - protein, 431 aa, unidentified
MPNKVYVINKHGRPLMPCSPAKARHLLDAGKAKVKKRTPFTIQLVYGSSGYTQEVILGVDAGSKTIGMSASTTKEELLSAEVKPRNDVVDLLSTRREFRRARRNRKTRYRKPRFDNRVRSKHKGWLAPSVEVKIQEHITSIKRVCRILPVSKVVIETAEFDLQLLKAIADGKPVPQGEDYQKGEMYGHYNVRQYVLWRDDYTCQCCGAHATKKKEVRLHVHHLESRKVGGDAPDNQVTLCESCHEKLHKGLIAEKDFKKRKRRSTRDATFMGIMRKTLMQRLYSELPIPVIETRGYITKATREKLLVLPKSHTNDALAIAQGKRGFNVGYLPEIAQIDKIYTIRPVRHHNRQLHKAAILKGGIRKSNQAGKYVFGYRLFDKVQFNGQDCFIFGRRTSGYFVVKTIDGKVIHNSASFKKLKLVERASNYLIA

SEQ ID NO: 11376 - protein, 651 aa, Sphaerisporangium sp.
  VARIANT 5..58: note = X can be any naturally occurring amino acid
  VARIANT 202..260: note = X can be any naturally occurring amino acid
VLPQXXXXXXXXXXXXXXXXXXXXXXXXXXXXXXXXXXXXXXXXXXXXXXXXXXXXXXVLPQPAALESVGADNPGGGDETAHGLPALPGAGVEHGRGEIGVDGTRLLRRHPEGASASQGADREVHPVVFVLDKHGRPLDPCHPARARRLLACGRAVVVRHTPFVIRLRDRVAADSTMAGVELGIDPGSKHTGIAVFRTDGGXXXXXXXXXXXXXXXXXXXXXXXXXXXXXXXXXXXXXXXXXXXXXXXXXXXXXXXXXXXRTGLYALQLDHRGGQIRDKLASRAALRRGRRSRNLRYRAPRFLNRTKPKGWLAPSLKHRVGGTMSWVSRLSRWTPVTAVHVEKVSFDTHALSAGKPLEGVEYQQGTLAGYEVREYLLAKWGRKCAYCGAENTPLNIDHIHPRSRGGSDRISNLCVACIPCNQAKNATPIEEFLKAKPALLKRILLAAKAPLRDAAAVNSTRWALWRALTQTGLGVATASGGRTKWNRSRTDAPKSHTLDALHVGHLDAVIDWPSVVLVVAATGRGTYARTRADRYGFPRLRLPRTKTVHGYATGDLVRAVVPTGAKAGIHTGRVAVRTSGSFNIRTRHGLVQGIHHRHVRLLQRADGYAYTTHPEVRHRAAFPPPPEGGGSTLEVIDDPDLRLLRRVGTVG

SEQ ID NO: 11377 - protein, 502 aa, Streptomyces sp.
MQRACTRPAARHTDLDSFGEAVLGREAHQLNRTVTINAGADSAEAQAVGPGAGCSRVFVLDRRGVPLTPCHPARARILLAKGRAAVVRHTPFVIRLKDRLVEESEVDGVEVRIDPGSKGTGIAVTDDLTTVDTVTGEVVTSRRGLFAVELRHRGAQIKAKLEQRSNYRRRRRVAHLRYRAPRFNNRTRPRGWLAPSLQHRVDTTMSWVERLRRWAPVAAVHVERSSFDSHALGLGKESLDGVEYLQGTLAGYEVRQYLLEKWGRACAYCGAQGAPLQVEHIQPKADGGSDRIANLTLACQPCNQAKAAKPIEIFLAERPSVLARIQRQAKTPLRDSAAMNATRWRLWSRLNKVGLHVSAWSGGRTKYNRHTQHLAKTHTLDALAVGDIPTGTRIVRHPDTVLVAKATGRGSYARTRTDKYGFPRLRLPRQKTFFGYQTGDLVRAVVPTGKKAGTHIGRVAIRKTGNFNISTAAGPVTDIHRRHIRRLQRADGYGYTMRKETA

SEQ ID NO: 11378 - protein, 437 aa, Clostridium sp.; identical to SEQ ID NO: 8243

SEQ ID NO: 11379 - protein, 439 aa, Arcobacter sp.
  source 1..439: note = isolate UBA6788
LVFVIDKQKNQLLPTTNAKARILLNANKAVIHKIYPFVIRLKTSKTINANNKCAIKLDPGANTTGVAIVDKEKCLFLMEIIHRGKEIRKALFQRKVVRRNRRQRNTRYRQARFQNRIKRNGWLAPSVKSRADNIINIVNKLSKYIPLTNVAIESVSFNTTDMTEGIKLYGKEYQNGNLKDTKLRKFLMEKYSNRCNYCGSIEKLEVEHILSKSKGGTDSIKNLTLSCRKCNELKNNLSLKQFGKLINRDLSHLEPLQTPKSAAIIQSARNYTIAQLAKSFEIETGEGWETSFNRKEVNLPKEHYYDALCVGKDYDYRIVANTVLVIKARGRGSRQMCLMDKYGFPRTSPKSSKSVKGFQTGDIIKAKVPDGKKQGKYFGKVAVRTNGYFNITTDTQTIQGIGHKHCKVIQRGDGYAYFMKGASGFLSGLEDRVSTAILR

SEQ ID NO: 11380 - protein, 406 aa, unidentified
MVYVQDINGKSLMPTTRHGKVRRLLKDKKAVVVNLCPFTIKLMYVTSDYKQEIVLGVDAGTKHVGLSATTKSKELYASEVILRNDIVDLLSTRRELRRVRRNRLRYRKPRFNNRVKSKHPGWIAPSVRYKIDDHIRVIDNICSILPISRIVIEVAQFDTQKIKNPDISGKEYQEGDQLGFWNVREYVLARDGHKCQHCKGKSKDAILNVHHLESRKTGGNSPSNLITLCETCHKEYHKGNIKLKVKRGTSLRDAAAMGIMKWKLLDKLKSLFPNVSMTFGYITKHNRIKHEIKKSHISDAFVISKNFEAKRLGYYFKEKLVRRHNRQIHKTKILKGGKKKMNQAPFKVFGFRLFDKVEFQGNEYFIYARRLSGYFNIRDINSENKKDVTYKKLNHIGYGLISVETE

SEQ ID NO: 11381 - protein, 456 aa, unidentified
MSTCVCVLSNSGERLMPTFRLGKVRRLLKDGKAKIVKHHPFTIQLLYDSKANTQPIEICEDVGYNYIGISVKSESHEYVSAQYDTLQDEKEHHDDCRKYRRTRRNRLRYRKPRFDNRKRSEGWLAPSLEHKKQLNIRLIERYVSVIPITRATVEVGSFDTMLLQAIQKGESKPEGVDYQKGPRYNLATLREAVFYRDNYTCQVCGRKVADGAILHMHHMFYWKGRHGYQLDELVTACEKCHTPANHQKGGKLFGFGEDKEFANLSGAAFMNAVRWQIVNALYATYGKEFVTITYGAMTKEKRIILGIEKTHNNDAYAMGDYHPAHRCVFRHYQKRRRNNRVLEKFYDATYIDARTGNKAKGKELFNGRISRNHKKDSENFHKYRNKKVSKGRRSIRRQRYAIQPYDTVRLEGKTYITSGCHNKGTRLLIPANGKSKSVAISKVQVVCHAGAWIQII

SEQ ID NO: 11382 - protein, 532 aa, unidentified
MSTVYVLNKDGKPLMPTTRGGHVRHLLKEQKARVVRAKPFTIQLLYETNDVVQPLYLGIDPGRTNIGVAVVKADGTAVFTAHLETRNKEIPKLMQDRKKARRARRTNGRRCRRQRRAKANGTISKKCVKQDTAQSKNPSKRAKEIGIIKRHLPGCEKDVLCIGIKNKEAKYTNRARLEGWLTPTANQLLQTHINLVRKMQKFLPISDVVLEVNKFAFMRLDNPDIQKWQYQQGPLYKKESLESAVSEMQEHHCLFCKKPIDHYHHVVPKSENGSNTIANIVGLCAEHHNLVHKDAAWQKKLAEEKVGLNKKYGALSVLNQIIPALTNKLSVLFPKHFFVTAGKSTHDYRAAHGVSKDHWLDAYCIACSVLPSNVCDSNINNHMPYELKQFRRHDRRALHKENMGRVYTLNGKAVATNRHKAIKQTTDSLEEFRQNYPDDVYKLKVKEHHPAYRNLNRNYPGSVFLVGKQAHVMQGIASSKDGKTTKYNDTNATTITAGKCKFVAKNSGILFVQCKFRKALSDGTTKKLQYPV

SEQ ID NO: 11383 - protein, 413 aa, unidentified; identical to SEQ ID NO: 2636

SEQ ID NO: 11384 - protein, 443 aa, Halomonas sp.; identical to SEQ ID NO: 7694

SEQ ID NO: 11385 - protein, 431 aa, unidentified; identical to SEQ ID NO: 7229

SEQ ID NO: 11386 - protein, 474 aa, Halomonas sp.
LKDLRHQARKGSILEGDRMAVFVLGKNKQPLMPCSEKRARLLLERGRAVVVNRTPFVIRLRDRRQSDGTLQPTLLAADPGSKETGLALIRLEDNTTDEQAPAIRHVLCLFQLVHRGFQIRQALEQRAGFRRRRRSKNLRHRKPRFDNRTRKKGWLPPSLQHRVDTTMAWVDKLCRWVPVTHLSMELVRFDMQKLENPEITGVEYQQGTLLGYEVREYLLEKWGRACAYCGTGDTRLEIEHVVPRSRDGSDRVSNLTIACHDCNTAKDSQWLTDFFATDKGLKKRLKANGLSAAVRLERVERQLKLPLRDATAVNATRWALFGAMKTTGLPVAVGSGGRTQYNRQCLGIPKTHALDAACVGNVDFLKGWQIPTLVIKATGRGSYQRTRLDKYGFPRGYLMRQKQVQGFQTGDRVRAIVPTGKKAGTHTGRVAIRKTGSFNIQTEQGAIQGISWRYCTLLQRGDGYGYHPLPTIQA

SEQ ID NO: 11387 - protein, 441 aa, Sulfobacillus sp.; identical to SEQ ID NO: 4231

SEQ ID NO: 11388 - protein, 485 aa, unidentified; identical to SEQ ID NO: 10557

SEQ ID NO: 11389 - protein, 512 aa, unidentified
MSTVYVLNKDGKPLMPTTRCGHVRHLLKEQKARVVTSKPFTIQLLYETDDVVQPLYLGIDPGRTNIGVAVVKTDGTAVFTAHLETRNKEIPKLMQGRKKARRTRRTNGRRCRRQRRAKANGTISKKCVKQTTAQNGSVSKRAKEIGVIKRHLPGCEKDVLCVGIKNKEAKFSNRTRQEGWLTPTANQLLQTHINLIKKIRKFLPISNVVLEINKFAFMQLDNPNIQKWQYRQGQLYQKASLEEAVSEMQEHHCLFCKKPIAHYHHVVPQSENGSNTIGNIVGLCTKHHDLVHKDTTWQKKLAKKKTGLNKKYGALSVLNQIIPALTKELSSLFPKHFFATNGKSTYDYRAAHSVSKDHWLDAYCIACSVLANDVCDSNINSRVPYELKQFRRHDRRALNNENMSRVYTLNGKVVATNRHKATKQTTDSLEEFRQNHSDDVCKLKVKEHHPTYRNMNRNYPGSVFLIGKQVHVMQGIAGSKNGEATTYKDTNANSIAAGKCKFVAKNSGILFV

SEQ ID NO: 11390 - protein, 427 aa, Parasutterella sp.; identical to SEQ ID NO: 3787

SEQ ID NO: 11391 - protein, 421 aa, unidentified
MLVFVKNKHGENLMPCKPSKARKLLKQKKAKIISYKPFTIQLLYGSSGYKQPVTLGVDLGSKHIGIAVTSEDKVLIKGEIELRDDIKENLDIRRQYRRSRRYRKTRYRKPRFNNRKRPEDWLPPSIQSRIDNTFRWIDNFINLLPNPKLCIEVGKFDVQKMMNPDIEGVEYQQGETYGYYDVRYYVFARDNYTCQVCKKKDKILQTHHIVYKSKGGTDRPSNLITVCTDCHTHKNHQEGGIFYKWMVEKKKMPSYKETPLMNIMRRRVFEKYPEANIVYGSYTAIRRKELGLEKTHYNDAIAITGIESIKHNPDNYFKIKQFRKKKRSLHEAIPRKGRKEPNRTQKRNSKNTKYRNGFYLNDKVKVLGKVGFITGFTNGGAYIQDIEGNYITIPNKSYKQVSFKYIEFINHNNNWQFISHL

SEQ ID NO: 11392 - protein, 407 aa, unidentified
TNGRRCRRQRRAKANGTISKKCVKQTTAQNGSVSKRAKEIGVIKRHLPGCEKDVLCIGIKNKEAKFSNRTKPEGWLTPTANQLLQTHINLVKKIRKFLPISDVVLEINKFAFMQLDNPNVQKWQYQQGPLYQKANLEEAVSEMQEHHCLFCKKPIAHYHHVVPQSENGSNTIGNIVGLCTKHHDLVHKDTAWQKKLTKKKTGLNKKYSALSVLNQIIPALTKELSSLFPKHFFATNGKSTYDYRAAHGVRKDHWLDAYCIACSVLPNDVCDKNINSRVLYELKQFRRHDRRALNNENMSRVYTLNENVVATNRHKATKQTTDSLEEFRQNHPDDACKLKVKEHHPTYRNMSRNYPGSVFLVGNQVHVMQGVAGSKDGKATTYKDTNANSIAAGKCKFVAKNSGILFV

SEQ ID NO: 11393 - protein, 431 aa, Petrotoga sp.; identical to SEQ ID NO: 5928

SEQ ID NO: 11394 - protein, 415 aa, unidentified
MENKIEYCFVIDKNNKPLTPTKVNKGWYLIRKGRAKLKSKYPMVIQLEKEVKSDEYDESHMVCGIDDGSTHVGLAIVQKCLTKNKVVFKGTIEQRQDVKRLMDVRRGYRRYHRYHKRYRQARFNNRSSSKRTCRLAPSIKQKKDAILRVLYQLNKWVNIQEYYLEDVCIDIRAMTDDYKPYRWQYQKSNRLDENLRKATILRDGCRCQECGKSNCILEVHHIRARRYGGANTIGNLITLCKKCHDKTESREKDFEERYFNMIKSKPKRFDYAMHVMQGKTYLREKISELGILHLTNGGETANKRIEWDIVKSHSNDAICIADGIPDTCDIKEWIIKPMRRKSKAKTDNVLGIKHRDLVSYTYKSGETHTGYVTALYPEQLALNFQSKTKHCKKVNARKCRLLWKFNKIYWLEQCV

SEQ ID NO: 11395 - protein, 424 aa, Moorena sp.; identical to SEQ ID NO: 2651

SEQ ID NO: 11396 - protein, 430 aa, unidentified
LSWSNYSNIQEVIETLVYVLNNQGNPLMPCKEAKARKLLKQNKAIIAKYEPFTIQLTFECENQTQEVSLGVDAGSKHIGISVTTEKQVLYEADVELRNDIVDKLSSRRETRRARRNRLRYRPARFNNRVHSKHKGWLAPSVEQKINSHIQIIKKLHQILPVSKIIVETAQFDIQKIQDPDIKGEQYQQGNQMGFWNVREYVLFRDEHKCQYCKGKSKDNRLNVHHIESRKTGGNSPNNLITLCETCHNDYHQGKIQLNIKRSKSFRDAAFMGIMRKTLLLRLKQIYPNVQETFGYITKSTRIENNLPKEHYIDARCISGNPLAKPFGYYLYQKCIRRQNRKINRDKFIKGGIKKKNRLAGDVFGFGLFDTVGYQKKRYFVFGRRKRGEFDIRTLDGEKVNNGSIRYKKLKLIQKNNNILTERRLSVAPQL

SEQ ID NO: 11397 - protein, 458 aa, Scytonema sp.
MMITNSVFVLSKNGKILKPTTTVRARILQAQGKAKKLKLFPFTLILDKDVDENVEPYLELRIDPGSRYTGISLVDLNKNEVIWAMELEHRGLAIKMELIKRAGIRRSRRSRRVRYRKKRFDRKKPDGWLAPSLRHRLLTTQTWIKRLLKIAPIKSIAIESVKFDLQKMETPDIEGIEYQQGTLFGYTLREALLEHWGRECVYCGKTDVPLQIEHINARSKGGSERFSNLTLSCEKCNQKKGNKPVEQFLKGKPEILQKIKSHQKKSRFNAAAVNSTRKAIFEMAHQFGLPVISGDGASTKMIRIKSGLPKLHWIDSACVGTSEIVKLRICQPLRVTCTGHGTRQAQRVNAKGFPAIASIKKNPVTGKKEVKLVSKNQKYTHATAGDYVICNLLKDRKHIKAGIYRARVKTPTPKGVEVLISGHRIAIDQQYVKLIHRSDGYEYSFAKIDQNLLRFKAI

SEQ ID NO: 11398 - protein, 369 aa, Caldalkalibacillus sp.; identical to SEQ ID NO: 10125

SEQ ID NO: 11399 - protein, 442 aa, unidentified; identical to SEQ ID NO: 3161

SEQ ID NO: 11400 - protein, 442 aa, unidentified; identical to SEQ ID NO: 3161

SEQ ID NO: 11401 - protein, 416 aa, unidentified; identical to SEQ ID NO: 6135

SEQ ID NO: 11402 - protein, 268 aa, unidentified
MPNKVYVINKHGRPLMPCSPAKARHLLDEGKAKVKKRTPFTIQLVYGSSGYTQEVILGVDAGSKTIGMSASTTKEELLSAEVKPRNDVVDLLSTRREFRRAQRNRKTRYRKPRFDNRVRSKHKGWLAPSVEVKIQEHITSIKRVCRILPVSKVVIETAEFDLQLLKAIEEGKPVPQGEDYQQGEMYGHYNVRQYVLWRDGYTCQCCGAHATKKKEVRLHVHHLESRKVGGDAPDNQVTLCESCHEKLHKGLIAEKDFKKRKRKSTRDA

SEQ ID NO: 11403 - protein, 421 aa, unidentified
MKVYVISQDGKPLMPTTPARARKKLRDKRAKCIRKTPFTIKLLYKTTTYTQPITLGIDTGSSYIGSAAVDGEGNVLYLSEVEVRNDIADKMKQRAKYRRNRRNRKTRYRQARWLNRKNSIKSDRFSPTMASKINSHLKEISFAKSLLPITHIILETGTFDPHALKNPDVLKNKWLYQHGTNYGFANTKAFVLDRDSHVCQYCKGKSKDHRLEVHHIIFRSNGGSDEAENLITLCKTCHDKVHANKIKLKGGKSKGVLKHATQMNSIRKQLLRLLPDAEETFGYITKEHRYLMFLPKEHYFDAVAIASLDNIRNEGLISTNLQTCLLRKKCISKGDYQQTKGIRSERSIQTGKIMGFRKFDKVKYIGNEYFIKGRMSTGYAILMDITGNKIPLKPIPKFCRMERLNARKSWIMQQETIQNIA

SEQ ID NO: 11404 - protein, 251 aa, unidentified
MVYVQDIDGKPMMPTTRHGKVRQLLKDKKAVVINTCPFTIKLMYKTSDYKQEIVLGVDAGTKHVGLSATTKSKELYSSEVILRSDIVDLLSTRRELRRTRRNRLRYRKPRFDNRIKSKRTGWVAPSVRHRIDAHIRVIDNVCSILPISRIIVEVAQFDTRKIKNPNISGNEYQEGNQLGFWNVREYVLTRDGHKCRHCKGKSKDPILNVHHIESRKTGGDSPSNLITLCETCHKEYHKGKIDLRVKRGKSL

SEQ ID NO: 11405 - protein, 431 aa, Klebsiella sp.; identical to SEQ ID NO: 2435

SEQ ID NO: 11406 - protein, 477 aa, Acidithiobacillus sp.; identical to SEQ ID NO: 4655

SEQ ID NO: 11407 - protein, 423 aa, unidentified; identical to SEQ ID NO: 9087

SEQ ID NO: 11408 - protein, 424 aa, Microcoleus sp.
MSNQIFVLDINRRPLTPCTPGIARSLLKAGKAAVFRQYPFTIILKKEVNATPEAITLKLDPGSKTTGIALVQGTVVLFGAELTHRGQTIKASLESRRVLRRGRRSRHTRYRQARFLNRTRPKGWLAPSLQHRVKTTLTWVNKLIKLAPINSIAQELVRFDLKQLENPEISGIEYQQGTLLGYEVREYLLEVWERKCAYCSIENVPLQIEHIHSKAKGGSNRISNLCLACDTCNKKKGTQDIKQFLAKKPDILKRIQAQRKRPLKDATAVNSTRWALLNRLKETGLPVTAGSGGQTKFNRTRLQLLKSHWLDAACVGKVEELKVLTAQPLLIKTAGHGTRQICGTNKFGFPIRHKSRKQIHFCFQTGDIVSATVTAGKKIGSYTGRVLCRASGSFDIVTTTGRVAGISHKYCRPIHKKDGYSYGF

SEQ ID NO: 11409 - protein, 426 aa, Parasutterella sp.; identical to SEQ ID NO: 3045

SEQ ID NO: 11410 - protein, 427 aa, Nostoc sp.; identical to SEQ ID NO: 2670

SEQ ID NO: 11411 - protein, 416 aa, unidentified
MVYVLSQNGQPLMPTENHAKVRVLLKHGKAKVVKKCPFTIQLQYENTTHTQEVNLGIDAGSKTIGVSATTETKVLYEAEVVLRNDIVELLSGRQSLRRSRRNRKTRYRKPRFDNRKRPDGWLAPSIRQKIETHVIVVANVMKILPVTKIIVETASFDIQKIKNSEIEGEGYQHGEQLDFWNIREYVLFRDEHTCQCCKGKSKDNILNVHHIESRKTGGNAPNNLITLCETCHKAYHKGIITLPKEIHRGMRFRDAAFMGIMRWAFYDRLKELYNPLGVEVVNTYGYITKNTRIEHGLAKEHYVDARCISGNPAAKPMDHYYFQKKVRCHNRQIHKNTILKGGIRKRNQAAYEVKGFRLYDQVLWRGQKCFIFGRRSTGRMDLRLLNGTHINASVGYKNLKLLSMRKNYLIEQRKVG

SEQ ID NO: 11412 - protein, 504 aa, unidentified; identical to SEQ ID NO: 3854

SEQ ID NO: 11413 - protein, 418 aa, unidentified
MVYVTNRQGKALMPTDRHGKVRRLLKSGLAHVVRRIPFTIQLDYDTTEITQPITLGIDSGSKFIGVCATTNKKELYAANVELRNDIVDKLSTRREQRRTRRSRLRYRKTRFNNRVSSKRKERVAPSVENKIQTHMTVVRNAYKILPISKIVVETASFDIQKIKNPNIDGEDYQNGEQMGFWNIREYVLWRDGHTCQHCHGKSGDKILNAHHLESRKTGGNSPSNLITLCETCHKAYHRGEFELKVKRGTSFRDAAFMGIMRWAFFERLKQIYTNVSMTFGYATKNTRIANGLPKEHYVDARCISGNPQAKPLGYYFYQKKARCQNRQIHKINILKGGKKKLNQAPFMVKGFRLFDLVDYQKELFYVFARRKSGYFDIRRLDGTKVNKGSINCKKLRLVEIRRTLLTERRNSGSIPPRS

SEQ ID NO: 11414 - protein, 451 aa, unidentified
MSVAVISKTGMLLMPTSEYRARKLLKSKKAIIHGHNPFTIQLTEREIGCVQQIELCMDTGYIHIGISVKSEKHEYLGLQIDTLTDEKPRHNACRMYRRQRRSRKRYRQPRFNNRKRNNGWIAPSLEHKKNIHIQAVSRICKVMPITDITLEMGNFDTQVLKAREEGRPLPQGVDYQHGERYGIATLREAVFTRDGYTCQCCGRTIEDDAILHVHHIVYRSHGGTNRMSNLITVCDKCHTPANHKQGGKLYNWKPKIASFKGATYMTTIRWKLYNEVKTLFPDIDIHITYGAETKERRRAFDIDKSHVNDAFVMGQFHPKHRSKPICYKKKRRNNRCLEKFYDAKYIDSRDGKKRSGQELFNGRISRNHKKDSENLHQYRLQKVTPGRRAIRRQHYPIQPHDIIIYNGNKIEVSGCQHKGTRVVFSKTKKSVQISKIKLFKYAGGYSKSVFN

SEQ ID NO: 11415 - protein, 442 aa, unidentified; identical to SEQ ID NO: 2903

SEQ ID NO: 11416 - protein, 434 aa, unidentified; identical to SEQ ID NO: 7534

SEQ ID NO: 11417 - protein, 442 aa, unidentified; identical to SEQ ID NO: 2903

SEQ ID NO: 11418 - protein, 346 aa, Arthrospira sp.; identical to SEQ ID NO: 2872

SEQ ID NO: 11419 - protein, 451 aa, unidentified
MSVAVISKTGERLMPTSEYRARKLLKLGKAVKYSYHPFTIQLTERKTGDIQPIELCMDTGYIHIGISVKSEKHEYLAEQIDTLTDERARHDACRMYRTQRRGRKRYRQPRFNNRKRDKGWIAPSLEHKKDIHVQAISRINKVMPLTDITMEIGNFDTQVLKAKEEGKPLPQGADYQHGERYGIATLREAVFARDGYKCQCCGRTIKDGAILHVHHIKYRSQGGTNSMSNLATVCDKCHTPKNHKPGGKLYNWKPKLPSFKGATFMTTIRWQLYNEVKALFPDIDIHITYGAMTKRRRRELDIDKSHVNDAFAMGRFHPKHRVKAVLYKKKRRNNRCLEKFYDAKYIDSRDGSKKTGQELSNGRINRNHKKDSENLRQYRLQKVTAGKRTVRKQHYKIQPHDIVIYENRKRETAGCHCNGTRVMLLTDKKSASIKKVKVYRYAGGYFKSAFN

SEQ ID NO: 11420 - protein, 438 aa, Methanosarcina sp.
MIFVLNKNKQPLSPCHSAVARKLLKTGKAVIHKKYPFTIRLKELKTSINKVEFRLKIDYGSRHTGLAILNGSKVIGLAHIHHKTSIKSNMDNRRAMRRTRRNRTTRYRKPRFNNRKRKEHWLPPSLQSRVDNIQNWVNRLQKLCPLTHISYENVKFDTQIMQNPEISGIEYQQGELQGYEVREYLLEKWNRKCAYCGAENVPLEIEHIIPKARHGTSRVSNLTLACRTCNEAKGTKTAEEFGYPEIQKQARKTLKDAALVTATRWKVYNVLSKPALNIECGTGARTKMNRIRLNLPKDHHFDAICVGASTPNKIIFKTNQVLHIKAKGRGSHCRTNLDKYGFPRGYLSRQKSFFGFQTGDIVKAVVPKGKYKGIHFGAVACRKTGYFDIKNKEGVRIVQGINHKYCNILSRADGYEYATEHLEVDGIPPMTKVIGVLP

SEQ ID NO: 11421 - protein, 431 aa, unidentified
MPNKVYVINKHGRPLMPCSPAKARHLLDAGKAKVKKRTPFTIQLVYGSSGYTQEVILGVDAGSKTIGMSVSTTKEELLSAEVKPRNDVVDLLSTRREFRRARRNRKTRYRKPRFDNRVRSKHKGWLAPSVEVKIQEHITTIRRVYGILPVSKVVVETAEFDLQLLKAIADGKPVPQGEDYQKGEMYGHYNVRQYVLWRDDYTCQCCGAHATKKKEVRLHVHHLESRKVGGDAPDNQVTLCESCHEKLHKGLIAEKDFKKRKRKSTRDATFMGIMRKTLMQRLYSELPIPVIETRGYITKATREKLLVLPKSHTNDALAIAQGKQGFNVGYLPGIVQINKIYTIRPVRHHNRQLHKATILKGGIRKSNQAGKYVFGYRLFDKVQFNGQDCFIWGRRTTGIFTIKTINGKMIKDGISFKKLKPVEKSTSYLIA

SEQ ID NO: 11422 - protein, 383 aa, unidentified; identical to SEQ ID NO: 11278

SEQ ID NO: 11423 - protein, 442 aa, unidentified; identical to SEQ ID NO: 2834

SEQ ID NO: 11424 - protein, 437 aa, unidentified
MITGKHISSIRLWQEEKFSERKVSEMTNIKEYAFVLDAEGKQLSPMRTEKAWYKIRHNQAKLINKYPMVVQLNKVVPEDEICKDEVRCGIDDGGLHVGIALVQNCQTKNKVLLKGTIEQRNDVKKKIEQRKMYRNHRRYYKRYRKCRFSNRASSMRKGRIAPSIFQKRQATMRIINQINKWINISGYWLEDVSIDIRAMADGYRSYGWQYQKSNRLDENIRKAVIMRDGCKCMECGKSNCRLEVHHIKPRRNNGSNTMSNMITLCSKCHDKTEGKEEQFMSRYFSMINGSDNKHLNYASHVMIGKTWLREQLSNLAPLRLTTGGDTANKRIDWSIEKSHSNDAICITGLKPDTVMVKDWMLKPIRRKCNGKTDSVFGFRYRDYVEYTYKNGRTYKGYVTALIPKNHAISFQSISKKCAKVNALKCKLLWRFNRIYWL

SEQ ID NO: 11425 - protein, 414 aa, unidentified; identical to SEQ ID NO: 11037

SEQ ID NO: 11426 - protein, 451 aa, unidentified; identical to SEQ ID NO: 3061

SEQ ID NO: 11427 - protein, 459 aa, unidentified
  source 1..459: note = Cyanobacteria bacterium UBA11159
MSNQPNYAFVLDTNRKPLTPCKPSIARKLLNAGKAKVFRLYPFAIILNKEVVEIPEPLTLKIDPGSKTTGLAILSGCNLLWVAELTHRGQTIKASLESRHSLRRGRRNRHTRYRQARFLNRTRFNGWLAPSLQHRVETTLTWVKKLTRSGPINVVAQELVRFDLQQMDNPEISGIEYQQGGLAGYEVREYLLNKWERKCAYCGIENIPLQIEHIHPKAKGGTNRVSNLCLACEPCNIKKGTKNIEEFLKKKPDVLKKVLAQAKQPLKDAAAVNSTRWSLFNRLKKTGLEVATGSGGLTKFNRTRLQLSKTHFFDAACVGDTPELLVLANQPLLIKATGHGSRQMCRTDKFGFPSRYVTQFKFVKGFQTGDIVKAIVTSGKKIGTYTGRVAVRSTGSFNISTTNGLVQGISYKHCQQIHQKDGYGYGFSRLEANKFAAALSSPVSHTRSFQRRRYSDEST

SEQ ID NO: 11428 - protein, 462 aa, unidentified
MSVLVIGRNGRALMPTNPRKARLLLKKKTASVVCRHPFTIQLLYKTGCATQEGCIGIDTGSQHIGVGITCGDRVILKDEHALRSSMEKRSLLATRAVMRRGRRYRKVRYRKPKWRHHTKRMYFEKANRRGQHWRKVKTTTQSPRPKGWLPPSLQSKCDHHFRIIDRYLKYLPDPITRNLVIETGRFDMARMNDPTIHGEMYQRGPMYDAENLRAYIFARDNYQCACCKAKAGTTRKADGTTVKLVAHYILFRSRGATDNPKYIISVCDHCHTTKAHQPGGILYSWMENNKKVARGLRDATFMNILRKRLFARYPQAAFTYGNITAADRKKLRLPKSHANDAVAISLFGKEASTVKNICQTMHYKQIRKSKRSLHEAIPRKGRKNPNTKAVRNKKNTTQANGFKLWDSVLADGKKLFICSFTGTSAYLIDKNGCYISQPGKTYKQWPLSKLKRLHPNGNWLMA

SEQ ID NO: 11429 - protein, 242 aa, unidentified
LQFYRKEHGIMQYVYVLNKHGEPLMPCSPGKARLLLKQQKACVVKRTPFTIKLLFGSAGYKQPITLGVDAGSKHVGLSASTEKRELYSEEFTPRSDVVELLSTRRQNRRSRRNRKTRYRVPRFDNRVHSKHKGWLAPSVEVKIQEHITVIKHICKILPISLVRVETAEFDTQRLKAMLAGKPLPVGTDYQLGEMYDEYNVRQYVLKRDHYTCQCCGTHNTAKKVVKLHVHHLESRKTGGNAP

SEQ ID NO: 11430 - protein, 430 aa, unidentified
MVLVIDKHKKPCNTISEAYARRLLFKKQAVIHKRFPFTIRLKNDNAVLKDRSYTVKIDPGSRHTGVAVVDDKDSVVMLAELEHRGHVIKRNMDSRRAVRRHRRNRKTRYRPARFLNRTKHKGWLAPSVKSRADNIVNFIKKYKKLLNISKVMIENVSFDVAQMSSNTKLWGNAYQQGPLYQQKLRSFIFSRSNNQCVYCGAKATEIDHIIPRANGGTDSTYNLVASCRACNEKKSNLTLKEFGKSVGKDFSKLKPKKLPKDAAIVQSARNYMVREITKLVSDTTTHDAWLTKYNRDQLGLPKEHYYDALSVGEVPPKFNLFTDKILQISAKGRGSRQMCRVNRYGFPRTSAKASKSVKGFQTGDMVKVIVLTGSKQGEYLGRVAVKSSGYFDIQTRTKTIEGIGYKYCHIVQRSDGYLYSYNERSSLGNE

SEQ ID NO: 11431 - protein, 424 aa, Scytonema sp.; identical to SEQ ID NO: 2747

SEQ ID NO: 11432 - protein, 419 aa, unidentified
MFVYVLDKNGQPLMPTSRFGKVRRLLRDKKAKVVKRCPFTIRLLYEPETKIVQDIVLGVDTGSKHVGVACVGNRKVLYQAQVELRDDIKRKMDRRRTFRRNRRSRKTRYRKHRFLTRGNSTKKGRYCPTVLSKCYGHEREIEFCKKILPIKDTVLETGKFDTQLMEKPWLQEHKWAYQKGVNYGYANAREHALVRDKYTCQCCGKKSCGLEVHHIIYRSKGGSDSLENLITLCEDCHKAVHLGKVDLKLKGKRRSNLRYATQLSILRSMLLKKYSNAIETFGFVTKANRENLGIEKEHYIDACVIASGGLEFSPSEVLYQKRCVSVQNRVLTKGSRDEKRYPIGKVHGFKQYDKVKYLGRTCFIKARRTNGGFVLMDIESNSIDFRDRGGKQNPSYKAIKRLNARKSILCIQKIVERGI

SEQ ID NO: 11433 - protein, 568 aa, unidentified
LFLQIPQAFGCLLRLSIFPVDSSARVALSRTIPLTANTQPRETQPPVSAGETYSKRRVAYMPTVYVLNKDGKPLMPTTRCMHVRHLLKNGKARVVKSKPFTIQLLYETDDVVQPLYLGIDPGRTNIGVAVVKADGAAVFTAHLETRNKEVPKLMKKRKESRCARRTNGRRCRRQRRAKTNGTISKKCVKQTTAQNGSVSKRAKEIGVIKRHLPGCEKDVLCIGIKNKEAKFTNRARPEGWLTPTANQLLQTHINLVKKIQKFLPISDVVLEVNKFAFMQLDNPNIQKWQYQQGPLYQKGSLENAVSEMQEHHCLFCEKPIEHYHHVVPKSENGSNTIANIVGLCTEHHNLVHKDATWQKKLAKEKVGLVKKYSALSVLNQIIPALTKEMNSLFPKHFFVTNGKSTYDYRTAHGVSKDHWLDAYCIACSVLPNDVCDSNINSHVPYELKQFRRHDRRVLHKANMSRVYTLNGKTVATNRHKAIKQTTDSLEEFRQSHPGDVCKLKVKEHHPAYRNLNRNYPGSVFLVDGQVHVMQGVSGSHNGKADGYYNTNGNAYPYYKCKFVVKNEG

SEQ ID NO: 11434 - protein, 440 aa, unidentified; identical to SEQ ID NO: 5150

SEQ ID NO: 11435 - protein, 427 aa, Parasutterella sp.; identical to SEQ ID NO: 4733

SEQ ID NO: 11436 - protein, 441 aa, Sulfobacillus sp.; identical to SEQ ID NO: 4231

SEQ ID NO: 11437 - protein, 423 aa, unidentified; identical to SEQ ID NO: 7434
  source 1..423: note = Cyanobacteria bacterium UBA11370

SEQ ID NO: 11438 - protein, 546 aa, unidentified
MVYVQDINGKPMMPTTRHGKVRRLLKSNKAIVVNLCPFTIKLMYVTSDYKQEIVLGVDAGTKHVGLSATTKSKELCSSEVILRNDIVDLLSTRRELRRTRRNRLRYRKPRFDNRVKSKRPGWIAPSVRYKIDAHIRVIDNVCSILPISRIVIEVAQFDTQKINNPNISGKEYQEGDQLGFWNTREYVLCRDGHKCQYCKGKSKDSILNVHHIESRKTGGNSPSNLITLCETCHKEYHKGNIDLKIRRGKSLRDAAVMGIMKWRLYEELKSKYDRVSMTFGYVTKYNRINHDIEKSHVSDAFVISKNFNAIRLGYYYKVKLVRRHNRQIHKQKIQKGGIKRLNQSPFEVFGFRLFDRVMFENSYYFIFGRRKTGSFDIRDIDGKRQKNITYKKLKLSRCKRFMIQMELNKKKHGHVLKMKEILTETLRKSGAAVCDKIKEMFLSGECDHLTANDLETWTQLANPAKYYTGEEAVSYLNVTSKRFYEYRKAKLVPDPVKIKGFPKPLYTKVMLDDAIKTISGMSEREIYMRILNAKSRESRAKERRGV

SEQ ID NO: 11439 - protein, 442 aa, unidentified; identical to SEQ ID NO: 2903

SEQ ID NO: 11440 - protein, 420 aa, unidentified; identical to SEQ ID NO: 3685

SEQ ID NO: 11441 - protein, 443 aa, Anoxybacillus sp.; identical to SEQ ID NO: 4041

SEQ ID NO: 11442 - protein, 426 aa, unidentified; identical to SEQ ID NO: 2776

SEQ ID NO: 11443 - protein, 418 aa, Bacteroides sp.; identical to SEQ ID NO: 2425

SEQ ID NO: 11444 - protein, 424 aa, Microcoleus sp.
MSNQILVLDTNRKPLTPCTPGMARSLLKARKATVFRRYPFTIIITKEVQNTPQSLTLKLDPGSKVTGIALLKNDKLIWAAELTHRGSAIKHALLSRRQLRRARRNRKTRYRKARFLNRTRHEGWLAPSLQHRVDTIQTWVNRISRYAPVGSLVQELVRFDLQLMQNPEISGVEYQQGELQGYEVKEYLLNKFNRQCVYCGAKDTKLEVEHIHPRSKGGSDRVSNLALACHPCNQWKGNQDIKDFLSGKVDILKRVLAQSKVPLKDAAVVNATRWALFNALRTTGLPVSTGSGGKTKFNRTRLGLPKTHWLDAACVGDTPTLEVLTLQPLLIKSAGHGTRQMCGTNKFGFPIRHRTRVQIHKGFQTGDLVKATVTSGKKIGFYVGRVLCRATGSFDIATVTERVTGISHKYCTPIHKKDGYNYSY

SEQ ID NO: 11445 - protein, 512 aa, unidentified; identical to SEQ ID NO: 7153

SEQ ID NO: 11446 - protein, 439 aa, unidentified
MKVCVVNQHGRPLMPTTPRKARLLLKAGKAQIIQRIPFTIQLLYGTRGHAQPITLGIDAGYATVGFAAVTEQEELVGGELKLLAGMSERLSERAMYRSGRRRRTRHRQPRFDNRRRAEGWLAPSIQHKLDSHLRLIERLGAVLPISCIVIEVANFDIQRLKDPDIEGAGYQQGEQAGFWNLREYILHRDAHTCQNPNCPNRAKEKVLQVHHLGYWRRDGSDRPANLITLCTRCHTPENHLPGGFLWGWEPRLNSFRPETFMSMVRGRLVEAVGAETTYGYLTKGRRIELGLPKSHANDAFVIAGGSTQPRTAPLLLEQVRRNRRALQIWYDAKYIDTRTGEVVKAQVLNNGRRTRNRNLKGENLRRYRGAKISKGRRYIRRRRYPYQPGDLVRFERQVYRVQGMGGYGRNLKLAGRPKEVKATLVTPARRRKGICQQVP

SEQ ID NO: 11447 - protein, 430 aa, unidentified
MVFVLNRSKKPLNMITNAEARILLRKKLAVIHKIYPFTIRLRGNSCVSNDRAYTIKLDPGSRHTGVAVVDDKDAVVMLAELEHRGHIIKKSLNSRRAVRKSRRQRKTRYREARFLNRTKPQGWLAPSVKSRADNVINFIKKYKKLLNIDRVMIERVSFNVAQMSSEVELYGTDYQQGPLYQKKLRDFIFSKTNGRCVYCGAPAQEIDHIVPRANGGTNSVNNLTAACRACNEKKSNLTLKAFGKLMNRDYSHLTPKKLPKSAAIVQSARNYMVREITKLVANTKSYDSWLTKYNRDELGLPKEHYYDALSVGEVPNKFNFLTDKILQISAKGRGSRQMCCMNRFGFPRTLPKGSKSVRGFQTGDIVKAIVPKGSKKGEYFGRVAVRSSGSFNIETSDCLIQHIGYKYCRLIQKSDGYSYNYKEYNVASTF

SEQ ID NO: 11448 - protein, 406 aa, unidentified; identical to SEQ ID NO: 2752

SEQ ID NO: 11449 - protein, 413 aa, unidentified
MTSYSFVLDANGKQLAPTKEPKAWFLIRKKRAALVSKYPMVIQLKKKIQENEICKDEIRCGIDDGGLHVGIALVQKCKSKNKVVFKGTIEQRNDVKHLMEVRRNYRRYHRYHKRYRQARFDNRKSSKRKGRIAPSILQKRQATIRVINRLNKWINITNYWLEDVSIDIRVLTDGYKSYSWQYQKSNRLDENIRKATILRDGGKCMECGKSNCRLEVHHIKPRRRNGSNTLDNLITLCESCHQKTEGQEELYMDRYFSLLKSSDNKNLNYAQHVMIGKMWLRKQLSGLGVLYLTSGGDTANKRIDWNIEKSHTNDAVCITDLQPDTCDMKEWTMKPMRRQSKAKTDHVLGIHHRDLVEYTFKNGETHRGYVTALYPDQKAINFQSQTKHCKKVNARKCKLLWKYSKIYWFENAS

SEQ ID NO: 11450 - protein, 425 aa, Spirulina sp.
MSNLVLVIDTNKKPLTPCKPGTARRLLNAGKAAVYRRYPFSIVLKKVVNENPEPCQIKIDPGSKTTGIAILKGNQLLWGANLHHRGQAIKASLLSRRQLRRSRRSRKTRYRQPRFLNRTRPQGWLPPSLQHRVETVMTWVNRLRRFCAIGSIAQELVRFDTQIMQNSEISGTEYQQGELAGYEVREYLLEKWGRECAYCGAKDTPLEVEHIQPKSKSGSNRVSNLTLACRPCNQAKGNQAVADFLSGKPNLLGRILKQAKAPLKDTAAVNSTRWALFNALKATGLTVQTGTGGQTKFNRCRFNLPKDHWLDAACIGDVESLEMLTQQPLNIKATGHGTRQMCRTDKFGFPKRYVPRNKFVKGFQTGDIVRADVPKGKKAGVHVGRVAVRSTGSFNISTANGLVQGINAKYCRKVHGKDGYAYGIG

SEQ ID NO: 11451 - protein, 416 aa, unidentified
MVYVLDKNGQPLMPTDRHRKVRLMLQSGQAKVIKRCPFTIQLNYDSGHQTQEISLGIDAGSKHIGVSATTKIKVLYEADVELRNDIVDLLSSRRELRRGRRNRKTRYRQAKFNNRRRGNGWLAPSIRQKIGTHLTVVENICKILPISRIMVETASFDIQKIKNPDIQGAEYQQGDQLEFWNVREYVLFRDGHTCQCCKGKSKDKILNVHHIGSRKTGGNAPNNLITLCETCHTGYYKGTVQLPKAIKRGMRFKDAAFMGIMRWAFYEALKQQYEPVGTPVHDTYGYITKHTRIAYNLPKEHYVDARCISGNPEASSNGEYYYQKKVRCHNRQIHKLTVLKGGIRKQNQATYLVKGYRLFDKVSYQGKGYFVFGRRQSGFFDIRTLSGEKVNKGSLSCKKLKFIATRTYYLTERRAV

SEQ ID NO: 11452 - protein, 431 aa, unidentified
MDAWDIIVVLNKRGKPLMPCSPAKARLLLKEKKAIVKRRTPFTIQLTIATGETNQPVSLGVDAGYKHVGLSASTEKAELYASEVELRQDVSDLLSARRALRQSRRNRKTRYRAPRFNNRLRTKRKGWLAPSVENRINAHLSRIEAVLRLLPVTKITVETASFDLQLLKNPDISGKEYQEGEQLGFWNVREYVLFRDGHVCQHCHGRSKDPVLNVHHLESRRTGGDSPGNLITLCETCHKALHRSEITLKTKRGQSFRAEAFMGIMRWEVLNRLKASHPELEVNNTYGYRTKHARIANGIAKSHCADAFCIAGNLGAERLGEFFFQKQTRRNNRQIHKLSILKGGIRKRNQAPFEVKGFRLFDKVACQGEEGFIFGRRSSGFFDVRKLDGTCISAGISYKKLHLLEKRRTYLTEIRKEEALPPLPEGRGLRA

SEQ ID NO: 11453 - protein, 466 aa, unidentified
MSTCACVLSKNGERLMPTIRLGKVRHLLKDGKAKIIKHHPFTIQLLYDSETNIQPIEICEDVGYNYIGISVKSESHEYVSAQYDTLQDEKDCHDSCRKMRRIRRNRLRYRKPRFDNRKRNKGWLAPSLEHKKELNVNVIKMYCKVVPITHVTVEVGSFDTRLVKAIEEGKAAPEGVDYQKGPRYNLATLREAVFYRDNYTCQVCGREAQKDSAILHVHHMFYWKGRHGNSLSELLTVCKKCHTPASHQKGGKLYGFGENIKFANLSGAAFMNTVRWQIVNELCAAFGKPFVTFTYGAMTKEKRIALHLEKSHNNDAYAMGSFHPVGRCAFEHYEKVKRNNRILERFYDSQYIDIRTGKVTNGKSLFNGRINRNHKKDSENLHKYRGKRIRKGYRALRRKKVALNPGDLVFLNGEILVVHGTHTDKKGAVRVEFKVAAKNGKKSANLKKLKIIKTSNLTYSAWKKVS

SEQ ID NO: 11454 - protein, 405 aa, unidentified
MVYVINKEGQALMPTERFGKVRRLLKNGLAHVVCRIPFTIQLDYETTHFVQPISLGVDAGSKHIGISATTSEKELYAADVELRNDIVDKLSTRREQRRTRRSRLRYRKARFNNRVSSKHKGWLAPSVENKIQTHLTVVEKIHKFLPITKIIVETASFDIQKIKNPSISSKEYQQGEQLNFFNVREYVLFRDNHTCQHCKGKSKDHILNVHHIESRKTGGNSPSNLITLCESCHKAYHNGKIDIKIKRGASFRDATFMGIARWTTYERLKNIYPNVSMTFGYITKNTRITNGLPKEHHVDARCISGNPKSKPLGYYFYQKKVRCQNRQIHKANFLKGGRKKLNQSAFLVKGYRLFDLVEYQKELYYIFGRRDSGFFDIRRLDGTKVNKGSISCKRIRLVDIRRNIT

SEQ ID NO: 11455 - protein, 439 aa, unidentified
LMPTSEYRARKLLKSGKAVKHSYHPFTIQLTERKTGDVQPIELCMDTGYIHIGISVKSEKHEYLAEQIDTLTDERIRHDACRMYRRQRRGRKRYRKPRFNNRKRDKGWIAPSLKHKKDIHVQAISRINKVMPLTDITMEMGNFDTQVLKAKEEGKPLPQGACYQHGERYGTATLREAVFSRDGYKCQCCGRTIRDGAMLHVHHVKYRSQGGTNSMANLATVCDKCHTPKNHKPGGKLYNWKPKLPDFKGATFMTTIRWQLYNEVKSLFPDINVHITYGAATKEQRRELNIDKSHVNDAFAMGKFHPKHRANAVLYKKKRRNNRCLEKFYDAKYIDSRDGSKKTGQELFNGRINRNHKKDSENLHQYRLQKIKAGKRTIRKQHYSIQPHDIIMYKNRKRETSGCHCNGTRVVLLPDKKTAAIQKVKIYKYAGGYFKSAFN

SEQ ID NO: 11456 - protein, 320 aa, unidentified
RAPRFDNRIRTKRKGWLAPSVENRINAHLSRIEAVLRLLPVTKITVETASFDLQLLKNPDISGKEYQEGEQLGFWNIREYVLCRDGHVCQHCYGRSKDPVLNVHHLESRRTGGDSPGNLITLCETCHKALHRGEITLKAKRGQSFRAEAFMGIMRWEVLNRLKASHPELEVNNTYGYRTKHARIANDIAKSHCADAFCIAGNLGAERLGEFFFQKQTRRNNRQIHKLSILKGGIRKRNQAPFEVNGFRLFDKVACKGEEGFIFGRRSSGFFDVRKLDGTRISAGISYKKLHLLEKRQTYITEIRKEKALPPLPEGRGLHA

SEQ ID NO: 11457 - protein, 424 aa, unidentified; identical to SEQ ID NO: 8578

SEQ ID NO: 11458 - protein, 302 aa, unidentified
VKVKIQEHITSIKRVCTILPISKVVIETAEFDLQLLKAIQEGKPIPEGEDYQKGEMYGSYNVCQYVLWRDNYTCICCGVRGTPKNPVRLHVHHFESRKYGGNAPDNHGTLCDDCHKKFHLGIITDVKLKTRRRQSTRDAAFMGIMRKTLMWRLRTELFIPVAETKGYITKATREKLLVLPKSHTRDALAIAQGRHGFGIKEYAYVEPANHIYTVRPVRHHNRQLHKASILKGGIRKRNQASKYVFGFRLYDKVLYQGKACFVWGRRTSGTFLLRTIDGIKVKDGVSYRNLTLLERSSNYLIA

SEQ ID NO: 11459 - protein, 545 aa, Actinomadura sp.; identical to SEQ ID NO: 11225

SEQ ID NO: 11460 - protein, 427 aa, unidentified; identical to SEQ ID NO: 9882

SEQ ID NO: 11461 - protein, 431 aa, unidentified
MPNKVYVINKHGRPLMPCSPAKARHLLDAGKAKVKKRTPFTIQLVYGSSGYTQEVILGVDAGSKTIGMSASTTKEELLSAEVKPRNDVVDLLSTRREFRRARRNRKTRYRKPRFDNRVRSKHKGWLAPSVEVKIQEHITSIKRVCRILPVSKVVIETAEFDLQLLKAIADGKPVPQGEDYQQGEMYGHYNVRQYVLWRDGYTCQCCGAHATKKKEVRLHVHHLESRKVGGDAPDNQVTLCESCHEKLHKGLIAEKDFKKRKRKSTRDATFMGIMRKTLMQRLCSELPIPVIETRGYITKATREKLLVLPKSHTNDALAIAQGKQGFNVGYLPGIVQINKIYTIRPVRHHNRQLHKATILKGGIRKSNQTEKYVFGYRLFDKVQFNGQDCFIWGRRTTGIFTIKTINGKMIKDGISFKKLKLVEKSTSYLIA

SEQ ID NO: 11462 - protein, 445 aa, unidentified
  source 1..445: note = Bacterium sp.
MIKIDSQVFVYIQDQEGNALMPTKRYGHVRRLIANGKAKVIRANPFTIRLLYQTTKHKQPIVLGLDSGYENIGFSAVTTKEEVLSGEMSLLKGQSNRLKEKSSYRRTRRSRLRYRKPKFDNRKKVEKTLAPSIENKLQTHIRLVEFARSILPISKVIVEVGNFDIQKLKDESIEGVSYQKGEQYGFYNLREYILYRDNHRCQNPNCSNKSSEKILQIHHLGYWKSDSSNRPSNLITLCDKCHRSENHLKGKLLYGWQPKLNSYRAESFMSTVRWKLVEKLNSKVTYGYITKGKRTELKIEKSHSNDAFVIAGGKNQNRANTIKIEQVRKNNRSLEKFYDASYLDSRTREKASGQELNTGRRTRNTSLNTENLSKYRATKLKPGRRSIRKQRYPFQPKDRVIFNGKKYLVSGVQNYGDYIKLQGLQKPVKISNVKLIYYGNGFRVT

SEQ ID NO: 11463 - protein, 373 aa, Moorena sp.; identical to SEQ ID NO: 10254

SEQ ID NO: 11464 - protein, 465 aa, unidentified; identical to SEQ ID NO: 3070

SEQ ID NO: 11465 - protein, 421 aa, unidentified; identical to SEQ ID NO: 5881

SEQ ID NO: 11466 - protein, 449 aa, Allochromatium sp.
MAVFVLDRQKHPLMPCTEKRARLLLERGRAVVVRLAPFTIRLKDRVGETRQPLRLKLDPGSRVTGLALVRESATRDPEPGAVERLEHGLWFGELEHRGQAIREALEQRRHCRRARRARKTRYREPRFLNRTRRDGWLPPSLQHRIGTTVNWVERLQRLAPITALSQELVRFDTQAMQNPEISGVEYQQGELAGYEVREYLLEKWNRTCAYCGATHVPLEIEHIVPRAKGGSDRVSNLTLACRPCNEHKGNRLIEAFLKGRPVLLKQIQAQAQAPLQDAAAVNATRWALLNALKTTGLAVETGSGGRTKFNRTRLGIPKTHALDAACVGAVDQLRDWNRPVLAIRATGRGAYRRTRTFNNGFPRAYLMRHKRVNGFQTGDWVRAEVPKGKKAGVHVGRVAIRRTGSFNVQTPGGTVAGISHRYCRLLQRADGYGYTIHTKPVTEDARRAA

SEQ ID NO: 11467 - protein, 420 aa, Petrotoga sp.
MLVYVLNKHGKPLMPCKPSKARKLLKEEKAKVVKKEPFTIQLLYGSSGYKQPITLGVDAGSKTVGLSATTENKELFAAEVELRDDIPKLISQKRQYRRDRRFRKTRYREPRFLNRVHSKNKGWLAPSVEHKIKSHIKLIDLVRHLLPITKIVVEVASFDIQKIKNPNIEGKQYQQGEQLAFWNTREYVLWRDNYTCQHCKGKSKDKRLNVHHIESRQIGGNAPSNLITLCETCHKDYHDGKIKLNFKRGQKFKDATFMGIMRWTLYNRLKTLYPNVHLTYGYITKNTRIQNSLTKTHRIDALCISGHPQAKQLEYYYHIKEVRRHNRQIHKAKILKGGIRKLNQAPYLVHGFRLFDKIRYNGIECFIFGRRSTGYFDIRKVDGTVIHRSAKSNDLILVSKVKTLLWERRENSAFLSPLKW

SEQ ID NO: 11468 - protein, 422 aa, unidentified
LRVFVLNKRGQPLMPCSPAKARLLLKEKKAIVKRRTPFTIQLTIATGEAKQPVTLGVDSGYKHIGLSATTEKAELYASQVELRQDITDLLSARLALRRSRRSRKTRYRAPRFDNRVASKHKGWLAPSVENRIAAHMSRVEAVMRVLPVTAITVETAAFDTQLLKDPDIAGGAYQQGEQLGFWNVREYVLFRDGHVCQHCRGKSKDPILNVHHIESRRTGGDAPNNLITLCETCHKAFHRGEIKLKVRRGKSFKAETFMGIMRRTLFERLKKAHPELNVRNTYGYLTKHKRISYGIAKSHCADAYCIADNLGAKRLEGFFFQKQTRKHNRQIHKLLILKGGLKKKNQAPYEVKGFRLFDKVICKGEEAFIFGRRTSGSFDVRRLDGTRISAGINYKKLRLLEPRTTYLTEFRKEAALPPLHKC

SEQ ID NO: 11469 - protein, 423 aa, unidentified; identical to SEQ ID NO: 3951

SEQ ID NO: 11470 - protein, 436 aa, unidentified
MTKTLTTQTTQACLLDQNGKPLMPTTRLGKVYRLLKTQKAHIVSYEPFTIQLDYEPDTHIIQPMTLGVDSGAIHSGYSVANEHREYYSAEIIARNDISNRLSDRRMYRQTRRSRKTRHRKPRFNNRKNKKKGWLPPSLEQKVATQLNEIDHLHRYFPIETIIVEVAEFDIQKIKNPDILGIEYQQGTLQGYNIRNYLLEKHGRKCFYCGKTVSDFEVEHMFPKSKGGSNRIDNLTLSCHNCNEKKGTLTAEKFIQQTLPAKKAAAKLKQLPKEKRLFKYMAHMNATRWTLYNTIKEKYPNVKMTYGYITKYNRIQAGLPKAHHIDAKCITGFSNVPSISQTVVKVKMRRHNRQLHRATFSKGHIRKAASLPTKVFGFQLYDLVLFNNHRYYIKGRRSSGSFALVSVEGLKNEKRSYKKITLLAHTNAYLINHYVNV

SEQ ID NO: 11471 - protein, 487 aa, unidentified; identical to SEQ ID NO: 11019

SEQ ID NO: 11472 - protein, 417 aa, unidentified
MPCSPAKARLLLKEKKAIVKRRTPFTIQFTIATGEARQPVTLGVDSGYKHIGLSATTEKAELYASQVELRQDITDLLSARLALRRSRRSRKTRYRAPRFDNRVASKRKGWLAPSVENRIAAHMSRVEVVMRVLPVTAITVETAAFDTQLLKNPDIAGEAYQQGEQLGFWNVREYVLFRDGHVCQHCRGKYKDPILNVHHIESRRTGGDAPNNLITLCETCHKAFHRGEIKLKVRRGKSFKAETFMGIMRWTLFERLKKAHPELRVRNTYGYLTKHKRISHGIAKSHCADAYCIADNLGAKRLEGFFFQKQTRKHNRQIHKLSILKGGLRKKNQAPYEVKGFRLFDKVICKGEEAFIFGRRTSGSFDVRRLDGTRISAGISCKKLRLLEPRTTYLTEFRKEAALPHLHECRGFRAEFL

SEQ ID NO: 11473 - protein, 419 aa, unidentified
MVYVINKQGQALMPTERFGKVRRLLKNSLAHVVCRIPFTIQLDYDTTDYTQPVSLGVDAGSKHIGISAITSEKELYAADVELRNDIVDKLSTRRELRRTRRSRLRYRKARFNNRVSSKRKGWLAPSVENKIQTHLTVVEKIHKFLPITNIVVETAAFDIQKINNPSISGSEYQQGEQLDFFNVREYVLFRDNHTCQHCKGKSKDKVLNVHHIESRKTGGDSPNNLITLCETCHKAYHRGEFELNVKRGKSFRDAAFMGIMRWSFYEKLKNIYPNVSMTFGYITKNTRITNNLPKEHYVDARCISDNPVAKPLGYYFYQKKVRCQNRQIHKANFLKGGRKKLNQAPFLVKGFRLFDLVEYQNDLYYIFGRRDSGFFDIRKLNGTKVNKGSINCKHLRLMATRKSILIEKRMQINYENTGF

SEQ ID NO: 11474 - protein, 465 aa, unidentified
MSTCVCVLSNNGERLMPTIRLGRVRHLLKDGKAKIIKHHPFTIQLLYDSKTNTQPIEICEDVGYNYIGISVKSQSHEYVSAQYDTLQDEKACHDSCRKLRRTRRNRLRYRKPRFDNRKRGEGWLAPSLKHKKELNVNVVKMYCTVMPITHATVEVGSFDTMLVKAIQEGKVIPEGADYQKGPRYNLATLREAVFYRDNYVCKICGRKATEGAILHMHHMFYWKGRHGNSLNELLTVCEKCHTPANHQKSGKLYGFGEKIKFADLSGAAFMNTVRWQIVNELYVAFGKPFVTITYGAMTKEKRIALQLEKSHNNDAYAMGEFHPNLRCMFEHYEKTRRNNRILEKFYDSRYIDIRTGEIATGKELFNGRINRNHKKDSENLHKYRGKRTYAGHRALLRKKVNLNPGDLVSLNGENLIVHSTHTKKNGAVNVEFETPAKSGQKSASLKKLKIVKAANSIHPAWKKIS

SEQ ID NO: 11475 - protein, 425 aa, unidentified; identical to SEQ ID NO: 10997

SEQ ID NO: 11476 - protein, 448 aa, unidentified; identical to SEQ ID NO: 9314

SEQ ID NO: 11477 - protein, 413 aa, unidentified; identical to SEQ ID NO: 5215

SEQ ID NO: 11478 - protein, 422 aa, unidentified
LNKRGKPLMPCSPAKARLLLKEKKAIVVRRTPFTIQLTIATGESKQPVSLGVDAGYKHVGLSASTEKAELYASEVELRKDITDLLSARRALRQSRRNRKTRYRAPRFDNRIRTKRKGWLAPSVENRINAHLSRIEAVLRLLPITKITVETASFDMQRLKNPDISGKEYQEGEQLGFWNVREYVLFRDGHVCRHCHGRSKDPVLNVHHLESRRTGSDSPDNLITLCETCHKALHRGEITLKAKRGQSFRAQAFMGIMRREVLNRLKASYPELKVHETYGYLTKHARIANGIVKSHGADAFCIAGNLGAERLGEFFFQKQTRRNNRQIRKLSILKGGIRKRNQAPFEAKGFRLFDKVACQGEEGFIFGRRSSGSFDVRKLDGTRISAGISCKKLRLLERRRTYLTEIRKEEALPPLPEGRGLRA

SEQ ID NO: 11479 - protein, 512 aa, unidentified
MSTVYVLNKDGKPLMPTTRCGHVRHLLKEQKARVVTSKPFTIQLLYEADDLVQSLYLGIDPGRTNIGVAVVKTDGTAVFTAHLETRNKEIPKLMQGRKKARRARRTNGRRCRRQRRAKANGTISKKCVKHDTAQNGSVSKRAKEIGVIKRHLPGCEKDVLCIGIKNKEAKFSNRTRPEGWLTPTANQLLQTHINLVKKIQKFLPISDVVLEINKFAFMRLDNPNVQKWQYQQGPLYQKANLEETVSEMQEHHCLFCKKKIDHYHHVVPQSENGSDTIGNIVGLCTKHHDLIHKDTAWQKKLAKKKTGLNKKYGALSVLNQIIPALTKELSSLFPKHFFVTNGKSTYDYRAAHGVSKDHWLDAYCIACSVLPNDTCDKTINSRVPYELKQFRRHDRRALNNENMSRVYTFNGKMVATNRHKATEQTTDSLEEFRQRQPNDVCNLKVKEHHPTYRNMNRNYPGSVFLVGNQVHVMQGIAGSKDGEATTYKDTNANSIAAGKCKFVAKNSGILFV

SEQ ID NO: 11480 - protein, 420 aa, unidentified; identical to SEQ ID NO: 11059

SEQ ID NO: 11481 - protein, 520 aa, unidentified
MNYLDFVLMVDKNKVPCIPIKESTAAYLLRHNKAKIINHDPTVIQRFDEYSADYEIRNIFELKIDSGYLNIGFSVSDSEHEYLAGQVNLLQGMSERLTVRASNRKFKRARLRYRKNKNVDYKTVHNSTYKNGNQDGWIAPSIQHKIDSHIRLIKKIAQWVPIDRIIIEVAKFDIQKMIADLDGRIISGKDYQNGEMKGYENVTAYVRDRDKHTCQMCLSSGKVKNKNNDTIEVHHIIPRAAGGTNRPSNLICLCHHHHRLVHSNNNNNKYFRELQNKKMPDTYKDSTFMNIVRYKIYNALCADFKDVELAYGYETKINRKLIGLPKFHYTDAVCLKEWKNISLTKFIYIVDQKRCNDRKMESFFDAKYIDIRDGKTKSGTELCYTRLDNASSWRTTCKNEVDNLRQYREKKITKGRKQRECHFYCLKPGDLIFINLGNHKGNLAEVKTMQIQKGKYKIFFTYKNQKVDNPTISLSSEEYEQLKKNECSKVKIVRTRRGMIWRKYNRLEYENTYKDQYDKN

SEQ ID NO: 11482 - protein, 413 aa, Clostridium sp.; identical to SEQ ID NO: 4134

SEQ ID NO: 11483 - protein, 430 aa, unidentified
MPKVFVLNRHGRPLMPCTPAKARHLLDAGKAKVRHRTPFTIQLLYGSTGYTQEVILGVDAGSKTIGLSAATETEELFSAEVKPRNDVVELMSARRQFRRARRNRTTRYRKPRFDNRVRSKHKGWLAPSVEVKIQEHMTAIRRACAILPVSKVVVETAEFDLQLLKAVAEGKPVPQGEDYQKGEMYGHYNVRQYVLWRDSYTCCICGVHGSVRKGVPLHVHHLESRRVGGDAPDNLVTLCTACHDKLHKGIIMAADIKKRKRRSTRDATFMGIMRMTLLRRLREQLPVPVVETRGYITKATRENLLVLPKSHANDALAIAHGPQGFRAEHLPNIRQADRLYTIRPVRHHNRQLHKATILKGGVRKTNQAEKYICGFRLYDKVLYNGIECFVWGRRTSGSFLLRQLNGEKVKDGVSYKHLKLLERSQSYLVA

SEQ ID NO: 11484 - protein, 413 aa, unidentified; identical to SEQ ID NO: 6473

SEQ ID NO: 11485 - protein, 632 aa, unidentified
MSVAVVSKTGMLLMPTSEYRARKLLKSKKAIIHGYHPFTIQLTERGTGYIQPVELCMDTGYIHIGTSVKSEKHEYLGEQIDTLTDERRKHDACRMYRRQRRNRKRYRQPRFNNRERDDGWIAPSLEHKKTIHIQAISRICKVMPVTDITLEMGNFDTQVLKAREEGKPLPQGLDYQHGERYSVTTLREAVFLRDGYTCQCCGRTIKDGAILHAHHVVYRSQGGTNRISNLITVCDKCHTPANHKPGGKLYGWKPKVASFKGATYMTTIRWKLYNEVKVLFPDIDIHIAYGAETKERRRAFDITKSHVNDAFVMGQFHPKHRSKPVCYKKKRRNNRCLEKFYDAKYIDSRDGKKRTGQELFNGRISRNHKKDSKNLHQYRRQKISAGKRAIRKPELVHIPQLKQKATVGYSVEAIVKVLDGVTNSQVDVTGTTKPLLECITSGVIRGAVAMVGCNNPKIRPDYAHIELMKKCIANDIIIIASGCSAQAAAKAGLMDKSARDLCGAGLKRVCELADIPPVLHMGSCVDISRMMILAAELAKDAGLQINQLPVVGCAPEWMSEKAVSIGNYVVGTGIDTFLGVDPYVSGSSEMCELLTEGTRKWTGAAYTVETDIEKLVDLMIERIEEKRTALGI

SEQ ID NO: 11486 - protein, 465 aa, unidentified; identical to SEQ ID NO: 3070

SEQ ID NO: 11487 - protein, 440 aa, unidentified
LVSGQLIMAWEAIQTRRIKPHDIGEGTLRRHAAGTVSFPVLCKNRKETLMSVLVIGRNGRALMPTNPRKARLLLKKKTASVVCRHPFTIQLLYKTGCATQEGCIGIDTGSQHIGVGITCGDRVILKDEHALRSSMEKRSLLATRAVMRRGRRYRKVRYRKPKWRHHTKRMYFEKANRRGRHWRKVKTTTQSPRPKGWLPPSLQSKCDHHFRIIDRYLKYLPDPITRNLVIEAGRFDMARMNDPTIHGEMYQRGPMYDAENLRAYIFARDNYQCACCKAKAGTTRKADGTTVKLVAHYILFRSRGATDNPKYIISVCDHCHTTKAHQPGGILYSWMENNKKVARGLRDAVFMNILRKRLFARYPQSAFTYGNITATDRKQLRLPKSHANDAVAISLFGKEASTVKNICQTMHYKQIRKSKRSLHEAIPRKGRKNPNTKAVR

SEQ ID NO: 11488 - protein, 427 aa, Nostoc sp.; identical to SEQ ID NO: 2670

SEQ ID NO: 11489 - protein, 515 aa, unidentified; identical to SEQ ID NO: 8359

SEQ ID NO: 11490 - protein, 426 aa, unidentified; identical to SEQ ID NO: 3614

SEQ ID NO: 11491 - protein, 515 aa, unidentified
MATVYVLNKDSKPLMPTTRCGHVRYLLKEKKARVVRANPFTIKLLYETDDVVQPLYLGIDPGRTNIGVAVAKGDGTAVFTAHLETRNKEIPKLMAKRKEYRQGRRHYRRCKRQRRAAAHGTLSKRCKKQDTAQGSNISERAQKIGVFERNLPGCEKPVLCIGIKNKEARFNNRVRPAGWLTPTANQLLLTHINFVKKICKFLPISDVVLEINKFAFMALDNPNIQKWQYQQGPLYQKGSLENAVSEQQDHHCLFCKQSIVHYHHVVPQSENGSDTIGNIVGLCTKHHDLVHKDTAWQKKLAKKKTGLNKKYGALSVLNQIIPALTKELSSLFPKHFFATNGKSTYDYRAAHGVSKDHWLDAYCIACSVLPDGCFDNTVNSRIPHELRQFRRHDRQVCHQQNAKRKYYLDRKLVAINRHKATEQKTDSLEEYRNNGGATDKLVVKEHKPTSKRLNRILPGALMTANGKLNVMMASKGLHNGIPDYYVFADNSEAKPTKYTLINKNKGIVFVLNSVS

SEQ ID NO: 11492 - protein, 385 aa, unidentified
MATVYVLNKDSKPLMPTTRCGHVRYLLKEKKARVVRANPFTIKLLYETDDVVQPLYLGIDPGRTNIGVAVAKGDGTAVFTAHLETRNKEIPKLMAKRKEYRQGRRHYRRCKRQRRAAAHGTLSKRCKKQDTAQGSNISERAQKIGVFERNLPGCEKPVLCIGIKNKEARFNNRVRPAGWLTPTANQLLLTHINFVKKICKFLPISDVVLEINKFAFMALDNPNIQKWQYQQGPLYQKGSLENAVSEQQDHHCLFCKKAIEHYHHVVPRSENGSNTIANIVGICIKHHDLVHKDTAWQKKLAKKKTGLNKKYGALSVLNQIIPALTKELSFLFPKHFLRPMAKVPTTIVQHTELVKTTGSMPIVLLALFYRMVALTIQSTVVFPMN

SEQ ID NO: 11493 - protein, 415 aa, unidentified; identical to SEQ ID NO: 6534

SEQ ID NO: 11494 - protein, 431 aa, unidentified
MPDKVYVISRLGHPLMPCSPAKARHLLDDKKAKVVKRMPFTIRLLYGSTKYIQPIILGVDAGSKTIGLSASTAKEEVFAAEVMPRNDVVENLSTRREFRRARRNRTTRYRKPRSDNRVRSNHERWLAPSVKVKIQEHITSIKRVCTILPISKVVIETAEFDLQLLKAIQEGKPIPEGEDYQKGEMYGSYNVCQYVLWRDNYTCICCGVRGTPNNPVRLHVHHFESRKYGGNAPDNHGTLCDDCHKKFHLGIITDVKLKTRRRQSTRDAAFMGIMRKALMWRLRTELFIPVAETKGYITKATSEKLLVLPKSHTRDALAIAQGRHGFGIKEYAYVEPANHIYTVRPVRHHNRQLHKASILKGGIRKRNQASKYVFGFRLYDKVLYQGKACFVWGRRTSGTFLLRTIDGIKVKDGVSYRNLTLLERSSNYLIA

SEQ ID NO: 11495 - protein, 413 aa, unidentified; identical to SEQ ID NO: 2636

SEQ ID NO: 11496 - protein, 518 aa, unidentified; identical to SEQ ID NO: 7468

SEQ ID NO: 11497 - protein, 570 aa, Streptomyces sp.
MRHVRSLNSNVTHTTPLSPKSLRAPASGATCPRRPHVRVISPDPCSLGNPRCVASGTSREGRSLAPSYRVTSPGHHDLRISRGASMTTFFTGEQTHQAVLPQQPALKSAGADTPGSRDETAHGLPDPKPGTGVGHGRGETGAVRTRTRRRHARRLDPGSKATGIAVTDERDEVGAKGRTALVRRGLVSIELRHRGRQIHSGMVRRAGHRRRRRSANLRYRAPRRDNRTRPDGWLPPSLRHRIDSTMSLVARLCRYAPVLEIHVEQVAFDTALIAAAVSSREQDFSERTHAGSEIREFLLAKWERSCAYCGATGVLLNIEHVRPRSRGGSDRVANLVIACVPCNQAKGAARIDEFLADRPARLERVIAQLRRPLHDVAAMNTTRLLLVKTLATHGVAVHTWSGGRTSWNRLAMGRPKSHTLDALATGVIDLERGDAVVRIPAQILVVRSTGRGSYARTTPDRYGFPRLQRPRRKIHHGFSTGDLVAAVVPKGKWAGRWVGRVSVRAGGQHRITTLTSRFDVSHRNLRLLQRADGYTYGFADEIRLSEEHGPAYSGRTLKGGDPGNVRTPDA

SEQ ID NO: 11498 - protein, 274 aa, unidentified
MVYVQDIDGKPMMPTTRHGKVRRLLKDNKAVVVNTCPFTIKLTYKTSDYKQEIVLGVDAGTKHVGLSATTKSKELYSGEVILRNDVVELLSTRRESRRARRNRLRYRKPRFENRVKSKRLGWVAPSVRHKVDAHIRVIDNICSTLPISRIIVEIAQFDTQKIKNPDISGNEYQEGDQLGFWNVREYVLARDGHKCQHCKGKSKDPILNVHHIESRKTGGDSPSNLITLCETCHKEYHKGNIDLKVKRGKSLRDAAVMGIMKWKLYEELKSRYDN

SEQ ID NO: 11499 - protein, 414 aa, unidentified
MPCSPAKARLLLKEKKAIVKRRTPFTIQLTIATGETKQPVGLGVDAGYKHVGLSASTDKAELYASQVELRQDITDLLSARRALRRARRNRKTRYRAPRFNNRIRTKRKGWLAPSVENRINAHLSRIEAVLRLLPVTKITVETASFDMLLKKNPDIAGKEYQEGEQLGFWNVREYVLFRDGHVCQHCYGRSKDPVLNVHHLESRRTGGDSPGNLITLCETCHEALHRGEIALKTKRGHSFRAEAFMGMMRWEVLNRLKASHSELEVNNTYGYRTKHARIVNGIDKSHCADAFCIAGNLGAERLCEFFFQKQTRRNNRQIHKLSILKGGIRKRNQAPFEIKGFRLFDKVACKGEESFIFGRRSSGYFDVRKLDGTRISAGISYKKLRLLEKRRTYLTEIRKEEALPPLPEGRGLRA

SEQ ID NO: 11500 - protein, 426 aa, unidentified
MSKIFVIDSDERPLDPIHPAQARQLLRNKKAAIFRRFPFTLILKEARPEAPTQPLRLKIDPGAKYTGMALVNDSTGEVVFAAELKHRGFAIRDSLTSRRQLRRGRRNRKTRYRQPRFLNRTRPKGCLPPSLQSRIENIKTWVAKLRKYVPLEAISQELVRFDMQLIQNPEIQGKEYQQGTLAGYETREFLLEKWNRQCAYCGIKDVPLQIEHIHARAKGGSNSITNLTLSCSKCNTKKGTKDIKDFLKKDSQRLDKILKQAKRPLADAAAVNTTRFALLEVLRATSLPVEIGSGGLTKFNRNQQKLPKTHWLDAACVGTSTPILNIKGIKPLMITANGHGTRQSCRTDKYGFSNRHCSRTKFHFGFQTGDIVKAVVTSGKKIGKYVGRIATRATGSFNISTKNGLVQGISYKLCKQIHKKDGYSYA

SEQ ID NO: 11501 - protein, 529 aa, unidentified
MSTIYVLNKDGKPLMPTTRGGHVRHLLKEQKARVVQSNPFTIQLLYETNDVVQPLYLGIDPGRTNIGVAVVKADGTAVFAAHLETRNKKIPKLMQDRKKARRARRTNGRRCRRQRRAKANGTISKKCVKQDTAQSKNPSKRAKEIGVIKRHLPGCKKDVLCVGIKNKEAKYTNRARLEGWLTPTANQLLQTHINLVKKIQKFLPISDVVLEVNKFAFMRLDNPNIQKWQYQRGPLYQKGSLENAVSEMQEHHCLFCEKPIEHYHHVVPKSENGSNTIANIVGLCAEHHNLVHKDVAWQEKLVEEKTGLNKKYGALSVLNQIIPALTKELSFLFPEHSFVTNGKSTYDYRATHGVSKDHWLDAYCIACSVLPSDVCDSNINNHMPYELKQFRRHDRRVLHKANTSRVYTLNGKKVATNRHKAAKQTADSLEEFRQSHPDDVCKLKVKEHHPAYRNLNRNYPGSVFFVGKQVHVMQGIASSKDGKATKYNDTSATTIAAGKCEFVAKNSGILFVQCKFRKVFSDETTKKLQ

SEQ ID NO: 11502 - protein, 413 aa, unidentified; identical to SEQ ID NO: 2636

SEQ ID NO: 11503 - protein, 417 aa, unidentified
MRGQCLMPCSPRKARVLLREKKAVVKQKSPFTIQLTIPTGETKQEVTLGVDAGSKHIGISVTTAKTELFASEVELRQDVTGLLADRRALRRSRRARKTRYRAPRFNNRVHSKHKGWLAPSIENHIQAHLSRIEAVLKLFPVTKIVVETASFDIQKIKNPAITGNGYQQGELLDFFNLREYILWRDNHTCQHCKGKSKDKVLQVHHLESRRTGGNATNNLITLCKTCHEKSHTGEITLNIKRGRSFKDAAFMNIMRPAFVARLRKAHPGMLIEETYGYITKYQRIKLKLPKTHCADAFCIAGNLHATRSDVYLYQKQTRKHNRQIHKVNAIKGGIRKLNQAPYIVKGFRLFDKVKCFGKKCYGKEGFIMGRRQDGGFDIRTIDGQHISKSVSPKKLKLIEKRKTFLTAIKKEGASSPV

SEQ ID NO: 11504 - protein, 512 aa, unidentified
MSTVYVLNKDGKPLMPTTRCGHVRHLLKEQKARAVASKPFTIQLLYETDDVVQPLYLGIDPGRTNIGVAVVKTDGTAVFTAHLETRNKEIPKLMKKRKDSRRARRTNGRRCRRQRRAKANDTISKKCVKQDTAQSGSVSKRAKKIGVIKRHLPGCEKEVLCIGIKNKEAKFSNRTRPESWLTPTANQLLQTHINLVKKIQKFLPISDVVLEINKFAFMQLDNPNVQKWQYQQGPLYQKATPEEAVSEMQEHHCLFCKKPIAHYHHVVPQSENGSNTIGNIVGLCTKHHDLVHKDTTWQKKLAKKKTGLNKKYGALSVLNQIIPALTKELSSLFPKHFFATNGKSTYDYRAAHGVSKDHWLDAYCVACSVLPNDVCDSGINSRVPYELKQFRRHDRRALHKKNMSRVYTLNGKSVATNRHKAIKQTTDSLEEFRQRQPNDVCKLKVKEHHPEYRNPKRSFPGCMFLVGKQTHVMQGTSGSHNGKADGYYDTNGNSYSSGKCKFVAKNEGIVFA

SEQ ID NO: 11505 - protein, 454 aa, Streptomyces sp.; identical to SEQ ID NO: 9429

SEQ ID NO: 11506 - protein, 414 aa, unidentified
MPCSPAKARLLLKEKKAIVVRRTPFTIQLTIATGESKQPVSLGVDAGYKHVGLSASTEKAELYASEVELRPDVSDLLSARRTLRQSRRNRKTRYRAPRFDNRIRTKRKGWLAPSVENRINAHLSRIGAILRLLPVTKITVETASFDTQLLKNPDISGKEYQEGEQLGFWNVREYVLFRDGHACQHCHGRSKDPVLNVHHLESRRTGGDSPGNLLTLCETCHKALHRREIKLKTKRGQSFRAEAFMGIMRWEVLNRLKASHPEQEVQNTYGYRTKHARIENGIAKSHCADAFCIAGNLGAERLGEFFFQKQTRRNNRQIHKLSVLKHGLRKRNQAPFEIKGFRLFDKVACKGEEGFIFGRRSSGYFDVRKLDGTHISAGISYKKLRLLEKRQTYITEIRKEEALPPLSEGRGLRA

SEQ ID NO: 11507 - protein, 442 aa, Sutterella sp.; identical to SEQ ID NO: 3234

SEQ ID NO: 11508 - protein, 424 aa, Phormidium sp.; identical to SEQ ID NO: 4427

SEQ ID NO: 11509 - protein, 501 aa, unidentified; identical to SEQ ID NO: 9337
  source 1..501: note = Lachnospiraceae bacterium UBA2901

SEQ ID NO: 11510 - protein, 413 aa, unidentified; identical to SEQ ID NO: 5705

SEQ ID NO: 11511 - protein, 396 aa, unidentified; identical to SEQ ID NO: 4508

SEQ ID NO: 11512 - protein, 493 aa, unidentified; identical to SEQ ID NO: 2644

SEQ ID NO: 11513 - protein, 309 aa, unidentified
MARFLNRTASKKEGWLAPSVKHKVDSHLKVIGNVHRILPISRIVIETASFDIQKIRNPEISGREYQQGEQLGFWNTREYVLWRDNHECQHCHGKSKDRILNVHHKESRKTGGDSPGNLVTLCETCHKSHHAGRIQLKLTPNKSYRHASFMGIMRWHVYNSLKELYPEVSMTYGYITKNNRIRNSIEKTHSTDAYCISGNVNAMRIDEIYYQVFKRKHNRQIHKANFLKGGKKKPNQSAYEVKGFRLFDHVRYRDEECFIFGRRTSGYFDLRKLDGSIVHRSASFKELKLLKRQNTILIERKGCNGVLLS

SEQ ID NO: 11514 - protein, 369 aa, Lactobacillus sp.
VVSQEKVLCQSEVELRQDVHKNLYTRKIYRGGRRNRKTRYRQSRFLNRVHGKRDGLWLPPSVKGKVNHNIAWIKRYLAVLPNPDLHVEVGKFDMAKMLNPQISGKQYQEGSLKGWKNYEYYVLARDKYTCQLCRKHGKGVKLAVHHIIYRSQGGTDRVSNLITLCTDCHTTKNHQPGGKLYKWMKAKKKVTKYLKGATFMNILRKRIMTAFPEASFQYGSQTYVDRKNLNLPKGHFMDAIAISGIKSVGQMPETVTMISQFRKKKRSLHEATARKGRKQPNKAAKRNAKNTKYARGIWLNDYVRIIENNAKGYVQGFKSNGYAVYLTDGLGNYVLNNGKKNINRKQCRLIMHNGNWQKAEQKLSLYEFK

SEQ ID NO: 11515 - protein, 413 aa, unidentified; identical to SEQ ID NO: 2636

SEQ ID NO: 11516 - protein, 419 aa, unidentified; identical to SEQ ID NO: 4877

SEQ ID NO: 11517 - protein, 427 aa, unidentified; identical to SEQ ID NO: 2799

SEQ ID NO: 11518 - protein, 417 aa, unidentified
MPCSPAKARLLLKEKKAIVKRRTPFTIQLTIATGEAKQPVTLGVDSGYKHIGLSATTEKAELYASQVELRQDITDLLSARLALRRSRRSRKTRYRAPRFNNRVASKRKGWLAPSVENRITAHMSRVEAVMRVLPVTAITVETAAFDTQLLKNPDIAGEAYQQGEQLGFWNVREYALFRDGHVCQHCRGKYKDPILNVHHIESRRTGGDAPNNLITLCETCHKAFHRGEIKLKVKRGKSFKAATFMGIMRWTLFERLKKAHPELSVRNTYGYLTKHKRISHGIAKSHCADAYCIADNLGAKRLSGYLFQKQTRKHNRHIHKLSILKGGLRKKNQAPYEVKGFRLFDKVICKGEEAFIFGRRTSGSFDVRRLDGTRISAGISYKKLRLLEPRTTYLTEFRKEAALPPLHKCRGFRAEFL

SEQ ID NO: 11519 - protein, 430 aa, unidentified; identical to SEQ ID NO: 4504

SEQ ID NO: 11520 - protein, 414 aa, unidentified; identical to SEQ ID NO: 2588

SEQ ID NO: 11521 - protein, 474 aa, unidentified; identical to SEQ ID NO: 9173

SEQ ID NO: 11522 - protein, 427 aa, Aphanizomenon sp.; identical to SEQ ID NO: 9845

SEQ ID NO: 11523 - protein, 413 aa, unidentified
MTSYAFVLDANGKQLAPTKEQKAWFLIRKKRATLVSKYPMVIQLKKKIPDKEIYKDEIRCGIDDGGLHVGIALVQKCQTRNKVVFKGTIEHRNDVKHLIDVRRGYRRYHRYHKRYRPARFNNRSSSKREGRIAPSILQKRQAIIRVINRLNKWINITNYWLEDVAIDIRALTDGHKPYWWQYQKSNRLDENIRKAVILRDGRKCMECGKSNCRLEVHHIKPRRLKGSSTLGNLITLCTKCHQKTEGVEELYMDKYFALLNSSDNKNLDYTQHVMIGKKWLRKQLSNLGLLYLTSGGDTANKRIDWDITKSHSNDAVCITDLRPDTCEIKEWIIKPMRRQSKAKTDNVFGIKHRDLVEYTFGNGETHRGYVTALYPEQNALNFQSLTKHCKKVNARKCKVLWKYSKIYWLDNVV

SEQ ID NO: 11524 - protein, 465 aa, unidentified; identical to SEQ ID NO: 3856

SEQ ID NO: 11525 - protein, 465 aa, unidentified; identical to SEQ ID NO: 5478

SEQ ID NO: 11526 - protein, 442 aa, unidentified; identical to SEQ ID NO: 6360

SEQ ID NO: 11527 - protein, 413 aa, unidentified; identical to SEQ ID NO: 2636

SEQ ID NO: 11528 - protein, 428 aa, unidentified
LKVFVLNMRGQPLMPCSPAKARHLLKAGKAAVRRRTPFTIQLRIATGETKQSVTLGVDAGAKHVGLSAATEKEEVFASEVELRQDITGLLAARLSLRRERRQRKTRYRAPRFLNRVRSKHNGWLPPSVENRIQAHLSRIDAICGLLPVTKIVIETASFDIQKIKHPDVEGTDYQQGDQLGFWNVREYVLFRDGHVCQHCHGHAKDKILNVHHLESRQTGGDAPNNLITLCERCHKACYAGKIKLKVKRGQSFREEAFIGIMRWTLLDRVRKAHPGLPVENTYGYLTKNTRITLGLPKAHCVDAYCIAGNLKAVRRGVYLHQRQVRKHNRQIHKCTVLSKTLKDGTKIGYRKLNQTPHLVKNFRLFDKVRCLGQTGFIFGRRSSGYFDVRRLDGVKISSCINYRKLTLLEKRGTCLTELRKEDGASSPV

SEQ ID NO: 11529 - protein, 430 aa, unidentified; identical to SEQ ID NO: 4504

SEQ ID NO: 11530 - protein, 412 aa, unidentified
MFVYMVYVQDINGKPMMPTTRHGKVRRLLKDKKAIVVNLCPFTIKLTYVTSDYKQEIVLGVDAGTKHVGISATTKSKELYSSEVILRNDIVDLLSTRRELRRTRRNRLRYRKPRFNNRVKNKRPGWIAPSVRYKIDAHIRVIDNVCSILPISCIVIEVAQFDTQKIKNPEISGKEYQEGNQLDFWNIREYVLARDGHKCQYCKGKSKSKILNVHHIESRKTGGDSPSNLITLCEDCHKEYHKGNIDLKIKRGSSLRDAAVMGIMKWKLYEKLRSRYDRVSMTFGYITKHNRIKHGIEKSHVSDAFVISKNFNAIRLGYYYKVKLVRRHNRQIHKQKILKGGVKKLNQSPFEVFGFRLFDRVVFENSYYFVFGRRKTGNFNIRDIDGRNKRDITCKKLRLSRCKRFMIQKVIN

SEQ ID NO: 11531 - protein, 425 aa, unidentified
MFVFVLSKDKRPLSPCHQARARKLLKQGKAAVYRKYPFTIILKEEVNPNKPKPCRIKLDPGAKVTGIALIQGDRVIFGAELEHRGFRIKDSLESRRQLRRGRRGRKTRYRKPRFLNRTRPKGWLPPSLQSRVENINTWVNRLRKLCPVDSISVELVRFDTQQLENPEISGVEYQQGTLFGYEVREYLLEKYNRTCQYCGAKEVPFEIEHIVPKSKGGSDRVSNLTLSCHKCNQKKGNRSVEEFLKGKPEVLKRVKANAKKPLRDAAAVNAARWAVFNRLKASGLEVEAGSGGLTKFNRTKHELPKTHWLDAACVGKSTPSKLRMLVQKPLKIKATGHGTRQMCRTNKYGFPTRYVPHKKDVKGFQTGDIVKAVVTKGKKTGIYVGRVAVRSTGSFNISTAKGVIQGINHKYCRQIHKKDGYSYAT

SEQ ID NO: 11532 - protein, 535 aa, unidentified; identical to SEQ ID NO: 6116

SEQ ID NO: 11533 - protein, 408 aa, unidentified; identical to SEQ ID NO: 5302

SEQ ID NO: 11534 - protein, 456 aa, unidentified
MSTCVCVLSNNGERLMPTFRLGKVRRLLKDGKAKIVKHHPFTIQLLYDSKTNTQPIEICEDVGYNYIGISAKSKSHEYVSAQYDTLQDEKEHHDDCRKMRRTRRNRLRYRKPRFDNRKCDKGWLAPSLEHKKQLNISLIERYVSVIPITHATVEVGSFDTMLLQAIQKGKAKPESADYQKGPHYNLATLREAVFYRDNYTCQVCKRKIADGAILHMHHMFYWKGRHGYQLDELATVCEKCHTPANHQKGGKLFGFGEGKEFADLSGAAFMNAVRWQIVDALYTTYDKEFVTITYGAMTKEKRIALQLEKTHNNDAYAMGDYHPACRCKFRHYQKRRRNNRVLEKFYDATYIDARTGNKAKGKELFNGRINRNHKKDSENLHKYRSKKVSKGRRSIRRRRYAIQSYDTVRLEGKTYITSGCHNKGTRLLIPVNGKSKSVAISKVQVVCHAGAWIQIS

SEQ ID NO: 11535 - protein, 389 aa, unidentified
MLRSGMAKVIKKCPFTIQLQYESERNVQPVSLGVDAGSKHIGISATTKTKVLYESDVELRDDIVKLLATRRQLRRSRKTRYRPARFDNRKRKEGWLAPSIRQKIGSHLTVVANVCKILPINQIIVETASFDIQKIKNPDIQGTEYQQGEQMDFWNVREYVFFRDGHTCQCCKGRSKDKILNVHHIESRKTGGNAPNNLITLCETCHKGYHNGTVILPKNIKRGMQFKDAAFMGIMRWAFYNALKEQYEPAIPVSMTYGYLTKNTRIEHGLLKEHYIDARCISGNPDAVSDGTYYYQKKVRCHNRQIHKQTILKGGIRKSNQAEYLVKGYRLFDKVSYQGREYFIFGRRKTGFFDIRTLSGEKVRKGSISVKKLTFADTRKNYLIERRIV

SEQ ID NO: 11536 - protein, 455 aa, unidentified
VIKSSEGKERCPLHQTPSNIDEGCLLPERAWRQNLRVFVINQRGKPLMPCSPAKARVLLREKKVRVKRRTPFTIQLTTATGEARQDVSLGVDAGYRHVGLSASTEKAELYASEAVLRDDITDLLSARLALRRARRNRKTRYRAPRFSNRVHSKNKGWLAPSVEHKIASHLKLVENVCRLLPVTNITVETASFDMQAIKNPDIKGTEYQQGEQLGFWNVREYVLWRDGHQCQHCRGKSGDPILNVHHLESRRTGGDAPNNLVTLCETCHKAYHAGRIDLKLKRGRSMRAEAFMGIMRWTFFYRLKEIHADKTVENTYGYLTKHTRITHGIEKSHCADAYCIAGNLSAERLPEYLYQKQVRKHNRQIHKLTIGRGGIRKRQQTPFEVKGFRLFDKVRLGGEEGYIFGRRSSGYFDVRRLDGQKLSAGVSFKKLHLLEKRKTYLTVLLPRLKTKVSAP

SEQ ID NO: 11537 - protein, 490 aa, Anaerostipes sp.; identical to SEQ ID NO: 6170

SEQ ID NO: 11538 - protein, 546 aa, Streptomyces sp.; identical to SEQ ID NO: 8861

SEQ ID NO: 11539 - protein, 394 aa, unidentified
MVTVQQSTHHLPFGRVFIRRNLFMVYVISQDGKPLMPCSDPIARLLLKQGKAKVKKREPFTIKLTYETTNYTQGLTLGVDTGSGTIGTAVSKDNGDIVYMSEVVVRNDITDKMTQRAKYRRNRRNRKTRYRKARWLNRASSIKKDRFSPTMQSKLHSHVREIEYIQSILPVTEMVFETGQFDMHLMKNPSLANPKVRPWGYQKGANYGFENTKAMVLNRDNYTCQCCKGKHKDSKLEVHHIVFRSQGGSDEESNLLTLCHTCHKDLHSGKINPKLSGKVKGNLKYATQMNSIRKQLFRCYPNAIETFGYVTKVNRLHLGVAKEHYYDACTIATQGNAFNVKSNLYKKKCVSDGDFQKTKGIHSEQPIVTDKICGFRKFDKVRYFGNDYFIKGRM

SEQ ID NO: 11540 - protein, 447 aa, Petrotoga sp.; identical to SEQ ID NO: 4357

SEQ ID NO: 11541 - protein, 424 aa, Moorena sp.
MRVFVLDKNRKPLDPCRPARARIMLKLGRAKVVRRYPFTIILPDKSLENCVTHKHQLKIDPGAKTTGLAISQNNKVIWGAELTHRGFQIKDALTDRRQLRRSRRHRKTRYRKPRFLNRKRPEGWLAPSLMSRVHNILTWTKKLIKFCPITGISQELVRFDTQKMENPEISGVEYQQGTLYGYELREYLLEKWHRQCAYCGAANTPLEIEHIKPLARGGSNRVCNLAIACHKCNQTKGVQEIEQFLYGKPSVLKRVLAQAKRPLADAAAVNTTRWKLYNELKSTDLPIETGSGGSTKYNRCRQNLPKTHWLDAANVGQVDKLRIEDYQPLLITAKGHGTRQMCRTNKFGFPSRYVTRLKFVKGFQTGDIVKAIVTKGKKIGTYTGRVATRKTGSFNISTKNGLIQGISHQYCTIVHRKDGYSYSF

SEQ ID NO: 11542 - protein, 417 aa, unidentified
MPCSPAKARLLLEEKKAIVKRRTPFTIQLTIATGEAKQPVTLGVDSGYKHIGLSATTEKAELYASQVELRQDITDLLSARLALRRSRRSRKTRYRAPRFDNRVASKREGWLAPSVENRIAAHMSRVEAVMQVLPVTAITVETAAFDTQLLKNPDITGAAYQQGEQLGFWNVREYVLFRDGHVCQHCRGKSKDPILNVHHIESRRTGGDAPNNLITLCETCHKAFHRGEIKLKVRRGKSFKAETFMGIMRRTLFERLKKAHPELNVRNTYGYLTKHKRISYGIAKSHCADAYCIADNLGAKRLEGFFFQKQTRKHNRQIHKLLILKGGLKKKNQAPYEVKGFRLFDKVICKGEEAFIFGRRTSGSFDVRRLDGTRISAGINYKKLRLLEPRTTYLTEFRKEAALPPLHECRGFRAEFL

SEQ ID NO: 11543 - protein, 431 aa, unidentified; identical to SEQ ID NO: 2697

SEQ ID NO: 11544 - protein, 462 aa, Halomonas campaniensis; identical to SEQ ID NO: 6329

SEQ ID NO: 11545 - protein, 445 aa, unidentified
MKGKLLMVFVLNRSKKPLDMITNAEARILLRKKLAVIHKVYPFTIRLRDNSCGSKDRAYTVKIDPGSRHTGIAITDDKNAVVMLAEIEHRGHLIKKDLVSRKAVRYSRRQRKTRYRPARLLNRTKPEGWLAPSVKSRADNVINFIKKYKKLINIDKVMIENVSFDTAQMSSNTNLIGTAYQQGPLYQKELRSFIFSRSNGKCVYCGAKATEIDHTIARANGGTDSTYNLVAACRACNKKKSNSSLKEFGKLMNKDYSHLEPKKLPKDAAIVQSAREYTIRKIKDIIPNTISYAAWMTKYNRDQLGLPKEHYYDALSVGNIQNYKFLTNKVLVISAKGRGSRQMCRVDKYGFPRASAKASKVVRGFQTGDIVKAVVTKGPKAGEYLGRVAVKSDGYFNIQTKAKTIQCIGHEYCHLIQRGDGYSYNYKESDSLSGKNNRVSIASIR

SEQ ID NO: 11546 - protein, 374 aa, unidentified
VVIQLKKKIQENEICKDEIRCGIDDGGLHVGIALVQKCKSKNKVVFKGTIEQRNDVKHLMEVRRNYRRYHRYHKRYRQARFDNRKSSKRKGRIAPSILQKRQATIRVINRLNKWINITNYWLEDVSIDIRVLTDGYKSYSWQYQKSNRLDENIRKATILRDGGKCMECGKSNCRLEVHHIKPRRRNGSNTLDNLITLCESCHQKTEGQEELYMDRYFSLLKSSDNKNLNYAQHVMIGKMWLRKQLSGLGVLYLTSGGDTANKRIDWNIEKSHTNDAVCITDLQPDTCDIKEWAIKPMRRQSKAKTDHVLGIHHRDLVEYTFKNGETHRGYVTALYPDQKAINFQSQTKHCKKVNARKCKLLWNYSKIYWFENAS

SEQ ID NO: 11547 - protein, 416 aa, unidentified; identical to SEQ ID NO: 7785

SEQ ID NO: 11548 - protein, 387 aa, unidentified
QLTIATGETKQPVSLGVDAGYKHVGLSASTENAELYASEVELRQDVSDLLSARRALRQSRRNRNTRYRAPRFDNRIRTKRKGWLAPSVENRINAHLSRIETVIRLLPVTKITVETTSFDMQLLKNSDIAGKKYQEGEQLGFWNVREYVLFRDGHVCQHCHGRSKDPVLNVHHLESRRTGGDSPGNLITLCETCHKALHRGEITLKAKRGQSFRAETFMGIMRWEVLDRLKASHPKLEVQNTYGYRTKHARISNGIAKSHCADAFCIAGNLGAERLGEFFFLKQTRRNNRQIHKLSILKGGIRKRNQAPYEIKGFRLFDKVACQGEEGFIFGRRSSGYFDVRKLNGTRISAGISCKKLRLLEKRQTYLTEIRKEEALPPLPEGRGLRA

SEQ ID NO: 11549 - protein, 506 aa, unidentified
LFLQIPQAFGCLLRLSIFPVDSSARVALSRTIPLTANTQPRETQPPVSAGETYSKRRVAYMPTVYVLNKDGKPLMPTTRCMHVRHLLKNGKARVVKSKPFTIQLLYETDDVVQPLYLGIDPGRTNIGIAVVKADGAAVFTAHLETRNKEVPKLMKKRKESRCARRTNGRRCRRQRRAKTNGTISKKCVKQTTAQNGSVSKRAKEIGVIKRHLPGCEKDVLCIGIKNKEAKFTNRARPEGWLTPTANQLLQTHINLVKKIQKFLPISDVVLEVNKFAFMQLDNPNIQKWQYQQGPLYQKGSLENAVSEMQEHHCLFCEKPIEHYHHVVPKSENGSNTIANIVGLCTEHHNLVHKDATWQKKLAKEKVGLVKKYSALSVLNQIIPALTKEMNSLFPKHFFVTNGKSTYDYRTAHGVSKDHWLDAYCIACSVLPNDVCDSNINSHVPYELKQFRRHDRRVLHKANMSRVYTLNGKTVATNRHKAIKQTTDSLEEFRQSHPGDVCKLKVK

SEQ ID NO: 11550 - protein, 414 aa, unidentified
MPCSPAKARLLLKEKKAIVKRRTPFTIQLTIATGESKQPVTLGVDAGYKHVGLSASTEKAELYASEVELRQDVSDLLSARRALRQSRRNRKTRYRAPRFNNRLRTKRKGWLAPSVKNRINAHLSRIEAVLRLLPVTKISVETASFDMQLLKNPDIAGKEYPEGEQLGFWNVREYVLFRDRHVCQHCYGRSKDPVLNVHHLESRRTGGDSPGNLITLCETCHKALHRGDITLKAKRGKSFRAEAFMGIMRWEVHNRLRALHPGIEVSNTYGYRTKHARIANGIAKSHCADAFCIAGNLGAERLCEFFFQKQTRRNHRQIHKLSILKGGIRKRNQAPFEVKGFRLFDKVACQGEEGFIFGRRSSGFFDVRKLDGTRISAGISCKKLHLLEKRRTYLTEIRKEEALPPLPEGRGLRA

SEQ ID NO: 11551 - protein, 427 aa, Calothrix sp.
MSKIFVLDTEERPLDPIHPAHARQLLRNKKAAVFRQFPFTIILKESRPESAVSSLRLKIDPGAKFTGIALVNDSTGEVINAFELKHRGFAIRDALTCRRQLRRSRRARKTRYRKPRFLNRTRPDSWLAPSLQSRIDNIKTWVEKLRKFAPIEAIASELVRFDMQLMANPDIQGKEYQQGTLAGYETREYLLEKWGRRCAYCGVKDVPFQVEHIHPRAKGGSNSITNLTLSCEKCNTKKGTKDIKEFLKKDTSRLEKILKQAKRPLADVAAVNTTRFALLKTLKATGLPVETGSGGLTKFNRSQQKLEKTHWIDAACVGESTPILNIKGVKPLLITASGHGTRQSCRTDKYGFPSRHCSRTKFHFGFQTGDIVKAVVKTGKKVGEYVGRIATRATGSFNISTTNGLLQGISHRYCKAIHKKDGYGYSN

SEQ ID NO: 11552 - protein, 512 aa, unidentified
MSTVYVLNKDGKPLMPTTRGGHVRHLLKEQKARVVRTNPFTIQLLYETDNLVQPLYLGIDPGRTNIGVAVVKTDGTAVFTAHLETRNKEIPKLMQGRKKARRARRTNGRRCRRQRRAKANGTISKKCVKQATAQNGSVSKRAKEIGVIKRHLPGCEKEVLCIGIKNKEAKFSNRTRPEGWLTPTANQLLQTHINLVKKIQKFLPISDVVLEINKFAFMRLDNPNVQKWQYQQGPLYQKASLEEAVSEMQEHHCLFCKKPIAHYHHVVPQSENGSDTIGNIVGLCTKHHDLVHKDTAWQKKLAKKKTGLNKKYGALSVLNQIIPALMKELSSLFPKRFFATNGKSTYDYRAAHGVSKDHWLDAYCIAGSVLPNDACDNNINNRVPYELKQFRRHDRRALHKENMSRVYTLNGKSVATNRHKAIKQTTDSLEEFRQRQPNDVCKLKVKEHHPEYRNPKRNFPGCVFLVGKHTHVMQGTSGSHNGKADGYYDTNGNSYSSGKCKFVVKNEGIVFT

SEQ ID NO: 11553 - protein, 477 aa, Acidithiobacillus sp.
MLVFVMDQYDRPGHPTRRLDWVRKQVKRKWAKIVGGGISGKPAVLVLRERSFDRSKTVKRRFFAALDTGFLNVGYAVTELLADGTLGVLLKGTLNARTPDIRGLMDERRMYRRARRYHRRLNVKKKGQTPKSRPPRYESRGKRDSVTLRHGLETHVNLYARLARLAPLPDHQVRRGFESVSFDLRALAYGKPRTGSGYQVSPVGKATGEKVRTFVVRRDGGCIVCGSTEHLHDHHLRKRSQQGSNRANNQVTLCDNCHDDVHAGLIELPITDGAQWRDASMVNAVCGKLRKLARDLDLTPVPVEQSVAARRRLAMVKTHALDAVSVAVAMTDAAAVDYRDTLDMDMAQYRRHRRARIHAQRDRLYYLPGDKKPVAHNRRKRSDQGDVDSLAEFRRAHPQDMGRLKVKKAVRLYTPNRAKAPAVGGDVWNIGGRRVVAQGVHSKTNLYVPDLKRVTGKVYASPKDGVRLFWNSGMVVA

SEQ ID NO: 11554 - protein, 435 aa, unidentified
MVFVLNKNKKPLSPCSNAVARKLLKQGKAVIHKRYPFTIRLKELKTEPTKNEEYHKQEYRLKIDYGSRYTGLAILNKNNVLWLAQLHHKTDIKSKLDARRGHRRFRRNKLRYRKPRFLNRKRKEGWIPPSLQSRVDNIQSWVNKLQKLIPLTDISYENCKFDTQLLNNPDINSVEYQQGTLYGYEVREYLLEKFNRKCIYCGKDNVPLEIEHIIPKSRGGTNRIDNLGIACHECNQRKDNMTAEEFGYPNIQKQVKQSLKDSSIINSTRWKVYDVLCNTGLNVECGTGARTKMNRINLGLSKDHHYDACCIGQSTPKELYFKTNEVLYIKNIGRGLYQRTNLDKYGFPRGYLPRQKYFFGFMSGDIIKAVVPKGKKKGVYFGSAACRSTGSFNINLLKRRIQGINYKYMKIIQKSDGYKYNLGRREIQSQNSSHS

SEQ ID NO: 11555 - protein, 566 aa, Parasutterella sp.
  VARIANT 122: note = X can be any naturally occurring amino acid
MPCSPAKARLLLKEKKAIVVRRTPFTIQLTIATGESKQPVSLGVDAGYKHVGLSASTEKAELYESEVELRQDVSDLLSARRALRQSRRNRKTRYRAPRFDNRIRTKRKGWLAPSVENRINAXFQHWRRITTGRKTEETNLRVFVRNKRGKPLMPCSPAKARLLLKEKKAIVVRRTPFTIQLTIATGETKQPVSLGVDAGYKHVGLSASTENAELYASEVELRQDVSDLLSARRTLRQSRRNRNTRYRAPRFDNRIRTKRKGWLAPSVENRINAHLSRIETVIRLLPVTKITVETTSFDMQLLKNSDIAGKKYQEGEQLGFWNVREYVLFRDGHVCQHCHGRSKDPVLNVHHLESRRTGGDSPGNLITLCETCHKALHRGEITLKAKRGQSFRAETFMGIMRWEVLDRLKASHSKLEVQNTYGYRTKHARISNGIAKSHCADAFCIAGNLGAERLGEFFFQKQTRRNNRQIHKLSILKGGIRKRNQAPYEIKGFRLFDKVACQGEEGFIFGRRSSGYFDVRKLNGTHISAGISCKKLRLLEKRQTYLTEIRKEKALPPLPEGRGLRA

SEQ ID NO: 11556 - protein, 310 aa, unidentified
PRFDNRVHSKHKGWLAPSVEVKIQEHITIIKRICKILPISLVRVETAEFDTQRLKAMLAGKPLPVGTDYQLGEMYDEYNVRQYVLKRDNYTCQCCGAHTTAKKLVKLHVHHLESRKTGGNAPSNLVTLCTTCHKNLHKGKVTLDGKERGKPLRDAAFMGIMRKTLMARLKEELPIPVQGTYGYITKMRREQNDIKKGHTNDARCISKHPLAEPCSVCYRTKAIRHHNRQTHKANFSKKGIRKRSQMPYLAEGYRLWDKVLYKEQECFVSGRRSSGSFTLKKLDGTSVSKGMTFKKLRLLEPATNYLIERM

SEQ ID NO: 11557 - protein, 443 aa, unidentified; identical to SEQ ID NO: 4257

SEQ ID NO: 11558 - protein, 469 aa, unidentified
  source 1..469: note = Candidatus Dependentiae bacterium
MPLINISEAHVTPEMGEGKNMVLVIDNNKKPVNPCRPADARLLLKGGKAAVFRRFPFTIILNEDSLQKVRPLRLKIDPGSTTTGMALVDDKTGKVISALEISHRSKTISRSMISRASSRKSRRYRNTRYREARYNNRKTASGWLPPSFGSRIANDETWIKRFMRYSPISHISVEIAKFDTQLMQNAEISGIEYQQGALQGYEVREYLLEKFGRKCCYCGGKDRPLEIDHIVPKSRGGSNRVSNLAISCKSCNQMKSNQNAHEFGYPEVQKYAQSSLKDAAAMNITRIILLKRIETNGLPLETGTGALTKLHRMEQGLEKAHWIDAACVGISTPKKLLINDLQPLLVKATGHGSRQMCKVDKYGFPRTQSKKNKKKFGFQTGDMIKAIVKDGKKKGTHLGKVAVRSSGYFDILRPQGIVTGIKHTACRIIHKSDGYSYSYLPIIREKNRLVELMGLEPITSWMPSMRSTR

SEQ ID NO: 11559 - protein, 450 aa, unidentified; identical to SEQ ID NO: 2935

SEQ ID NO: 11560 - protein, 502 aa, unidentified
MSIIYVQDRHGKPLAPTTRGGHVRRLLDSKQARVVCGNPFTIRLMYGVDPCTQGFILGIDPGRTNIGVTVAAADGTCVFSAKAETNNKDVPKRMKERKAHRQASRQGERKRRQRRARKNGTCFGERKRILPGCKEPITNHYITNTEARFMNRARTKGWLTPTANQLLQSTISLVRKVCKFLPVTDVVLELNEFAFLAMDDPGIQRWEYQKGPLYGYGSVEAAVYTQQDGHCIFCEQAIAHCHHVIPASKGGSDTLENRAGLCGGHHDLVHKEQSWTDKLAELKAGMNKRYAALSVVNQIIPRLADELGKMFPGHAFATNGWSTKQFRDAHGIPKDHNTDADCIACSILENPTIKLPEKVYELRKFRRHDRAQISRMEDRNYYLPGADPKTGKPKKVLAAKNRHKRTEQKTDSLEEFRAAHPNDVGRLMVARGGPKHKDPNRVLPGAIFQVETRSGNVEQLVLQGSHGRDKNGQPLYLEFVGQGNFRPNRCKYVARGRGWQFV

SEQ ID NO: 11561 - protein, 451 aa, unidentified; identical to SEQ ID NO: 5203

SEQ ID NO: 11562 - protein, 456 aa, unidentified
MSTCVCVLSNSGERLMPTIRLGKVRRLLKDGKAKIVKHHPFTIQLLYDSKTNTQPIEICEDVGYNYIGISVKSESHEYVSAQYDTLQDEKACHDSCRKLRRTRRNRLRYRKPRFDNRKRGEGWLAPSLEHKKQLNIRLIERYVSVIPITHATVEVGSFDTMLLQAIQKGKSKPEGVDYQKGPRYNLATLREAVFYRDNYTCQVCGRKIADGAILHMHHMFYWKGRHGYQLDELVTACEKCHTPANHQKGGKLFGFGEDKEFANLSGAAFMNAVCWQIVDALHATYGKEFVTITYGAMTKEKRIILGIEKTHNNDAYAMGDYHPAHRCVFRHYQKRRRNNRVLEKFYDATYIDARTGNKAKGKELFNGRINRNHKKDSEDLHKYRSKKVSKGRRSIRRQRYAIQPYDTVRLESKTYITSGCHNKGTRLLIPVNGKSKSVAISKVQVVCHAGAWIQII

SEQ ID NO: 11563 - protein, 440 aa, unidentified
MSVFVLDKKHEPLMPCHPARARKLLKAGRARVVKTYPFTIRLVDRLLENSAVQPVAVKVDPGSEQSGMAVVRDDGKAHHHALFFINLVHRGKVIRDRLTGRRAFRHRRRSANLRYRAPRFLNRKRRKGWLPPSLQHRVDTTMSWVKKLRKLVPVTALWVENVKFDTQKLQNPEVSGVEYQQGTLFGFEVREYLLEKFERRCVYCGAENTPLNIDHVVPRAKGGSDRVSNLVLACTECNQKKGAQPLEVFLKGKPEQFERIRRQLKAPLRDAAAVNATRWALFNALKQTGLPVATGTGAQTKFNRKAFGIPKEHWLDALCVGRINGADHPEGMGVLQVRCTGRGSYQRTRLNKYGFPRGHLMRQKRVHGFATGDMVKAVVPSGKKAGIHQGRVAVRVTGSFAIQKADGKVDGIHWRHCRLISHNDGYGYAWLRPAPHSSLV

SEQ ID NO: 11564 - protein, 442 aa, Streptomyces sp.
MPCHPARARELLHKGRAVVVRQVPFTIRLKDRPLAESEVDGVQLRIDPGSKGTGLSLTDEKKETDEHGTAVTVRRGLVSVELQHRGDQIHLCMQQRAGYRRRRRSANCRYRASRSDNRTRPGAWLPPSLRHRVDTTVSRATRLCRYAPVTEIHVERVAFDTHSMSAGRDLTEAEYQQGTLAGTEARAYLHARWNRACAYCDATDVPLNIDHLRPRSRGGSNRISNLVLACVACNQAKGSTSVHVFLAHQPDRLSKILRQAKTPLHDAAAMNATRWRLTEALSALGKPVHAWSGGRTKWNRTAMGLDKTHTLDALCVGRLDHETGDTITRLPKQILIAKATGRGSYTRTTPDRFGFPRLRRVRAKQHFGYVTGDLVRATIPTGKWAGTWTGRVSVRARGQHSLATPEGRINVSHWNLRLLQRGDGYGYSAQPESVASPSRKIG

SEQ ID NO: 11565 - protein, 413 aa, unidentified; identical to SEQ ID NO: 10655

SEQ ID NO: 11566 - protein, 430 aa, Desulfobacter sp.
LNVFVLDTNKKSQNPVHPAKARLLLTEGKAAVFRQFPFTIILKETVLDVASNPLRIKIDPGSKDTGIAVINDDTGEIVFAMELRHRGQQIKNNLESRRAIRRSRRNRKTRYRKPRFDNRTRAEGWLPPSLKSRVYNIETWVNRLCRFCNIQAISMELVRFDMQKIQNPEISGVAYQQGELMGYEVREYLLEKWDRTCAYCGKTDIPLEIEHIVPKSKGGSNRVSNLTLACTACNRKKGNKSLEHFLSRKPRLLKRIQKQSKVPLKDAGAVNTTRWDLFRTLKKTGLPVETGSGGLTKFNRTTRGLHKTHWLDAACVGKSTPEKIFQIDKTVLIVKADGHGSRQMCRVNKFGFPRTTAKSTEKKVKGFQTGDIVKAVVNSGKKVGTYIGRVAVRKSGSFNIKTVDKTVQGISWKYCRLLHASDGYSYNTTC

SEQ ID NO: 11567 - protein, 465 aa, unidentified; identical to SEQ ID NO: 4783

SEQ ID NO: 11568 - protein, 512 aa, unidentified; identical to SEQ ID NO: 11330

SEQ ID NO: 11569 - protein, 413 aa, unidentified; identical to SEQ ID NO: 2636

SEQ ID NO: 11570 - protein, 427 aa, Enterococcus sp.; identical to SEQ ID NO: 2410

SEQ ID NO: 11571 - protein, 426 aa, unidentified
MVYVQDIDGKPMMPTTRYGKVRRLLKNKKAVVVNLCPFTIRLTYVTSDYKQEIVLGVDAGTKHVGLSATTKSKELYSSEVILRNDIVDLLSTRRELRRARRNRLRYRKPRFDNRIKSKRPGWIAPSVKYKIDAHIRVVENVCSILPISRIVIEVAQFDTQKIKNPNISGKEYQEGDQLGFWNTREYVLARDGHKCQYCKGKSKDKILNVHHIESRKTGGDSPSNLITLCETCHKEYHKGNIDLKIKRGKSLRDAAVMGIMKWKLYEELKSRYPNVSMTFGYITKYNRIKYGIEKYHISDAFVISKNFNALRLEYHYKVRLVRRHNRQIHKQKVLKGGAKKPNQSPFEVFGFRLFDRVMFENSYYFIFGRRKTGSFDIRYIDGKNQKNVTYKKLKLSRCKRFMIQMELNKKTRTCFENERNSDRDAA

SEQ ID NO: 11572 - protein, 431 aa, unidentified; identical to SEQ ID NO: 9032

SEQ ID NO: 11573 - protein, 420 aa, unidentified; identical to SEQ ID NO: 11172

SEQ ID NO: 11574 - protein, 407 aa, unidentified
LMPCSPGKARLLLKQQKAHVVKRTPFTIKLLYGGAGYKQPITLGVDAGSKHVGLSASTEKRELYREEFTPRNDVVDLLSTRKQNRRSRRNRKTRYRASRFDNRVHGKHKGWLAPSVEVKIQEHITVIKRTCRILPVALVRVETAEFDTQRLKAMLEGKPLPVGTDYQLGEMCDEYNVRQYVLNRDHYTCQCCGAHTTTKKTVKLHVHHLESRKVGGNAPSNLITLCTTCHDALHKGKVSLDNKKRGKPMRDAVFMGIMRKTLMARLREELPIPVQGTYGYITKMWREQNDIKKSHVNDARCISKHPLAEPCSVCYRTKAIRHHNRQTHKANFSKGGIRKRSQMPYVVGGYRLWDKVLYKGQECFVSGRRTSGSFTLKKLDGTRISKGVTFKKLRLLEPATNYLIERM

SEQ ID NO: 11575 - protein, 430 aa, Desulfobacter sp.
LSVFVLDTNKKPQNPVHPAKARLLLTEGKAAVFRQFPFTIILKETVLDVASNPLRIKIDPGSRETGIAVINDDSGEIIFAMELRHRGQQIKNNLESRRAIRRSRRNRKTRYRKPRFDNRTRAEGWLPPSLKSRVHNIETWVNRLCRFCNIQAISMELVRFDMQKIQNPEISGVEYQQGELMGYEVREYLLEKWDRTCAYCGKTDIPLEIEHIVPRSKGGSNRVSNLTLACTACNRKKGNKPLEQFLSRKPGLLKRIQKQSKVPLKDAGAVNTTRWDLFRTLKKTGLPVETGSGGLTKFNRTTRGLHKTHWLDAACVGKSTPEKIFQIDKAVLIVKADGHGSRQMCRVNKFGFPRTTAKSTEKKVKGFQTGDIVKAVVTSGKKVGTYTGRVAVRKSGSFNIKTVDKTVQGISWKYCRLLHASDGYSYNTTC

SEQ ID NO: 11576 - protein, 427 aa, unidentified; identical to SEQ ID NO: 4977

SEQ ID NO: 11577 - protein, 430 aa, unidentified; identical to SEQ ID NO: 9911

SEQ ID NO: 11578 - protein, 465 aa, unidentified; identical to SEQ ID NO: 3856

SEQ ID NO: 11579 - protein, 429 aa, Parasutterella sp.
LRVFVRNKRGKPLMPCSPAKARLLLKEKKAIVVRRTPFTIQLTIATGESKQPVSLDVDAGYKHVGLSASTEKAELYASEVELRQDITDLLSARRALRESRRNRKTRYRAPRFDNRIRTKRKGWLAPSVENRINAHLSRIESVLRLLPVTKITVETASFDTQLLKNPDISGKEYQEGEQLGFWNIREYVLCRDRHVCQHCYGRSKDPVLNVHHLESRRTGGDSPGNLITLCETCHKALHRGEITLKAKRGQSFRAEAFMGIMRSEVPNRLKASHPELEVNNTYGYRTKHARIANDIAKSHCADAFCIAGNLGAERLCEFFFQKQTRRNNRQIHKLSILKGGIRKRNQAPFEVKGFRLFDKVACQGEEGFIFGRRSSGFFDVRKLDGTRISAGISCKKLHLLEKRRTYLTEIRKEEALPPLPEGRGLRAKM

SEQ ID NO: 11580 - protein, 443 aa, Anoxybacillus sp.
MVEENMTCFMQRKGENPMVFVLDTNKRPLAPCHEAVARKLLKQGKAAIYRRFPFTIILKKSVDESEIKATYRLKIDYGSRHTGLAILRGQEVVWLGQLDHRTDIKERIDKRRAFRRARRNRKTRYRKPRFLNRKRKEGWLPSSLESRVQNIQTWVNRLKKLCPIGYISYENAKFDTQLMRNPEINGVEYQQGTLQGYEVREYLLEKFGRKCCYCGKENVPLEVEHIIPKSRGGTDRVDNLCLACHDCNQRKGSKTAEEFGYPHIQKQVKESLKDASAINSTRWKVYEVLKQTGLDVECGTGARTKMNRIRLDLPKTHYFDACCVGESTTNHLYFKTKEVLFIKAKGRGSRSRTNLDRYGFPRGYLARQKFFFGFQTGDMVKAVVPRGKYQGVWFGEVACRKTGSFDIKGKDGKRIAQGINYRYVQVIQRFDGYAYGKGVAELA

SEQ ID NO: 11581 - protein, 512 aa, unidentified; identical to SEQ ID NO: 3057

SEQ ID NO: 11582 - protein, 453 aa, unidentified
VVFVLDKRKRPLMPCSEKQARKLLKEGRAVVHRLVPFVIRLKDRVVEQSVLQSLRLKIDPGYEVTGISVVRVAEGKETVIFFAEIHHRTDITEKLLSRRQVRRSRRNRKTRYRAPRFSNRRRPEGWLPPGAEARVNQVLSVVRKLLRWLPITEIVVESARFDTQKLQNPEISGVEYQRGELFGYEVREYLLEKFGRKCAYCGKENVPLEIEHVVPKSRGGTDRVSNLTLACRECNRAKGNKLPQEWMEELKKSGRSVDRKRAENIPEVLSRLRKPLKGAAFMNATRYALVDRLKGFGLPVLTATSAQTKYNRTRFGLPKTHYYDAGCVGEMPDGLEIATEYVQVFRAVGRGTRRMCNPDKYGFPRGHREARKRYFGFSTGDLVRAVVPNGKYAGVWTGSVVVRASGFFDLKDVAGKRIAQGIHYRSIRLIQRGDGWRYDRFRREGGKAHSSSQ

SEQ ID NO: 11583 - protein, 408 aa, unidentified
MVYVQDINGKPLMPTTRHGKVRRLLKDKKAVVVNLCPFTIKLTYVTSDYKQEIVLGVDAGTKHVGLSATTKSKELYSSEVILRSDIVDLLSTRRELRRTRRNRLRYRKPRFDNRIKSKRPGWVAPSVKYKIDAHIRVIDNVCSILPISSIVIEVAQFDTQKIKNPNISGKEYQEGDQLGFWNVREYVLARDGHKCQYCKGKSKDSILNVHHIESRKTGGSSPSNLITLCETCHKEYHKGNIDLKIRRGKSLRDAAVMGIMKWRLYEELKYKYGCVSMTFGYVTKYNRIKYGIEKSHVSDAFVISKNFNAIRLGYYYKVKLVRRHNRQIHKQKIPKGGIKRLNQSPFEVFGFRLFDRVMFENSYYFIFGRRKTGRFNIRDIDGKNQRDITYKKLKLSRCKCFMVQNEMN

SEQ ID NO: 11584 - protein, 415 aa, unidentified
MANNIKYCFVIDKDNQPLAPTKVNKGWYLIRKNRAKLKSKYPMVIQLEKKVKFDENDKSYMVCGIDDGSAHIGLAVVQKCPTKNKVVFKGTIEQRQDVKHLMDVRRGYRRYHRYHKRYRPMRFNNRASSKRIGRLAPSIKQKKDAILRVLYQLNKWINIKEYYLENVCIDIRAMTDDYKPYKWQYQKSNRLDENLRKATIIRDNYKCQECGKSNCKLEVHHIQARKYHGADTIGNLITLCSKCHDKTKGKEKDFEDKYFKIINSKPKRFDYAMHVMQGKNYLRNKISELGLLHLTNGGETANKRIEWNIEKSHSNDAICIADGIPDNCNIKEWIIKPMRRKSKAKTNNVLGIKHKDLVSYAYKNGEIHTGYVTALYPEQLALNFQSRTKHCKKVNARKCKLLWKFNKIYWLEQCI

SEQ ID NO: 11585 - protein, 421 aa, unidentified; identical to SEQ ID NO: 4235

SEQ ID NO: 11586 - protein, 568 aa, Streptomyces sp.; identical to SEQ ID NO: 2953

SEQ ID NO: 11587 - protein, 420 aa, Petrotoga sp.; identical to SEQ ID NO: 11467

SEQ ID NO: 11588 - protein, 427 aa, unidentified; identical to SEQ ID NO: 7675

SEQ ID NO: 11589 - protein, 415 aa, Bacillus sp.; identical to SEQ ID NO: 2431

SEQ ID NO: 11590 - protein, 435 aa, unidentified; identical to SEQ ID NO: 2260

SEQ ID NO: 11591 - protein, 419 aa, Anaerostipes sp.; identical to SEQ ID NO: 4877

SEQ ID NO: 11592 - protein, 431 aa, Petrotoga sp.
MEKRSVQRVFVLDKNKQPLMPCHPARARELLKKGKAAVFRYHPFTIILKDREGGDTQPIQVKIDPGSKYTGVALVADFKRGKKVIWASVIYHRGHVIKKNLDTRRGVRRFRRNRKTRYRKPRFLNRKRKEGWLPPSLISRAENILTWVKRIRRFSPVTSISMELVRFDTQKLQNPEIKGVEYQRGTLYGYEVKEYLLEKWGRKCAYCGKENVPLEIEHIVPKSKGGSDRISNLTLACHECNQKKNNQSIDEFLANNPKKLNQIKARAKGPLKDVASVNATRWYLFNQLKKEGLPIEVGTGGQTKYNREMQNYSKKHWIDAACVGESGYNVQLEPDMQVLEITAMGHGMRRICFVDKYGFPKSYRPKERTYMGYKTGDIVLANVPKGKNKGIHIGRIAIRHRPSFLLNGVGDVHPKYLTLLQKNDGYGYQIS

SEQ ID NO: 11593 - protein, 297 aa, unidentified; identical to SEQ ID NO: 5896

SEQ ID NO: 11594 - protein, 436 aa, unidentified
MAKTLTTQTMQACVLDQNGKPLMPTTRLGKVYRLLKTQKAHIVSYEPFTIQLDYEPDTQVIQPMTLGVDSGAIHSGYSVANEHREYYNAEVIARNDISNRLSDRHMYRQHRRYRKTRYRQPRFNNRKNKKKGWLPPSLEQKVAVQVNEIDHIHRYFPIETIIVETAEFDIQKIKNPDISGVEYQQGTLQGYNIRNYLLEKHGRKCFYCGKAVSDFEVEHMFPKSKGGSNRIDNLTLSCHDCNEKKGTLTAEEFIQQTLPAKKAVAKLKQLPNEKRLFKYMAYMNATRWALYDAIKERYPNVKMTYGYITKYNRIQAGLPKAHHVDAKCITSFATVPFMSQTVVKVKMRRHNRQLHRATFSKGHVRKVACLPTVTFGFQLYDLVLFDNHRYYIKSRRSSGIFALASVEGLKNEERTYKKLTLLAHTNAYLTNRYVNV

SEQ ID NO: 11595 - protein, 420 aa, unidentified; identical to SEQ ID NO: 2681

SEQ ID NO: 11596 - protein, 440 aa, unidentified
MSTSVFVLDKKHRPLMPCRPARARRLLRAGRARVVKRFPFVIRLVDRTVEQSEVQPVLIKLDPGSRETGAAVVRDDEKKRHHALAFFVIKHRGGAIRDALKARSAFRRRRRSQNFRCRSPRFLNRVKPKGWLPPSLRHRVETTLSFVRRMCRYLPVSGIATELVKFDSQKLQNPEVSGVKYQQGTLFEYEVREYLLEKFGRKCVYCGAEGVPLNIDHVVPRAKGGSNRVSNLVLACVSCNQKKGARSLEDFLKGKPEVLARVRRELKTPLRDAAAVNATRWVLFNELKATGLPVETGSGALTKLNRHAFGVEKEHWLDALCVGRLNGAVTRKGLNVLEIRCMGRGSRQRTRLTKYGFPRGYLMRQKCVHGFATGDMVEANVPKGKKAGLWRGRVAVRVSGSFNIQTPKGVIQGVGWKHCRLISHNDGYGYAWLGHAPHSS

SEQ ID NO: 11597 - protein, 428 aa, unidentified
LKVFVLNMRGQPLMPCSPAKARHLLKAGKAVVRRRTPFTIQLRIATGETKQSVTLGVDAGAKHVGLSAATEKEEVFASEVELRQDITGLLAARLSLRRERRQRKTRYRAPRFLNRVRSKHKGWLAPSVENRIQAHMSRIDAICELLPVTKIVIETASFDIQKIKHPDVEGTDYQQGDQLGFWNVREYVLFRDGHVCQHCHGHAKDKILNVHHLESRQTGGDAPNNLITLCETCHKAYHAGKIKLKVKRGQSFRAEAFMGIMRWTLLDRVRKAHPGLPVENTYGYLTKHTRITHGLPKTHCVDAYCIAGNLKAVRRGVYLHQRQMRKHNRQIHKFTVLSKRLEDGTKIGYRKLNQSPYLVHGFRLFDKVRCLGQIGFIFGRRSSGYFDVRRLDGVKLSPSISWRKLTLLEKRSTYLTELRKQDGASSPV

SEQ ID NO: 11598 - protein, 389 aa, unidentified
MVYVQDIYGRPLMPTTRHGKVRRLLKSKKATVVNLCPFTIRLLYDTTGYKQEITLGVDTGTKHVGLSATTKSKELYASEVILRSDVVDLLSTRRELRKIRRYRLRYRKPRFMNRIKSKKRGWIAPSIRQKIDSHIRIIGFVYSILPVSKLIIEVAQFDTQKIKNPEISGKEYQEGEQLGFWNVREYVLARDEHKCQHCKGKSKDPVLNVHHIESRKTGGDSPSNLITLCKTCHKEFHKGNIKLKVNRGESLRDAAVMSIMKWELYDELKSLYPNVKMTFGYITKYNRINHGIEKSHVSDAFVISRNFDSERLGYYYKRKLVRRHNRQIHKMKAPKGGNKRMNQSPFKVFGFRLFDKVMFQGKERFIYARRLRGIFNIRDINGENKKDIS

SEQ ID NO: 11599 - protein, 396 aa, unidentified; identical to SEQ ID NO: 4508

SEQ ID NO: 11600 - protein, 442 aa, unidentified; identical to SEQ ID NO: 2903

SEQ ID NO: 11601 - protein, 430 aa, unidentified; identical to SEQ ID NO: 7986

SEQ ID NO: 11602 - protein, 195 aa, unidentified
GTLCDDCHKKFHLGIITDVKLKTRRRQSTRDAAFMGIMRKTLMWRLRTELFIPVAETKGYITKATREKLLVLPKSHTRDALAIAQGRHGFGIKEYAYVEPANHIYTVRPVRHHNRQLHKASILKGGIRKRNQASKYVFGFRLYDKVLYQGKACFVWGRRTSGTFLLRTIDGIKVKDGVSYRNLTLLERSSNYLIA

SEQ ID NO: 11603 - protein, 512 aa, unidentified
MSTVYVLNKDGKPLMPTTRCGHVRYLLKEKKARVVASKPFTIQLLYETDDVVQPLYLGIDPGRSNIGVAVVKTDGMAVFTAHLETRNKEIPKLMKKRKDSRRARRTNGRRCRRQRRAKANGTISKKCVKQTTAQNGSVSKRAKEIGVIKRHLPGCEKDVLCIGIKNKEAKFNNRTRPTGWLTPTANQLLQTHINLVKKIQKFLPISDVVLEVNKFAFMQLDNPNIQKWQYQKGPLYQKESLKSAVSEMQEHHCLFCKKKIDHYHHVVPQHKNGSNTIDNIVGLCTQHHDLVHKDATWQKRLAKKKTGLNKKYGALSVLNQIIPALTKELSSLFPKHFFATNGKSTNDYRIAHGVSKDHWLDAYCIACSVLPNDTCDRTINSRVPYELKQFRRHDRRALHKENMSRVYTLNGKSVATNRHKATEQTTDSLEEFRQCQPDDVCKLKVKEHYPEYRNPKRNFPGCVFLVGKHTHVMQGTSGSHNGKADGYYDTNGNSYPSGKCKFVAKNKGIVFA

SEQ ID NO: 11604 - protein, 460 aa, unidentified
VQLRQSDAGQSHVLCCLSDKKKGRHNHMYVYVINKHGQPVMPCRPRMARVLLQEGKAAVVKQVPFTIRLLYGSSGYKQPVSLGMDAGSRHIGIAATTGKKVLYAEELSPRNDVVKLLSVRRQRRRARRSRRTRYRQARFDNRVSSKPKGWIAPSVEVKIQEHISAILRIQKMLPVSEIHVETAEFDTQRLKALEEGRPVPVGTDYQKGEMYNQYNVRQYVLFRDGYKCKCCGKHGDGVKLHVHHIESRQTGGNAPNNLITLCEDCHKALHAGTMQLPDGRAKRGRSHRDAAFMGIMRKAMVSQLRDIVDIPVTETYGYITKYYRELHHVEKSHISDAIIISRNFKAEPDDTYYASKAVRHHNRQLHKNTILKGGVRKRNQAPHVVKGFRLFDLVRYENSVYYVFGRRKSGFMDIRTLDGRKINKGSISSKKLKFVSTSKGTLVERRKAIPLADKSASFLA

SEQ ID NO: 11605 - protein, 421 aa, unidentified
MVVYVLNQNGQPLMPISRCGKVRRLLKSKRAKVVRRCPFTIKLLFEPENDFVRECYCGVDTGSKHVGVAVVGNDRVLYQSQTELRSGIKKKIDRRRGFRRLRRSRKIRYRKPRFLNRRNSIRTGRLSPSVKHKVQAHIDEIEFCKKILPVSDLILEVSQFDTALMKNPSLISEKVKHWGYQQGLNYGYSSRRSAILHRDGYTCQCCGKKNCRLEVHHIIFRSNGGTDDENNLITLCADCHKKVHKGEIVLEKKPKKMNLKHATHMSIIRSWLLKKYPNAIETFGFVTSENRNHLGLEKSHYIDACVVASGGLEFEELDVIFYKRRVSKGDYKLTRGARGEQKLHTGKVHGLRKFDKVKYLNQEYFVESRINTGFAKLMDVFGNQADFSFALRGHKTPKLSNCKRINARRSTLCTWLANTIN

SEQ ID NO: 11606 - protein, 451 aa, unidentified; identical to SEQ ID NO: 6972

SEQ ID NO: 11607 - protein, 514 aa, unidentified
MSTVYVLNKNGKPLMPTTRCGRVRHLLKEQKARVVTSNPFTIQLLYETDDVVQPLYLGIDPGRTNIGVAVVKTDGTAVFTAHLETRNKEIPKLMQGRKKARRARRTNGRRCRRQRRAKANDTISKKCVKQDTAQSVSASKRAKKIGVIKRHLPGCEKGVLCIGIKNKEAKFSNRTRPEGWLTPTANQLLQTHINLVKKIRKFLPISDVVLEINKFAFMQLDNPNIQKWQYQQGPLYQKASLEEAVSEMQEHHCLFCKKPIAHYHHVVPQSENGSDTIGNIIGLCTKHHDLVHKDTAWQKKLAKKKTGLNKKYGALSVLNQIIPALTKGLGSRFQGYFYVTTGKSTYDYREVHGVSKDHWLDAYCIACSVLPNDVCDSDINNRVPYELKQFRRHDRRALHKANINRVYTLNGKSVATNRHKAIKQTTDSLEEFRQCQPDDVCKLKVKEHHPEYRNPERNFPGCVFLVGKHTHVMQGTSGSHNGQADGYYDTNGNSYSSGKCKFVAKNEGVVFTLN

SEQ ID NO: 11608 - protein, 431 aa, unidentified; identical to SEQ ID NO: 3235

SEQ ID NO: 11609 - protein, 420 aa, unidentified; identical to SEQ ID NO: 11070

SEQ ID NO: 11610 - protein, 476 aa, Ferroplasma sp.; identical to SEQ ID NO: 8620

SEQ ID NO: 11611 - protein, 426 aa, unidentified; identical to SEQ ID NO: 4097

SEQ ID NO: 11612 - protein, 413 aa, unidentified; identical to SEQ ID NO: 2636

SEQ ID NO: 11613 - protein, 372 aa, Clostridium sp.
MVEYSFVVDLSGNRLSPCNKNKAYYLIRKNKAKMLNKFPMVIQLQKIVEDDNIDDVKNYLGIDDGSKNVGLGIIQQCNTKVKTVFKGTIELRQDVSTKMTVRKGHRTYHRYHKRYREKRFDNRRASKRKNRLAPTILQKKQSILRVVSKLLKWTKIDAIYLEDVLIDIRAMIEGKKLYKWQYQKSNRLDNNIRLAVFMRDNFKCVDCNSNMMDRYLTKIKGKNLYIRHPMHVMQGKKYLQVELGKIAPLSLTTGADTANHRIDWNIEKSHSNDALVVCGTEIKTKDINIKEWHIKPLRRKSKGDIDKIVDGFRLRDYVKYTKRNGLCYIGYITALYPDKKQFNMTTKDDIVLKRYGLKSLNLISRPNSIRFL

SEQ ID NO: 11614 - protein, 414 aa, unidentified
MVYVINKQGQALMPTERFGKVRRLLKNSLAHVVCRIPFTIQLDYDTTDYTQPVSLGVDAGSKHIGISATTSEKELYAADVELRNDIVDKLSTRRELRRTRRSRLRYRKARFNNRVSSKRKGWIAPSIENKIQTHLTIVEKIHKFLPITNIVVETAAFDIQKINNPSISGSEYQQGEQLDFFNVREYVLFRDNHICQHCKGKSKDKVLNVHHIESRKTGGDSPNNLITLCETCHKAYHRGEFELNVKRGKSFRNAAFMGIMRWSFYDRLKNIYPNVSMTFGYITKNTRITNNLPKEHYVDARCISDNPVAKPLGYYFYQKKVRCQNRQIHKANFLKGGRKKLNQAPFLVKGFRLFDLVEYQKELYYIFSRRNSGYFDIRKLDGTKVNKGSINCKHLRLIDTRKSILIEKRTKVNL

SEQ ID NO: 11615 - protein, 406 aa, unidentified
VPVMVYVLNFDGQPLMPTDKHGKVRHLLKDGRAEVVKRCPFTIRLLYDSTHYTQDIVLGVDAGSKHIGLSATTETKELYASDVELRNDIVDLISTRRQNRRSRRNRKIRYRKARFQNRVSGKKNWLAPSIRQKVDTHMTVVSRVCMILPVTKIIVETASFDIQKIKDPDISGTGYQQGEQLDFWNVREYVLFRDGHTCQCCKGKSKDLVLNVHHIESRKTGGDAPNNLITLCETCHKGYHSGAVQLPKAIHRGMRFKDAAFMGVMRWNFYNKLKEIYELQGIEIRMTFGYLTKNSRIRHHLPKEHYIDARCISGHPEAIPNNEVFYQKKVRCHNRQIHKNTILKGGIRKRNQTGYLVKGFRLFDKVAYEGREYFIFGRRQSGFFDLRDLSGCKVNKGSLSYRKIRF

SEQ ID NO: 11616 - protein, 471 aa, unidentified
  source 1..471: note = Candidatus Poribacteria bacterium
MSKVPVLDTHKRRLEPCHPAVARRLLRNGQAAVYKRYPFTIILKREASSPKTTDYMLSIDPGSKCTGFAITDSENNIIACFELHHRGAAIKKGLSNRAGYRRSRRTRKRRHRPARWQNRSRKAPVLTTDGWKYKSFGQSSKDWIAPSLMSRVFNIHTWVNRLSKIYPISRLAVEHVKFDTQLMENPEISGVAYQRGTLFEAEVWEYLLEKFGRKCFYCGTKNVPLEKEHILPKAKGGTNRVSNLTVSCRDCNIKKGNCHPDEIEGELGKRVQSALRAAKKPLKDAQTVNTIRWKIVETLKATGLPIIHGTGGKTKWHRKQAGLPKTHYYDAACVASVPKLPAPPSVLAIHAVGYGHRRDLGGFQTVQTAPGFKRPYTRVENANGFQKLETVAMQTKKGRVVGCINSFDKTVAGKPQKLRIKTDWTAGDGRVSGNVTQLTRVQKRDGYAYQIVSSEKQEIRSTEKAAQLLLF

SEQ ID NO: 11617 - protein, 475 aa, unidentified
MVITLDKNKRPLGFMSERRCRILLEKKRAVLYRYFPTIVILKDVDARKLSGLSSYRIKIDPGAKYTGIAIVMDDTNEFMYAMQIEHRGEQIKKNLDTRRGARRNRRSRETGYRKPKWENRCTAKGQRQSYDSRRDENWLPPSVKSTADNIISWIRRLCRWINITNCSIESVRFDTQLMENPEIEGVEYQQGTLYGYEVKEYLLEKYGHTCQYCGGKSNDPILEWEHMIPRSRGGSDRLKNASLACHNCNQDKGNHTLEEWQTILQDRIPKERGKQKELDQIRQKFVQQVMEGKTPVKGLRYAAWVNSSRRYSQRHLYLRFPELECSSGGRTKYNRNAHEYPKEHHYDALCVGEIPEDGFVDRTNGYYLYAKATGRGTRLRGQINQCGVIIRKWMDRSKTAFGFQTGDLVVADVPKDTKYKYKGHFSGRVMIRKSGSFDIRTLSGELVTVNAKFCRLLQNNSGYQMMIKRAIPLGN

SEQ ID NO: 11618 - protein, 442 aa, unidentified
MSTSVFVLDKKHRPLMPCRPARARRLLRAGRARVVKRFPFVIRLVDRTVEQSEVQPVLIKLDPGSRETGAAVVRDDEKKRHHALAFFVIEHRGGAIRDALKARSAFRRRRRSQNLRCRSPRFLNRVKPKGWLPPSLRHRVETTLSFVRRMCRYLPVSGIAAELVKFDSQKLQTPEVSGIEYQQGTLFEYEVREYLLEKFGRKCVYCGAEGVPLNIDHVVPRAKGGSNRVSNLVLACVSCNQKKGARSLEDFLKGKPEVLARVRRELKTPLRDAAAVNATRWVLFNELKATGLPVETGSGALTKFNRHAFGVEKEHWLDALCVGRLNGAVTRKGLNVLEIRCMGRGSRQRTRLTKYGFPRGYLMRQKCVHGFATGDMVEANVPKGKKAGLWRGRVAVRVSGSFNIQTPKGVIQGVGWKHCRLISHNDGYGYAWLGHAPHSSPA

SEQ ID NO: 11619 - protein, 396 aa, Geobacillus sp.
MPCSPRKARLLLKQKKAKVVRRTPFTIQLLYGSSGYKQPVSLGVDMGTRHVGISATTKKDVLFEAEAQLRTDIVELLAIRRQFRRSRRNRKTRYREARFLNRRKPEGWLPPSIQHKINSHIKLIDLVHNILPATSVTIEVAAFDTQKLKNLNIRGVEYQQGEQMGFWNVREYVLYRDNHTCQYCKGKKKDPVLQVHHIESRKTGGDSPDNLITLCKTCHHEIHEKGLEHIFQRKRPPMRDASQMTAMRWAMFSRIREKYSHANITYGYITKCIRIANGLSKSHMVDARCISGNPLAKPSGTVYLLKFVRKNNRQLHKATILKGGKRKSNKAPRFVKGFQLFDKVVYERKECFIFGLTFRTLTRSKQRIFYLVFQNNFLTNTTSDGYPFFTIAGRSV

SEQ ID NO: 11620 - protein, 423 aa, unidentified; identical to SEQ ID NO: 3951

SEQ ID NO: 11621 - protein, 532 aa, unidentified; identical to SEQ ID NO: 3169

SEQ ID NO: 11622 - protein, 594 aa, unidentified; identical to SEQ ID NO: 4104

SEQ ID NO: 11623 - protein, 412 aa, unidentified; identical to SEQ ID NO: 4932

SEQ ID NO: 11624 - protein, 470 aa, unidentified; identical to SEQ ID NO: 2949

SEQ ID NO: 11625 - protein, 404 aa, unidentified
MPNKVYVINKHGRPLMPCSPAKARHLLDAGKAKVKKRTPFTIQLVYGSSGYTQEVILGVDAGSKTIGMSASTKKEEVFAADVTPRNDVVDLMSTRREFRRARRNRKTRYRKPRFDNRVRSKRKGWLAPSVEVKIQEHITSIKRVCRILPVSKVVVETAEFDLQLLKAIADGKPVPQGEDYQKGEMYGHYNVRQYVLWRDDYTCQCCGAHATKKKEVRLHVHHLESRKVGGDAPDNQVTLCESCHEKLHKGLITAKDFKKRKRRSTRDATFMGIMRKTLMQMLCSELPIPVVKTRGYITKATREKLLVLPKSHTNDALAIAQGKQGFNVGYLPGIEQIDKIYTIRPVRHHNRQLHKAAILKGGIRKSNQVGKYVFGYRLFDKVQFNEQDCFIWGRRTTGIFTIKT

SEQ ID NO: 11626 - protein, 411 aa, unidentified; identical to SEQ ID NO: 3762

SEQ ID NO: 11627 - protein, 494 aa, unidentified
MTMVYVQNKDGKPLMPTTRYCYVRLLLKEKKARVVSRTPFTIQLNYDTPDITQDLILGIDPGRTNIGVAVVKEDGQCVFSAHLETRNKEVPLLMKKRAAFRRQHRTQDRRRKRQRRAIAAGTTVESNTIERLLPGYEKPVVCHYIRNKEARFNNRSRPQRWLTPTANHLLQTHINLIAKIAKFLPITKVVVELNRFAFMAMDNPNIRRWEYQQGPLYGLGSVEDAVYAQQDGHCLFCKKPIDHYHHVVPRHKGGSETLANRCGLCEKHHDLVHKDKAWAEKLVTRKGGMNKKYHALSVLNQIIPHLMEYLGGETPYDVYATDGKSTKGFRVAKYVPKEHYTDAYCVACAILDADTKVSAPVEPFELKQFRRHDRQACIRQMVDRKYLLDGKVVATNRHKAIEQKSDSLEEFREAYGDAAVSQLAVRPHSPQYKDMTRIMPGAVMDFDGVVGVFQGSSGRNNGTPNYYNSTKGARVLTKRCALLAKNVGMVFIPA

SEQ ID NO: 11628 - protein, 414 aa, unidentified
MPCSPAKARLLLKEKKAIVKRRTPFTIQLTIATGEAKQPVSLGIDAGYKHVGLSASTEKAELYASEVELRQDITDLLSARRALRQSRRNRKTRYRAPRFDNRISTKRKGWLAPSVENRINAHLSRIEAVLRLLPVTKITVETASFDLQLLKNPDISGKEYQEGEQLGFWNIREYVLCRDGHVCQHCYGRSKDPVLNVHHLESRRTGGDSPGNLITLCETCHKALHRGEITLKAKRGQSFRAEAFVGIMRWEVHNRLRALHPGIEVSNTYGYRTKHARIANGIAKSHCADAFCIAGNLGAERLCEFFFQKQTRRNHRQIHKLSILKGGIRKRNQAPFEVKGFRLFDKVACQGEEGFIFGRRSSGFFDVRKLDGTRISAGISCKKLHLLEKRRTYLTEIRKEEALPPLPEGRGLRA

SEQ ID NO: 11629 - protein, 428 aa, unidentified; identical to SEQ ID NO: 7377

SEQ ID NO: 11630 - protein, 364 aa, unidentified
GTIGTAVSKDNGDIVYMSEVIVRNDITDKMTQRVKYRRNRRNRKIRYRKARWLNRANSIKNDRFSPTMQSKLHSHVKEIEYIKSILPITEMVFETGQFDTHFMKNPSLANPKVKHWGYQKGTNYGFENTKAMVLNRDSYTCQCCKGKHKDSKLEVHHIVFRSQGGSDEESNLITLCHTCHKDLHSGKINPKLSGKVKGNLKYATQMNSIRKQLFRLYPNAIETFGYVTKANRLHLGVNKEHYYDACTIATQGNAFNVKSNLYKKKCVSDGDFQKTKGVCSEQPIVTDKICGFRKFDKVRYFGNDYFIKGRMSTGYAILMDIDGDKVDFSAMPKGYKTPKMVNLKRLEARSTWMITTVEVTPNIA

SEQ ID NO: 11631 - protein, 423 aa, unidentified; identical to SEQ ID NO: 3538

SEQ ID NO: 11632 - protein, 393 aa, unidentified
SKSHEYVSAQYDTLQDEKEHHDDCRMHRRTRRNRLRYRKPRFDNRKRGEGWLAPSLMHKKELNVNVVKMYCAVMSITHATVEVGSFDTMLVKAIQEGKVIPEGADYQKGPRYNLATLREAVFYRDNYVCKICGRKATEGAILHMHHMFYWKGRHGNSLDELLTVCEKCHTPANHQKGGKLYGFGEDVKFADLSGAAFMNTVRWQIVNELYVAFGKPFVTITYGAMTKEKRIALQLEKSHNNDACAMGEFHPNLRCMFEHYEKARRNNRILEKFYDSRYIDIRTGEIATGKELFNGRINRNHKKDSENLHKYRGKRTYAGHRALLRKKVNLNPGDLVSLNGENLIVHSTHTKKNGAVNVEFETPAKSGQKSASLKKLKIVKAANSIHPAWKKIS

SEQ ID NO: 11633 - protein, 424 aa, unidentified; identical to SEQ ID NO: 3351

SEQ ID NO: 11634 - protein, 431 aa, Calothrix sp.; identical to SEQ ID NO: 5518

SEQ ID NO: 11635 - protein, 421 aa, Sutterella sp.; identical to SEQ ID NO: 8559

SEQ ID NO: 11636 - protein, 424 aa, unidentified
MRVFVFNMRGEPLMPCTQRKARVLLKENKAIIYKYNPFTIQLTYTTGETTQDCHIGVDTGSKHIGIAVTSKDKLLFKGEVELRQDVKSNIDTKRIYRRSRRNRKTRYRKARFLNRKKANKWLPPSLQNRINHTFHWIDTFISLIPNPTLHVEVGKFDTAKMINPEINGVDYQHGQTYGFFDERYFVFARDNYTCQCCGKSKNKILQIHHIIYRSNGGTNRVDNLITVCTDCHTSKNHKKGEILYKWQEQHKKVKRYKEPPFMNILRQRIFVTYPNAEITYGSETTPKRNIMGLSKTHYNDAIVISGINEINENCEDWLLIKQFRKKKRSLHEATARKGRKNPNRNQIRNNKNTPYYKGLYLNDKVSILGISGYVTGFTNGGAYIKDDNDNYITLPNKTYKQININKIKRKCHNNNWQYIVKNVA

SEQ ID NO: 11637 - protein, 310 aa, unidentified
MERLLRKEVGYMLVYVISKHGKPLMPCNPQKARRLLKEQKAKVVKRTPFTIQLLYGSSGYKQDVILGVDAKSKTIGVSASTENKELFSAEVELRTDIVDLLSTRRTLRRSRRNRKTRYGQSRFLNRRKPEGWVAPSVQNKIDTHIKVVKLVHAILPITRVVVEVAQFDVQKIKNPDILGEDYQQGEQLGFYNVREYVLFRDKHTCQHCNGKSRDPILNVHHIESRKTGGNSPDNLITLCETCHKRYHKGGIELKVKRNSSFRDAAFMGIMRWASYNKLKEQYSNVHLTFGYITKNVRIKHNLEKSHRILP

SEQ ID NO: 11638 - protein, 430 aa, unidentified
MPKVYVLNRHGRPLMPCTPAKARHLLDAGKAKVRHRTPFTIQLLYGSTGYTQEVILGVDAGSKTIGLSAATETEELFSAEVKPRNDVVELMSARRQFRCARRNRTTRYRKPRFDNRVRSKHKGWLAPSVEVKIQEHMTAIRRACAILPVSKVVVETAEFDLQLLKAVAEGKPVPQGEDYQKGEMYGHYNVRQYVLWRDSYTCRICGMHGSVRKGVPLHVHHLESRRVGGDAPDNLVTLCTACHDKLHKGIIMAADIKKRKRRSTRDATFMGIMRMTLLRRLREQLPVPVVETRGYITKATRENLLVLPKSHTNDALAIAHGPQGFRAEYLPNIRQADRLYTIRPVRHHNRQLHKATILKGGVRKANQAEKYICGFRLYDKVLYNGIECFVWGRRTSGSFLLRQLNGEKVKDGVSYKHLKLLERSQSYLVA

SEQ ID NO: 11639 - protein, 446 aa, unidentified; identical to SEQ ID NO: 11087
  REGION 1..446: note = Ga0373628_0008773

SEQ ID NO: 11640 - protein, 333 aa, Bacillus sp.; identical to SEQ ID NO: 5532

SEQ ID NO: 11641 - protein, 424 aa, Caldicoprobacter sp.; identical to SEQ ID NO: 6395

SEQ ID NO: 11642 - protein, 428 aa, unidentified
RLGMVRRWLKTGQAKWFGNSRNTIQFVRLVTTNTQELTLGVDAGFHLGLSVVGNNREYYVSESLRKSEKDRITSRRELRRTRRNRLRYRKARFNNRRRKDGWLAPSIQHRLDFTIKEIKRLYKFLPITNLVVEVTPFDNQKLLNPDIQGWQYQEGKMYGFKTIKDYLLARDNYRDALDGKQYPASQLRVHHLVQRKDGGSNQPDNLVLLSDINHNQANHNNGILAKLKENRQKTLDYRGAYFMSILATRLSNYFDNYTITQGYLTANLRQKYEIKKSHLNDAFIIAGGTDTTLRTNNVYSRQKLRNNNRVLQKFYDAKYIDSRDGKKKTGKELSSGRTRRSQELNYDNLRQFRKEKVKKGRVSIRRGHYQLRPHDVVLNTRTNRIETVKGVQNSGTVIKFQTGKTCSIKSVVSLYHVNGILEKKMENI

SEQ ID NO: 11643 - protein, 424 aa, Petrotoga sp.; identical to SEQ ID NO: 8893

SEQ ID NO: 11644 - protein, 443 aa, Anoxybacillus sp.; identical to SEQ ID NO: 7070

SEQ ID NO: 11645 - protein, 465 aa, unidentified
MSTCVCVLSNNGERLMPTIRLGKVRHLLKDGKAKIIKHHPFTIQLLYDSKTNTQPIEICEDVGYNYIGISMKSEFHEYVSVQYDTLQDEKDCHDGCRRVRRSRRNRLRYRQARFDNRKRDDGWLAPSFEHKKELNVNVIKMYCKVMPITHAIVEVGSFDTMLVKAIEEGKATPESADYQKGPRYKLATLREAVFYRDNYTCQVCGRKANEGAILHVHHMFYWKGRHGNSLSELITVCEKCHTPANHQKGGKLYGFGEDIKFTNLSGAAFMNTVRWQIVNVLYAAFGKPFVTFTYGAMTKEKRIALHLEKSHNNDAYAMGSFHPVNRCAFEHYEKVKRNNRILEKFYDSQYIDTRTGELTNGKSLFNGRISRSHKKDSENLHKYRGKRICKGHRALRRKKVALNPGDLVSLNGEILVVHGTHTKKNGSVNVEFKTPSRGGKKSASLKKLKIVKTSNLMHSAWTKVS

SEQ ID NO: 11646 - protein, 442 aa, unidentified; identical to SEQ ID NO: 7482

SEQ ID NO: 11647 - protein, 413 aa, unidentified; identical to SEQ ID NO: 2636

SEQ ID NO: 11648 - protein, 422 aa, unidentified
MSVFVLAKDGRPLMPCSPAKAKHLLKKGLAKVRRRTPFTIQMLVVTKHCTQEVILGVDAGSKTVGLSCGTADKELFAGEMIPRNDVVEKLSARREFRRARRNRKTRYRQPRFNNRVKSKHKGWLAPSVEVKIQEHITVIRRICRLLPVSKVIIEGVEFDLQLIKAVAEGKPVPQGEDYQKGEMLGYYNVRQYVLWRDGYKCRNCGAHKDVKLRTHHLESRKIGGDAPNNLVTLCGKCHDLFHKGTIQLKARRGSSYRDAAFMGIMRKALISRLRVELNIPAYETRGYITKHTREYQMHLTKSHVNDALAICHGPHGFNDGEKAVVERAAHVYLIKPVRHNNRQLHRATILKGGIRKANQSPKYVKGFRLFDKVRYNGHDCFIWGRRTSGYFAVKTIDGKVIHNSASFKKLNLVERASNYLIA

SEQ ID NO: 11649 - protein, 431 aa, unidentified
MPNKVHVINKHGCPLMPCSPAKARHLLDAGKAKVKKRTPFTIQLVYGSSGYTQEVILGVDAGSKTIGMSASTTKEELLSAEVKPRNDVVDLLSARREFRRARRNRKTRYRKPRFDNRVRSKHKGWLAPSVEVKIQEHITAIRRVCGILPVSKVVVETAEFDLQLLKAIEEGKPVPQGEDYQQGEMYGHYNVRQYVLWRDNYTCQCCGAHATKKKEVRLHVHHLESRKVGGDAPDNQVTLCDRCHEKLHKGLITEKDLKKRKRRSTRDATFMGIMRKTLMQRLCSELPIPVVKTRGYITKATREKLLVLPKSHTNDALAIAQGKRGFNVGYLPEIAQIDKIYTIRPVRHHNRQLHKATILKGGIRKSNQTEKYVFGYRLFDKVQFNGQDCFIWGRRTTGIFTIKTINGKMIKDGISFKKLKLVEKSTNYLIV

SEQ ID NO: 11650 - protein, 421 aa, unidentified
MQYVYVLSKHGEPLMPCSPGKARLLLKEKKARVVRRTPFTIKLLYGSAGYKQPITLGVDAGSKHVGLSASTEKRELYREEFTPRNDVVKLLSKRKQYRRSRRNRKTRYRAPRFNNRVHSKHKGWLAPSVEVKIQEHITVIKRICRIIPISLVRVETAEFDTQRLKAMLEGKSLPVGTDYQLGEMYDEYNVRQYVLKRDNYTCQCCGAHPTEKKPVRLHVHHLESRHVGGNAPNNLITLCVACHKALHEGKITLDKGKKRGKPLRDAAFMGIMRNTLLARLKDELNIPVKQTYGYITKLLREKNKIPKSHVNDARCIAKAPNAKPCDTMLYTRALRHHNRQIHKAKILNGGIRKKNQAPYLVKGFRLWDKVRYNGEECFITGRRSSGYFALKKYDGTVISNSASYKKLMLLEAATNYITERS

SEQ ID NO: 11651 - protein, 408 aa, unidentified
MVYVQDINGKPMMPTTRHGKVRRLLKDKKAVVVNLCLFTIKLMYVTSDYKQEIVLGVDAGTKHVGLSATTKSKELYSSEVILRNDIVDLLSTRRELRRSRRNRLRYRKPRFDNRIKSKRPGWVAPSVKYKVDAHIRVIDNVCSILPISRIVIEVAQFDTQKINNPNISGKEYQEGDQLGFWNVREYVLARDGHKCQHCKGKSKDPVLNVHHIESRKTGGDFPSNLITLCETCHKEYHKGNIDLKIKRGSSLRDAAVMGIMKWRLYEELKSKYDNISMTFGYVTKYNRIKHGIEKSHVFDAFVISKNFDAIRLGYYYKVRLVRRHNRQIHKQKIPKGGIKRPNQSPFEVFGFRLFDRVMFENSYYFIFARRKTGSFNIRDIDGKNQRDITYKKLKLSRCKRFMVQKEMD

SEQ ID NO: 11652 - protein, 414 aa, unidentified; identical to SEQ ID NO: 2588

SEQ ID NO: 11653 - protein, 456 aa, unidentified; identical to SEQ ID NO: 6594

SEQ ID NO: 11654 - protein, 408 aa, Bacillus sp.; identical to SEQ ID NO: 9968

SEQ ID NO: 11655 - protein, 480 aa, unidentified
LYTKPLDNIGEGSLPPSGEINLKGMTFMVYVKSIDGKVLMPTSNAKARKLLKQKKAKVVSLRPFVVKLTYKTKTEYIQKLNLGVDSGYSNIGFSVIDAKQEYIAGEVKLLEGMKKRLLEKASYRRIRRSRLRYRKARWNNRVKSKKKGWLAPSLKHKLDTHIKFIDYLKNILPIEKITIEVANFDIQKMKDDLISGIDYQNGDMFGFWNVREFVLHRDGHKCQNPNCKHKDKKEQILKVHHIRYRSEGGSDRPENLITLCSKCHTPANHKKGKFLYDWCVNGKKVRGFKDATFMSMIRWYLVNELKSKHNNVSITYGYITKNHRIQNGIEKSHLNDAFAIAKGTNQARTKDRFLVIQDRLKNRSLEKFYDSKIIDIRTGKKVSGGDLSCGRSTRNKNLNTENLRKYRGAKISKGQRRIRKQKYFYQSNDLVKYDGKVYTVKGTQNEGKYIALKEIKKVPKVELLIPYVFKKGLNWSYGLC

SEQ ID NO: 11656 - protein, 413 aa, unidentified; identical to SEQ ID NO: 2636

SEQ ID NO: 11657 - protein, 427 aa, Nostoc sp.; identical to SEQ ID NO: 2670

SEQ ID NO: 11658 - protein, 442 aa, unidentified
MVTVQQSTHHLPFGRVFIRRNLFMVYVISQDGKPLMPCSDPIARLLLKQGKAKVKKREPFTIKLTYETTNYTQGLTLGVDTGSGTIGTAVSKDNGDIVYMSEVVVRNDITDKMTQRAKYRRNRRNRKTRYRKARWLNRASSIKKDRFSPTMQSKLHSHVREIEYIQSILPVTEMVFETGQFDMHLMKNPSLANPKVRPWGYQKGANYGFENTKAMVLNRDNYTCQCCKGKHKDSKLEVHHIVFRSQGSSDEESNLLTLCHTCHKDLHSGKINPKLSGKVKGNLKYATQMNSIRKQLFRFYPNAIETFGYVTKVNRLHLGVAKEHYYDACTIATQGNAFNVKSNLYKKKCVSDGDFQKTKGIRSEQPIVTDKICGFRKFDKVRYFGNDYFIKGRMSTGYAILMDIDGNKIDFSTMPRGYKTPKLSNCKRITARSTVMTQVKVV

SEQ ID NO: 11659 - protein, 454 aa, unidentified; identical to SEQ ID NO: 8421

SEQ ID NO: 11660 - protein, 422 aa, Petrotoga sp.; identical to SEQ ID NO: 6564

SEQ ID NO: 11661 - protein, 465 aa, unidentified; identical to SEQ ID NO: 3603

SEQ ID NO: 11662 - protein, 427 aa, Calothrix sp.; identical to SEQ ID NO: 9900

SEQ ID NO: 11663 - protein, 408 aa, Petrotoga sp.
LKKGKAAVFRYHPFTIILKEREGGDTQPIQVKIDPGSKITGVTLVGDFKNGKKVIWGAEIHHRGQSIKKALDTRRGVRRSRRNRKIRYRIARFDNRKRSKGWLPPSLISRVENILTWIKRIRRFSPITGISLELVRFDTQKLQDPEINGIEYQRGTLYGYEIKEYLLEKWGRKCVYCGKENVPLEIEHIVPKSKGGSDRISNLTLACHECNQKKGNQSIEEFLTNNPERLKQIKSESKRPLKDTAALNATRWYIFNQLRGNSLTAGKEELPIEVGTGGRTKYNRETQNYPKKHWIDAACVGESGQNVQIEPDMQVLEIKAMGHGMRRMCFVDKYGFPKSYRPKERTYMGYKTGDIVLAVIPKGKNMGIHIGRIAIRHRPSFLLNGVGDVHPKYLTLLQKNDGYGYQIS

SEQ ID NO: 11664 - protein, 413 aa, Blautia sp.; identical to SEQ ID NO: 3290

SEQ ID NO: 11665 - protein, 422 aa, unidentified; identical to SEQ ID NO: 4124

SEQ ID NO: 11666 - protein, 406 aa, unidentified
  VARIANT 406: note = X can be any naturally occurring amino acid
MVYVINFEGKPLMPTTNAKARKLLKQKKATVKRVNPFIIQLLYKTDTEYIQTITLGIDSGYLNIGFSAITDSKELIVGEVKLLQGIKDRLLEKSQYRRIRRQRLRYRKPRWNNRKIKQGWLAPSLQHKLNTHLKFIDYLNSILPIRNIVIEVANFDIQKIKNPDISGVEYQQGEQMGFWNVREYVFHRDGHKCQNPNCKNKSKEQILEIHHIKYKSEGGSDAPSNLITLCNKCHTSPNHKKGKFLYDWCENGKKVRGFRDATFMSMIRWYLLEQLKEKYTNIKATYGYLTKNHRIEHGIEKSHFNDAFAIAKGVNQVRNLEVFKVEQSRLNNRSLEKFYDAKYIDNRTGEKVSASELNCGRRTRNKNLNSENLRMFRGQKISKGQRRIRKQKSLYQPNDLIKYNGX

SEQ ID NO: 11667 - protein, 423 aa, Moorena sp.; identical to SEQ ID NO: 7848

SEQ ID NO: 11668 - protein, 442 aa, unidentified; identical to SEQ ID NO: 3161

SEQ ID NO: 11669 - protein, 442 aa, unidentified; identical to SEQ ID NO: 3234

SEQ ID NO: 11670 - protein, 237 aa, unidentified
MYDEYNVRQYVLKRDNYTCQCCGAHTTKKKTVKLHVHHLEGRQVGGNAPNNLITLCVDCHKALHAGKVKLDGKKRGKSFKDAAFMGIMRKTLMARLRDELPIPVQGTYGYITKMRREQNDIKKSHVNDARCISKHPLAEPCSVCYRTKAIRHHNRQTHKANFSKGGTRQRSQMPYVVEGYRLWDKVLYKGQECFVSGRRASGSFTLKKLDGTRISKGVTFKKLRLLETATNYLIERM

SEQ ID NO: 11671 - protein, 413 aa, Clostridium sp.; identical to SEQ ID NO: 4134

SEQ ID NO: 11672 - protein, 443 aa, unidentified
LTKDENRPSGRTTGLRAEQAEPAGIRKGDTLKVFVLNMRGKPLMPCSPAKARHMLKAGKAVVVRRTPFTIKLTIATGETKQDVTLGVDAGARHVGISATTEKEEVFASEVALRQDITGLLADRLAFRRARRNRKTRYRAPRFNNRVRSKHKGWLAPSVENRIQAHISRIEAVCRLLPVTKIVIETASFDIQKIRNPEVEGTGYQQGDQLGFWNVREYVLFRDGHICQHCRGRSKDPILNVHHLESRKTGGDAPNNLITLCETCHKAYHAGKIKLKVKRGQSFRAEAFMGIMRWTLLDRVRKTHPKLPVENTYGYLTKHKRIALGLPKTHCADAFCIAGNLKALRRGDFLFQQQTRKHNRQIHKCSILKGGVRKLNQAPFLVKGFRLFDKVRIGGQIGFVFGRRVRGTFNIRRLDKTVIGTDINCKKLSLLETRKTFLTELRKE

SEQ ID NO: 11673 - protein, 412 aa, unidentified; identical to SEQ ID NO: 6751

SEQ ID NO: 11674 - protein, 416 aa, unidentified; identical to SEQ ID NO: 5948

SEQ ID NO: 11675 - protein, 414 aa, unidentified
MPCSPAKARLLLKEKKAIVKRRTPFTIQLTIATGEAKQPVSLGIDAGYKHVGLSASTEKAELYASEVELRQDITDLLSARRALRQSRRNRKTRYRAPRFDNRISTKRKGWLAPSVENRINAHLSRIEAVLRLLPVTKITVETASFDLQLLKNPDISGKEYQEGEQLGFWNIREYVLCRDGHVCQHCYGRSKDPVLNVHHLESRRTGGDSPGNLITLCETCHKALHRGEITLKPKRGQSFRAEAFMGIMRWEVLGRLKASHPELEVNNTYGYRTKHARIANDIAKSHCADAFCIAGNLGAERLGEFFFQKQTRRNNRQIHKLSILKGGIRKRNQAPYEIKGFRLFDKVACQGEEGFIFGRRSSGFFDVRKVDGTRISAGISYKKLHLLEKRRTYLTEIRKEEVLPPLPEGRGLRA

SEQ ID NO: 11676 - protein, 231 aa, unidentified
LGKDSHSLRRGQFCQSLTVTTTRKETTSMYVYVLNQHGEPLMPCSPRKARTMLRDHKATVVRRTPFTIRLLHGCSGYTQRITLGVDAGSKFIGLSACTESKELFAAEVKPRNDVVDLLSTRRELRRSRRNRKTRYRVARFDNRVHSKHKGWLAPSVEVKIQEHITAIKRTCAILPISMVIVETAEFDTQRLKAMLEGKPLPVGTDYQLGEMYDEYNVRQYVLKRDNYTCQC

SEQ ID NO: 11677 - protein, 431 aa, unidentified
MNRVFVLSKTGKTLMPCHPARARQLLHSKKARVKRLYPFTIQLTHRSDGYIQPVELKFDPGSKQTGIGLVLHGKNRLSAIYAAVLTHRGQEIKSNLDSRRMIRRARRNRKTRYRQARFLNRVRSKHKGWLAPSIQSRVNNIVEWSKRFIRLSPVGFITVESVKFDMQKMENAAVEGLEYQRGTLFDYEVKEYLLEKYNYSCVYCGAKNVPFEKEHVIPRSRGGSNRISNLVLSCHDCNQKKDNLPIEVFLKDNPALLKKIKAQLKSPLKDASAVNITRKQIVKELGNLNVPVLTGTGAETKYNRVSQKYPKEHYIDALCAGATGAKVYISSKLKPLLIKKERRNNRQMCLVDKYGFPRGKAKGSKIVKGFKTGDIVKAVVLKGKKKGTYKGKVAVRSSGSFNIKVKQGVVEGIGWKNCVMLYRFDGYSYTY

SEQ ID NO: 11678 - protein, 430 aa, unidentified
MNSVFVLSNTKKPLMPCRPARARQLLTAGKAAVYRLHPFTIILKDRADGDVQDVEVKVDPGSKTTGVALVGHFEQQGAVVLFGANLSHRGQAIRNNLESRRSLRRGRRGRNTRYRPARFLNRTRKAGWLPPSVESRVMNTESVINKLANRCPITSATVELVKFDMQQMVNPEVSGVEYQQGELAGYEVREYLLEKWNRTCAYCGTQNVPLQVEHIQPKAHGGSNRVSNLTLACQPCNQRKGSQPVAEFLKGQPDVLKRIQAQAKAPLKDAAAVNASRWVLVNRLKAWLPVTTGSGGRTKFNRTRQGFEKDHWIDAVCVAESGERVSIRDGMKPLVITAKGRGTHQVVRTDRFGFPRGKAGRIKRAFGFSTGDIVKLHMPKGKYAGSYVARLAGIRATGTLDIKTAAGTVGASYKHFQLIQRNDGFDYATA

SEQ ID NO: 11679 - protein, 509 aa, unidentified; identical to SEQ ID NO: 5057

SEQ ID NO: 11680 - protein, 461 aa, unidentified
VQPLYLGIDPGRTNIGVAAVKANGTAVFTAHLESRNKEILKLMQDRKKARRARRTNGRRHRRQRRAKANGTISKKCVKQDTAQSKNPSKRAKEIGVIKRRLPGHKKDLLCIGIKNKEAKYTNRARPEGWLTPTAIQLLQTHINLVKKIQKFLPISDVVLEVNKFAFMRLDNPDIQKWQYQQGPLYQKGSLESAVSEIQEHHCLFCKKPIDHYHHVVPQHKNGSNTIGNIVGLCAKHHDLVHKDSAWEKKLAKKSTGLYKKYGALGVLNQIIPTLTNELSSLFPKHSFVTNGKSTYDYRAAHGVSKDHWLDAYCIACSVLPSNVCDSNINNHMPYELKQFRRHDRRVLNNENMNRVYTLNNKAVAINRHKAKDQKTVSLEEFRKEHPDDVCKLKVKEHHPTYRNMNRNFPGSVFLVGKQIHVMQGIASSKDGKATKYNDTSATAIAAGKCKFVAKNTGILFV

SEQ ID NO: 11681 - protein, 414 aa, unidentified; identical to SEQ ID NO: 4492

SEQ ID NO: 11682 - protein, 479 aa, Streptomyces sp.
METAENGSGDVPTHDHAYAGGIGASRVFVLSKDGQPLMPCHPARARELLGKGRAVVARQVPFTIRLKDRTLAESEVDGVRLRIDPGSKGTGLALTDEKKEADEHGATVTVRRGLIAVELQHRGDQIRMCMQQRAGYRHRRRSANCRYRAPRSDNRARPEGWLPPSLRHRVDTTVSLARRMCRYAPITEIHIERVAFDTHAMTAGSPLAGTEYQQGTLAGTEARAYLHAKWNRACAYCDAAGVPLNIDHLRPRSRGGSDRVSNLVLACVPCNQAKGSTPVDVFLAHRPDRLAEILQQVKTPLHDAAAMNATHWRLTEALESLGRPILAWSGGRTKWNRTAMGLDKTHTVDALCVGGLDHEDGDAIVRLPEQVLIAKATGRGSYARTTPDRFGFPRLRRARAKQHFGYVTGDLVRATIPTGKWAGTWTGRISVRARGQHSLATPRGRINVSHWNLRLVQRGDGYGYATRRELVQSPSRKTG

SEQ ID NO: 11683 - protein, 422 aa, unidentified
LRVFVINQRGKPLMPCSPAKARVLLREKKARVKRRTPFTIQLTTATGEARQDVSLGVDAGYRHVGLSASTEKAELYASEAVLRDDITDLLSARLALRRARRSRKTRYRAPRFLNRVHSKNKGWLAPSVEQRIASHLKLVENVCRLLPVTKITVETASFDMQAIKNPDIKGAEYQQGEQLGFWNVREYVLWRDGHQCQHCRGKSGDPILNMHHLESRRTGGDAPNNLVTLCETCHKAYHAGRIDLKLKRGRSMRAEAFMGIMRWTFFNRLKEIYSGKTVENTYGYLTKHTRITHGIEKSHCADAYCIAGNLRAERLPDYLWQKQVRKHNRQIHKLTIGKGGIRKRQQTPFEVKGFRLFDKVRLGDEEGFIFGRRSSGYFDVRRLDGQKLSAGVSFRKLHLLEKRTTYLTVLLPRLKTRVSAPE

SEQ ID NO: 11684 - protein, 434 aa, unidentified
MTTQKVIQVCVLDQNGTPLMPTQRLGKVYRLLKTKKAHIVNYEPFTIKLDYEPKTHIIQPMTLGVDSGAIHSGYSLANEHREYYNTEVIARDNISKNLSDRRMYRRNRRSRKTRYRKPRFSNRKNKGEGWIPPSLEQKVYVQVKEIEHLHKYFPINNIIIEVAEFDTQKIENPDISGNEYQQGTLHGYNIRNYLLEKYHHKCFYCDKEVSAFEVEHMIPRARSGSNRIDNLTLSCHDCNQKKGTLTAEEFIKQTLSSQKAAQKLRQIPKTKQLLKYMAHMNATRWALYNTIKETYESVSLTYGYITKYNRINAGLPKAHHIDAKCITGFSTVPSFDVTVVKTKMRRHNRQLHRATFSKGHVRRAATLPRLVHGFQLYDIVLFNKHRYYIKSRRSSGSFSLVSLEGLKDENRTYKKLTFLTHTNAYLTNHYINGK

SEQ ID NO: 11685 - protein, 406 aa, unidentified; identical to SEQ ID NO: 9317

SEQ ID NO: 11686 - protein, 447 aa, unidentified; identical to SEQ ID NO: 3915

SEQ ID NO: 11687 - protein, 446 aa, unidentified
VAFSLATIQKKEEGIMPNKVYVINKHGRPLMPCSPAKARHLLDDGKAKVKKRTPFTIQLVYGSSGYTQEVILGVDAGSKTIGMSASTTKEELLSAEVKPRNDVVDLLSTRREFRRARRNRKTRYRKPRFDNRVRSKHKEWLAPSVEVKIQEHITSIKRVCRILPVSKVVVETAEFDLQLLKAIADGKPVPQGEDYQQGEMYGHYNVRQYVLWRDGYTCKCCGAHTTKKKEVRLHVHHLESRKVGGDAPDNQVTLCESCHEKLHKGLIAEKDFKKRKRKSTRDATFMGIMRKTLMQRLCSELPIPVIETRGYITKATREKLLVLPKSHTNDALAIAQGKQGFNVGYLPGIEQIDKIYTIRPVRHHNRQLHKAAILKGGIRKSNQTGKYVFGYRLFDKVQFNGQDCFIWGRRTTGIFTIKTINGKMIKDGISFKKLKLVEKSTSYLIA

SEQ ID NO: 11688 - protein, 420 aa, unidentified
MLVYVLKQNGQPFMPTERFGKVRRLLKEGKAKVVRREPFTIRLLYEPETDVVQECYCGVDTGSRHIGVAVVGNDKVLYQSQTELRSDIKKKMDARRQARRSRRLRKIRYRKSRFLNRKNSIKKDRLPPSVRHKVQAHIDEIEFCKKILPIADLILEVSQFDTALMKNPSLVNEKIKKWGYQQGFNYGYSCRRKAILHRDGYTCQRCGKKNCRLEVHHIVFRRDGGTDDEENLITLCKDCHDGVHAGTVVLDKKPNKSNGLKHATHMSIIRSWLLKEYPDAIETFGFVTSENRNRLKLEKDHYIDACVIASGGLEFKELDVIYRKRRAPKQGRVLTKGIRGEQKLPTGKIFGFKKFDKVEYLGVTCFIKGRRSSGAFVLMDIDNNSIDFRDSGGKQNPSYRALKRVSARKSVLCIKERLER

SEQ ID NO: 11689 - protein, 420 aa, unidentified; identical to SEQ ID NO: 10448

SEQ ID NO: 11690 - protein, 509 aa, unidentified; identical to SEQ ID NO: 5585

SEQ ID NO: 11691 - protein, 424 aa, unidentified; identical to SEQ ID NO: 11636

SEQ ID NO: 11692 - protein, 492 aa, unidentified; identical to SEQ ID NO: 4486

SEQ ID NO: 11693 - protein, 428 aa, unidentified
LKVFVLNMRGQPLMPCSPAKARHLLKAGKAVVRRRTPFTIQLRIATGETKQNVTLGVDAGAKHVGLSAATEKEEVFASEVELRQDITGLLAARLSLRRERRQRKTRYRAPRFLNRVRSKHNGWLPPSVENRIQAHLSRIDAICGLLPVTKIVIETASFDIQKIKHPDVEGTDYQQGDQLGFWNVREYVLFRDGHVCQHCHGYSKDKILNVHHLESRQTGGDAPNNLITLCETCHKACHAGKIKLKVKRGQSFRAEAFMGIMRWTLLDRVRKAHPGLPVENTYGYLTKNTRITLGLPKTHCVDAYCIAGNLKAVRRGVCLHQRQVRKHNRQIHKCTVLSKTLKDGTKIGYRKLNQTPHLVKNFRLFDKVRCLGQTGFIFGRRSSGYFDVRRLDGVKLSSGISYRKLTLLEKRSTYLTELRKEDGASSPV

SEQ ID NO: 11694 - protein, 430 aa, Desulfobacter sp.
LSVFVLDTNKKPQNPVHPAKARLLLTEGKAAVFRQFPFTIILKEKALDVASNPLRIKIDPGSRETGIAVINDDSGEIIFAMELRHRGQQIKNNLESRRAIRRSRRNRKTRYRKPRFDNRTRAEGWLPPSLKSRVHNIETWVNRLCRFCNIQAISMELVRFDMQKIQNPEISGVAYQQGELMGYEVREYLLEKWDRTCAYCGKTDIPLEIEHIVPKSKGGSNRVSNLTLACTACNRKKGNKPLEQFLSRKPGLLKRIQKQSKVPLKDAGAVNTTRWDLFRTLKKTGLPVETGSGGLTKFNRTTRGLHKTHWLDAACVGKSTPEKIFQIDKTVLIVKADGHGSRQMCRVNKFGFPRTTAKSTEKKVKGFQTGDIVKAVVTSGKKVGTYIGRVAVRKSGSFNIKTVDKTVQGISWKYCRLLHASDGYSYNTTC

SEQ ID NO: 11695 - protein, 419 aa, unidentified; identical to SEQ ID NO: 3670

SEQ ID NO: 11696 - protein, 620 aa, Streptomyces sp.
MSSGRSFAMTSTSGSRPRSRRRRSSTSLRNASGRHDQASGSRSIAPWTLWPGPRPPWNRRARLTSSSHPRMEVPWMTTFHAGEKTHPAVLPQRRALESVGADTPGSRDETAHGHPAVAQGTDMEHERGEISGSGTRRQWRHPVAPATAEAAGETRNDDVLVKSSTNRGNTGDGRVFVLAKDGSPLMPCHPARARALLSEGRAVVARHSPFTIRLKDRTREQSEVEGVQVRIDPGSRATGIAITDEKKKLDQHGNCVNVRRGLVSVELQHRGQQISKALKQRSGYRRRRRSDNLRYRATRFDNRTRPSGWLAPSLQHRIDTTVATVDRLRRFAPVREVHLERVSFDVHAMSAGRELNAAEYQRGTLAGTEVREYLLAKWNRTCAYCGATGVPLNIDHIQPRSRGGSDRISNLTLACVPCNQAKGSDRIEVFLSDDSRRLAKILGQAKTTLRDSAAMNATNRQLAEALKTHGAPVYCWSGGRTKWNRTAMGLPKTHTLDALAVGSLDHEQGDAIVRIPNQVLVMKATGRGSYARTRPDKYGFPRLKLTRTKRHYGFQTGDLVQATVSTKKRRGTWTGRVVVRATGSHTVTTQHERLYTSYKNLRLLQRSDGYAYVVRKEAEV

SEQ ID NO: 11697 - protein, 413 aa, unidentified; identical to SEQ ID NO: 2636

SEQ ID NO: 11698 - protein, 396 aa, unidentified; identical to SEQ ID NO: 4508

SEQ ID NO: 11699 - protein, 419 aa, unidentified; identical to SEQ ID NO: 6671

SEQ ID NO: 11700 - protein, 538 aa, Streptomyces sp.; identical to SEQ ID NO: 9608

SEQ ID NO: 11701 - protein, 459 aa, Halomonas sp.
MAVFVLDRQKRPLMPCSEKRARLMLARGRAVVHKRYPFTIRLKDRVDGETQPLRLGIDPGSRITGLALMRENSEEREVGKRHVLCLFELVHRGFQIREALDQRRAFRRRRRTKNLRHRAPRFDNRTRRDGWLAPSLQHRVDTLSAWVDRLCRLAPITSLSQELVRFDTQKLDNPEISGVEYQQGTLLGYEIREYLLEKWRRECAYCGARNTPLEIEHIEPRRRGGSNRIGNLTLACHDCNQEKSADTLDAFFATARGLKKRLRQHRQSADARYRRVIQQHDRPLRDASAVNTTRWALNRNLKRKGLPVAVGTGGLTKYNRQRLGIPKTHALDAACVGQVEALHGWQVPTLTLRAMGRGSYQRTRLDKFGFPRGTLMRRKQVHGFQTGDMVKAVVPNGKKAGTHVGRVAIRQTGSFNIQTEHGVVQGISYRHCTVIQRGDGYRYHLTPFTHDRGEGRAVA

SEQ ID NO: 11702 - protein, 428 aa, unidentified
LKVFVLNMRGQPLMPCSPAKARHLLKAGKAVVKRRTPFTIQLRIATGETKQNVTLGVDAGAKHVGLSAATEKEEVFASEVELRQDITGLLAARLSLRRERRQRKTRYRAPRFLNRVRSKHKGWLAPSVENRIQAHMSRIDAVCRLLPVTKIVIETASFDIQKIKDPSVEGTDYQQGDQLGFWNVREYVLFRDGHVCQHCHGHAKDKILNVHHLESRQTGGDAPNNLITLCERCHKACHAGKIKLKVKRGQSFREEAFMGIMRWTLLDRVRKAHPGLPVENTYGYLTKNTRITQGLPKAHCVDAYCIAGNLKAVRRGVHLYQRQVRKHNRQIHKCTVLSKTLKDGTKIGYRKLNQTPHLVKNFRLFDKVRCLGQIGFIFGRRSSGYFDVRRLDGVKLSPSISWRKLTLLEKRSTYLTELRKQDGASSPV

SEQ ID NO: 11703 - protein, 344 aa, unidentified
VVDLLSTRREFRRAQRNRKTRYRKPRFDNRVRSKHKGWLAPSVEVKIQEHITSIKRVCRILPVSKVVIETAEFDLQLLKAIADGKPVPQGEDYQQGEMYGHYNVRQYVLWRDGYTCQCCGAHATKKKEVRLHVHHLESRKVGGDAPDNQVTLCESCHEKLHKGLIAEKDFKKRKRKSTRDATFMGIMRKTLMQRLCSELPIPVIETRGYITKATREKLLVLPKSHTNDALAIAQGKQGFNVGYLPEIAQIDKIYTIRPVRHHNRQLYKATILKGGIRKSNQTKKYVFGYRLFDKVQFNEQDCFIWGRRTTGIFTIKTINGKMIKDGISFKKLKLAEKSTSYLIA

SEQ ID NO: 11704 - protein, 328 aa, unidentified
RAPARRIPIRRQSGGVVQGYDSPEEYIHDVQNGKCLVCGKPHIDYLHHIIPRSKGGSDKVSNIAGLCYDCHYGPMGVHNCQNTQDRLPELKSEANKQYKVSLLNSVMPVLIEEMDKFCKANSIMFSICEGHDTAKVRDMYDLQKDHCIDGFAISLVDRNVKSVDVMPDRIYQKQRYKKKSKNIIQKRNCREYYDDKKLVAVNRHKGTDQKADSLEEYMNTYAETHTTDECKKHFDSLGVKPARRTYTFHKEWRICPFHIGDKVRYEKKNKIKGNTKVDTFICEGIRFVKDENKAEVKHNKTKSKKMKFCRVLESGCTPYVDYRKLALM

SEQ ID NO: 11705 - protein, 473 aa, unidentified; identical to SEQ ID NO: 3562
  source 1..473: note = uncultured beta proteobacterium

SEQ ID NO: 11706 - protein, 456 aa, unidentified
MSTCVCVLSNSGERLMPTFRLGKVRRLLKDGKAKIVKHHPFTIQLLYDSKANTQPIEICEDVGYNYIGISVKSQSHEYVSAQYDTLQDEKACHDSCRKLRRTRRNRLRYRKPRFDNRKRGEGWLAPSLRHKKELNVNVVKMYCAVMPITHATIEVGSFDTMLVKAIQEGKAIPEGADYQKGPRYNLATLREAVFYRDNYVCKVCGRKATEGAILHVHHMFYWKGRHGNSLSELITVCEKCHTPANHQKGGKLFGFGEDKEFANLSGAAFMNAVRWQIVNALYATYGKEFVTITYGAMTKEKRIILGIEKTHNNDAYAMGDYHPAHRCVFRHYQKRRRNNRVLEKFYDATYIDARTGNKAKGKELFNGRINRNHKKDSEDLHKYRSKKVSKGRRSIRRQRYAIQPYDTVRLEGKTYITSGCHNKGTRLLIPVNGKSKSVAISKVQVVCHAGAWIQII

SEQ ID NO: 11707 - protein, 494 aa, unidentified
MAMVYVQNKDGKPLMPTTRYCYVRLLLKENKARVVSTTPFTIQLNYDTPNITQDLILGIDPGRTNIGVAVVKEDGQCVFSAHLETRNKDVPLLMQKRAGFRKQHRTLDRRRKRQRRAKVAGTTVEGETIERLLPGCEKPVVCHYIRNKEARFNNRSRPAGWLTPTANHLLQTHINLIAKVAKFLPITKVVVELNRFAFMAMDNPNIRRWEYQQGPLYGLGSVEDAVYAQQNGHCLFCKKPIDHYHHVVPRHKGGSETLANRCGLCAKHHDLVHKDKAWAEKLVTRKGGMNKKYHALSVLNQIIPHLMEYLGNETLYDVYATDGRSTKGFRIAKNVPKEHYTDAYCIACSILDTDIEVSTPFEPFELKQFRRHDRQACHQQRVDRKYYLNGKQVATNRHKAIEQKSNSLEEFREAYGDAAVSQLTVKPHPPQYKDMTRIMPGAVMDFDGNVGVLQGADGFHNGKPDYYSSTKGEKVRARRCTLLARNAGTVFIPA

SEQ ID NO: 11708 - protein, 338 aa, unidentified
LSARRALRQSRRNRKTRYRAPRFDNRIRTKRKGWLAPSVENRIDAHLSRIEAVLRLLPVTKITVETASFDLQLLKNPDISGKEYQEGEQLGFWNIREYVLCRDGHVCQHCYGRSKDPVLNVHHLESRRTGGDSPGNLITLCETCHKALHRGEITLKAKRGQSFRAEAFMGIMRSEVLNRLKASHPELEVNNTYGYRTKHARIANDIAKSHCADAFCIAGNLGAERLGEFLFQKQTRRNNRQIHKLSILKGGIRKRNQAPFEVNGFRLFDKVACKGEEGFIFGRRSSGFFDVRKLDGTRISAGISCKKLHLLEKRRTYLTEIRKEEALPALPEGRGLRA

SEQ ID NO: 11709 - protein, 461 aa, Parasutterella sp.; identical to SEQ ID NO: 3646

SEQ ID NO: 11710 - protein, 326 aa, unidentified
MDSRRGFRRNRRYRKTRHRKARFLNRANSKKKDRLPPSVKSKVQSHVDEIEFCKKILPVRKIVLEVSQFDTALMKNPALINEKIKRWGYQKGFNYGYSSRREAVIHRDNYTCRCCGKRHTRLEVHHIVFRSQGGTDDEKNLITLCKDCHDAIHNGTLVLTKKPRRLSLKHATHMSIIRSRLLKIYPDAIETFGFVTKENRNNLNLQKGHFIDACVIASGGKEFKQSDLLFKKRRVPRQNRQLCKGIRGEKKIHTGKLFRFKRFDKVRYLNEICFIKGRRSSGAFVLMDIDNNSIDFRDRGGKQNPSYKLLERLNTRRSTLCIGQII

SEQ ID NO: 11711 - protein, 410 aa, unidentified
MFVDMVYVQDIDGKPMMPTTRHGKVRRLLKDKKAVVVNLCPFTIRLTYVTSDYKQEIVLGVDAGTKHVGLSATTKSKELYSSEVILRNDIVDLLSTRRELRRTRRNRLRYRKPRFDNRIKSKRPGWVAPSVKYKIDAHIRVIDNVCSILPISSIVIEVAQFDTQKIKNPEILGKEYQEGDQLGFWNTREYVLARDGHKCQYCKGKSKDKILNVHHLESRKTGGDSPSNLITLCETCHKEYHKGNIDLKIKRGSSLRDAAVMGIMKWKLYEELRSRYDRVSMTFGYITKHNRIKYGIEKSHTSDAFVISMNINAKRIERQYLKRLIRRHNRQIHKMKILKGGKKKNNQAPFEVFGFRLFDKVLYNNKILFVYGRRKSGSFNIRDFNGENSKDVSRKKFKLIRGKRHPIILK

SEQ ID NO: 11712 - protein, 420 aa, unidentified; identical to SEQ ID NO: 3504

SEQ ID NO: 11713 - protein, 451 aa, Blautia sp.; identical to SEQ ID NO: 5203

SEQ ID NO: 11714 - protein, 443 aa, Anoxybacillus sp.
MVEENMTCFMQRKGENPMVFVLDTNKRPLAPCHEAVARKLLKQGKAAIYRRFPFTIILKKSVDESEIKATYRLKIDYGSRHTGLAILRGQEVVWLGQLDHRTDIKERIDKRRAFRRARRNRKTRYRKPRFLNRKRKEGWLPSSLESRVQNIQTWVNRLKKLCPIGYISYENAKFDTQLMRNPEINGVEYQQGTLQGYEVREYLLEKFGRKCCYCGKENVPLEVEHIIPKSRGGTDRVDNLCLACHDCNQRKGSKTAEEFGYPHIQKQVKETLKDTSAINSTRWKVYEVLKQTGLDVECGTGARTKMNRIRLDLPKTHYFDACCVGESTTNHLYFKTKEVLFIKAKGRGSRSRTNLDRYGFPRGYLARQKFFFGFQTGDMVKAVVPRGKYQGVWFGEVACRKTGSFDIKGKDGKRIAQGINYRYVQVIQRFDGYAYGKGVAELA

SEQ ID NO: 11715 - protein, 420 aa, unidentified
MQYAYVLNKRGEPLMPCSPGKARILLKQQKACVVKRTPFTIKLLHGSAGYKQPITLGVDAGSKHVGLSASTEKRELYSEEFTPRNDVVELLSTRRQNRRSRRNRKTRYRAPRFNNRVHSKHKGWLAPSVEVKIQEHITVIKRICRILPITLVRVETAEFDTQRLKAMLAGKPLPVGTDYQLGEMYDEYNVRQYVLKRDNYTCQCCGAHTTAKKTVKLHVHHLESRKVGGNAPSNLITLCTTCHNNLHKGKITLDGKKRSKTLRDAAFMGIMRNTLLTRLRNELNIPVQNTYGYITKLLREQNDIKKSHVNDARCISKHPLAKPCSVCYRTKAIRHHNRQIHKAKILKGGIRKANQAPYIVKGFRLWDKVLYNEQECFISGRRSSGYFALRKFDGTTITNSISFKKLRLLEPATNYLIERK

SEQ ID NO: 11716 - protein, 449 aa, unidentified
VTTILKTCFAAFNLAKVVVLMDAWDIIVVLNKRGKPLMPCSPAKARLLLKEKKAIVVRRTPFTIQLTIATGETKQPVSLGVDAGYKHVGLSASTEKAELYASEVELRQDVSDLLSARRALRQSRRNRKTRYRAPRFDNRIRTKRKGWLAPSVENRINAHLSRIETVLRLLPVTKITVETASFDMQLLKNPDIAEKEYQEGEQLGFWNVREYVLFRDRHVCQHCYGRSKDPVLNVHHLESRRTGGDSPGNLITLCETCHKALHRGEITLKAKRGQSFRAEAFMGIMRWEVHSRLRALHPGIEVSNTYGYRTKHARIANGIAKSHCADAFAGNLGAERLGEFFFQKQTRRNNRQIHKLSILKGGIRKRNQAPFEVKGFRLFDKVACQGEEGFIFGRRSSGFFDVRKLDGTRISAGISCKKLHLLEKRRTYLTEIRKEEALPPLPEGRGLRA

SEQ ID NO: 11717 - protein, 413 aa, unidentified
MTSYSFVLDANGKQLAPTKEPKAWFLIRKKRAALVSKYPMVIQLKKKIQENEICKDEIRCGIDDGGLHVGIALVQKCKSKNKVVFKGTIEQRNDVKHLMEVRRNYRRYHRYHKRYRQARFDNRKSSKRKGRIAPSILQKRQATIRVINRLNKWINITNYWLEDVSIDIRVLTDGYKSYSWQYQKSNRLDENIRKATILRDGGKCMECGKSNCRLEVHHIKPRRRNGSNTLENLITLCESCHQKTEGQEELYMDRYFSLLKSSDNKNLNYAQHVMIGKMWLRKQLSGLGVLYLTSGGDTANKRIDWNIEKSHTNDAVCITDLQPDTCDIKEWAIKPMRRQSKAKTDHVLGIHHRDLVEYTFKNGETHRGYVTALYPDQKAINFQSQTKHCKKVNARKCKLLWNYSKIYWFENAS

SEQ ID NO: 11718 - protein, 296 aa, unidentified
INAHLSRIEAVLRLLPVTKITVETASFDMQLLKNPDISGKEYQEGEQLGFWNIREYVLCRDGHVCQHCYGRSKDPVLNVHHLESRRTGGDSPGNLITLCETCHKALHRGEITLKAKRGQSFRAEAFMGIMRWEVLNRLKASHPELEVNNTYGYRTKHARIANDIAKSHCADAFCIAGNLGAERLGEFFFQKQTRRNNRQIHKLSILKGGIRKRNQAPFEVNGFRLFDKVACKGEEGFIFGRRSSGFFDVRKLDGTCISAGISYKKLHLLEKRRTYLTEIRKEEALPPPPEGRGLRA

SEQ ID NO: 11719 - protein, 399 aa, unidentified; identical to SEQ ID NO: 3828

SEQ ID NO: 11720 - protein, 537 aa, unidentified
VTDAPAGFPGSQLCQAYAEARETLPPLWGVPYRKKLRKEITLNMDMVYVLNKDGKPLMATTRGGRVRYLLKEKKARVVSSTPFTIQLNYDTPDITQDLILGIDPGRTNIGVAAVKEDGQCVFSAHLETRNKDVPLLMKKRAGFRKQHRTLDRRRKRQRRAKVAGTTVEGETIERLLPGYEKPVVCHYIRNKEARFNNRSRPAGWLTPTANHLLQTHINLIAKVAKFLPITKVVVELNRFAFMAMDNPNIRRWEYQQGPLYGLGSVEDAVYAQQDGHCLFCKKPIDHYHHVVPRHKGGSETLANRCGLCERHHALVHKDKAWAEKLVTRKGGMNKKYHALSVLNQIIPHLMEYLGSETPYDVYATDGKSTKGFRIAKNVPKEHYTDAYCIACSILDADTKVSTPAEPFKLKQFRRHDRQSCHQQRVDRKYYLDGKQVATNRHKAIEQKSNSLEEFRETYGDAAVSQLTVKPHPPQYKDMTRIMPGAVMNFCGAVGILLGSDGFHNGKPDYYKSTKEEKVRMRRCALLAQNAGMVFIPA

SEQ ID NO: 11721 - protein, 431 aa, unidentified
MPNKVYIINKHGRPLMPCSPAKARHLLDEGKAKVKKRTPFTIQLIYGSSGYTQEVILGVDAGSKTIGMSVSTTKEELLSAEVKPRNDVVDLLSTRREFRRARRNRKTRYRKPRFDNRVRSKHKGWLAPSVEVKIQEHITAIRRVCGILPVSKVVVETAEFDLQLLKAIADGKPVPQGEDYQQGEMYGHYNVRQYVLWRDGYTCQCCGAHATKKKEVRLHVHHLESRKVGGDAPDNQVTLCESCHEKLHKGLIAEKDFKKRKRRSTRDATFMGIMRKTLMQRLCSELPIPVVKTRGYITKATREKLLVLPKSHTNDALAIAQGKQGFNVGYLPGIVQINKIYTIRPVRHHNRQLHKATILKGGIRKSNQTEKYVFGYRLFDKVQFNGQDCFIWGRRTTGIFTIKTINGKMIKDGISFKKLKLAEKSTSYLIA

SEQ ID NO: 11722 - protein, 515 aa, unidentified
MTALEERLSKTEYIYVLGFDGKPQMPTRRKRHVLKLLKTGRARIAEDIPFTIRLTYRNAPVLQPVTLAEDPGRTNIGAAVLSPLGDLLFAAVIETRNKEIKKLMADRKKSRQASRRGERKARQRLAKRYGSMVKSGMIIRKLPMYAADKFVTCKFIRNTQARFCNRKRCPDWITPTVQHLVQTHLNIIRKISRYLPVTDIAFEVSRFAFMHMENPEAIGVDFQNGPLKGYGDVKEAIRTQQHGKCLMCKKPIAHFHHIVPRSRGGSDTIQNLAGLCPECHTKVHTDTAFRKDFDEKKSGQLKKYGALSALNQAVPFICKKLLEEYGEEHVHFCGGLDTSLIRTALGFEKTKKNQMHEVDAYCIGLAALEVNEVETPAFDHTFQIRQFRRQDRSIIHHQTGRSYYQGKEKVAQNRKPGFEQKTTALSQWYEEQVRIHGEKEAEKLRSQLRVEKSCRHYNDMDRFLPGAVFLYEGKRYVLSGRITNGKYLRACGQGMKNFPAAECTFIRHNAGLVFI

SEQ ID NO: 11723 - protein, 512 aa, unidentified; identical to SEQ ID NO: 3971

SEQ ID NO: 11724 - protein, 434 aa, unidentified
  source 1..434: note = Selenomonadales bacterium
MGFLTTWARRKILPKGKVAEMPIFKKYAFVMDAEGKRLDPTIEQNAWRLVRQHKARLVSKFPIVIQLNKVVDNPNNDEIRCGIDDGANHIGLALAQKCQTRNKVLFKGTIEQRKDVKHLLTVRRGYRRYHRYHKQYRPARCLNRASSRRSGRLMPSIIQRKQAILRVIDRLCQWINIDGYWLEDVKIDIRALTDGYKPYRWQYQKPNRVDNNLRLAAIHRDGCKCVECGKTKTRFEVHHITPREVGGADTISNLITLCPKCHAKTFGRESQFADRYYALIGSTGHVEGLADAQRVMQGKHWFREQLQQRGSLVLTTGGNTANKREDWDIAKTHSNDAVCITDLKPENIDIEEWTIKPMRRKNKAGVDEVCGFHHRDYVTYTYRNGETHTGYVTAMYPELHALNFQSPTKHCKKANALKCKLVWRYSKIYWLKCV

SEQ ID NO: 11725 - protein, 495 aa, unidentified
MAVVYVISKSGKPLMPTTRCGHVRILLKEGKARVVERKPFTIQLTYESTEETQPLVLGIDPGRTNIGMSVVTESGESVFNAQIETRNKDVPKLMKDRKQYRMAHRRLKRRCKRQRRAKAAGTVFEEGAKQRLLPGCSKPITCKSIRNKEARFNNRKRPAGWLTPTANHLLVTHLNAVRKVQKILPVTKVVLELNQFAFMAMDNPKVQRWQYQRGPLYGKGSVEEAVSMQQDGHCLFCKHGIDHYHHVVPRRKNGSETLENRVGLCEEHHRLVHTDKEWEAKLSSKKAGMNKKYHALSVLNQIIPYLADQLADMFPGSFCVTSGQDTYMFREKHGIPKDHYLDAYCIACSALTDANKVSVPKGKPYMVRQFRRHDRQVCHKANLNRSYYSDGKLVATNRHKAMEQKTDSLEEYRAAHSTTDISKLTVKHPPAQYKDMSRVMPGSILMSDDGKLFTLVRSDGRKKGQVNYFVDTQGEKHWARKCLYLRNNGGLQIYV

SEQ ID NO: 11726 - protein, 414 aa, unidentified
MPCSPAKARLLLKEKKAIVKRRTPFTIQLTIATGEAKQPVSLGIDAGYKHVGLSASTEKAELYASEVELRQDITDLLSARRALRQSRRNRKTRYRAPRFDNRISTKRKGWLAPSVENRINAHLSRIEAVLRLLPVTKITVETASFDLQLLKNPDISGKEYQEGEQLGFWNVREYVLFRDGHVCRHCHGRSKDPVLNVHHLESRRTGGDSPGNLITLCETCHEALHRGEIALKTKRGHSFRAEAFMGMMRWEVLNRLKASHSELEVNNTYGYRTKHARIVNGIDKSHCADAFCIAGNLGAERLCEFFFQKQTRRNNRQIHKLSILKGGIRKRNQAPYEIKGFRLFDKVACQGEEGFIFGRRSSGSFDVRKLDGTRISVGISCKKLRLLEKRRTYLTEIRKEEALPPLPEGRGLRA

SEQ ID NO: 11727 - protein, 416 aa, unidentified
LLFYRKEHGIMQYVYVLNKHGEPLMPCSPGKARLLLKQQKACVVRRTPFTIKLLYGSAGYKQPITLGVDAGSKHVGLSASTEKRELYSEEFTPRSDVVKLLSTRKQNRRSRRYRKTRYRAPRFDNRVHSKHKGWLAPSVEVKIQEHITVIKRICKILPISLVRVETAEFDTQRLKAMLAGKPLPVGTDYQLGEMYDEYNVRQYVLKRDHYTCQCCGAHNTAKKVVKLHVHHLESRKTGGNAPSNLVTLCTTCHKNLHKGKVTLDGKERGKPLRDAAFMGIMRKTLMARLKEELPIPVQGTYGYITKMRREQNDIKKSHTNDARCISKHPLAEPCSVCYRTKAIRHHNRQTHKANFSKKGIRKRSQMPYLVEGFRLWDKVLYKGQECFVSGRRSSGSFALKKLDGTSISKGVTFKKL

SEQ ID NO: 11728 - protein, 416 aa, unidentified
MTNCENYAFVLDAESKQLSPTKEKKAWYLIRKKRAILVSKYPMVIQLNKIVSNDNICKDEIRCGIDDGGLHVGIALVQKCQTKNKTLFKGTIEQRNDVKHLMKVRWDYRRCRRYHKRYRPKRINNRSSSKRTDRIAPSILQKRQATLRVITQLNKWINITSYWLEDVAIDVRVLTDGFSSYGWQYQKSNRLDENIRKAVILRDGCRCMECGQSNCRLEVHHIKPRRLNGSNTLGNLITLCESCHQKTEGKEEQYMQHYFNILESSDNKNLNYASYVMIGKTWLRKQLSQLGVLNLTTGGNTANKRIDWNIEKSHSNDAVCIIDLQPDSCNVKDWIIKPMRRQSKAKTDNVLGIKHRDLVSYVYKNGELHTGYVTALYPELNALNFQSPTKHCKKVNVRKCRVLWKYNKIYWLDSVS

SEQ ID NO: 11729 - protein, 515 aa, Blautia sp.; identical to SEQ ID NO: 9146

SEQ ID NO: 11730 - protein, 496 aa, Streptomyces sp.; identical to SEQ ID NO: 4777

SEQ ID NO: 11731 - protein, 424 aa, unidentified
MVYVIAKDGSPLMPCSNVIARLLLKQQKAKVKRKTPFTIKLTYETTKYTQNLTLGVDTGSGTIGTAVCRDNGEVVYMSETEIRNDIADRMKQRRSYRRTRRNRKTRYRKPRFDNRGNSIKKGRFSPTIRSKLHSHVKEIEYIKSILPITQVVLETGQFDPHLLKNPALASEKVKHWGYQKGPNYGFENTRAMVLERDNHVCQHCKGKRKDNRLEVHHIVFRSHGGSDRADNLITLCHTCHKKLHAGKIRLKLDEKPKDTLKHATQMNSIRKQLLKIYPDAKETFGYITKTNRLLLGVEKEHFYDACVIARQGDPFVIKCDLVKKKCIAKGDFQKTKGPCSDQRIETGKIGGFRKFDKVRYLGKDYFIKGRMSTGFAILMDVNGKKADFSFMPRGSKTPKMEKLRRLEARSSWMVMTVAVTQNIA

SEQ ID NO: 11732 - protein, 404 aa, unidentified
MPNKVYVINKHGRPLMPCSPAKARHLLDAGKAKVKKRTPFTIQLVYGSSGYTQEVILGVDAGSKTIGISASTKKEEVFAADVTPRNDVVDLMSTRREFRRARRNRKTRYRKPRFDNRVRSKHKGWLAPSVEVKIQEHITAIRRVCGILPVSKVVVETAEFDLQLLKAIADGKPVPQGEDYQKGEMYGHYNVRQYVLWRDDYTCQCCGAHATKKKEVRLHVHHLESRKVGGDAPDNQVTLCESCHEKLHKGLIAEKDFKKRKRRSTRDATFMGIMRKTLMQMLCSELPIPVVKTRGYITKATREKLLVLPKSHTNDALAIAQGKRGFNVGYLPEIAQIDKIYTIRPVRHHNRQLHKAAILKGGIRKSNQAGKYVFGYRLFDKVQFNGQDCFISVSYTHLRAHETC

SEQ ID NO: 11733 - protein, 493 aa, unidentified
MAAVYVISASGKPLMPTTRCGHIRGLLNAGKARVVEREPFTIQLKYETPDVTQPLYLGIDPGRTNVGSAVVREDGECVFTVQLTTRNKDVPKLMKARKQFRMAHRRLKRRCKRQRRAKAAETLSQKGEFQRLLPGYEEPILCKCIRNKEARFNNRQRPAGWLTPTANHLLLTHLNMVKKLQKLLPITDVVLEVNRFAFMAMENPSIRRWQYQQGPLYGKGSVEDAVYAQQDGHCLFCGKPIAHYHHVVPQHKNGSETLENRVGLCNEHHDLVHKDRAWDAKMKETKAGLNKKYHALSVLNQIIPALTEQLTAMFPQHAFVTTGKDTADFREDYGIAKEHHLDAYCIACSVLAEPTKVAAPTGKPHRLMQFRRHDRQVCHKENIKRVYLSEGKAVATNRHKAIEQKDDSLEEFRKTHTQQEVSALTVKDHQPVYKDMRRFMPGGVFLFNGKVHTLQRSHGRYKGMPFYYIDTDGSKNHAKGCIFLQQNCGLRWV

SEQ ID NO: 11734 - protein, 450 aa, unidentified; identical to SEQ ID NO: 2935

SEQ ID NO: 11735 - protein, 426 aa, Lactobacillus sp.; identical to SEQ ID NO: 3294

SEQ ID NO: 11736 - protein, 474 aa, unidentified
RIFRQVPFTIQLTYKNEPVLQPVTIAEDPGRSNIGMAVVSLSGELLSAAIVQTRNKEIVKLMEKRKQHRRASRNGERKARQRLAKKCHTMIKTGFLMRKLPMYGKDKRVRCNVIKNTEAKFCNRKREDGWLTPSAEHLVRTHINLIHKMQKFLPISDVAIEINRFAFLSLEDPSISGVDFQNGPLKGYDDLNAAIEDLQDGHCLMCNSPIEHRHHIVPRNMQGSNTIGNIAGLCCKCHERVHKDARFEDRLKKKKAGLNKRYAAISTLNQAIPFICKRLEQEFGKEHVHYCSGRDTSMVRRSLGYHKTKEKQLHEVDAWCIAVLALQHVPEKAPEFDHVHEILQFRRQDRSRIKAQTSRAYYHEGKKIAKNRKKAEGQREDSLQEWRKRQVERYGKEQTRKMISQLEVKESIRRYNRLDRLMPGAVFYYRGNRYVMRGQHSNGQYLQAVGMGKKDFPVKDCMIVAHNEGLIFVS

SEQ ID NO: 11737 - protein, 377 aa, unidentified
LSKVKTMRVFVFNMRGRPLMPCSQRKARLLLRENKAMIYKYHPFTIQLTYTTGETKQDCHIGIDTGSKYIGAAVRSEDKVFWKGEIELRQDIRSNLDTKRIYRRSRRNRKTRYRKPRFLNRKRRDEWLPPSLQSRINHTFHWIDTLSSLVPNPILHIEVGKFDVAKMINPEIHGVDYQHGQTYGFFDERYFVFARDNYTCQCCGKSKNKILNTHHIIYRSNGGTNRVDNLITVCTDCHTSQNHRKGGIFYQWQEQHKKVKQYKEPPFMNTLRKRIFVAYPDAEITYGSETTPKRKAMKLDKTHYNDAIVISGINEIKENPEEWLLIKQFRKKKRSLHEATARKGRKKPNRNQTRNSKNTPYYKGFYLNDKVSVFGKS

SEQ ID NO: 11738 - protein, 415 aa, Bacillus sp.; identical to SEQ ID NO: 2431

SEQ ID NO: 11739 - protein, 465 aa, unidentified
MSTCVCVLSNSGERLMPTFRLGKVRHLLKDGKAKIIKHHPFTIQLLYDSKMNTQPIEICEDVGYNYIGISVKSQSHEYVSAQYDTLQDEKACHDSCRKLRRTRRNRLRYRKPRFDNRKRGEGWLAPSLRHKKELNVNVVKMYCAVMPITHATVEVGSFDTMLVKAIQEGKAIPEGADYQKGPRYNLATLREAVFYRDNYVCKVCGRKATEGAILHVHHMFYWKGRHGNSLDELLTVCEKCHTPANHQKGGKLYGFGENVKFADLSGAAFMNAVRWQIVNELYAAFGKDFVTVTYGAMTKEKRIALRLEKSHNNDAYAMGEFHPNCRCTFEHYEKVRRNNRTLEKFYDSRYIDIRTGEIATGKELFNGRINRNHKKDSENLHKYRGKRTYAGHRALLRKKVNLNPGDLVSLNGEVLIVHGTHTNKKGAVNVEFKVPAKNGQKSANLKKLKIVKAAGSIHPAWEKVS

SEQ ID NO: 11740 - protein, 418 aa, unidentified
MLNNQKEYSFVLDAEGKKLDPTIVQNAWRLVRQKKATLIAKRPMTIQLKKVIDNPNDDEIRMGIDDGAKHVGLALVQKCKTKNKVIFIATMEQRNDVHKLMEQRKNYRRYRRYWKRYRKARFSNRVSVRRKGRIAPTILQKRQAVVRIFDRLNKYIRINSIYLEDVAIDVRVLTDEKRLYSWQYQQSNRLDENLRKATILRDRCQCQMCGKRNCRLEVHHITPRRMNGANTIGNLITLCADCHSKVTGCEMEFAEQLYSKIGKKKNNAGLQYSSHVMVGKTWLREELSKRAPIFITTGGDTANKRIDWSLEKSHEIDAVCITNLKPESVGVKPLKVKPLRHQRKVMQVEEVLGFRHRDVVCYTFKNGEYHEGYVTALYPSNGKQKEGLNFLSLTKHCKRVNPKKCQRLDRPNKFLWLV

SEQ ID NO: 11741 - protein, 532 aa, unidentified; identical to SEQ ID NO: 3169

SEQ ID NO: 11742 - protein, 419 aa, unidentified; identical to SEQ ID NO: 8452

SEQ ID NO: 11743 - protein, 544 aa, unidentified
MKQKKQKVIIYILNKKGEPLMPTTRCRHVRILLDNKKAVVVSSNPFTIRLKYDTPNGVQNVFAGIDSGRENIGSGASNEGGDCLYLGELKTSNKSIKMKMTERAGFRRERRRHDRQNKQRKARKDHTEIQNGDDDVCRTTISCKSVQISYPTAEESVTHKIIRGKEGKFANRHRDEGWITPSARQLIQMHMNDLKSMCRILPISHVTLERVAFDFQKLENENIKAWEYGKGKLYGYNSPEEYIRDVQDGKCLVCGKPHIDYLHHIIPRSKGGSDKVSNLVGLCYDCHYGPTGVHKCQDTQDRLPELKNKANKQYKVSLLNSVMPVLIEEMDKFCKANSIIFSICEGHDTAKVRDMYDLQKDHCLDGFAISLVGRDVESVDVMPDRIYQKQRYKKKSKNIIQKRNHREYYAGKKLVAVNRHKGTDQKTDSLEEYMNTYAESHTADECKKHFESLTVKPARRTYTFHKEWRICPFHIGDKVRYEKKNKVKGNTKVETFICESIYFSKDENKAKVEHNKTKSKKMKFCRVLESGCIPYIDYRKLALI

SEQ ID NO: 11744 - protein, 414 aa, unidentified
MPCSPAKARLLLKEKKAIVVRRTPFTIQLTIATGEAKQPVSLGVDAGYKHVGLSASTENAELYASEVELRQDVSDLLSARRALRQSRRSRNTRYRAPRFDNRIRTKRKGWLAPSVENRINAHLSRIETVIRLLPVTKITVETTSFDMQLLKNSDIAGKKYQEGEQLGFWNVREYVLFRDGHVCQHCHGRSKDPVLNVHHLESRRTGGDSPGNLITLCETCHKALHRGEITLKAKRGQSFRAEAFMGIMRWEVLDRLKASHPKLEVQNTYGYRTKHARISNGIAKSHCADAFCIAGNLGAERLGEFFFQKQTRRNNRQIHKLSILKGGIRKRNQAPYEIKGFRLFDKVACQGEEGFIFGRRSSGYFDVRKLDGTCISAGISYKKLHLLEKRRTYLTEIRKEEALPPLPEGRGLRA

SEQ ID NO: 11745 - protein, 426 aa, Parasutterella sp.; identical to SEQ ID NO: 3045

SEQ ID NO: 11746 - protein, 404 aa, unidentified
MPNKVYVINKHGRPLMPCSPAKARHLLDEGKAKIKKRTPFTIQLVYGSSGYTQEVILGVDAGSKTIGVSALTKKEELFAANVIPRNDVVDLLSTRREFRRARRNCKTRYRKPRFDNRVRSKHKGWLAPSVEVKIQEHITTIRRVYGILPVSKVVVETAEFDLQLLKAIADGKPVPQGEDYQKGEMYGHYNVRQYVLWRDDYTCQCCGAHATKKKEVRLHVHHLESRKVGGDAPDNQVTLCESCHEKLHKGLIAEKDFKKRKRRSTRDATFMGIMRKTLMQRLYSELPIPVIETRGYITKATREKLLVLPKSHTNDALAIAQGKRGFNVGYLPEIAQIDKIYTIRPVRHHNRQLHKAAILKGGIRKSNQAGKYVFGYRLFDKVQFNGQDCFIWGRRTTGIFTIKT

SEQ ID NO: 11747 - protein, 395 aa, Pseudomonas sp.; identical to SEQ ID NO: 11253

SEQ ID NO: 11748 - protein, 442 aa, unidentified; identical to SEQ ID NO: 8056

SEQ ID NO: 11749 - protein, 439 aa, unidentified; identical to SEQ ID NO: 3652

SEQ ID NO: 11750 - protein, 413 aa, unidentified; identical to SEQ ID NO: 2636

SEQ ID NO: 11751 - protein, 468 aa, Fervidicola sp.; identical to SEQ ID NO: 9528

SEQ ID NO: 11752 - protein, 431 aa, Petrotoga sp.; identical to SEQ ID NO: 5928

SEQ ID NO: 11753 - protein, 431 aa, unidentified
MPDKVYVISRLGHPLMPCSPAKARHLLDDKKAKVVKRTPFTIRLLYGSTKYIQPVILGVDAGSKTIGLSASTVKEELFAAEVMPRNDVVENLSTRRAFRRARRNRTTRYREPRSDNRVRSNHECWLAPSVKVKIQEHITSIKRVCTILPVSKVAIETAEFDLQLLKAIQDGKPIPEGEDYQKGEMYGSYNVRQYVLWRDNYTCTCCGVKGTDKKPVKLHVHHFESRKHGGNAPDNYGTLCEDCHKKFHLGIIIDEILKTRKRRSTRDAAFMGIMRKTLMQRLRTELSIPVAETKGYITKATREKLLVLPKSHTSDALAIAQGRHGFGIKAHTYVEPANHIYTVRPVRHHNRQLHKASILKSGIRKRNQASKYVFGFRLYDKVLYQGKECFVWGRRTSGSFLLRTIDGIKVKDGVSCRNLTLLERSSNYLIA

SEQ ID NO: 11754 - protein, 469 aa, Burkholderia sp.; identical to SEQ ID NO: 9410

SEQ ID NO: 11755 - protein, 415 aa, Bacillus sp.; identical to SEQ ID NO: 2431

SEQ ID NO: 11756 - protein, 417 aa, unidentified
MPCSPAKARLLLKEKKAIVKRRTPFTIQLTIATGEARQPVTLGVDSGYKHIGLSATTEKAELYASEVELRQDITDLLSARLALRRSRRSRKTRYRAPRFDNRVASKREGWLAPSVENRIAAHMSRVEAVMQVLPVTAITVETAAFDTQLLKNPDIAGEAYQQGEQLGFWNVREYVLFRDGHVCQHCRGKSKDPILNVHHIESRRTGGDAPNNLITLCETCHKAFHRGEIELKVRRGKSFKAETFMGIMRWTLFERLKKAHPELRVRNTYGYLTKHKRISHGIAKSHCADAYCIADNLGAKRLEGFFFQKQTRKHNRQLHKLSILKGGLRKKNQAPYEVKGFRLFDKVICKGEEAFIFGRRTSGSFDVRRLDGTRISAGINYKKLRLLEPRTTYLTEFRKEAALPPLHECSGSRAEFR

SEQ ID NO: 11757 - protein, 413 aa, unidentified
MTSYAFVLDANGKQLAPAKEQKAWFLIRKKRAALVSKYPMVIQLKKKIQENEICKDEIRCGIDDGGLHVGIALVQKCKSKNKVVFKGTIEQRNDVKHLMEVRRNYRRYHRYHKRYRQARFDNRKSSKRKGRIAPSILQKRQATIRVINRLNKWINITNYWLEDVSIDIRVLTDGYKSYSWQYQKSNRLDENIRKATILRDGGKCMECGKSNCRLEVHHIKPRRRNGSNTLDNLITLCESCHQKTEGQEELYMDRYFSLLKSSDNKNLNYAQHVMIGKMWLRKQLSGLGVLYLTSGGDTANKRIDWNIEKSHTNDAVCITDLQPDTCDIKEWAIKPMRRQSKAKTDHVLGIHHRDLVEYTFKNGETHRGYVTALYPDQKAINFQSQTKHCKKVNARKCKLLWKYSKIYWFENAS

SEQ ID NO: 11758 - protein, 423 aa, unidentified
VRYYKPERKLPSVPYKVLADNSSAQDLHSGKSGQDLRVPVINMHKQPLMPTTPRKASVIQRTPFTIQLKYPTGEAKQDITLGIDAGYSTIGFSIITEKSELLSGELTLRKRISKLIEQKSNYRRARRNRLWHRKPRFNNRSIANGWFAPSIQHKLETHFRLINKLTKILPITKIIVEVASFDTHKLQNPEIKGVEYQQGELQGCEVREYLLEKWVHKCAYCGESNTPLEIEHIIPKIRGGTDRVSNLTLACHKCNQKKGNQTAAEFGYPEIQQKANQTLKSVAFMNIVRWKLVNTLKCDWTYGYITKYNRVKLNMEKSHVNDAFVIAGGTTQSRTIPYMATQTRRNNRSIQTNRKGYKPSIRKQRYKLQPGDLVKYIKSLFRVKGVFNYGKWVRLISLTKANKIINVNIKKVELVKYGKGIQF

SEQ ID NO: 11759 - protein, 421 aa, unidentified
MEVYVISQDGKPLMPTTPARARKKLRDKKAKCIRKTPFTIKLLYKTTTYTQPITLGIDTGSSHIGSAAVDDRGNVLYLSEVEIRNDIADKMKRRAKYRRNRRNRKTRYRQARWLNRKNSIKSDRFSPTMVSKVNSHLKEVKFVKSLLPITHVILETGTFDPHALKNPDVLKNKWLYQRGANYGFANTRAFVLDRDSYICQYCKGKSKDRRLEVHHIIFRSNGGSDEAENLITLCKTCHDKVHANKIKLKGGKVKGQLKHATQMNSIRKRLLRLLPEAEETFGYITKEHRYLMSLPKEHYFDAVAIASLDNIRNEGLVSVNFKTCLLRKKCISKGDYQQTKGIRSEQLIQTGKIMGFRKFDKVRYMNKEYFIKGRMSTGYAVLMDIVGNKVSLKPIPKFCKMERLSARKSWIIQQEIIQNIA

SEQ ID NO: 11760 - protein, 499 aa, Acidithiobacillus sp.
MLSYLGVRRRRATEQAPWTWARHTLLAPEKAKTEKGSDMQNRVLVLDKNKQPLMPCHPARARALLKAGKAAVFRRFPFTLILKDREGGATQHITTKTDPGSKTTGIAVVAEFARRGPTVIWAAELAHRGQVIHQALEKRRTLRHSRRSRKTRYRAPRYDHRTRAKGWLAPSITHRVRTVITWFQRLLRWVPITDVSMERVRFDMQALENPEISGIEYQQGTLFGYEVRAYLLEKWGRKCAYCDTADAPLEVDHIQPRSKGGSNRVRNLAIACHACNQAKGHAPLSVFLQTDNDRMKRRQIAAAQVAGNDPKKRAERERHEQNRLERVREQAKTPLNDAAAVNTTRHILFERLQALGLPVETGTGGRTKFNRVQQGYPKAHWIDAACVGASGGKVRLDSALRPLQITATGYGNRRMCNVDRFGFRRGKPKSRQKVYFGFQTGDMVRAVVTEGKRTGVHQGRVACRKTGSFKMVTPSGKVDGIHYRFCKPIHRQDGYNYAA

SEQ ID NO: 11761 - protein, 533 aa, unidentified
MSTVYVLNKDGKPLMPTTRGGHVRHLLKEQKARVVQSNPFTIQLLYETNDAVQPLYLGIDPGRTNIGVAVVKADGTAVFTAHLKSRNKEIPKLMQDRKRARRARRTNGRRHRRQRRAKANGTISKKCVKQTTTQNGSVSKRAKEIGIIKRHLPGCEKDVLCIGIKNKETKYTNRERPEGWLTPTANQLLQTHVNLVKKVQKLLPISDVVLEVNKFAFMRLDNPNIQKWQYQQGPLYKKESLESAVSEIQEHHCLFCKKPIDHYHHVVPKSENGSNTIANIVGLCAEHHNLVHKDVAWQEKLAEEKTGLNKKYGALSVLNQIIPALTNKLSVLFPKHFFVTAGKSTHDYRAAHGVSKDHWLDAYCIACSVLPSNVCDSNINNHVPYELKQFRRHDRRVLHKANMSRVYTLNGKAVATNRHKAIKQTTDSLEEFRQNYPDDVYKLKVKEHHPAYRNLNRNYPGSVFLVGKQAHVMQGIASSKDGKTTKYNDTNATTITAGKCKFVAKNSGILFVQCKFRKALSDGTTKKLQYPVR

SEQ ID NO: 11762 - protein, 195 aa, unidentified
MICIVLCIIANARTKHVGLSATTKSKELYSSEVLLRNDIVDLLSTRRELRKTRRNRLRYRKPRFNNRIKSKRSGWIAPSVKYKVDAHIRVIDNVCSILPIFRIVIEVAQFDTQKIKNPNISGKEYQEGDQLGFWNTREYVLARDGHKCQYCKGKSKDKILNVHHIESRKTGGNSPSNLITLCETCHKEYHKGNYF

SEQ ID NO: 11763 - protein, 570 aa, Streptomyces sp.; identical to SEQ ID NO: 5250

SEQ ID NO: 11764 - protein, 425 aa, Microcoleus sp.
  VARIANT 425: note = X can be any naturally occurring amino acid
MQNYVFVIDQNKQALNPIPPARARELLTKQKAAVFRMYPFTIILKHVVGNPSPKPLIIKLDPGSKFTGIAILDGENVIWAAQWEHRAWQIKNALESRRLLRRSRPNRKTRYRQSRFDNRKRPTGWLPPSLIHRVLTIETWVKRLCRYAPIAQIAMELVKFDTQKLQNPEVNGVEYQQGELAGYEVREYLVEKWGRKCSYGDSEGLPLQVEHIHPRSKGASNRVSNLTLSCERCNIKKGTKPVKEFLTKNPARLEKILQQAKQQLKDAGAVNSTGWALFRTLKNILPITTGTGGQTKYNRTRVKLPQQHWIDATCVGEIETIKLVTQQPLRIKPTGWGTRQMCATDRYGFPSRHRERNQIHFGFRTDDIASSVVTKGKKVGEDVGVYCVAKQAVLILPRDSAGYPALATDFVRQFIKRMVTPMRFX

SEQ ID NO: 11765 - protein, 427 aa, Nostoc sp.
MSKVFVLDTEKRPLIPIHSAQARQLLRNKKAAIYRRFPFTIILKEVYPDSVVMPLRLKLDPGAKTTGIALVNDSTGVVVFAAELKHRGFAIREALTSRRQLRRGRRARKTRYRQARFLNRTRPEGWLAPSLQSRVDNIKTWVEKLRKLAPIEAMSQELVRFDMQLIRNPKIQGKEYQQGTLAGYETREYLLEKWGRQCAYCGIKDVQLQIEHIHPRARGGSNSITNLTLSCEKCNTKKGTKDIKDFLKKDPSKLTKILAQAKRPLADAAAVNTTRWALFRALKETELPVETGSGGLTKFNRCQQKLEKTHWLDATCVGQSTPKLIVKAVKPLLITANGHGSRQSCRTDKFGFPSRHVPREKIHFNFQTGDIVKASVATGKKIGNYAGKVAIRSSGSFNISTKNGLIQGILHKFCKRIHAKDGYSYAQ

SEQ ID NO: 11766 - protein, 429 aa, Parasutterella sp.; identical to SEQ ID NO: 4241

SEQ ID NO: 11767 - protein, 442 aa, unidentified; identical to SEQ ID NO: 2903

SEQ ID NO: 11768 - protein, 406 aa, unidentified
MPCSPRKARLLLKQKKAKVVRRTPFTIQLLYGSSGYKQPVSLGVDMGTRHVGISATTKKDVLFEAEAQLRTDIVELLAIRRQFRRSRRNRKTRYREARFLNRRKPEGWLPPSIQHKINSHIKLIDLVHNILPATSVTIEVAAFDTQKLKNLNIRGVEYQQGEQMGFWNVREYVLYRDNHTCQYCKGKKKDPVLQVHHIESRKTGGDSPDNLITLCKTCHHEIHEKGLEHIFQRKRPPMRDASQMTAMRWAMFSRIREKYSHANITYGYITKCIRIANGLSKSHMVDARCISGNPLAKPSGTVYLLKFVRKNNRQLHKATILKGGKRKSNKAPRFVKGFQLFDKVVYERKECFIFGRRSSGYFDLRLLDGTKVHASASWKKLKRVEHASTLLIERRKGDSSPTFALA

SEQ ID NO: 11769 - protein, 472 aa, unidentified
VVGNRLLSIKPLINIGEGVIYSSICTGLSLQTYQKRKEVPCMVYVLDINGQPLMPTTRHGKVRRLLNSHLAKVVKRCPFTIQLLYQSTKEIQPVSLGVDAGSKHIGMAATTEKKVVYQEELSARNDVVKLLSARRTLRRTRRNRKTRYRKPRFNNCVHSKHKGWLAPSVEVKIQEHITTIKRICQILPISEIQVETAEFDLQRLKAMEEGRTPPVGTDYQLGEQYDFYNTRQYGLHRDGYTCQCCGTHDNNIKLHVHHIESRQTGGDAPNNLIILCEHCHKALHEGKLELPKGKKRGKSYRDATFMGVMRKTLLERLKKEIDVPVEGTYGYITKYWRERAGLEKSHIHDAVCISQYPYAKPLDIYYLTKTVRHHNRQIHKSNFSKGGIRKRNQAPYLVKGFRLFDKVLYQGKEYSIFGRRATGYFDIRTLDGTKVNKGSISYKKLRIQDTAKAYLKEARAIPHMNKFTCVLA

SEQ ID NO: 11770 - protein, 465 aa, unidentified; identical to SEQ ID NO: 10623

SEQ ID NO: 11771 - protein, 470 aa, unidentified
MSVFVVGLNGCRLMPVSERKARLLLKGGKASVYRKVPFTIKLNYKTGSTVQPGYLGIDTGSQHIGVSVVRQDGTVLHKEEIGLRDSMSKRKLLESRASLRRGRRYRKTRYRHPKWKPKTKRIYSEKADRKGRHWKKQKNMFTSKRQAGWLPPSLQSKTDHHIQWIRKLLHLLPEGYRLSIELGRFDPARMKDPGIHGELYQKGPQYDYENVRAYVLARDGYTCRVCKKKGGKLHVHHILYRSRGASDDPKYMAAVCSNCHTTENHLPGGILYQWMQDQKKFTRGLRDATFMNILKKRLRRAFPDAVFTYGNITKADREKLGLPKSHGNDATAIALVKTGVTSVKDEEPVIHIQQVRRKKRSLHEETPRKGRKEPNRTASRNDKNTRSVTVSKGSGKKKVSMTACLFDRVELDGKKGWITGFTGTSCYVKDKEDNYICTSPKYKQVSISKLRILHHCGNWVIGAEKPLGKG

SEQ ID NO: 11772 - protein, 411 aa, unidentified
  REGION 1..411: note = Ga0307928_10015040
MVYVIGQDGKTLMPCTNVIARLLLKQGNAKVKRVTPFTIKLLYRTETTYTQTLTLGVDTGSSKIGSAVINKNGDVLYLSEIEIRNDITKKMKQRSKYRRSRRNRKTRYRKARWLNRGNSTKLGRFSPTMTSKINSHLKEIRFVKSILPITKLILETATFDPHALKNPEVLKNKWLYQKGINYGFANTKAYVLTRDKYKCQNCKGKSKDKKLEVHHIIFKSNDGSDDETNLITLCKTCHDKVHKGSLEIKGGKRKSQLKFATQMNSIRIQLLKLLPEAEEAFGFVTKEHRQTLGLGKEHYFDAVAIASQGVPVQFKTNKVLFKKCVSDGDYQQAKGVRGEQKIPTGKIQGFRKFDKVRYLGKEYFIKGRMSTGYAVLMDITGSKVNLKPIPKFSKMIRGSARKSLLLQEMAI

SEQ ID NO: 11773 - protein, 458 aa, Scytonema sp.; identical to SEQ ID NO: 10402

SEQ ID NO: 11774 - protein, 465 aa, unidentified
MSTCVCVLSNSGERLMPTFRLGKVRHLLKDGKAKIVKHHPFTIQLLYDSKTNTQPIEICEDVGYNYIGISVKSQSHEYVSAQYDTLQDEKACHDSCRKYRRTRRNRLRYRKPRFDNRKRGEGWLAPSLRHKKELNVNVVKMYCAVMPITHATVEVGSFDTMLVKAIQEGKAIPEGADYHKGPRYNLATLREAVFYRDNYTCQVCGRKVADGAILHMHHMFYWKGRHGDSLNELLTVCEKCHTPANHQKSGKLYGFGENVKFADLSGAAFMNAVRWQIVNELYTAFGKPFVTITYGTMTKEKRIALRLEKSHNNDAYAMGEFHPNHRCTFEHYEKVRRNNRTLEKFYDSRYIDIRTGEIATGKELFNGRINRNHKKDSENLHRYRGKRTYAGHRALLRKKVNLNPGDLVSLNGEVLVVHSTHTNKKGAVNVEFKTPGKSGQKSASLKKLKIVKAADSMHSAWEKIS

SEQ ID NO: 11775 - protein, 442 aa, unidentified; identical to SEQ ID NO: 10884

SEQ ID NO: 11776 - protein, 408 aa, unidentified; identical to SEQ ID NO: 5302

SEQ ID NO: 11777 - protein, 470 aa, unidentified; identical to SEQ ID NO: 5326

SEQ ID NO: 11778 - protein, 411 aa, unidentified
MPCSQRKARLLLKNKKAKIYAYHPFTIQLFYASGETIQMCHIGVDTGSRHIGLAITSENKVLLKGEIDLRQDVKSNLDTRRIYRRNRRNRKTRYRKARFFNRVTSKQKNWLPPSIESKIHHTFHWMNKLENLVADSNLHIEVGKFDMAKMIRPDIQGKEYSQGQCYGYFDTRYFVFARDDYTCQCCKKKNKILKTHHILYRSNGGTDRADNLITVCTDCHTSKNHKKGGILYEWQQRHKKGKPYKEPPFMNIIRKRIYQKYPDAVISYGSQTTPKRKERNLDKTHYNDAIIISGIEDIKENPKEWLRIKQFRKKKRSLHEAAARKGRKEHNRTQKRNRKNTPYDKGWYLNDYVEVFGKKGYISGFTNSGVYIKNTNDDYITMPDKKYKQVSHHNLVRICHNNNWQYEIQKI

SEQ ID NO: 11779 - protein, 490 aa, Anaerostipes sp.; identical to SEQ ID NO: 6170

SEQ ID NO: 11780 - protein, 415 aa, unidentified
MIYVRNKEGKALMPTEREGRIGYLLRHGKAHVVSRVPFVVQLDYESTIYTQEVSLGIDAGSKHIGVSASSEKKELLAAQVELRSDVVNLLSTRRELRRTRRNRKTRYRKVRFDNRKRKDGWLAPSIEQKVESHLKVIRLVHKLLPITKTTIEVAQFDAQKIKNSDIKGEEYQQGEQMGFWNVREYVLARDGHKCVHCKGKSKDPILNVHHLESRKVGGNSPSNLVVLCETCHKAYHRGEFDLKIKRGTTLRDAAVMNIMRWSVYERAKAEFGNVYLTYGYITKHTRIENDIEKTHAADAFCIAKNVHARRSRTFFMCRCVPRHTRALHVANPKKGGIRRSCIASHKIGKSRFQRFDMVRWKGKECFIFGSTHGNVVLRKIDGVKVHETQAVSAKTIKFLKRIRNNILMEERTSES

SEQ ID NO: 11781 - protein, 414 aa, unidentified
MPCSPAKARLLLKEKKAIVKRRTPFAIQLTIATGETKQPVSLGVDAGYKHVGLSASTEKAELYASEVELRQDITDLLSARRALRQSRRNRKTRYRAPRFDNRIRTKRKGWLAPSVENRINAHLSRIEAVLRLLPVTRITVETASFDLQLLKNPDISGKEYQEGEQLGFWNVREYVLFRDGHVCQYCHGRSKDPVLNVHHLESRRTGGDSPGNLITLCETCHKALHHGEITLKTKRGQSFRAEAFMGIMRWEVLNRLKVSHPELEVNNTYGYRTKHVRIANGIAKSHCADAFCIAGNLGAKRLGEFFFQKQTRRNNRQIHKLSILKGSLRKRNQAPFEVKGFRLFDKVACKGEEGFIFGRRSSGFFDVRKLDGTRISAGISYKTLHLLEKRQTYLTEIRKEEALPSLREGRGLRA

SEQ ID NO: 11782 - protein, 424 aa, unidentified; identical to SEQ ID NO: 8578

SEQ ID NO: 11783 - protein, 512 aa, unidentified; identical to SEQ ID NO: 7017

SEQ ID NO: 11784 - protein, 413 aa, unidentified
MTSYAFVLDANGKQLAPAKEQKAWFLIRKKRAALVSKYPMVIQLKKEIPENEICKDEIRCGIDDGGLHVGIALVQKCKTKNKVVFKGTIEQRNDVKHLMEVRRSYRHYHCYHKRYRPARFDNRKSSKRKKRIAPSILQKRQAIIRVIHWLNKWINITNYWLEDVSIDIRALTDGYKPYRWQYQKSNRLDENIRKAAILRDGGKCMECGKLNCRLEVHHIKPRRRNGSDTLDNLITLCKSCHQKTEGQEELYMDRYFSLLKSSDHKNLNYAQHVMIGKEWLRKQLSSLGVLYLTNGGDTANKRIDWNIEKSHANDAVCITNLQPDTYDMKEWTVKPMRRQSKAKTDNVLGIKHRDLVEYTLKNGETHRGYVTALYPEQKAINFQSPTKHCKKVNARKCKLLWKYSKIYWFENAS

SEQ ID NO: 11785 - protein, 458 aa, Lactobacillus sp.; identical to SEQ ID NO: 4474

SEQ ID NO: 11786 - protein, 414 aa, unidentified
MVYVINKQGQALMPTERFGKVRRLLKNSLAHVVCRIPFTIQLDYDTTDYTQPVSLGVDAGSKHIGISATTSEKELYAADVELRNDIVDRLSTRRELRRTRRSRLRYRKARFNNRVSSKRKGWLAPSVENKIQTHLTVVEKINKFLPITNIVVEIASFDIQKINNPIISGSEYQQGEQLDFFNVREYVLFRDNHICQHCKGKSKDKVLNVHHIESRKAGGDSPNNLITLCETCHKAYHRGEFELNVKRGKSFRDSAFMGIMRWSFYDRLKNIYPNVSMTFGYITKNTRITNNLPKDHYVDARCISGNPTAKPLGYYFYQKKVRCRNRQIHKANFLKGGRKKLNQAPFLVKGFRLFDLVEYQKELYYIFGRRSSGSFDIRKLDGTKVNKGSINCKYLRLIATRKSILTEKRMQVNL

SEQ ID NO: 11787 - protein, 413 aa, unidentified; identical to SEQ ID NO: 2636

SEQ ID NO: 11788 - protein, 420 aa, Petrotoga sp.; identical to SEQ ID NO: 5114

SEQ ID NO: 11789 - protein, 422 aa, unidentified; identical to SEQ ID NO: 5457

SEQ ID NO: 11790 - protein, 456 aa, Halomonas sp.; identical to SEQ ID NO: 2773
  source 1..456: note = isolate UBA1491

SEQ ID NO: 11791 - protein, 420 aa, unidentified
MQYVYVLNKHGEPLMPCSPRKARLLLKQKKACVVKRTPFTVKLLYGSTGYKQPVTLGVDAGSKHIGISATTEKHELYREEATPRNDVVDLLSARRAFRRSRRNRKTRYRAPRFDNRVHSKHEGWLAPSVEVKIREHITLIKRVCRILPITLVRVETAEFDTQRLKAMLEGKPLPVGTDYQLGEMYDEYNVRQYVLKRDNYTCQCCGAHPTKTKAVKLHVHHIETRKTGGNAPNNLITLCTVCHKALHAGKVTLDGKKRGKPLKDAAFMGIMRKALLERLRKELKIPVQGTYGYITKYLREKHGIPKSHTNDARCISKNPLAIPCDTCYYTKAVRHHNRQLHKATILKGGIHKANQAPYTVKGYRLWDKVSYNGKECFITGRRTSGYFALKKLDGTVISNSISYKKLRLLEVATNYITERK

SEQ ID NO: 11792 - protein, 399 aa, unidentified
MVYVQDINGKPMMPTTRHGKVRRLLKENKAVVVSLCPFTIKLTYVTSDYKQEIVLGVDAGTKHVGLSATTKSKELYSSEVILRNDIVDLLSTRRELRKTRRNRLRYRKPRFNNRIKSKRSGWIAPSVKYKVDAHIRVIDNVCSILPIFRIGIEVAQFDTQKIKNPNISGKEYQEGDQLGFWNTREYVLARDGHKCQYCKGKSKDKILNVHHIESRKTGGNSPSNLITLCETCHKEYHKGNIDLKIRRGKSLRDAAVMGIMKWRLYEELKSKYDNISMTFGYVTKYNRINHDIEKSHVSDAFVISKNFNAIRLGYYYKVRLVRRHNRQIHKQKIQKGGIKRLNQSPFEVFGFRLFDRVMFENSYYFIFGRRKTGSFNIRDIDGKRISRTRNLNYQGVSVL

SEQ ID NO: 11793 - protein, 456 aa, unidentified
MTNIYILDINGKPLMPCHNGAFVRCRLKNKEAKVVKRKPFTVQLMYEVKNNYKQDIYLGVDAGYKYIGFSASTSNQELFSGELEQDCGMVERNKERRMYRRQRRSRLRYRKARFNNRKAAKPQGWTAPSLQRKRDTHLRFIMMLSSIMPITYINVEIGLFDPALMKATAEGRTIKGTDYQHGEAEGFENMKSYIRYRDSFTCQNPDCKCHKMKKEDREKLKLHVHHIGYYKHDRSNRPGNLITLCELSHTPETHQPGNLLYGWKPKMKSLRETAFMNTVRKEIVDTLKVIYPDKTVRYTYGYKTNLTRRDWHVPKNHHNDAFCIAGQYNLKRAETVYFNQQRRNNRSLEIFHDAKYIDSRDGKRKTGKELYCGRNTRNKNFNKENLHPYRSKKVSKGKRNIRKQRHKYQPNDIVVFEGQKYKIRGSHCKGSRVILDTKKSVSVKKIHILKHCSGIC

SEQ ID NO: 11794 - protein, 492 aa, unidentified; identical to SEQ ID NO: 4486

SEQ ID NO: 11795 - protein, 416 aa, unidentified
MVYVLDKNGQPLMPTDRHRKVRLMLQSGQAKVIKRCPFTIQLNYDSGHQTQEISLGIDAGSKDIGVSATTKIKVLYEVDVELRNDIVDLLSSRRELRRGRRNRKTRYRQAKFNNRRRGNGWLAPSIRQKIGTHLTVVENICKMLPISRIMVETASFDIQKIKNPDIQGAEYQQGDQLEFWNVREYVLFRDGHTCQCCKGKSKDKILNVHHIESRKTGGNAPNNLITLCETCHTGYHKDTVQLPKAIKRGMRFKDAAFMGIMRWAFYEALKQQYEPVGTPVHNTYGYITKHTRIAYNLPKEHYVDARCISGNPEASSNGEYYYQKKVRCHNRQIHKLTILKGGIRKQNQATYLVKGYRLFDKVSYQGKGYFVFGRRQSGFFDIRTLSGEKVNKGSLSCKKLKFIATRTYYLTERRAV

SEQ ID NO: 11796 - protein, 413 aa, unidentified
MTSYVFVLDANGKKLAPTKKQKAWFLIRKKRATLVSKYPMVIQLKKKIPDKEICKDEIRCGIDDGSLHVGIALVQKCQTRNKVVFKGIIEQRNDVKHLMDVRRGYRRYHRYHKRYRPARFNNRFSSKREGRIAPSILQKRQAIIRVINRLNKWINITNYWLEDVAIDIRALTGGYKSYSWQYQRSNRLDENIRKAVILRDNCRCKECGKSNCRLEVHHIKPRRLNGPNTLDNLITLCENCHQKTEGKEELYMSRYFGLLKSSDSKRLNYAQHAMIGKKWLREELSNLGMLYLTNGGNTANKRIDWSIEKSHSNDAICITDLQPDTCNIKEWTIKPMRRQSKAKTDNVLGIKHRDLVEYTFRNGETYKGYVTALYPEQKAINFQSSTKHCKKVNARKCKLLWKYSKIYWLENAG

SEQ ID NO: 11797 - protein, 423 aa, unidentified; identical to SEQ ID NO: 2998

SEQ ID NO: 11798 - protein, 431 aa, unidentified; identical to SEQ ID NO: 3801

SEQ ID NO: 11799 - protein, 396 aa, unidentified; identical to SEQ ID NO: 4508

SEQ ID NO: 11800 - protein, 413 aa, Blautia sp.; identical to SEQ ID NO: 3119

SEQ ID NO: 11801 - protein, 413 aa, unidentified; identical to SEQ ID NO: 4651

SEQ ID NO: 11802 - protein, 509 aa, unidentified; identical to SEQ ID NO: 7892

SEQ ID NO: 11803 - protein, 428 aa, Lactobacillus sp.; identical to SEQ ID NO: 11642

SEQ ID NO: 11804 - protein, 407 aa, unidentified
MPCSPAKARLLLKEKKAIVVRRTPFTIQLTIATGEAKQPVSLGVDAGYKHVGLSASTEKAELYASEVELRQDVSDLLSARRALRQSRRSRNTRYRAPRFDNRIRTKRKGWLAPTVENRINVHLSRIETVLRLLPVTKITVETASFDTQLLKNPEISGKEYQEGEQLGFWNVREYVLFRDGHVCQHCHGRSKDPVLNVHHLESRRTGGDSPGNLITLCETCHKALHRGEIKLRAKRGQSFRAETFMGIMRWGVLNRLKASHPKLEVNNTYGYRTKHARIANGIAKSHCADAFCIAGNFGAKRLGEFFFQKQTRRNNRQIHKLSILKGGIRKRNQAPFEVKGFRLFDKVACQGEEGFIFGRRSTGYFDVRKLDGTCISAGISYKKLHLLEKEKNLFNRNSKGGGASSPA

SEQ ID NO: 11805 - protein, 442 aa, Lactobacillus sp.; identical to SEQ ID NO: 5262

SEQ ID NO: 11806 - protein, 431 aa, unidentified; identical to SEQ ID NO: 4804

SEQ ID NO: 11807 - protein, 406 aa, unidentified; identical to SEQ ID NO: 4082

SEQ ID NO: 11808 - protein, 431 aa, Aphanizomenon sp.
MSKVFVLDTEKRPLDPINPAQARQLLRNKKAAIFRQFPFTIILKKSCPDSPVSSLRLKIDPGAKFTGMALINDSTGEVVFAAELKHRGFAIRDALTSRSQLRRSRRARKTRYRQPRFLNRTHPEGWLAPSLQSRVENIKTWVERLRKLAPIEAISQELVRFNMQLMANPDIQGKEYQQGTLAGYESREYLLEKWGRQCAYCGVKDVPFQVEHIHPRAKGGSNSITNLTLSCEKCNTKKGTKDIKDFLKKDPSKLEKILEQAKRPLADAAAVNTTRLALLFVFKATGLPVETGSGGLTKFNRSQQNLEKTHWIDAACVGQSTPILNIKGVKPLLITANGHGTRQSCRTDKYGFPSRYVPRFKFVNGFQTGDIVKAVVTKGKKIGAYIGRVAVRTSGSFNISTISGLIQGISYKYCKSIHKKDGYEYGKSKIC

SEQ ID NO: 11809 - protein, 431 aa, unidentified
MPNKVYVINKHGRPLMPCSPAKARHLLDDGKAKVKKRTPFTIQLVYGSSGYTQEVILGVDDGSKTIGISASTKKEEVFAADVTPRNDVVNLLSARREFRRARRNRKTRYRKSRFDNRVRSKRKGWLAPSVEVKIQEHITAIKMVCRILPVSKVVIETAEFDLQLLKAIEEGKPVPQGEDYQQGEMYGHYNVRQYVLWRDNYTCQCCGAHATKKKEVRLHVHHLESRKVGGDAPDNQVTPCESCHEKLHKGLITEGDFKKRKRRSTRDATFMGIMRKTLMQMLCSELPIPVVETRGYITKTTREKLLVLPKSHTNDALAIAQGKRGFNVGYLPGIIQTDKIYTIRPVRHHNRQLHKAAILKGGIRKSNQAGKYVFGYRLFDKVQFNEQDCFIWGRRTTGIFTIKTINGKMIKDGISFKKLKLAEKSTSYLIA

SEQ ID NO: 11810 - protein, 454 aa, Halomonas sp.; identical to SEQ ID NO: 8111

SEQ ID NO: 11811 - protein, 442 aa, unidentified; identical to SEQ ID NO: 3161

SEQ ID NO: 11812 - protein, 303 aa, unidentified
VETTLSFVRRMCRYLPVSGIATELVKFDSQKLQNPEVSGVKYQQGTLFEYEVREYLLEKFGRKCVYCGAEGVPLNIDHVVPRAKGGSNRVSNLVLACVSCNQKKGARSLEDFLKGKPEVLARVRRELKTPLRDAAAVNATRWVLFNELKATGLPVETGSGALTKLNRHAFGVEKEHWLDALCVGRLNGVVTRKGLNVLEIRCMGRGSRQRTRLTKYGFPRGYLMRQKCVHGFATGDMVEANVPKGKKAGLWRGRVAVRVSGSFNIQTPKGVIQGVGWKHCRLISHNDGYGYAWLGHAPHSSPA

SEQ ID NO: 11813 - protein, 416 aa, unidentified
VPEMTNYAFVLDADGKPLSPTKEQKAWFLIRKKRATLNSKYPMVIQLNRVIPEEDICKDEIRCGIDDGGLHVGVALVQKCRNKNKVLFKGTIEQRDDVKHLMEVRKGYRKYHRSHKRYRPARFNNRSSSKRTNRIAPSILQKRQATWRVVIRLSKWIPVTSYWLEDVSMDIRVLTDGFQSYGWQYQKSNRLDENIRKAVILRGGCKCMECGKSNCRLEVHHIRPRRLDGTNTMANLITLCDGCHQKTEGKEEQYMQHYFTMLNSSDMKGLNHVSHVMIGKTWLRKQLSQLGPLHLTTGGDTANKRIDWEIAKSHSNDAICITDLRPDTCEIKDWTIKPIRRQSKAKTDNVLGIQHRDLVSYTYKNGETHTGYVTALYPELYALNFQSPTKHCKKVNARQCRLLWKYNKIYWLDDVV

SEQ ID NO: 11814 - protein, 320 aa, unidentified
RAPRFDNRIRTKRKGWLAPSVENRINAHLSRIGAILRLLPVTKITVETASFDTQLLKNPDISGKEYQEGEQLGFWNVREYVLFRDGHACQHCHGRSKDPVLNVHHLESRRTGGDSPGNLLTLCETCHKALHRREIKLKTKRGQSFRAEAFMGIMRWEVLNRLKASHPEQEVQNTYGYRTKHARIENGIAKSHCADAFCIAGNLGAERLGEFFFQKQTRRNNRQIHKLSILKGGIRKRNQAPFEIKGFRLFDKVACKGEEGFIFGRRSSGYFDVRKLDGTHISAGISYKKLRLLEKRQTYITEIRKEEALPPLSEGRGLRA

SEQ ID NO: 11815 - protein, 419 aa, Lyngbya sp.; identical to SEQ ID NO: 2999

SEQ ID NO: 11816 - protein, 419 aa, Moorena sp.; identical to SEQ ID NO: 2828

SEQ ID NO: 11817 - protein, 423 aa, unidentified; identical to SEQ ID NO: 3951

SEQ ID NO: 11818 - protein, 413 aa, unidentified; identical to SEQ ID NO: 2636

SEQ ID NO: 11819 - protein, 672 aa, unidentified
  REGION 1..672: note = Ga0315277_10040887
VNTETREQVLGIDFGPKHVGIALVARGASSEEVLFVAEVRLRDRKSLLADRRALRRGRRGRKRYRQPKIPQRGGGATSQSGEESERGRAAAPEYRRATGLNTGRRRCKFVDPQTGEICGWNTPRKANVRDLLLWNICRHLPVSVSEQAGFLAYVNQTNLHRAEILGALPAEEQAPLEAVFSQQRRPKDERLKDRLRRLGVDRHLRSQVTDIVGITSRRPLSGRLSFCREHFLRHHEQSRVPRPSVWLPNTVEMKQADVLKVCRQEVAPRWRVDCIVLERANFDLQLLRQQTAIEWSVEDWQRGPRWGYRNTFEAKKQEQGNRCAYCGSKPTAKNRLRLELEHVIPGGGDTWENLVLSCRKCNEGKGNRSPAQAGMRFWTDTETGETLSPAPLGAAHVSRYMTQTDQGWRRLQAALQQVFPQAAVEHTWGYVTSFYRNRWNLPKKHFVDAAVIASSHELERPVSVPEQPQRFAPTSGGKQLFDTNPLSKRPEGRFAQSKAIVCEQGTLAFKDVAKVENPRKRATLQRVADEATAAAKARGETPPTAFTAEMLPKIPFKSVRLAKQDASDTNTRRLGRHWFKVASAVNIATIVYQLDGKVCMQLQRNPAVFRHDPGLPQGARVVATFRKGDLVECDAGRGRVTKNHSNCTLTVELLDSGKEVTRLAKSFRPRHG

SEQ ID NO: 11820 - protein, 443 aa, Anoxybacillus sp.; identical to SEQ ID NO: 4769

SEQ ID NO: 11821 - protein, 414 aa, unidentified
MPCSPAKARLLLKEKKAIVKRRTPFTIQLTIATGETKQPVGLGVDAGYKHVGLSASTDKAELYASQVELRQDITDLLSARRALRRARRNRKTRYRAPRFNNRIRTKRKGWLAPSVENRINAHLSRIEAVLRLLPVTKITVETASFDMLLLKNLDIAGKEYQEGEQLGFWNVREYVLFRDGHVCQHCYGRSKDPVLNVHHLESRRTGGDSPGNLITLCETCHEALHRGEIALKTKRGHSFRAEAFMGMMRWEVLNRLKASHSELEVNNTYGYRTKHARIVNGIDKSHCADAFCIAGNLGAERLCEFFFQKQTRRNNRQIHKLSILKGGIRKRNQAPFEIKGFRLFDKVACKGEESFIFGRRSSGYFDVRKLDGTRISAGISYKKLRLLEKRRTYLTEIRKEEALPPLPEGRGLRA

SEQ ID NO: 11822 - protein, 515 aa, Ruminococcus sp.; identical to SEQ ID NO: 2456

SEQ ID NO: 11823 - protein, 420 aa, unidentified
MQYVYVLNKHSEPLMPCSPGKARLLLKRQKACVVKRTPFTIKLLHGSAGYKQPVTLGVDAGSKHVGLSASTETHELYCEEFTPRNDVVELLSTRRQNRRSRRYRKTRYRAPRFNNRVHSKHKGWFAPSVEVKIQEHITVIKRICRILPVTLVRVETAEFDTQRLKAMLAGKPLPVGTDYQLGEMYDEYNVRQYVLKRDNYTCQCCGTHTTTKKAVKLHVHHLESRKVGGNAPSNLITLCVTCHNSLHKGKITLDGKRRGKTLRDAAFMGIMRNTLLTRLRNELNIPVQNTYGYITKLLREQNDIKKSHVNDARCISKHPLAEPCSVCYRTKAIRHHNRQIHKAKILKGGIRKANQAPYIVKGFRLWDKVLYNGQECFISGRRSLGYFALRKLDGTAITNSISFKKLRLLEPATNYLIERK

SEQ ID NO: 11824 - protein, 304 aa, unidentified
LAGAICGGQDPGAYHQYQAGFELLPIGKVVVETAEFDLQLLKSIADGMPVPQGEDYQKGEMYGFYNVRQYVFFRDGYTCQCCGAHGKGIKFHTHHLESRKTGGNAPDDLVTVCDKCHKAFHAGLITDAKLKKRRRKSTRDAAFMGIMRKTLLQRLRAELPIPVVETRGYITKATRERLLKLPKSHTNDALAIAMGRHGFGIEEVTYMPQSDRIYQIKPVRHHNRQLHKALPKKGGRRQRSQGPKYVQGFRRFDKVLYRGQECFIWGLRTRGYFQLKLLNGTKVHESAKASELILLEHSSGYLIA

SEQ ID NO: 11825 - protein, 442 aa, unidentified; identical to SEQ ID NO: 4418

SEQ ID NO: 11826 - protein, 512 aa, unidentified; identical to SEQ ID NO: 7636

SEQ ID NO: 11827 - protein, 426 aa, unidentified; identical to SEQ ID NO: 3614

SEQ ID NO: 11828 - protein, 406 aa, unidentified; identical to SEQ ID NO: 7944

SEQ ID NO: 11829 - protein, 406 aa, unidentified; identical to SEQ ID NO: 3157

SEQ ID NO: 11830 - protein, 376 aa, unidentified; identical to SEQ ID NO: 6265

SEQ ID NO: 11831 - protein, 406 aa, unidentified; identical to SEQ ID NO: 2703

SEQ ID NO: 11832 - protein, 446 aa, Actinomadura sp.
MPRERHAMVFVLDKHGMPLQPCHPARARYLLRRGRAVVHRHTPFVIRLKDREIAGSEVDGVEVGIDPGSKHTGVSVFTAQTGERRARFAVQLNHRGATIGKRMRQRAAYRRRRRSANLRYRKARFSNRTRPQGWLAPSLRHRADTTTSWVDRLTRWAPVQAVHVERASFDTHLLAAGKPLEGTEYQHGTLHGFEVREYLLTKWGRACAYCGATGTPLNIDHIRPSSRSGSDRVSNLTLACIPCNQVKSNRLVTEFLAGRPDVLAKVLAQATKPLADAAAVNSTRWALWRALDARLPTHTATGGRTKWNRTCNGLPKSHALDALAVGTLDSITETVRRVLVVGCAGRGAHQRTTPNQHGFPRLTRPRKKTFYTFATGDLVRAVVPTGKKAGTHTGRIAVRERGYFDIHTRHGRVAGIGHRHVRLLQRADGYAYTTQLEVTPEHHKDG

SEQ ID NO: 11833 - protein, 442 aa, Lactobacillus sp.; identical to SEQ ID NO: 9492

SEQ ID NO: 11834 - protein, 418 aa, unidentified
MPCSPAKARLLLKEKKAIVKRRTPFTIQLTIATGESKQPVTLGVDAGYKHVGLSASTEKAELYASEVELRQDITDLLSARRALRQSRRNRKTRYRAPRFDNRISTKRKGWLAPSVENRINAHLSRIEAVLRLLPVTKITVETASFDLQLLKNPDISGKEYQEGEQLGFWNIREYVLCRDGHVCQHCYGRSKDPVLNVHHLESRRTGGDSPGNLITLCETCHKALHRGEITLKAKRGQSFRAEAFMGIMRWEVHNRLRALHPGIEVSNTYGYRTKHARIANGIAKSHCADAFCIAGNLGAERLGEFFFQKQTRRNNRQIHKLSILKGGIRKRNQAPFEVKGFRLFDKVACQGEEGFIFGRRSSGFFDVRKLDGTRISAGISCKKLHLLEKRRTYLTEIRKEEALPPLPEGRGSAPKCDE

SEQ ID NO: 11835 - protein, 420 aa, unidentified
MQYVYVINKHGKPLMPCSPGKARLLLKQQKARVVKRTPFTIKLLYGSAGYKQPITLGVDAGSKHVGLSASTEKRELYSEEFTPRNDVVELLSTRRQNRRSRRNRKTRYRAPRFDNRVHSKHKGWLAPSVEVKIQEHITVIKRICRILPITLVRVETAEFDTQRLKAMLAGKPLPVGTDYQLGEMYDEYNARQYVLKRDHYTCQCCGAHTTTMKSVKLHVHHLESRKVGGNAPSNLITLCTTCHDALHKGKVSLDNKKRGKPMRDTAFMGIMRKTLMARLSEELPIPVQGTYGYITKMRREQNDIKKSHVNDARCISKHPLAEPCSVCYRTKAIRHHNRQIHKANFSKGGYRKRSQMSYIVEGYRLWDKVLYKGQECFISGRRASGRFALKKLDGTSISKSVTFKKLRLLEPATNYLIERM

SEQ ID NO: 11836 - protein, 495 aa, unidentified
MAVVYVLSASGKPLMPTTRCGHVRILLKEGKARVVERIPFTIQLTYQSEEETQPLYLGIDPGRTNIGTAVIRENGECVFTAQLTTRNKDVPKLMKARKQFRMAHRRLKRRCKRQRRAKANGTTSPKEEFQRLLPGCEEPITCKGIRNKEARFNNRKRLVGWLTPTATHLLLTHINLIQKLKKFLPITDVVLEVNQFAFMAMDNPHIQRWQYQRGPLFGQGSVEDAVYAAQDGHCLFCKKGIDHYHHVIPRRKNGSETLENRVGLCEEHHRLVHTEASWENKLASKKAGINKKFHALSVLNQIIPQLTEQLTELFPQHAFVTTGQDTCSFREDHSIPKDHYLDAYCIACSVLTDTSRVAIPKAAPHDIRQFRRHDRQACHKANIERKYIDAGGKVVASNRNKAIEQKTDSLREYRVSHSESEVSQLTVRPHFPQYKDMGRPMPGSLVLHNGNVFVLTSSDGRHNGFVDYYIDEYGEKHKARKCNILTNNSGLQFCG

SEQ ID NO: 11837 - protein, 440 aa, Clostridium sp.; identical to SEQ ID NO: 5468

SEQ ID NO: 11838 - protein, 375 aa, unidentified
  source 1..375: note = uncultured Candidatus Competibacteraceae bacterium
MNKVFVLSSTKEPLMPTRPARARQLLTRGRAAVYRMQPFTIILKDRETGDTQPVEVKVDPGSKATGIALVGHFEQQGAVVLWGANVNHRGQTMKNNLESRASLRRGRRGRKTRYRQARFLNRTRNAGWLPPSVESRVGNTESVINRLATRCPITEVSIEIVKFDMQAMVNPEISGTEYQQGTLAGYELREYLLEKWHRTCAYCGAKDVPLQIEHIQPKALGGSNRVSNLTLACKPCNQKKGSQPITVFLKTKPELIKKIQAQAKAPLKDAAAVNASRWALKNRLEKRWPVSCGTGGRTKFNRTKQGYEKDHWRDAACVGESGERVLIREGMKPLIITAKGRGSHQVVRTDKFGFPQGKAGRIKRVHGFSTGDIVK

SEQ ID NO: 11839 - protein, 434 aa, Lactobacillus sp.; identical to SEQ ID NO: 6197

SEQ ID NO: 11840 - protein, 414 aa, unidentified; identical to SEQ ID NO: 2588

SEQ ID NO: 11841 - protein, 344 aa, unidentified
MSVYQLQQKSKELYASEVILRSDVVDLLSTRRELRKIRRYRLRYRKPRFMNRIKSKKRGWIAPSIRQKIDSHIRIIGFVYSILPVSKLIIEVAQFDTQKIKNPEISGKEYQEGEQLGFWNVREYVLARDEHKCQHCKGKSKDPVLNVHHIESRKTGGDSPSNLITLCKTCHKEFHKGNIKLKVNRGESLRDAAVMSIMKWELYDELKSLYPNVKMTFGYITKYNRINHGIEKSHVSDAFVISRNFDSERLGYYYKRKLVRRHNRQIHKMKAPKGGNKRMNQSPFKVFGFRLFDKVMFQGKERFIYARRLRGIFNIRDINGENKKDISYKKLEYVSHGLISIVAG

SEQ ID NO: 11842 - protein, 414 aa, unidentified; identical to SEQ ID NO: 4492

SEQ ID NO: 11843 - protein, 427 aa, Enterococcus sp.; identical to SEQ ID NO: 5630

SEQ ID NO: 11844 - protein, 450 aa, unidentified
MSYMAVFVLDKHQKSLMPCSEKRARLLLNRRRARVHSIAPFTIRLVDRTIEKSSLQPIRCKIDPGSKTTGVAIARENGDQQIVLFLFELTHRGANIRDALQSRSVKRRRRRSQLRYRPKRFENRRRPRGWLAPSLYHRIETTLTWIERFQKRAPIAAITCERVRFDTQKLLNPEIEGIEYARGSLLGYEVREYLLEKWGRKCAYCDASNTPLQVDHITPQSRGGSDRIDNLTLACSSCNQKKNNQSVEAFHPQKAKIIRSKSSLRGAAAVNSTRSALWDQLTRLSLPCEEGTGGQTKYNRVRLAVPKMHALDAACTGVVSDLQNWQIPIQPILSTGRGSYQRTLLDRFGFPRGFLLRQKQVHGFQTGDMVIASVPSGKKQGRHAGRVAIRASGNFNIQTAEGVIQGINSKHCHLVQRSNGYHYPSRPLTFQYQGCNTQIITQRSGNSSRP

SEQ ID NO: 11845 - protein, 420 aa, unidentified
MQYVYVLNKHGEPLMPCSPRKARLLLKQKKACVVKRTPFTIKLLYGSTGYKQPITLGVDAGSKHIGISATTEKCELYREEATPRNDVVDLLSARRAFRRNRRNRKTSYRAPRFNNRVHSKHKGWLAPSVEVKIQEHITLIKRVCRILPVTLVRVETAEFDTQRLKAMLEGKPLPVGTDYQLGEMYDEYNVRQYVLKRDKYTCQCCGAHPTKTKAVKLHVHHIETRRTGGNAPNNLITLCTACHKALHAGKVTLNGKKRGKPLKDAAFMGIMRKTLMERLLKELKIPVQGTYGYITKYLREKNGIPKSHTNDARCISKNPLAIPCDTCYYTKAVRHHNRQLHKATILKGGIRKANQAPYIVKGYRLWDKVSCNGTECFITGRRTSGYFALKKLDGTVISNSISYKKLRLLEVATNYITERK

SEQ ID NO: 11846 - protein, 420 aa, unidentified
MQYVYVLNKHGEPLMPCSPRKARLLLKQKKACVVKRTPFTIKLLYGSTGYKQPITLGVDAGSKHIGISAATEKYELYREEATPRNDVVDLLSARRAFRRSRRNRKTRYRAPHFNNRVHSKHEGWLAPSVEVKIREHITLIKRVCRILPVTLVRVETAEFDTQRLKAMLEGKPLPVGTDYQLGEMYDEYNVRQYVLKRDNYTCQCCGAHPAKIKAVKLHVHHIETRRTGGNAPNNLITLCTACHKALHAGKVTLDGKKRGKPLKDAAFMGVMRKTLMERLLKELKIPVQGTYGYITKYLREKHSIPKSHTNDARCISKNPLAIPCDTCYHTKAIRHHNRQLHKATILKGGIRKANQAPYTVKGYRLWDKVSYNGSECFITGRRTSGYFALKKLDGTVVSNSASYKKMRLLEVATNYITERR

SEQ ID NO: 11847 - protein, 430 aa, unidentified
MPKVYVLNRHGRPLMPCTPAKARHLLDAGKAKVRHRTPFTIQLLYGSTGYTQEVILGVDAGSKTIGLSAATETEELFSAEVKPRNDVVELMSARRQFRRARRNRTTRYRKPRFDNCVRSKHKGWLAPSVEVKIQEHMTAIRRACAILPVSKVVVETAEFDLQLLKAVAEGKPVPQGEDYQKGEMYGHYNVRQYVLWRDSYTCCICGVHGSVRKGVPLHVHHLESRRVGGDAPDNLVTLCTACHDKLHKGIIMAADIKKRKRRSTRDATFMGIMRMTLLRRLREQIPVPVVETRGYITKATRENLLVLPKSHANDALAIAHGPQGFRAEHLPNIRQADRLYTIRPVRHHNRQLHKATILKGGVRKTNQAEKYICGFRLYDKVLYNGIECFVWGRRTSGSFLLRQLNGEKVKDGVSYKHLKLLERSQSYLVA

SEQ ID NO: 11848 - protein, 413 aa, unidentified; identical to SEQ ID NO: 2636

SEQ ID NO: 11849 - protein, 263 aa, unidentified
MINPDIHGVDYQLGQTYGFFDERYFVFARDNYTCQVCGKSKGKILQTHHIIYRSNGGTDRVDNLITVCTDCHTSANHKKGGILYKWQAEHKKVKQYKEPPFMNTLRRRIFDKYPNAIITYGSETTLKRKEIGLEKTHYNDAIVISSITAIKANPNEWLLIRQFRKKKRSLHESTARKGRKEPNRTQKRNRKNTPYYKGFWLNDKVSVLDQVGYITGFTSGGAYIKNKNDEYITLPGKSYKQVGISNLRLLSHNNNWQYIRNAV

SEQ ID NO: 11850 - protein, 536 aa, unidentified; identical to SEQ ID NO: 4526

SEQ ID NO: 11851 - protein, 431 aa, Calothrix sp.; identical to SEQ ID NO: 3120

SEQ ID NO: 11852 - protein, 429 aa, Beggiatoa sp.
MQRVFVLDTKKKPLMPCHPARARKLLKKGKAAVYRRYPFTIILKERVDGQLQPVEIKFDPGSRTTGIALVGHFERGSEVIWAGNLNHRGLQIKSNLVSRRAIRRSRRNRKTRYRPARFLNRRRPKSWLPPSLRSRVDNVKNWALKLSRLAPITQIAVETVRFDTQKMQNPEVSGMEYQQGELAGYEFREYLLEKWGRQCAYCGVQNVPLEVEHIQPRSKEGSNRVSNLTLACTKCNQKKGNKDVKDFLKGKPDRLKKIQAQAKASLRDTAAVNATRYAIGEALKTFGFVISFSSGGRTKFNRTQQGYPKEHWVDAACVGENGNPVAIPKAITPLIITAKGRGSRQKCRMNKYGFPRTGPKKHKRVKGFQTGDIVKAIVTKGKKIGTYVGRVAVRATGSFDIGSGIEAVGSISYKYCQLLQRSDGYDYLK

SEQ ID NO: 11853 - protein, 415 aa, unidentified
MENEMAYCFVVDKNNRPLAPTKVNKGWYLVRKGRAKIKSRYPMVIQLEKEVEPDKYDESRVVVGIDDGSAHVGLAIVQKCPTKNKVVFKGTIEQRQDVKHLMDVRRGYRRYHRYHKRYRQARFNNRHSSKRSGRLAPSIKQKKDAVLRVLYQLNRWINIQEYYLEDVCMDIRAMTDGYKPYRWQYQKSSRLDENLRKAAIIRDGCKCQECGRSNCVLEVHHIKARKYGGADTIGNLITLCSGCHQKTEGREREFEDRYFKIIGSKPKRFDYAMHVMQGKNYLRERISELGPLHLTNGGETANKRIEWNIVKSHSNDAICITDCISDTCDVKEWIIKPMRRKSKAKTDNVLGIRHRDLVSYTYKNGEIHTGYVTALYPELLALNFQSKTKHCKKVNAQKCRLLWKFDKIYWLEQCV

SEQ ID NO: 11854 - protein, 406 aa, unidentified; identical to SEQ ID NO: 2752

SEQ ID NO: 11855 - protein, 456 aa, unidentified
MSTCVCVLSNSGERLMPTFRLGKVRRLLKDGKAKIVKHHPFTIQLLYDSKTNTQPIEICEDVGYNYIGISVKSESHEYVSAQYDTLQDEKACHDSCRKLRRTRRNRLRYRKPRFDNRKRSEGWLAPSLRHKKELNVNVVKMYCAVMPITHATIEVGSFDTMLVKAIREGKAIPEGADYQKGPRYNLATLREAVFYRDNYVCKVCGRKATEGAILHMHHMFYWKGRHGNSLNELLTVCEKCHTPANHQKSGKLYGFGENVKFADLSGAAFMNTVRWQIVNELYAAFGKDFVTVTYGAMTKEKRIALQLEKAHSNDAYAMGNCHPAHRCEFGHYQKRCRNNRVLEKFYDATYIDTRTGNKAKGKELFNGRISRNHKKDSENLHKYRSKKVSKGRRSIRRQRYAIQPYDTVRLESKTYITSGCHNKGTRLLIPANGKSKSVAISKVQVVCHAGAWIQII

SEQ ID NO: 11856 - protein, 430 aa, unidentified
  source 1..430: note = Cyanobacteria bacterium UBA11153
MSNFIFVLDTNYQQLNPIPPGQARRLLKQGQAAIYRHYPFTIILKHKVSNPKTQPHQLKIDPGSQVSGLAIIQDDKVIWGAQLTHRGEQIKHDLESRRAIRRHRRNRKTRYRQPRFFNRTRKPGWLPPSLESRIKNILTWVKRITRYVPITGISQELVKFDTQAMSNPEISGIEYQQGELAGYEIKEYLLSKWGRKCAYCGVENLPLEIEHIQPKSTGGSNRVSNLTLACSRCNQAKGSRDIRDFLSHKPQVLSGILKQAKQPLKDAAAVNATRWALFNRLKAIALPVETGTGGRTKYNRNRLELPKTHWLDAACVGVVSSLKILTSKPLLITAKGWGSRMMSTSNKYGFPIKHKTRCQTFFGFKTGDIVQATLPTGKFAGIHVGRLIVRASGVFELISAKGKVSPVRHKYCKTIHRKDGYMYALSTFVQ

SEQ ID NO: 11857 - protein, 464 aa, unidentified; identical to SEQ ID NO: 6330

SEQ ID NO: 11858 - protein, 414 aa, Parasutterella sp.
MPCSPAKARLLLKEKKAIVVRRTPFTIQLTIATGETKQPVSLGVDAGYKHVGLSASTENAELYASEVELRQDVSDLLSARRTLRQSRRNRNTRYRAPRFDNRIRTKRKGWLAPSVENRINAHLSRIETVIRLLPVTKITVETTSFDMQLLKNSDIAGKKYQEGEQLGFWNVREYVLFRDGHVCQHCHGRSKDPVLNVHHLESRRTGGDSPGNLITLCETCHKALHRGEITLKAKRGQSFRAETFMGIMRWEVLDRLKASHSKLEVQNTYGYRTKHARISNGIAKSHCADAFCIAGNLGAERLGEFFFQKQTRRNNRQIHKLSILKGGIRKRNQAPYEIKGFRLFDKVACQGEEGFIFGRRSSGYFDVRKLNGTHISAGISCKKLRLLEKRQTYLTEIRKEKALPPLPEGRGLRA

SEQ ID NO: 11859 - protein, 470 aa, unidentified; identical to SEQ ID NO: 5320

SEQ ID NO: 11860 - protein, 470 aa, unidentified
MSVFVVGLNGCRLMPVSERKARLLLKGGKASVYRKVPFTIKLNYKTGSTVQPGYLGIDTGSQHIGASVVQKDGTVLHKEEIGLRDSMSKRKLLESRASSRRGRRYRKTRYRHPKWKPKTKRIYNEKADRKGRHWKKQKNTFTSKRQAGWLPPSLQSKTDHHIQWIRKLLDLLPEGYRLSIELGRFDPARMKDPGIHGELYQKGPQYDYENVRAYVLARDGYTCRVCKKKGGKLHVHHILYRSRGASDDPKYMAAVCSNCHTTENHLPGGILYQWMQDQKKFTRGLRDATFMNILKKRLRKAFPDAVFTYGNITKADREKLELPKSHGNDATAIALVKTEVTSVKDEEPVIHIQQVRRKKRSLHEETPRKGRKEPNRTASRIDKNTKSVTVTKGSGEKKASMTACLFDRVELDGKKGWITGFTGTSCYVKDKEDSYICTSPKYKQVSISRLRILHHCGNWAIGAEKPLGKR

SEQ ID NO: 11861 - protein, 422 aa, unidentified
IVKHHPFTIQLLYDSKTNKQPIEICEDVGYNYIGISVKSESHEYVSAQYDTLQDEKEHHDDCRKMRRARRNRLRYRKPRFDNRKRSEGWLAPSLEHKKQLNISLVERYVSVIPITHATVEVGSFDTMLLQAIQKGETKPEGADYQEGPRYNLATLREAVFYRDNYTCQVCGRKITDGAILHMHHMFYWKGRHGYKLDELVTACEKCHTPANHQKGGKLFGFGEDKEFADLSGAAFMNAVRWQIVNALHTTYSKEFVTITYGAMTKEKRIALQLEKSHNNDAYAMGDFHPVHRCGFRHYQKRRRNNRVLEKFYDATYIDARTGNKAKGKELFNGRISRNHKKDSENLHKYRSEKVSKGRRSIRKRRYAIQPYDTVRLKGKTYITSGCHNKGTRLLIPVNGKSKSVTISKVQVVCHAGPWIQII

SEQ ID NO: 11862 - protein, 451 aa, unidentified; identical to SEQ ID NO: 9425

SEQ ID NO: 11863 - protein, 442 aa, unidentified; identical to SEQ ID NO: 4418

SEQ ID NO: 11864 - protein, 413 aa, unidentified; identical to SEQ ID NO: 3220

SEQ ID NO: 11865 - protein, 462 aa, unidentified
MSVLVIGRNGRALMPTNPRKARLLLKKKTASVVCRHPFTIQLLYKTGCATQEGCIGIDTGSQHIGVGITCGDRVILKDEHALRSSMEKRSLLATRAVMRRGRRYRKVRYRKPKWRHHTKRMYFEKANRRGQHWRKVKTTTQSPRLKGWLPPSLQSKCAHHFRIIDRYLKYLPDPITRNLVIEAGRFDMARMNDPTIHGEMYQRGPMYDAENLRAYIFARDNYQCACCKAKAGTTRKADGTTVKLVAHHILFRSRGATDNPKYIISVCDHCHTTKAHQPGGILYSWMENNKKVARGLRDATFMNILRKRLFARYPQAAFTYGNITAADRKQLRLPKSHANDAVAISLFGKEASTVKNICQTMHYKQIRKSKRSLHEAIPRKGRKNPNTKAVRNKKNTTQVNGFKLWDSVLADGKKLFICSFTGTSAYLIDKNGCYISQPGKTYKQWPLSKLKRLHPNGNWLMA

SEQ ID NO: 11866 - protein, 497 aa, unidentified
MVEGRPRVRVTAPRGVTGERLRLNLSYPVGVIPPHPQLNSPRIHRTFPSGRCSFSTSAASRSCLATPARARQLLGKGRARVHKLYPFTIRLTDRLAETSEIDGMAVKIDPGSKATGIAVTRTDENGDLHGLVAVEVRHRGGQISKKLTARGAYRRRRRSANLRYRAPRFNNRTKPKGWLAPSLQHRVDNVIAWVTRLRKLAPVTSIAMETVRFDTQLLQNPEVSGVEYQQGTLAEYELREYLLEKYHRACVYCDATGVPLNLDHLVPRAHGGSDRAANRVLACVACNQAKGASAVEQFVTDPNRLAKILADVKKPLRDAAGVNSTRNALLRGLEATGMPVEAGTGGRTKWNRHHFSVPKSHTLDGLCVGEVSGIAKVSRDVLIASSTGRGTYQRTLPDKFGFPRLHRSRIRQHHGFQTGDLVRATVPSGKKAGTHTGRVAVRATGSFNITTGEGTVQGVHHRHCRLLQRADGFSYQTGKETALLPALTDGVSAREER

SEQ ID NO: 11867 - protein, 414 aa, unidentified; identical to SEQ ID NO: 11675

SEQ ID NO: 11868 - protein, 436 aa, unidentified
VSSFFLAAILSKEHGIMQYVYVLNKHGEPLMPCSPGKARLLLKQQKACVVKRTPFTIKLLFGSAGYKQPITLGVDAGSKHVGLSASTEKRELYSEEFTPRSDVVELLSTRRQNRRSRRNRKTRYRVPRFDNRVHSKHKGWLAPSVEVKIQEHITVIKHICKILPISLVRVETAEFDTQRLKAMLAGKPLPVGTDYQHGEMYDEYNVRQYVLKRDHNTCQCCGTHNTAKKVVKLHVHHLESRKTGGNAPSNLVTLCTTCHKNLHKGRVTLDGKERGKPLRDAAFMGIMRKTLMVRLKEELPIPVQGTYGYITKMRREQNDIKKSHTNDARCISKHPLAEPCSVCYRTKAIRHHNRQTHKANFSKKGIRKRSQMPYLVEEFRLWDKVLYKGQECFVSGRRSSGSFALKKLDGTSISKGVTFKKLRLLEPATNYLIERM

SEQ ID NO: 11869 - protein, 493 aa, unidentified; identical to SEQ ID NO: 2644

SEQ ID NO: 11870 - protein, 442 aa, Anaerostipes sp.; identical to SEQ ID NO: 2903

SEQ ID NO: 11871 - protein, 424 aa, unidentified
MVTVQQSTHHLPFGRVFIRRNLFMVYVISQDGKPLMPCSDPIARLLLKQGKAKVKKREPFTIKLTYETTNYTQGLTLGVDTGSGTIGTAVSKDNGDIVYMSEVVVRNDITDKMTQRAKYRRNRRNRKTRYRKARWLNRASSIKKDRFSPTMQSKLHSHVREIEYIQSILPVTEMVFETGQFDMHLMKNPSLANPKVRPWGYQKGANYGFENTKAMVLNRDNYTCQCCKGKHKDSKLEVHHIVFRSQGGSDEESNLLTLCHTCHKDLHSGKINPKLSGKVKGNLKYATQMNSIRKQLFRCYPNAIETFGYVTKVNRLHLGVAKEHYYDACTIATQGNAFNVKSNLYKKKCVSDGDFQKTKGIHSEQPIVTDKICGFRKFDKVRYFGNDYFIKGRMSTGYAILMDIDGNKIDFSTMPRGYKTPKLS

SEQ ID NO: 11872 - protein, 422 aa, unidentified; identical to SEQ ID NO: 5333

SEQ ID NO: 11873 - protein, 420 aa, unidentified
MQYVYVLNKHGEPLMPCSTRKARLLLKQKKACVVKRTPFTIKLLYGSTGYKQPITLGVDAGSKHIGISAATEKYELYCEEATPRNDVVDLLSARRAFRRSRRNRKTRYRAPRFNNRVHSKHKGWLAPSVEVKIQEHITLIKRVCRILPVTFVRVETAEFDTQRLKAMLEGKPLPVGTDYQLGEMYDEYNVRQYVLKRDNYTCQCCGAHPTKTKAVKLHVHHIETRRTGGNAPNNLITLCTACHKALHAGKVTLDGKKRGRSLKDAAFMGVMRKTLMERLLKELKIPVQGTYGYITKYLREKHSIPKSHTNDARCISKNPLAIPCDTCYYTKAIRHHNRQLHKATILKGGIRKANQAPYTVKGYRLWDKVSYNGSECFITGRRTSGYFALKKLDGTVVSNSASYKKMRLLEVATNYITERR

SEQ ID NO: 11874 - protein, 418 aa, unidentified; identical to SEQ ID NO: 2710

SEQ ID NO: 11875 - protein, 512 aa, unidentified; identical to SEQ ID NO: 9077

SEQ ID NO: 11876 - protein, 415 aa, unidentified
MENKIEYCFVVDKNNRPLAPTKVNKGWYLIRKGRAKLKSKYPMVIQLEKEVEPDDEDESHMVCGIDDGSSHVGIAIVQKCPSKNKVVFKGTIKQRQDVKHLMDVRRGYRQYRRYHKRYRKPRFNNRASSKKTNRLAPSIKQKKDSILRVLYQLNKWINIKEYYLEDVAIDIRAMTDGYKPYNWQYQKNNRLDENLRKATILRDSCKCQECGKTNTVLEVHHIRAKRFGGANTIGNLITLCSSCHQKTEGKEREFEERYFTKIKSKPKRFDYAMHVMQGKNYLRENIKQLGILHLTTGGDTANKRIEWNIEKSHSNDAICITNCFPDTCNIKEWMIKPMRRKSKAKTDNVLGIKHRDLVEYTYRNGETHKGYVTALYPHLNALNFQSPTKHCKKVNVRKCRLLWKYNKIYWLDSVI

SEQ ID NO: 11877 - protein, 512 aa, unidentified; identical to SEQ ID NO: 5238

SEQ ID NO: 11878 - protein, 630 aa, Nocardiopsis sp.
MTRAPSSARSSLGGASSTFPMGTPASVRVPVPPLVPAPPSTTVIPVLSRYGWLVTPSETWFRGPSAKDNHLRPQPTSRGNAFPARRRGFRPPGRGPGVTSTSQHQGGDQLATFHTGEKTHQAVLPQRPALESASADIPRNGNETGRGSHVRGAPGVEHVRGETTGGSPTAGGVAPVPPGAGEQAREDRPPKTTPREGHPYVFVPDRHGTPLQPTHPARARRLLARGRAIAARHTPFVIRLKDRTTAESGVDGVETGIGPGSKRTGTAVFTDRRGERRGRCAIRPDHRGGQIAKRMRQRAAYRKGRRSRNLRYRTARFDNRTRPRGWPPPSLRHRVDTTLAWVGRPARWAPVLERVAFDVHALGAGRPAEGVEYRHGTLHGYEVREYLLAKWGRACAYCGATGTPLNVDHVRPRSRGGSDRVADLALACVPCNRAKADQPVEEFVTNPRALAGISAQTKAPLRDAAAVDATRWALWRSLDECPPTRVGSGGRTKWNRTRDHLPESHTLDALAVGRVETVTTAVSTVLVVGAAGRGPYARTRADRHGFPRLRLPRRKRFFGFQTGDLARAAVPSDMNAGTHTGRVAVRSSGSHTLQTSYGPIKTSWKNLCLLQRADGYGYTTQKEAGAPSTA

SEQ ID NO: 11879 - protein, 413 aa, unidentified; identical to SEQ ID NO: 4790

SEQ ID NO: 11880 - protein, 279 aa, unidentified
VVVETAEFDLQLLKAIADGKPVPQGEDYQKGEMYGHYNVRQYVLWRDNYTCQCCGAHATKKKEVRLHVHHLESRKVDGDAPDNQVTLCESCHEKLHKGLIAEKDFKKRKRRSTRDATFMGIMRKTLMQRLCSELPIPVVETRGYITKATREKLLVLPKSHTNDALAIAQGKRGFNVGYLPGILQIDKIYTIRPVRHHNRQLHKAAILKGGIRKSNQAGKYVFGYRLFDKVQFNGQDCFIWGRRTTGIFTIKTINGKMIKDGISFKKLKLVEKSTSYLIA

SEQ ID NO: 11881 - protein, 543 aa, unidentified
LTFVSIYVQRVYGRTRRFFQSAALHSGRQARGNIYPAGQTAGVLQKEVRTMAAVYVISASGKPLMPTTRCGHIRGLLNAGKARVVEREPFTIQLKYETPDVTQPLYLGIDPGRTNVGSAVVREDGECVFTAQLTTRNKDVPKLMKARKQFRMAHRRLKRRCKRQRRAKAAETLSQKGEFQRLLPGYEEPILCKGIRNKEARFNNRQRPAGWLTPTANHLLLTHLNMVKKLQKLLPITDVVLEVNRFAFMAMENPSIRRWQYQQGPLYGKGSVEDAVYAQQDGHCLFCGKPIAHYHHVVPQHKNGSETLENRVGLCNEHHDLVHKDRAWDAKMKETKAGLNKKYHALSVLNQIIPALTEQLTAMFPQHAFVTTGKDTADFREDYGIAKEHHLDAYCIACSVLAEPTKVAAPTGKPHRLMQFRRHDRQVCHKENIKRVYLSEGKAVATNRHKAIEQKDDSLEEFRKTHTQQEVSALTVKDHQPVYKDMRRFMPGGVFLFNGKVHTLQRSHGRYKGMPFYYIDTDGSKNHAKGCIFLQQNCGLRWV

SEQ ID NO: 11882 - protein, 518 aa, unidentified; identical to SEQ ID NO: 7282

SEQ ID NO: 11883 - protein, 448 aa, unidentified
ILKTCFAAFNLAKVVVLMDAWDIIVVLNKRGKPLMPCSPAKARHLLKEKKAIVVRRTPFTIQLTIATGESKQAVNLGVDAGYKHVGLSASTEKAELYASEVELRQDITDLLSARRGLRRARRNRKTRYRAPRLDNRIRTKRKGWLAPSVENRINAHLSRIETVLRLLPVTKITVETASFDLQLLKNPDISGKEYQEGEQLGFWNIREYVLCRDGHVCQHCYGRSKDPVLNVHHLESRRTGGDSPGNLITLCETCHKALHRSEITLKAKRGQSFRAEAFMGIMRWEVLNRLKASHSELEVHNTYGYRTKHARIANGIDKSHCADAFCIAGNLGAKRPGEFLFQKQTRRNNRQIHKLSILKHGLRKRNQAPFEIKGFCLFDKVVCKGEEGFIFGRRSSGYFDVRKLDGTRISAGISYKKLRLLEKRRTYLTEIRKEEALPPLPEGRGLRA

SEQ ID NO: 11884 - protein, 424 aa, unidentified
MRVFVFNMRGRPLMPCSQRKARLLLRENKAMIYKYHPFTIQLTYTTGETKQDCHIGIDTGSKYIGAAVRSEDKVFWKGEIELRQDIRSNLDTKRIYRRSRRNRKTRYRKPRFLNRKRRDEWLPPSLQSRINHTFHWIDTLSSLVPNPILHIEVGKFDVAKMINPEIHGVDYQHGQTYGFFDERYFVFARDNYTCQCCGKSKNKILNTHHIIYRSNGGTNRVDNLITVCTDCHTSQNHRKGGIFYQWQEQHKKVKQYKEPPFMNTLRKRIFVAYPDAEITYGSETTPKRKAMKLDKTHYNDVIVISGINEIKENPEEWLLIKQFRKKKRSLHEATARKGRKNPNRNQTRNSKNTPYYKGFYLNDKVSVFGKSGYITGFTSNAAYIKDENNDYITLPNKTYKQVSINKMKLECHNNNWQYIIKNAV

SEQ ID NO: 11885 - protein, 511 aa, unidentified
LVSGQLIMAWEAIQTRRIKPHDIGEGTLRRHAAGTVSFPVLCKNRKETLMSVLVIGRNGRALMPTNPRKARLLLKKKTASVVCRHPFTIQLLYKTGCATQEGCIGIDTGSQHIGVGITCGDRVILKDEHALRSSMEKRSLLATRTVMRRGRRYRKVRYRKPKWRHHTKRMYFEKANRRGQHWRKVKTTTQSPRLKGWLPPSLQSKCDHHFRIIDRYLKYLPDPITRNLVIEAGRFDMARMNDPTIHGEMYQRGPMYDAENLRAYIFARDNYQCACCKAKAGTTRKADGTTVKLVAHHILFRSRGATDNPKYIISVCDHCHTTKAHQPGGILYSWMENNKKVARGLRDATFMNILRKRLFARYPQAAFTYGNITAADRKQLRLPKSHANDAVAISLFGKEASTVKNICQTMHYKQIRKSKRSLHEAIPRKGRKNPNTKAVRNKKNTTQANGFKLWDSVLADGKKLFICSFTGTSAYLIDKNGCYISQPGKTYKQWPLSKLKRLHPNGNWLMA

SEQ ID NO: 11886 - protein, 450 aa, unidentified; identical to SEQ ID NO: 2935

SEQ ID NO: 11887 - protein, 288 aa, unidentified
LLFYRKEHGIMQYVYVLNKHGEPLMPCSPGKARLLLKQQKACVVRRTPFTIKLLYGSAGYKQPITLGVDAGSKHVGLSASTEKRELYSEEFTPRSDVVKLLSTRKQNRRSRRYRKTRYRAPRFDNRVHSKHKGWLAPSVEVKIQEHITVIKRICKILPISLVRVETAEFDTQRLKAMLAGKPLPVGTDYQLGEMYDEYNVRQYVLKRDHYTCQCCGAHNTAEKVVKLHVHHLESRKTGGNAPSNLVTLCTTCHKNLHKGKVTLDGKERGKPLRDAAFMGIMRKTLMAR

SEQ ID NO: 11888 - protein, 272 aa, unidentified
VVRRTPFTIQLTIATGESKQPVSLGVDAGYKHVGLSASTEKAELYASEVELRKDITDLLSARRALRRARRNRKTRYRAPRFNNRIRTKRKGWLAPSVENRINAHLSRIEAVLRLLPITKITVETASFDMQRLKNPDISGKEYQEGEQLGFWNVREYVLFRDGHVCRHCHGRSKDPVLNVHHLESRRTGSDSPDNLITLCETCHKALHRGEITLKAKRGQSFRAETFMGIMRREVLDRLKASHPKLEVQNTYGYWTKHARMLSASPAILAPKG

SEQ ID NO: 11889 - protein, 426 aa, unidentified
LAKDLYRSIDREETNLRVYVLNKRGEPLMPCSSAKARILLKEKKAVVKRRTPFTIQLTIATGETTQPVTLGVDAGYKHVGLSASTKKAELYASEIELRQDVSELLAGRSALRHARRSRKTRHRAPRFDNRKRDKGWLAPSVENRIGAHVSRVEAVLRILPVTKIIVETASFDVQRLKNPDIQGVEYQQGEQLGFWNVREYVLFRDGHECQHCHGKSKDKVLNVHHIESRRTGGDAPNNLITLCEACHKAFHRGEIELRVKRGRSFQAETFMGVMRWTFFERLRARHSEIEVRNTFGYLTKNTRITHGIEKTHCADAFCIAGNLKAKRLGYYFFQKQTRRHNRQIHKLTILKGGARKRHQTPYEIKGFRLYDKVLFQGKTAFIFGRRSSGYFDIRTLDGERISASVSYKKLRLLEKRRTYLIELRRN

SEQ ID NO: 11890 - protein, 416 aa, unidentified
MVYVLDKNGQPLMPTDRHRKVRLMLQSGQAKVIKRCPFTIQLNYDSGHQTQEISLGIDAGSKHIGVSATTKIKVLYEADVELRNDIVDLLSSRRELRRGRRNRKTRYRQAKFNNRRRGNGWLAPSIRQKIGTHLTVVENICKILPISRIMVETASFDIQKIKNPDIQGAEYQQGDQLEFWNVREYVLFRDGHTCQCCKGKSKDKILNVHHIESRKTGGNAPNNLITLCETCHTGYYKGTVQLPKAIKRGMRFKDAAFMGIMRWAFYEALKQQYEPVGTPVHNTYGYITKHTRIAYNLPKEHYVDARCISGNPEASSNGEYYYQKKVRCHNRQIHKLTVLKGGIRKQNQATYLVKGYRLFDKVSYQRKEYFVFGRRQSGFFDIRTLSGEKVNKGSLSCKKLKFIATRTYYLTERRAV

SEQ ID NO: 11891 - protein, 512 aa, unidentified
MSTVYVLNKDGKPLMPTTRGGHVRHLLKEQKARVVRTNPFTIQLLYETDNLVQPLYLGIDPGRTNIGVAVVKTDGTAVFTAHLETRNKEIPKLMQGRKKARRARRTNGRRCRRQRRAKANGTISKKCVKQATAQNGSVSKRANEIGVIKRHLPGCEKNVLCIGIKNKEAKFSNRTRPEGWLTPTANQLLQTHVNLVKKIQKFLPISDVVLEVNKFAFMRLDNPNVQKWQYQQGPLYQKASLEEAVSEMQEHHCLFCKNTIDHYHHVVPQHKNGSNTIGNIVGLCAKHHDLVHKDTSWQEKLAKKKTGLNKRYGALSVLNQIIPALTKELSSLFPKHFFATNGKSTYDYRAAHGVSKDHWLDAYCIAGSVLPNDACDNNINNRVPYELKQFRRHDRRALHKENMSRVYTLNGKSVATNRHKAIKQTTDSLEEFRQRQPNDVCKLKVKEHHPEYRNPKRNFPGCVFLVGKHTHVMQGTSGSHNGKADGYYDTNGNSYSSGKCKFVVKNEGIVFT

SEQ ID NO: 11892 - protein, 464 aa, unidentified; identical to SEQ ID NO: 6574

SEQ ID NO: 11893 - protein, 456 aa, unidentified
MSTCVCVLSNSGERLMPTFRLGRVRHLLKDGKAKIIKHHPFTIQLLYDSKTNTQPIEICEDVGYNYIGISVKSQSHEYVSAQYDTLQDEKACHDSCRKLRRTRRNRLRYRKPRFDNRKRGEGWLAPSLRHKKELNVNVVKMYCAVMPITHATVEVGSFDTMLLQAIQKGESKPEGVDYQKGPRYNLATLREAVFYRDNYTCQVCGRKIADGAILHMHHMFYWKGRHGYQLDELVTACEKCHMPANHQKGGKLFGFGEDKEFANLSGAAFMNAVRWQIVNALYATYGKEFVTITYGAMTKEKRIALQLEKTHSNDAYAMGNCHPAHCCEFRHYQKRCRNNRVLEKFYDATYIDTRTGNKAKGKELFNGRISRNHKKDSEDLHKYRSKKVSKGRRSIRRQRYAIQPYDTVRLEGKTYITSGCHNKGTRLLISANGKSKSVAISKVQVVCHAGAWIQII

SEQ ID NO: 11894 - protein, 453 aa, Lactobacillus sp.
MMSEVQKVDYIYVVDSNGTPLMPTSRLGMVRRWLKTGQARWFGNSRKIIQFVRPVTTNTQELTLGVDAGFHLGLSVVGNKREYYASESLRKSEKDRITSRRELRRTRRNRLRYRQARFDNRRRKESWLAPSVQHRLDFTIREIKRLYTFLPIAKLVVEVTPFDNQKLVNPNIKPWEYTQGKLHGFKTIKDYLLARDNYRDALDGKQYPANQLRIHHLVQRKDGGTNQPDNLVLLSDINHSQANHNNGILAKLRENRQKVLDYRGAYFMSILATRLGDYFDEYTTTQGYLTANLRQKYQLEKSHLNDAFIIAGGTDTTLRTNNVYSRQKLRNNNRVLQKFYDAKYIDNRDNKTKTGKELSSGRTRRSRELNYINLRQFRKTKIKKGRVSIRRKHYQLRPHDVVLNTKTNKIEIVKGVQNSGTVIKFQTGKTCSIKNVVSLYHVNGMLEKKIEAI

SEQ ID NO: 11895 - protein, 317 aa, unidentified
LAKRTTDSAVCETGASPAERAVDRDPARDIRKDVWCGRRKPHPALPEKKGGMLMAVAVVSRTGVPLMPTSPYRARKLLASGKAEKYGYDPFTIRLTERETGDTQPVELCMDTGYIHIGVSVKSEKHEYLALQIDTLTDEKKKHEKCREKRRNRRSRKRYRKPRFDNRKRDKGWLAPSLEHKKEIHVQAAERICRVIPVTDITMEMGNFDTQVLKAKEEGRPLPQGTDYQQGERYGTATLREAVFSRDNYTCLCCGRTMKDGAYFHVHHIRYRSQGGTDRMANLATVCEKCHTPANHQPGGKLYNWKPEIKSFKVRPL

SEQ ID NO: 11896 - protein, 424 aa, unidentified; identical to SEQ ID NO: 2430

SEQ ID NO: 11897 - protein, 408 aa, unidentified; identical to SEQ ID NO: 11651

SEQ ID NO: 11898 - protein, 512 aa, unidentified
MSTVYVLNKDGKPLMPTTRCGHVRHLLKEQKARVVTLKPFTIQLLYEADDVVQSLYLGIDPGRTNIGVAVVKADGTAVFTAHLETRNKEIPKLMKKRKESRRARRTNGRRCRRQRRAKANGTISKKCVKHDTAQNGSVSKRAKEIGVIKRHLPGCEKDVLCIGIKNKEAKFSNRTRPEGWLTPTANQLLQTHINLVKKIQKFLPISDVVLEINKFAFMRLDNPNVQKWQYQQGPLYQKANLEETVSEMQEHHCLFCKKKIDHYHHVVPQHKNGSNTIDNIIGLCTQHHDLVHKDATWQKRLAKKKTGLNKKYGALSVLNQIIPALTKELSSLFPKHFFVTNGKSTYDYRAAHGVSKDHWLDAYCIACSVLPNDTCDKTINSRVPYELKQFRRHDRRALNNENMSRVYTFNGKMVATNRHKATEQTTDSLEEFRQRQPNDVCNLKVKEHHPTYRNMNRNYPGSVFLVGNQVHVMQGIAGSKDGEATTYKDTNANSIAAGKCKFVAKNSGILFV

SEQ ID NO: 11899 - protein, 442 aa, Virgibacillus sp.; identical to SEQ ID NO: 6559

SEQ ID NO: 11900 - protein, 414 aa, unidentified
MPCSPAKARLLLKEKKAIVVRRTPFTIQLTIATGETKQPVSLGVDAGYKHVGLSASTEKAELYASEIELRQDITDLLSARRALRQSRRNRKTRYRAPRFDNRIRTKRKGWLAPSVENRINSHLSRIEAVLRLLPVTKITVETASFDLQLLKNPNISGKEYQEGEQLGFWNIREYVLCRDGHVCQHCYGRSKDPVLNVHHLESRRTGGDSPGNLITLCETCHKALHRGELTLKAKRGQSFRAEAFMGIMRWEVLNRLKASHPELEVNNTYGYRTKHARISNGIAKSHCADAFCVAGNLGAKRLGEFFFQKQTRRNNRQIHKLSVLKHGLRKRNQVPFEVNGFRLFDKVACKGEEGFIFGRRSSGFFDVRKLDGTRISAGISYKKLHLLEKRQTYITEIRKEEALPPLPEGRGLRA

SEQ ID NO: 11901 - protein, 453 aa, Cupriavidus sp.; identical to SEQ ID NO: 9578

SEQ ID NO: 11902 - protein, 465 aa, unidentified; identical to SEQ ID NO: 5888

SEQ ID NO: 11903 - protein, 415 aa, unidentified
MVYVVANDGQPLMPTERHGKVCRMLKSGMAKVVKKCPFTIQLQYESERNVQPVSLGVDAGSKHIGISATTKTKVLYESDVELRDDIVKLLATRRQLRLSRRSRKTRYRPVRFDNRKRKEGWLAPSIRQKIGSHLTVVANVCKILPINQIIVETASFDIQKIKDPEIQGIEYQQGEQMDFWNIREYVLFRDGHTCQCCKGRSKDKILNVHHIESRKTGGNAPNNLITLCETCHKGYHNGTVILPKNIKHGMQFKDAAFMGIMRWTFYNTLKEQYEPDIPVHYTYGYITKNTRINHNLPKGHCIDARCISGNPDAVSDGTYYYQKKVRCHNRQIHKQTILKGGIRKSNQAEYLVRGFRLFDKVRYQDREYFIFGRRKSGFFDIRTLSGEKVNKGSISVKKLTFVDTRKNYFIERRTV

SEQ ID NO: 11904 - protein, 472 aa, Cupriavidus sp.
MAVCVLDRQGRPLMPCSEKRARLLLARGRARVHRVVPFVIRIVDRRQADGHLQSLRVKLDPGSKVTGIALVRELPVADDGNGDSAPGAVVLSLIELVHRGRSISEALTARRMFRRRRRGANLRFRAPRFHNRVRAPRWLPPSLEHRVKTTLTWVARLRRWAPVTALSCELVRFDPQALEQPEIAGVEYQQGTLFGYELREYLLEKWSRRCAYCDRENLPLQIEHIQARAKGGTDRASNLTLACATCNQAKGALPIERFLARQPARLTKILAQTKRPLKDATAVNATRWALLNALKHTGLTVDVGSGGRTKFNRSRLGIPKTHALDAVCVGSLALVKAWRRPTLTITCTGRGSYKRTRLDRYGFPRGYLMRGKSVHGFRTGDAVRAKVPTGKKTGEYFGRVAVRASGRFNIQTSATLVQGIGHRHCCLVQRADGYGYQFQTTDSLTRERAGSGRAAHAALSLPGQTAEVSRAA

SEQ ID NO: 11905 - protein, 418 aa, unidentified
  source 1..418: note = Clostridia sp.
MVYVLNQNSQPLMPTERYGKVRRLLKEKKAVVVSKTPFTIRLTYISTEYVHGLTLGVDAGSKNIGISVSSEEKEYYSSEVILRSDIVNLLSTRRQNRKKRRNRLRYRKARFLNRVSSKNKGWLAPSIEHKIQTHLKVIEKTLKLLPVRRIVVETASFDIQKIKNPNISDAQYQQGAQLDFWNVREYVFFRDGHTCQHCKGKSKDKILNVHHIESRKIGGDSPNNLITLCETCHKAHHKGKITVKVKRGQRFRDAAFMGIMRWTFYNRLREKYEPLDVTNTYGYITKNTRISEGLEKTHAIDALCISGHPKANQLEHFYLQKKIRCHNRQIHKANILKGGKKKLNQAQYLVKGFRLFDKVHYKRQEGFITGRRTTGYFAIKDISGVKIHDSAKWKDLELLEAKKSYIIQTKGRRFLPPL

SEQ ID NO: 11906 - protein, 502 aa, unidentified
MYRLITEAGIPLIPERLHDTKKRKEASRMSEYIYVIGVDGDPQMPTKRKRHVEQLLQTGRARIFRQIPFTIQLTYENKPVLQPVTIAEDPGRSNIGMAVVSLSGELLSAAVVQTRNKEIVKLMEKRKQHRRASRNGERKARQRLAKKCHTMVKAGSLMRKLPMYGKDKRVRCNMIKNTEARFCNRKREDGWLTPSAEHLVRTHINLMHKMQKFLPITDVAIEINRFAFLSLEDPSISGVDFQNGPLKGYDDLNAAVEALQDGHCLMCNSPIEHRHHIVPRSMQGSNTIGNIAGLCCKCHERVHKDSAFEDSLKKKKAGLNKRYAAVSALNQAIPFICKRLEQEFGKEHVHYCSGRDTSMVRRSLGYHKTKEEQLHEVDAWCIAVLSLQQIPEKAPSFDHVHEILQFRRQDRSRIKAQTSRAYYHERKKIAKNRKKAEGQREDSLQEWRKRQVERYGKEQTRKMISQLEVKESIRRYNRLDRLMPGAVFYYQGVRYVMRGQHS

SEQ ID NO: 11907 - protein, 536 aa, unidentified; identical to SEQ ID NO: 4526

SEQ ID NO: 11908 - protein, 419 aa, Moorella sp.
MLACRQKVYVYVLNKHGKPLMPCSPRKARILLKEGKAKVIKVKPFTIQLLYGSSGYKQKVYAGRGRGLTQGIAAVREDGEVLFLGEVTGRRDISELIYLRASLRRSRRNRKTPYRPCRVDNRKREEGWLPPSVSHLWYEHLKVRSFVESILPIAAWAERISKFDTHKMVNPEVKGKGYQEGPLKDKKNYREYVLERDSYRCVLCGEPEGLEIHHIVWRFRGGSDRPKNLITLCKGCHAKVTKGEIEIKKVVESYRWPARLNALNPQFNALEGIKIPAYEVKEARLKMGLDKTRYSDALALIYAAFGIAPKADLPKVIKGRFVRSNNRQLHRANPTKGGVRPKANANRYLVNKNGVRFQKYDLVSYRTRKSEAITGYVNTLFSRGAVRIAEFSGEELYNGASVNRLHKLQNSDTLIWEVA

SEQ ID NO: 11909 - protein, 406 aa, unidentified; identical to SEQ ID NO: 11380

SEQ ID NO: 11910 - protein, 423 aa, unidentified
MLVYVLKQNGQPFMPTERFGKVRRLLKEGKAKVVRREPFTIRLLYEPETDIVQECYCGVDTGSKHIGVAVVGNDRVLYQSQTELRSDIKKKMNRKRASRRNRRNRKTRYRKPRFLNRRNSIREDKLPPSVQHKVQTHIDEIEFCKKILPVSDLILEVSQFDTALMKNPGLMNEKVKHWGYQKGFNYGYSSRREAILHRDNYTCQCCGKKNCRLEVHHIKFKSNGGTDDEENLITLCEDCHKGVHAGTIVLNKKPKKSKGLKHATHMSIIRSRLLREYPDAIETFGFVTSENRNHLKLKKDHYIDACVIAGGGLEFKELDVIFYKRRVSKGDYRLTRGIRGEQKLPTGKLCGFRKFDKVKYFGEKYFIKGRVSCGSVLLMDIFGNKVDFSSMPRGYKTPKMSNCERISARRSILCITKELENEE

SEQ ID NO: 11911 - protein, 442 aa, unidentified; identical to SEQ ID NO: 2903

SEQ ID NO: 11912 - protein, 406 aa, unidentified
VVYVQDIDGNPLMPTTRHGKVRRLLKAKKAIVINLCPFTIQLTYATSGYKQEVVLGVDAGTKHVGLSATTKSKELYASEVILRSDVIDLLSTRRELRMERRSRLRYRKPRFMNRVKTKKKGWIAPSVRQRIDSHIRVIKFVYSILPVSKLIIEVAQFDTQKIKNPEISGKEYQEGDQLGFWNVREYVLARDNHKCQHCKGKSKDPILNVHHIESRKTGGDSPSNLITLCKTCHKEFHKGNIKLKVKRSASLRDAAVMSIMKWRLYDKLKSLYPNVKMTFGYMTKHDRINHGIEKSHVSDAFVISRNFDSYRLGYYYKRKLVRRHNRQIHKMKILKGGIKKPNQAPFKVFGFRLFDKVRYQDNVYFVYGRRLRGSFSIRDINGENKKDISYKKLKYINHGLISVETG

SEQ ID NO: 11913 - protein, 430 aa, unidentified
MVYVLDISGNPLTPTKRHGKVRHLLETGKAVCVKRCPFTIRLTYQNAGPEPEGLSLGVDCGSKHIGLSVSSEEQEYYSSEVELRQDIPANLSTRREFRRARRHRKTRYRKPRFLNRIASKKKGWLAPSVRQKVESHLNRIDKAVKMLPIREIKVEVAAFDLQKLQADLKGLKRSKGEEYQQGPQLDFWNVREYVLFRDHHECQCCHGKSGDKVLNVHHLRSRKVGGDAPDNLITLCEYCHGQYHKGELELPESTKKPKPLRDAVFMGIMRWTLYSRLKEIYEPQGIKVKLTYGYITKHTRIENGLEEKSHRLDALCIAGHPKAKRCREWFLQKKVRCHNRQLHKATIQKGGVRKANQLPAVIKGFRLYDKVLFQNRECFIWGRRKTGYFTLKTLDGIMICDGVSSKKLTLLEKRKSYLTERRKQELCNSF

SEQ ID NO: 11914 - protein, 405 aa, unidentified; identical to SEQ ID NO: 7624

SEQ ID NO: 11915 - protein, 430 aa, unidentified
MQIQANYVFLLNHDRTFLNMVHPARARELLTKQKAAVYRSYPFAIVLKQQILNPTLKPYRLKIDPGSKWTGFAIQCGEDIVFGMELKHRGLQISADLKQRASVRGSRRSRNLRYRAKRFNRKQPTGWLAPSLRHRIQTVETWIKRFMRYSPITEIEIEQVRFDTQLMQNPEISGVQYQAGELAGYEVKQYLLEKWEQKCSYCGATDTPLEVEHIQAKSKGRSNRVSNLALSCVPCNQKKGNRDIQDFLSGKPDLLQRILAQAKQPLKDAAAVNSTRFAIVRMAKELCDTVKCWTGGRTKFNRTQQGLEKSHSIDAACVGKSGRSIQLRTTQPLIVTCFGHGTRQEIRVNKHGFPAVKNTRVRYKHVKTGDTVKFTLDTDRKNSRAGTYTARVKTPTAKGFEVLINQFRIGVSTIKNVKFIHRQDGYSYRF

SEQ ID NO: 11916 - protein, 416 aa, unidentified
MVYVLDKNGQPLMPTDRHRKVRLMLQSGQAKVIKRCPFTIQLNYDSGHQTQEISLGIDAGSKHIGVSTTTKIKVLYEADVELRNDIVDLLSSRRELRRGRRNRKTRYRQAKFNNRRRGNGWLAPSIRQKIGTHLTVVENICKILPISRIMVETASFDIQKIKNPDIQGAEYQQGDQLGFWNIREYVLFRDNHTCQCCKGKSKDKILNVHHIESRKTGGNAPNNLITLCETCHTGYHKGTVQLPKAIKRGMRFKDAAFMGIMRWAFYEALKQQYEPVGTPVHNTYGYITKHTRIAYNLPKEHYVDARCISGNPEASSNGEYYYQKKVRCHNRQIHKLTVLKGGIRKQNQATYLVKGYRLFDKVSYQGKGYFVFGRRQSGFFDIRTLSGEKVNKGSLSCKKLKFIATRTYYLTERRAV

SEQ ID NO: 11917 - protein, 470 aa, unidentified; identical to SEQ ID NO: 2825

SEQ ID NO: 11918 - protein, 431 aa, unidentified
MLVYVLKQNGQPFMPTARFGKIRRLLKAKKAKVVRREPFTIKLLYEPETDVVQECYCGVDTGSRHISVAVVSNDKVLYQSQTELRSDIKRKMDARRMHRRNRRSRKTRYRKPRFLNRGNSTKSDRLPPSVKHKVQAHIDEIEFCKKILPISNSNLIIEVSQFDTALMKDPSLISEKAKHWGYQQGFNYGYSSRREAILHRDNYTCQCCGKKNCRLEVHHVKFRSNGGTDDEENLITLCEDCHKGVHAGTVVLDKRPKKSKNLKYATHMSVIRSCLLKKYPDAIETFGFVTSENRNHLQLKKDHYIDACVIASGGLEFKKLDVIYKKRRVSVQDRVLTKGVRGEKKIPTGKVHGFKRYDRVKYLGEICFVKGRRIKDGFVLMDIDNNAIDFRDIGGRQNPSYKSIERLNTRRSILCITKKIEREERLIPILS

SEQ ID NO: 11919 - protein, 413 aa, unidentified; identical to SEQ ID NO: 2815

SEQ ID NO: 11920 - protein, 419 aa, Anoxybacillus sp.; identical to SEQ ID NO: 5328

SEQ ID NO: 11921 - protein, 408 aa, unidentified; identical to SEQ ID NO: 6795

SEQ ID NO: 11922 - protein, 427 aa, unidentified
MSTCACVFSKSGKRLMPTIRLGKVRHLLKDGKAKIIKHHPFTIQLLYDSETNIQPIEICEDVGYNYIGISVKSQSHEYVSVQYDTLQDEKDCHDSCRKMRRMYCKVVPITHVTVEVGSFDTMLVKAIQEGKAIPEGADYQKGPRYNLATLREAVFYRDNYTCQVCGREVQKDGAILHVHHMFYWKGRHGNSLSELLTVCEKCHTPANHQKGGKLYGFGEDIKFANLSGAAFMNTVRWQIVNELYAVFGKPFVTFTYGAMTKEKRIAFHLEKCHNNDAYAMGNFHPVDRCAFEHYKKVKRNNRILEKFHDSQYIDIRTGKVANGRSLFNGRINRSHKKNSENLHKYRGKRTRKGYRALRRKKVALNPGDLVSLNGEILVVHSTHAGKNGYVGVEFKAPSKSGKKSASLKKLKIVKTSNSMRSAWTKVS

SEQ ID NO: 11923 - protein, 473 aa, unidentified; identical to SEQ ID NO: 3510

SEQ ID NO: 11924 - protein, 453 aa, unidentified; identical to SEQ ID NO: 5967

SEQ ID NO: 11925 - protein, 423 aa, Moorena sp.; identical to SEQ ID NO: 2845

SEQ ID NO: 11926 - protein, 424 aa, unidentified; identical to SEQ ID NO: 3434

SEQ ID NO: 11927 - protein, 442 aa, unidentified; identical to SEQ ID NO: 2903

SEQ ID NO: 11928 - protein, 415 aa, Bacillus sp.; identical to SEQ ID NO: 2431

SEQ ID NO: 11929 - protein, 371 aa, unidentified
VRSSFVIKRHLPGCEKEVLCIGIKNKEAKFSNRVKPEGWLTPTANQLLQTHINLVKKIQKFLPISDVVLEVNKFAFMQLDNPNIQKWQYQQGPLYQKASLEEAVSEMQEHHCLFCKKPIDHYHHVVPQHKNGSNTIGNIVGLCAKHHDLVHKDATWQKKLAKKKTGLNKKYGALSVLNQIIPTLTKELSSLFLKHFFVTNGKSTYDYRAAHGVSKDHWLDAYCIACSVLPNDTCDKTINSRVPYEFKQFRRHDRRALNNENMSRVYTFNGKMVATNRHKATEQTTDSLEEFRQRQPNDVCNLKVKEHHPTYRNMNRNYPGSVFLIGKQVHVMQGIAGSKDGEATTYKDTNANSIAAGKCKFVAKNSGILFV

SEQ ID NO: 11930 - protein, 512 aa, unidentified; identical to SEQ ID NO: 2745

SEQ ID NO: 11931 - protein, 430 aa, unidentified; identical to SEQ ID NO: 5985

SEQ ID NO: 11932 - protein, 412 aa, unidentified
MENKIEYCFVVDKDNRPLAPTKVKKGWYLIRKNRAKLKSKYPMIIQLNKKINIDKNDKSYMVCGIDDGSLHVGLAIVQKCPTKNKVIFKGTIEQRQDVKHKMDTRRRYRRYHRYHKRYRPARFNNRSSSKRIGRLAPSIKQKKYAILRVLYQLNKWIYIKEYYLEDVCIDIRAMTDDYKPYKWQYQKSNRLDENLRKATIIRDNYKCQECGKFNCKLEVHHIRARKYHGADTIGNLITLCSKCHDRTKGKEKDFEDKYFKKINSKPKRFDYAMHVMQGKNYLRSKISELGLLHLTNGGETANKRIEWNIEKSHSNDAICITDSIPDSCNIKEWTVKPMRRKSKAKTNNVLGIKHRDLVSYTYKNGEIHTGYVTALYPEQLALNFQSKTKHCKKVNARKCRLLWKFNRIYWLK

SEQ ID NO: 11933 - protein, 431 aa, unidentified; identical to SEQ ID NO: 6055

SEQ ID NO: 11934 - protein, 544 aa, unidentified
MKQKKQKVMVYILNKKGKPLMPTTRCGHVRKLLDSKKAVVVSSNPFTIRLKYDTPNGVQDVFAGIDSGRENIGSGASNEDGDCLYLGELKTSNKSIKMKMTERAGFRKERRSHDRQNKQRKARKDHTEIQNGNADICRTTISCKSVQISYPAAEKSVTHKIIRGKEGKFANRHRDEGWITPSARQLVQMHMNDLKSMCRILPISHVTLERVAFDFQKLENENIKAWEYGKGKLYGYNSPEEYIHDVQGGKCLICGKPHIDYLHHIIPRSKGGSNKVSNLAGLCYDCHYGPMGVHNCQDTQDRLPELKNEANKQYKVSLLNSVMPVLIEEMDKFCKANSIIFSICGGHDTAKVRDMYDLQKDHCIDGFAISLAGRNVKSVDVMPDRIHQKQRYKKKSKNIIQKRNCREYYDGKKLAAVNRHKGTDQKADSLEEYMNTYAETHTADECKKHFESLTVKPARRTYTFHKEGRICPFHIGDKVRYEKKNKIKGNTKVETFICEGIRFPKDENKAKVEHNKTKSKKMKFCRVLEPGCTPYIDYRKLVLI

SEQ ID NO: 11935 - protein, 453 aa, Lactobacillus sp.; identical to SEQ ID NO: 4050

SEQ ID NO: 11936 - protein, 442 aa, unidentified; identical to SEQ ID NO: 3218

SEQ ID NO: 11937 - protein, 424 aa, unidentified; identical to SEQ ID NO: 9714

SEQ ID NO: 11938 - protein, 493 aa, unidentified; identical to SEQ ID NO: 3154

SEQ ID NO: 11939 - protein, 427 aa, Mastigocladus sp.; identical to SEQ ID NO: 3596

SEQ ID NO: 11940 - protein, 413 aa, unidentified
MTSYSFVLDANGKPLAPTKEQKAWFLIRKKRAALVSKYPMVIQLMKEIPENEICQDEIRCGIDDGGLHVGIALVQKCKTKNKVVFKGTMEQRNDVKHLMEVRRGYRRYHRYHKRYRQARFDNRKSSKREGRIAPSILQKRQATIRVIHWLNKWINITNYWLEDVSIDIRALTDGYKPYRWQYQKSNRLDENIRKAAILRDGGKCMECGKLNCRLEVHHIKPRRRNGSDTLDNLITLCESCHQKTEGQEELYMDRYFSLLKSSDNKNLNYAQHVMIGKMWLRKQLSGLGVLYLTSGGDTANKRIDWNIEKSHANDAVCITDLQPDTCDMKEWTMKPMRRQSKAKTDHVLGIHHRDLVEYTFKNGETHRGYVTALYPEQKAINFQSPTKHCKKVNARKCKLLWNYSKIYWFENAS

SEQ ID NO: 11941 - protein, 465 aa, unidentified; identical to SEQ ID NO: 3603

SEQ ID NO: 11942 - protein, 405 aa, unidentified
MDTGYIHIGISAKSERHEYLGMQIDTLTDEKLKRDDKRQYRRQRRNRKRYRAPRFDNRRRKEGWIAPSLEHKKEIHIDAIQRICKVMPITDITLEMGNFDTHVLKAVEEGKPLPQGSDYQHGERYGIATLREAVFLRDGYKCQCCEKSVKDGAILHVHHIKYRSQGGTNRMSNLITVCDKCHTPKNHKPGGKLWNWKPKLAEFKGASYMTSIRWTLYNEVTALLPNSSVHITYGAKTKESRRKLDIKKSHVNDAYVMGLFCPKHRTKPVYFKKKRRNNRVLEKFYDAKYIDSRDGKKQSGQELFNGRINRNHRKDSENLHLYRKQKVTKGKRSIRNKHYPIQPHDILLYQKKKYENAGCHNNGSRVILLPEKKSVALKQLTIYQYAGGYYRVPYESNKKEERTGS

SEQ ID NO: 11943 - protein, 492 aa, Selenomonas sp.
MYVVYVLNKDSSPLMPTKRFGHVRRMLKSGQAKAVSTKPFVIQLLYESTEYTQPLYGGTDPGRTNIGEAVINEKGEVVYEAHVISRNKKIPRLMAKRKAYRQASRRGERLRRKRRAKKCGTTTIFPEGRKLPGYQEGVLALKDIINTEAKFNNRKRPAGWLTPTARQCVQTNVNAVKQILKILPVKYWTLEYNRFAFQNMGDGSIQGIDYQNNKMNRFDNVNDYIDYLQEGRCILCGCNSIEHHHHVIPRHKGGSDGPENIVGLCDDCHTKVHTNKAELDCIGKRKKYVGASIVNIAMPHIFDGLKEIFDKNLYVCKGRNTAKLRSEYGISKEHCSDAVCVASLGGNIPLSNVNDSSAFTIIQFRNHDRAIIKTQYERKYKLDGVVIAKNRKPRFEQDKKIPALSDWYKNLCEEVGASKARALLSKLKVAKSIRGYNDTNRIMDGAIFLYKGKRYVLKAYKYRRKFLEAYGQEKLFLAKECVFVQRKSLVYV

SEQ ID NO: 11944 - protein, 515 aa, unidentified; identical to SEQ ID NO: 11372

SEQ ID NO: 11945 - protein, 442 aa, unidentified
MSVSVFVLDKRKKPLMPCRPARARKLLNAGRARVVKTYPFTIRLVDRLLENSAVQPVAVKVDPGSEQSGMAVVRDDGKAHHHALFFINLVHRGKVIRDRLTGRRAFRHRRRSANLRYRAPRFDNRKRPEGWLPPSLQHRVDTTMSWVKKLRKLVPVTALWVENVKFDTQKLQNPEVSGVEYQQGTLFGFEVREYLLEKFGRRCVYCGAENTPLNIDHVVPRAKGGSDRVSNLVLACTDCNQKKGAQPLEAFLKDKPQQFERIRRQLKAPLRDAAAVNATRWALFNALKQTGLPVATGTGAQTKFNRKAFGIPKGHWLDALCVGRINGADYPEGMGILQVRCTGRGSYQRTRLNKYGFPRGHLMRQKRVHGFATGDMVKAVVPSGKKAGIHQGRVAVRVTGSFAIQKADGKVDGIHWRHCRLISHNDGYGYAWLRPAPHSSLV

SEQ ID NO: 11946 - protein, 444 aa, Calothrix sp.
MTTNLIFVLDSDKKPLTMCTAGLARKLLDSQKAALFKWFPATIILKKSVAELPLPYLELRIDPGSKFTGIALVEIATETIVWAMELEHRGLSISENLTARSNVRRARRNRNTRYRKERSNRKKQPGWLPPSLQHRVDTTMTWIRRIIKLAPIKSIAVERVKFDMQKIENPEIEGIEYQQGTLHGYTLREALLEHWGRKCAYCDAVNVPLEIEHIRPKSKGGSDRFNNLTLSCRQCNQNKNNQSIEEFLKNDPIRLDHIKKYQKESLRDAACVNSTRNKLFESLTHFDIPVHTGSGAHTKMMRIKSNLPKTHFIDAGCVNASREVTLKTLQPLRVKCNGHGNRQFMTMDKHGFPRKDYAPKHVRKDWKAGDIIKVKKKDGTSVLGRVKKAAKTLAFISFEGKETSFSPKNTKPIHRSCGYRYSFTTIDSVNEVCPKDELLKKTAT

SEQ ID NO: 11947 - protein, 413 aa, Clostridium sp.; identical to SEQ ID NO: 4134

SEQ ID NO: 11948 - protein, 518 aa, Nocardiopsis sp.; identical to SEQ ID NO: 3757

SEQ ID NO: 11949 - protein, 456 aa, Nitrincola sp.
VIKSGESSMAVFVLDKRKKPLMPCSEKRARQLVERGRAVVHKMRPFSIRLKDRLAGESSFQPLHVKIDPGSKTTGLAVVREDEQKPENQSVLSLFELIHRGFQIKQALEQRRAFRRRRRSQLRYRPARFNNRTKPTGWLPPSLQHRVDTTVAWVKRLIKLAPISGIQKELVRFDTQMLENPEISGVEYQQGTLLGYEVREYLLEKWGRECAYCGEQNVPLEIEHIYPRSKGGSSRVSNLTLSCHACNQGKDNMPIEAFFEQDKGLKTRLKKNGKSSGKQLERVLKQCKKPLCDAAAVNVTRWCLFTRLKQTGLPVKTSTGGKTKFNRQRLGIPKTHALDAACVGPVDLIQNWKQPTLQIKASGRGSYQRTRLDRFGFPRGYLMRQKSVKGFQTGDLVKAEVPSGKKEGTHTGRIAIRKTGSFNIQTGSQIIQGINWKYCTLIQRGDGYGYHNISTN

SEQ ID NO: 11950 - protein, 419 aa, unidentified; identical to SEQ ID NO: 6355

SEQ ID NO: 11951 - protein, 518 aa, unidentified
MTPKKRKEASRMSEYIYVLGMDGDPQMPTKRKRHVEKLLQVGRARVFRQVPYTIQLTYKNQPVLQPVTIAEDPGRSNIGMAVVSLSGELLSAAVVQTRNKEIVKLMEKRKLHRRASRNGERKARQRLAKMCHTMLKAGFLMRKLPMYGKDKRVRCNVIKNTEAKFCNRKREDGWLTPSAEHLVRTHINLIHKMQKFLPITDVAIEINRFAFLSLEDQSISGVDFQKGPLKGYDDLNAAVEDLQDGHCLMCDSPIEHRHHIVPRSMQGSNTIGNIAGLCCKCHERVHKDARFEDRLKKKKAGLDKRYAAVSTLNQAIPFICKRLVQEFGKEHVHYCSGRDTAMVRRSFGYHKTKEEQLHVVDAWCIAVLSLRQIPEKAPEFDHVHEILQFRRQDRSRIKAQTSRAYYHEGKKIAKNRKKTEGQREDSLQEWRKRQVERYGEEQTRKMISQLKVKKSIRRYNRLDRLMPGAVFYYQGVRYVMRGQHSNGQYLQAVGMGDKDFPAKKCKIVANNEGLVFVS

SEQ ID NO: 11952 - protein, 428 aa, Enterococcus sp.; identical to SEQ ID NO: 4335

SEQ ID NO: 11953 - protein, 431 aa, unidentified
MVYVLDIDGQPLMPTTRHGKVRRLLNSHLAKVVKRCSFTIQLLYQSTKETQPVSLGVDAGSKHIGLAATTDKKVVYQEELVSRNDVVKLISARRILRRSRRNRKTRYRKARFNNRVHSKHKGWLAPSVEVKIQEHITTIKRICQILPISEIQVETAEFDLQRLKAMKEGKPLPVGTDYQLGEQYDFYNTRQYVLHRDGYTCQCCGTHDNNIKLHVHHIESRQTGGDAPNNLIILCEHCHKALHEGKLELPKGKKRGKSYRDATFMGVMRKTLLERLKKEIDVPVEGTYGYITKCWREKTGLEKSHINDAICISKHPYAKPLDTYYLTKAVRHHNRQIHKSNFSKGGIRKRNQAPYLVKGFRLFDKVLYQGKEYFIFGRRATGYFDIRTLDGTKVNKGSIKYKKLRIQDTAKAYLKEARAIPHVNKFTCVLA

SEQ ID NO: 11954 - protein, 431 aa, unidentified
MPNKVYVINKHGRPLMPCSPAKARHLLDEGKAKIKKRTPFTIQLVYGSSGYTQEVILGVDDGSKTIGISVSTKKEEVFAADVTPRNDVVNLLSACREFRRARRNRKTRYRKSRFDNRVRSKRKGWLAPSVEVKIQEHITAIKMVCRILPVSKVVIETAEFDLQLLKAIADGKSVPQGEDYQKGEMYGHYNVRQYVLWRDDYTCQCCGAHATKKKEVRLHVHHLESRKVGGNAPDNQVTLCESCHEKLHKGLITEKDFKKRKRRSTRDATFMGIMRKTLMQMLCSELPIPVVETRGYITKATREKLLVLPKSHTNDALAIAQGKQGFNVGYLPGILQIDKIYTIRPVRHHNRQLHKAAILKGGIRKSNQAGKYVFGYRLFDKVQFNEQDCFIWGRRTTGIFTIKTINGKMIKDGISFKKLKLAEKSTSYLIA

SEQ ID NO: 11955 - protein, 335 aa, unidentified
KQKITFASKRPQGWLPPSLQSKTDHHIQWIKKLQDLLPDGYRLSIELGRFDPARMKDTEIHGDLYQKGPQYDYENVRAYVLDRDRYTCQVCGKKGGKLHIHHILYRSHGATDNPQYMATICSDCHSTENHQPGGILYQWMQEQKKFTRGLRDATFMNILRKRLMKAFPKATFTYGNITKADREKLKIPKSHGNDATAIAIVKTGIMTVKDNEPVIYIQQVRRKKRSLHEETPRKGRKEPNRKASRYNKNTKAVTVTKRKNKKRISITGCLFDRVELNGKKGWISGFTDKSCYIKDENDQYIRISPKYKQVSLSKLKILHHCGNWVIGARRSLGKG

SEQ ID NO: 11956 - protein, 458 aa, Lactobacillus sp.; identical to SEQ ID NO: 4474

SEQ ID NO: 11957 - protein, 442 aa, unidentified; identical to SEQ ID NO: 2903

SEQ ID NO: 11958 - protein, 413 aa, unidentified
LKVFVLNMRGKPLMPCSPAKARHMLKAGKAFVVRRTPFTIKLTIATGETKQDVTLGVDAGARHVGISATTEKEEVFASEVALRQDITGLLADRLAFRRARRNRKTRYRAPRFNNRVRSKHKGWLAPSVENRIQAHISRIEAVCRLLPVTKIVIETASFDIQKIRNPEVEGTGYQQGDQLGFWNVREYVLFRDGHICQHCRGRSKDPILNVHHLESRKTGGDAPNNLITLCETCHKAYHAGKIKLKVKRGQSFRAEAFMGIMRWTLLNRMRKAHPSLPVENTYGYLTKHKRIALGLPKTHCADAFCIAGNLKALRRGDFLFQQQTRKHNRQIHKCSILKGGVRKLNQAPFLVKGFRLFDKVRIGGQIGFVFGRRVRGTFNIRRLDKTVIGTDINCKKLSLLETRKTFLTELRKE

SEQ ID NO: 11959 - protein, 416 aa, unidentified
MVYVLSQNGQPLMPTGNHAKVRVLLNQRKAKVIKRCPFTIQLQYESTTHTQKINLGIDAGSKTIGVSATTETKVLYESEVALRNDIVELISGRRALRSSRRNRKTRYRKPRFDNRKRPDGWLAPSVRQKIETHITVVENVMKILPVTKIIVETASFDIQKIKNPEIEGVGYQHGEQLDFWNVREYVLFRDGHTCQCCKGKSKDNILNVHHIESRKTGGNAPNNLITLCETCHKAYHKGIITLPKEIHRGVRFRDAAFMGIMRWAFYDRLKELYTPFGVTVVNTYGYITKNTRIEYGLPKEHYVDARCISGNPAAKPLDHYYFQKKVRCHNRQIHKNTILKGGYRKRNQVEYEVKGFRLYDQVLWKGQKCFIFGRRSTGRMDLRLLDGTHVNASVGYKNLKLLSMRKNYLIEQRKAG

SEQ ID NO: 11960 - protein, 451 aa, unidentified
VTTILKTCFAAFNLAKVVVLMDAWDIIVILNKRGKPLMPCSPAKARLLLKEKKAIVKRRTPFTIQLTIATGETKQPVSLGVDAGYKHVGLSASTEKAELYASEIELRQDITDLLSARRELRRARRNRKTRYRGPRFDNRIRTKRKGRLALSLENRINAHLSRIEAVLRLLPVTKITVETASFDTQLLKNPDISGKEYQEGEQLGFWNIREYVLCRDGHVCQHCYGRSKDPVLNVHHLESRRTGGNSPGNLITLCETCHKALHRGEITLKAKRGQSFRAETFMGIMRWEVLNRLKASHPELEVNNTYGYRTKHARIANDIAKSHCADAFCIAGNLGAERLGEFFFQKQTRRNNRQIHKLSILKGGIRKRNQAPFEVKGFRLFDKVACQGEEGFIFGRRSSGFFDVRKLDGTRISAGISCKKLHLLEKRRTYLTEIRKEEALPPLPEGRGLRA

SEQ ID NO: 11961 - protein, 237 aa, unidentified
MYDEYNVRQYVLKRDHYTCQCCGAHTTTKKTVKLHVHHLESRKVGGNAPSNLITLCTTCHDALHKGKVSLDGKERGKPLRDAAFMGIMRKTLMARLRDELSIPVQGTYGYITKMRREQNDIKKSHVNDARCISKHPLAEPCSVCYRTKAIRYHNRQTHKANFSKGSIRKRSQMPYVVEGYRLWDKVLYKGQECFVSGRRASGSFTLKKLDGTRISKGVTFKKLRLLEPATNYLIERM

SEQ ID NO: 11962 - protein, 558 aa, unidentified; identical to SEQ ID NO: 5272

SEQ ID NO: 11963 - protein, 415 aa, unidentified
MENRIEYCFVVDKNNRPLTPTKVNKGWYLVRKSRAKLKSKYPMVIQLEKEVKSDEDDESHIVCGIDDGSAHVGLAIVQKCPTKNKVVFKGTIEQRQDVKHLMDVRRGHRRYHRYHKRYRQARFNNRSSSKRTCRLAPSIKQKKDAILRVLYQLNKWVNIQEYHLEDVCIDIRALTDDYKPYRWQYQKSNRLDENLRKATILRDECRCQECGKSNCVLEVHHIRARKYGGADTIGNLITLCSGCHQKTEGRERDFEDRYFNMIKSKPKRFDYAMYVMQGKTYLREKISELGSLHLTNGGETANKRIEWNMEKSHGNDAICVTDCIPDNCDVKEWIIKPMRRKSKAKTNNLLGIRHRDLVSYTYKNGETHTGYVTALYPEQLVLNFQSKTKHCKKVNARKCRLLWKFNKIYWLEQCV

SEQ ID NO: 11964 - protein, 420 aa, unidentified; identical to SEQ ID NO: 6017

SEQ ID NO: 11965 - protein, 448 aa, unidentified
MSTGLRAVQAEPAGIRKGDALKVFVLNMRGRPLMPCSPARARHLLKAGKAVVRRRTPFTIQLRIATGETKQSVTLGVDAGAKHVGLSAATEKEEVFASEVELRQDITGLLAARLSLRRDRRHRKTRYRAPRFLNRVRSKHKGWLAPSVENRIQAHMSRIDAVCRLLPVTKIVIETASFDIQKIKDPSVEGTDYQQGDQLGFWNVREYVLFRDGHVCQHCHGRSKDKILNVHHLESRKTGGDAPNNLITLCETCHKAYHAGKIKLKVKRGQSFRAEAFMGIMRWTLLDRVRKAHPGLPVENTYGYLTKHTRITYGLPKTHCVDAYCIAGNLKAVRRGVYLHQRQMRKHNRQIHKFTVLSKRLEDGTKIGYRKLNQSPYLVHGFRLFDKVRCLGQIGFIFGRRSSGYFDVRRLDGVKLSPSISWRKLTLLEKRSTYLTELRKQDGASSPV

SEQ ID NO: 11966 - protein, 413 aa, unidentified; identical to SEQ ID NO: 3023

SEQ ID NO: 11967 - protein, 462 aa, unidentified
MSVLVIGRNGRALMPTNPRKARLLLKKKTASVVCRHPFTIQLLYKTGCATQEGCIGIDTGSQHIGVGITCGDRVILRDEHALRSSMEKRSLLATRAVMRRGRRYRKVRYRKPKWRHHTKRMYFEKANRRGRHWRKVKTTTQSPRPKGWLPPSLQSKCDHHFRIIDRYLKYLPDPITRNLVIEAGRFDMARMNDPTIHGEMYQRGPMYDAENLRAYIFARDNYQCACCKAKAGTTRKADGTTVKLVAHHILFRSRGATDNPKYIISVCDHCHTTKAHQPGGILYSWMENNKKVARGLRDAVFMNILRKRLFARYPQSAFTYGNITATDRKQLRLPKSHANDAVAISLFGKEASTVKNICQTMHYKQIRKSKRSLHEAIPRKGRKNPNTKAVRNKKNTTQVNGFKLWDSVLADGKKLFICSFTGTSAYLIDKNGCYISQPGKTYKQWPLSKLKRLHPNGNWLMA

SEQ ID NO: 11968 - protein, 421 aa, unidentified; identical to SEQ ID NO: 2846

SEQ ID NO: 11969 - protein, 447 aa, unidentified; identical to SEQ ID NO: 11178

SEQ ID NO: 11970 - protein, 560 aa, unidentified
TKRKGWLAPSVENRINAHLSRIEAVLRLLPVTKITVETASFDLQLLKNPDISGKEYQEGEQLGFWNIREYVLCRDGHVCQHCYGRSKDPVLNVHHLESRRTGGDSPGNLITLCETCHKALHRGEITLKAKRGQSFRAEAFMGIMHWEVHNRLRALHPGIEVSNTYGYRTKHARIANGIAKSHCADAFCIAGNLGAERLCEFFFQKQTRRNNRQIHTLSILKGGIRKRNQAPFEVKGFRLFDKVACQGEEGFIFGRRSSGFFDVRKLDGTRISAGISCKKLHLLEKRRTYLTEIRKEEALPPPCLKAGAPRLNVMNNIDFHGIEEIWSSLSTSSLLWLTVTLAAYLFAQKLYKWSNWNSLLNPVAVSIVTVVLLLMATHTPYQTYFSGAQFIHFLLGPTTVALAVPLYDLRIQLAKNWLPILLGLFAGAVTAITSTVLIAGLLGASPETIISLAPKSVTTPIAMSIAEKLGGLPALSASLVVLTGVLGSICAGPLFLLLKVDSSSAKGFALGLSAHGMGTSRAFQIDSTAGAYGSLAIGLTGLTTALLAPLLTPLLMKLFF

SEQ ID NO: 11971 - protein, 414 aa, unidentified
MVYVINKQGQALMPTERFGKVRRLLKNSLAHVVCRIPFTIQLDYDTTDYTQPVSLGIDAGSKHIGISATTSEKELYAADVELRNDIVDKLSTRRELRRTRRSRLRYRKARFNNRVSSKRKGWLAPSVENKIQTHLTVVEKIHKFLPITNIVVETASFDIQKINNPIISGVEYQQGEQLDFFNVREYVLFRDNHTCQHCKGKSKDKVLNAHHIESRKTGGDSPNNLITLCETCHKAYHRGEFELNVKRGKSFRDSAFMGIMRWSFYDRLKNIYPNVSMTFGYITKNTRITNNLPKDHYVDARCISGNPVAKPLGYYFYQKKVRCQNRQIHKANFLKGGRKKLNQAPFLVKGFRLFDLVEYQKDLYYIFGRRDSGFFDIRKLDGTKVNKGSINCKYLRLVDKRKSILTEKRMQVNL

SEQ ID NO: 11972 - protein, 393 aa, unidentified
MPCSPAKARLLLKEKKAIVVRRTPFTIQLTIATGESKQPVSLGVDAGYKHVGLSASTEKAELYASEVELRKDITDLLSARRALRQSRRNRKTRYRAPRFDNRIRTKRKGWLAPSVENRINAHLSRIEAVLRLLPITKITVETASFDMQRLKNPDISGKEYQEGEQLGFWNVREYVLFRDGHVCRHCHGRSKDPVLNVHHLESRRTGSDSPDNLITLCETCHKALHRGEITLKAKRGQSFRAQAFMGIMRREVLNRLKASYPELKVHETYGYLTKHARIANGIVKSHGADAFCIAGNLGAESSANSSSRSRLAETTGRFTNFPSSKGAFESAIRHPLRPKASVFLIRLPAREKKASFSAVDHPGTLMFESLMEPAFQPASAARSCVCWKRDEPI

SEQ ID NO: 11973 - protein, 415 aa, unidentified
MENKIEYCFVVDKDNQPLAPTKVNKGWYLIRKGRAILKSKYPMIIQLEKKINIDKNDKSYMICGIDDGSSYVGLAIIQKCPTKNKVVFKGTIEQRQDVKRLMDIRRGYRQYHRYHKRHRPARFNNRASSKRIGKLAPSIKQKKDAILRVLYQLNKWINIKEYYLEDVCIDIRAMTDDYKPYKWQYQKSNRLDENLRKAAIIRDKCKCQECGKTNCKLEVHHIRARKYNGSDTIGNLITLCSKCHQKTEGKEKDFEDKYFRIIKSKPKRFDYAMHVMQGKNYLRNKISELGLLHLTNGGETANKRIEWNIDKSHSNDAICITDSIPDSCNIKEWIIKPMRRKSKAKTNNVLGIKHRDLVSYTYKNGETHIGYVTALCPEQLALSFQSRTKHCKKVNAQKCKLLWNFNKIYWLKQYV

SEQ ID NO: 11974 - protein, 329 aa, unidentified
TQRAKYRRNRRNRKTRYRKARWLNRASSIKKDRFSPTMQSKLHSHVREIEYIQSILPVTEMVFETGQFDMQLMKNPSLANPKVRPWGYQKGANYGFENTKAMVLNRDNYTCQCCKGKHKDSKLEVHHIVFRSQGGSDEESNLLTLCHTCHKDLHSGKINPKLSGKLKGNLKYATQMNSIRKQLFRFYPNAIETFGYVTKANRLHLGVDKEHYYDACTIATQGNAFNVKSNLYKKKCVSDGDFQKTKGIRSEQPIVTDKICGFRKFDKVRYFGNDYFIKGRMSTGYAILMDIDGNKIDFSTMPRGYKTPKLSNCKRITARSTVMTQVKVV

SEQ ID NO: 11975 - protein, 408 aa, unidentified
MVYVQDINGKPMMPTTRHGKVRRLLKDKKAIVVNLCPFTIKLMYVTSDYKQEIVLGVDAGTRHVGLSATTKSKELYSSEVILRNDIVDLLSTRRELRRSRRNRLRYRKPRFDNRIKSKRPGWVAPSVKYKVDAHIRVIDNVCSILPISRIVIEVAQFDTQKINNPNISGKEYQEGDQLGFWNVREYVLARDGHKCQHCKGKSKDPVLNVHHIESRKTGGDSPSNLITLCETCHKEYHKGNIDLKIKRGSSLRDAAVMGIMKWRLYEELRSKYNRVSMTFGYVTKYNRIKHGIEKSHVFDAFVISKNFDAIRLGYYYKVRLVRRHNRQIHKQKIPKGGIKRPNQSPFEVFGFRLFDRVMFENSYYFIFARRKTGSFNIRDIDGKNQRDITYKKLKLSRCKRFMVQKEMD

SEQ ID NO: 11976 - protein, 383 aa, unidentified
MRVFVFNMRGRPLMPCSQRKARLLLRENKAKIYKYHPFTIQLTYTTGETKQDCHIGIDTGSKYIGAAVRSEDKVFWKGEIELRQDIRSNLDTKRIYRRSRRNRKTRYRKPRFLNRKRRDEWLPPSLQSRINHTFHWIDTLSSLVPNPILHIEVGKFDVAKMINPEIHGVDYQHGQTYGFFDERYFVFARDNYTCQCCGKSKNKILNTHHIIYRSNGGTNRVDNLITVCTDCHTSQNHRKGGIFYQWQEQHKKVKQYKEPPFMNTLRKRIFVAYPDAEITYGSETTPKRKAMKLDKTHYNDAIVISGINEIKENPEEWLLIKQFRKKKRSLHELPPVREEKSQTEIRRVTVRIRLIIKDFILTIRFQFLERVDILQDLRAMRHI

SEQ ID NO: 11977 - protein, 423 aa, Moorena sp.
MRVFVLNKNRQPLDPCRPARARILLSTGKAKVYRRYPFTIILTEEIKEPITHGSQIKIDPGAKTSGLAIVQGNRVVWGAELTHRGFQIRDALTSRRQLRRARRNRKTRYRKPRFLNRTRSKGWLAPSLMSRVKNILTWVEKLTRVCPVTGISQELVRFDTQKLQNPEISGIEYQQGTLYGYELREYLLEKWNRKCAYCGATGTQLEIEHIKPKSKGGSDRVSNLAIACHPCNQAKSNQDIELFLSNKPSVLKRVLSQARRPLADAASVNTTRWKLYHDLKSTGIPVEVGSGGLTKFNRCRQNLPKTHWLDAANVGKVETLIIEVTHPLLITAKGHGTRQLCRTNKYGFPVRHCSRTKIHKGFQTGDIVRAVVTKGKKIGTYVGRVATRKSGYFNISTKSGLVQGISHKYCQFIHRKDGYAYTN

SEQ ID NO: 11978 - protein, 413 aa, unidentified
MTSYSFVLDANGKQLAPTKEPKAWFLIRKKRAALVSKYPMVIQLKKKIQENEICKDEIRCGIDDGGLHVGIALVQKCKSKNKVVFKGTIEQRNDVKHLMEVRRNYRRYHRYHKRYRQARFDNRKSSKRKGRIAPSILQKRQATIRVINRLNKWINITNYWLEDVSIDIRVLTDGYKSYSWQYQKSNRLDENIRKATILRDGGKCMECGKSNCRLEVHHIKPRRRNGSNTLDNLITLCESCHQKTEGQEELYMDQYFSLLKSSDNKNLNYAQHVMIGKMWLRKQLSGLGVLYLTSGGDTANKRIDWNIEKSHTNDAVCITDLQPDTCDIKEWAIKPMRRQSKAKTDHVLGIHHRDLVEYTFKNGETHRGYVTALYPDQKAINFQSQTKHCKKVNARKCKLLWNYSKIYWFENAS

SEQ ID NO: 11979 - protein, 441 aa, unidentified; identical to SEQ ID NO: 4242

SEQ ID NO: 11980 - protein, 430 aa, unidentified
LETRNKEIPKLMQGRKKARRARRTNGRRCRRQRRAKANGTISKKCVKQTTAQNGSVSKRAKEIGVIKRHLPGCEKDVLCIGIKNKEAKFNNRTRPTGWLTPTANQLLQTHVNLVKKIQKFLPISDVVLEVNKFAFMQLDNPNIQKWQYQQGPLYRKANLEKAVSEMQEHHCLFCKKKIDHYHHVVPQHKNGSNTIDNIVGLCTEHHDLVHKETAWQEKLAKKKTGLNKKYGALSALNQIVPVLTKELGSLFLKHFYVTTGKSTYDYRAAHGVSKDHWLDAYCIACSVLANDVCDSNINSRVPYELKQFRRHDRRALNNENMSRVYTLNGKVVATNRHKATKQTTDSLEEFRQRQPNDVCNLKVKEHHPTYRNMNRNYPGSVFLVGNQVHVMQGIASSKDGEATTYKDTNANSIATGKCKFVAKNSGILFV

SEQ ID NO: 11981 - protein, 495 aa, Nonomuraea sp.
VEHVRGEITGSTPAAGGVTPDRQVREPGREADPAVFVLDKHGTPLQPTTPARARKLLATGRAVVARHTPFVIRLKDRTAAASQIGGVDIGIDPGSKHTGIAVFTTHAGERQGRYSVQLDHRGATIRKKLEQRAAYRRGRRTRNLRYRAPRFLNRTRPKGWLPPALRHRVDTTTSWVDRLARWAPVRAVHVERVAFDTHAISAGRPLEGAEYQHGTLHGTEIREYLLAKFGRACSYCATMGVPLNIDHIRPRSQGGSDRVSNLTLACIPCNQAKGSLPVEEFAPRRAADILKRAKAPLLDAAAVNATRWALWRALNARFPTRTASGGRTKWNRTRCGLPKTHTLDALAVGILDTVTVWPTTVLVVKATGRGTYARTRTDKHGFPRLRLPRTKQFFGYATGDLVRAFVPSGKNAGTHTGRVAVRSSGSFAVRTASGLYTARHTHFRLLQRADGYAYTRRPEGATPLPSGRGSTDGGPPSGESPTPALLRRSFVSSPG

SEQ ID NO: 11982 - protein, 493 aa, unidentified; identical to SEQ ID NO: 3154

SEQ ID NO: 11983 - protein, 447 aa, unidentified
VPAYRIKHITKKEAPYMVYVLDIDGQPLMPTSRHRKVRKLLNSHLAKVVKRCPFTIQLLYQSTKEIQPVSLGVDAGSRHIGLAATTEQKVVYQEELVPRNDVVKLLSARRTLRRTRRNRKTRYRKPRFNNRVHSKHKVWLAPSVEVKIQEHITAIKRICQILPISDIHVETAEFDLQRLKAMEEGRPLPVGTDYQLGEQYDFYNTRQYVLHRDEYTCQCCGTHDNNVKLHVHHIESRQTGGDAPNNLITLCEHCHKALHEGKLELPKGKKRGKSYRDATFMGVMRKTLLERLKKEIDVPVEGTYGYITKYWREKAGLEKSHIHDAICISKYPYAKPLDTYYLTKAVRHHNRQIHKSNFSKGGIRKRNQAPYLVKGFRLFDKVLYQGKEYFIFGRRATGYFDIRTLDGTKVNKGSISYKKLRIQDTAKAYLKEERAIPHMNKFTCVLA

SEQ ID NO: 11984 - protein, 425 aa, unidentified; identical to SEQ ID NO: 3270

SEQ ID NO: 11985 - protein, 428 aa, unidentified
LKVFVLNMRGQPLMPCSPAKARHLLKAGKAAVRRRTPFTIQLRIATGETKQNVTLGVDAGAKHVGLSATTEKEEVFASEVELRQDITGLLAARLSLRRDRRHRKTRYRAPRFLNRVRSKHKGWLAPSVENRIQAHMSRIDAICGLLPVTKIVIETASFDIQKIKHPDVEGTDYQQGDQLGFWNVREYVLFRDGHVCQHCHGHAKDKILNVHHLESRQTGGDAPNNLITLCETCHKACHAGKIKLKVKRGQSFRAEAFMGIMRWTLLDRVRKAHPGLPVENTYGYLTKHTRITHGLPKTHCVDAYCIAGNLKAVRRGVYLHQRQMRKHNRQIHKFTVLSKRLEDGTKIGYRKLNQSPYLVHGFRLFDKVRCLGQIGFIFGRRSSGYFDVRRLDGVKLSPSISWRKLTLLEKRSTYLTELRKQDGASSPV

SEQ ID NO: 11986 - protein, 406 aa, unidentified
MVYVQDIDGKPMMPTTRHGKVRRLLKSNKAVVVNLCPFTIRLTYISDSYKQEIVLGVDAGTKHVGLSATTKSKELYSSEVILRNDIVDLLSTRRELRKARRNRLRYRKPRFDNRVKSKRPGWIAPSVKYKVDAHIRVVENVCSILPISRIVIEVAQFDTQKIKNPEISGKEYQEGDQLEFWNTREYVLARDGHKCQYCKGKSKDSILNVHHIESRKTGGDSPSNLITLCETCHKEYHKGNIDLKIRRGKSLRDAAVMGIMKWRLYEELKSRYDRVFMTFGYITKHNRIKYGIEKSHTSDAFVISKNINAKRIERQYLKRLIRRHNRQIHKMKILKGGKKKNNQAPFEVFGFRLFDKVLYNNKIFFVYGRRKSGSFNIRDFNGENSKDVSRKKFKLIRGKRHPIILK

SEQ ID NO: 11987 - protein, 407 aa, Succinivibrio sp.
MVYVLNCEGVPIMPTTRHGMVRRLLKEHKAKVVKRCPFTIQLRYECANITQSITLGVDTGYENVGISACTEKKVLFEAKAKIRTDMVKLLSTRRETRRTRRSRKTRYRKARFFNRSIEKGWLPPSIRAKVESHLRLVAKVHEILPIDKIVVEIASFDIQKIKNPDIKSAEYQQGDQLGFKNMKAYVLCRDRCTCRCCKGKSKDKILRVHHLESRLIGGDAPNNLVTLCNSCHTKFHKGLISLDDIKRGKSFKAETFMGLMRNFFFKELCDKYPCVKCTYGYITKHLREKYHLKKDHHADARCICGTPQALPSDVYLMKKVRCHNRQTHKFTTLKGGRRKLNQAPYTVKGFRLFDKVKVGDQIGFIFGRRTSGQFDIRTVYGERINGSISYKRLQLIETRKSWLIEKC

SEQ ID NO: 11988 - protein, 427 aa, Anabaena sp.
MSKVFVIDTDKRPLDPIHSAQARQLLRNKKAAVFRRFPFTIILKESHSDSAVSPLRLKLDPGAKHTGIALINDVTGEVVFAAELKHRGFAIRESLTSRRQLRRSRRGRKTRYRQPRFLNRTRPEGWLAPSLQSRIENIKTWVKKLCNLARIEAISQELVRFDMQLMANPDIQGKEYQQGTLAGYETREYLLEKWDRQCGYCGVKDVPFQVEHIHPRAKGGSNSITNLTLSCEKCNTKKGTKDIKDFLKKDPLKLEKILKQAKRPLADAAAVNTTRFALLEVLKATGLPVETGSGGLTKFNRSKQKLKKTHWIDAACVGQSTPILNIKGVKPLLITANGHGTRQSCRTDKFGFPNRHCSRIKFHFGFQTGDIVKSVVKTGKKVGEYIGRIATRATGSFNISTRNGLVQGLNYKTCKTIHKKDGYGYSN

SEQ ID NO: 11989 - protein, 457 aa, unidentified; identical to SEQ ID NO: 5656

SEQ ID NO: 11990 - protein, 424 aa, unidentified; identical to SEQ ID NO: 7441

SEQ ID NO: 11991 - protein, 430 aa, unidentified
MPKVYVLNRHGRPLMPCTPAKARHLLDAGKAKVRHRTPFTIQLLYGSTGYTQEVILGVDAGSKTIGLSAATETEELFSAEVKPRNDVVELMSARRQFRRARRNRTTRYRKPRFDNRVQSKHKGWLAPSVEVKIQEHMTAIRRACAILPVSKVVVETAEFDLQLLKAVAEGKPVPQGEDYQKGEMYGHYNVRQYVLWRDSYTCRICGVHGSVRKGVPLHVHHLESRRVGGDAPDNLVTLCTACHDKLHKGIIMAADIKKRKRRSTRDATFMGIMRMTLLRRLREQLPVPVVETRGYITKATREKLLVLPKSHTNDALAIAHGPQGFRAEYLPNIRQADRLYTIRPVRHHNRQLHKATILKGGVRKANQAEKYICGFRLYDKVLYNGIECFVWGRRTSGSFLLRQLNGEKVKDSVSYKHLKLLERSQSYLVA

SEQ ID NO: 11992 - protein, 372 aa, unidentified
MPNKVYVINKHGRPLMPCSPAKARHLLDDGKAKVKKRTPFTIQLVYGSSGYTQEVILGVDAGSKTIGMSVSTTKEELLSAEVKPRNDVVDLQSTRREFRRARRNRKTRYRKPRFDNRVRSKRKGWLAPSVEVKIQEHITAIRRVCGILPVSKVVVETAEFDLQLLKAIEEGKPVPQGEDYQKGEMYGYYNVRQYVLWRDNYTCQCCGAHATKKKEVRLHVHHLESRKSGGDAPGNLVTLCDSCHEKLHKGLITEDDFKKRKRKSTRDATFMGIMRKTLIQRLRAELTIPVAETRGYITKATREKLLVLPKSHTNDAQAIAQGKQGFNVGYLPGILQIDKIYTIRPVRHHNRQLHKATILKGGIRKSNQAEKY

SEQ ID NO: 11993 - protein, 431 aa, unidentified
MPNKVYVINKHGRPLMPCSPAKARHLLDAGKAKVKKRTPFTIQLVYGSSGYTQEVILGVDAGSKTIGMSASTTKEELLSAEVKPRNDVVDLLSTRREFRRAQRNRKTRYRKPRFDNRVRSKHKGWLAPSVEVKIQEHITSIKRVCRILPVSKVVIETAEFDLQMLKAIADGKPVPQGEDYQQGEMYGHYNVRQYVLWRDGYTCQCCGAHATKKKEVRLHVHHLESRKTGGDAPRNLITLCDSCHKKHHDGLITEDDFKKRKRRSTRDATFMGIMRKTLIQRLRAELTIPVAETRGYITKATREKLLVLPKSHTNDALAIAQGKHGFNVGYLPGILQIDKIYTIRPVRHHNRQLHKATILKGGIRKSNQTEKYVFGYRLFDKVQFNGQDCFIWGRRTTGIFTIKTINGKMIKDGISFKKLKLVEKSTSYLIA

SEQ ID NO: 11994 - protein, 343 aa, unidentified
MSEVVVRNDITDKMTQRAKYRRNRRNRKTRYRKARWLNRASSIKKDRFSPTMQSKLHSHVREIEYIQSILPVTEMVFETGQFDMHLMKNPSLANPKVRPWGYQKGANYGFENTKAMVLNRDNYTCQCCKGKHKDSKLEVHHIVFRCQGGSDEESNLLTLCHTCHKDLHSGKINPKLSGKVKGNLKYATQMNSIRKQLFRFYPNAIETFGYVTKVNRLHLGVAKEHYYDACTIATQGNAFNVKSNLYKKKCVSDGDFQKTKGIRSEQPIVTDKICGFRKFDKVRYFGNDYFIKRRMSTGYAILMDIDGNKIDFSTMPRGYKTPKLSNCKRITARSTVMTQVKVV

SEQ ID NO: 11995 - protein, 431 aa, unidentified
MPNKVYVINKHGRPLMPCSPAKARHLLDAGKAKVKKRTPFTIQLVYGSSGYTQEVILGVDAGSKTIGMSASTTKEELLSAEVKPRNDVVDLLSTRREFRRVRRNRKTRYRKPRFDNRVRSKHKEWLAPSVEVKIQEHITSIKRVCRILPVSKVVIETAEFDLQLLKAIADGKSVPQGEDYQKGEMYGHYNVRQYVLWRDNYTCQCCGAHATKKKEVRLHVHHLESRKVGGDAPSNLITLCDSCHEKFHKGIITAANLKKRKRRSMRDATFMGIMRKTLIQRLRAELTIPVAETRGYITKTTREKLLVLPKSHTNDALAIALGKHGFNVGYLPEIAQIDKIYTIRPVRHHNRQLHKVTILKGGIRKSNQAEKYVFGYRLFDKVQFNGQDCFIWGRRTTGIFTIKTINGKMIKDGISFKKLKPVEKSTSYLIA

SEQ ID NO: 11996 - protein, 415 aa, unidentified; identical to SEQ ID NO: 3582

SEQ ID NO: 11997 - protein, 444 aa, unidentified; identical to SEQ ID NO: 3460

SEQ ID NO: 11998 - protein, 470 aa, unidentified; identical to SEQ ID NO: 2825

SEQ ID NO: 11999 - protein, 443 aa, unidentified
LTKDENRPSGRTTGLRAEQAEPAGIRKGDTLKVFVLNMRGKPLMPCSPAKARHMLKAGKAFVVRRTPFTIKLTIATGETKQDVTLGVDAGARHVGISATTEKEEVFASEVALRQDITGLLADRLAFRRARRNRKTRYRSPRFNNRVRSKHKGWLAPSVENRIQAHMSRIDAVCRLLPVTKIVIEAASFDVQKIRNLEVEGTGYQQGDQLGFWNVREYVLFRDGHICQHCRGRSKDPILNVHHLESRKTGGDAPNNLITLCETCHKAYHAGKIKLKVKRGQSFRAEAFMGIMRWTLLDRVRKTHPKLPVENTYGYLTKHKRIALGLPKTHCADAFCIAGNLKALRRGDFLFQQQTRKHNRQIHRCSILKGGVRKLNQAPFLVKGFRLFDKVRIGGQIGFVFGRRVRGTFNIRRLDKTVIGTDINCKKLSLLETRKTFLTELRKE

SEQ ID NO: 12000 - protein, 430 aa, unidentified; identical to SEQ ID NO: 3252

SEQ ID NO: 12001 - protein, 407 aa, Succinivibrio sp.
MVYVLNCKGVPIMPTSRHGMVRRLLREHKARIIRKCPFTIQLNYECANIIQPISLGVDTGYENVGISACTEKKVLFEAKAKIRTDMVKLLSTRRETRRTRRSKKTRYRKARFLNRGIAKSWLPPSIRAKVESHLRLVAKVHEILPIGKIIVEIASFDIQKIKNPEIKGAEYQQGDQLGFKNMKAYVLARDGYICRCCKGKSKDKVLRVHHLESRLIGGDAPNNLVTLCDSCHTKFHKVLISLDDIKRGKSFKAETFMGLMRNFFLKELCNKYPCVKCTYGYITKHLREKYHLKKDHHVDARCICGTPQALPSDVYLMKKVRCHNRQIHKFTTLKGGRRKLNKAPYTVKGFRLFDKVKVGEQVGFIFGRMSTGYLDIKNLQGDLLYKAISCKKVKFLGTRKSWLIEKC

SEQ ID NO: 12002 - protein, 490 aa, Anaerostipes sp.; identical to SEQ ID NO: 6170

SEQ ID NO: 12003 - protein, 472 aa, Cupriavidus sp.; identical to SEQ ID NO: 4091

SEQ ID NO: 12004 - protein, 460 aa, unidentified
MVAVVDLFGKPLMPTNEYRARKLLKQKKAKIFGYRPFTIQLTERKSAEIQPIELCMDTGYIHIGISAKSERHEYLGMQIDTLTDEKLKRDDKRQYRRQRRNRKRYRAPRFDNRSRKEGWIAPSLEHKKEIHIDAIQRICKVMPITDITLEMGNFDTHVLKAVEEGKPLPQGSDYQHGERYGIVTLREAVFLRDGYKCQCCEKSVKDGAILHVHHIKYRSQGGTNRMSNLITVCDKCHTPKNHKPGGKLWNWKPKLAEFKGASYMTSIRWMLYNEVTALLPNSSVHITYGAKTKESRRKLDIKKSHVNDAYVMGLFCPKHRTKPVYFKKKRRNNRVLEKFYDAKYIDSRDGKKQSGQELFNGRINRNHRKDSENLHLYRKQKVTKGKRSIRNKHYPIQPHDILLYQKKKYENAGCHNNGSRVILLPEKKSVALKQLKIYQYAGGYYRVPYESNKKEERTGS

SEQ ID NO: 12005 - protein, 411 aa, Moorena sp.
MRVFVLNSNRQPLDPCKPARARILLSTGKAKVYRRYPFTIILTEEIQEPITHGSQFKIDPGAKTSGLAIVQGNRIVWGAELTHRGFQIRDALTSRRQLRCARRNRKTRYRKPRFLNRSRPEGWLAPSLMSRVHNILTWVKKLTRLCPIAGISQELVRFDTQKLQNPEISGIEYQQGTLYGYELREYLLEKWNRKCAYCGTTGTQLEIEHIKPLSKGGSNRVSNLAIACHSCNQSKSAQEIEQFLSGKPDVLKRVLSQAKRPLTDAAAVNITRWKLYHELKSIGLPVEVGSGGLTKFNRCRQNLPKTHWLDAANVGKVDTLIIEDYQPLLIAAKGHGTRQICRTNKYGFPIRYCSRTKIHKGFQTGDIVRAVVTKGKKIGTYVGRVATRKSGYFNISTKSGLVQGISQCGSF

SEQ ID NO: 12006 - protein, 518 aa, unidentified; identical to SEQ ID NO: 6957

SEQ ID NO: 12007 - protein, 406 aa, unidentified; identical to SEQ ID NO: 2703

SEQ ID NO: 12008 - protein, 533 aa, Acrocarpospora sp.
LTTFHVSEQTHRQVLPQPAALESVGADNPEGGDETAHGLPALPGAGVEHGRGEIGADGTRLLRRHLKGASASEGAAREGHPVVFVLDKHGQPLDPCHPARARRLLASGRAVVHRHTPFVIRLKDRTAADSTVTGVRVGIDPGSKHTGLAVFTEHGGSRTGVYSLQLGHRGGQIRDKLASRAALRRGRRSRNLRYRAPRFLNRGKPEGRLSPSLLHRVNGTVSWVSRLTRWAPVTAICVERVAFDTHALSAGRPLEGVEYQQGTLAGYEVREYLLAKWGRRCAYCGTSSVPLNIDHIHPRSRGGSDRVSNLTLACITCNQAKNATPIEEFLKTKPALLAKILRQAKAPLRDAAAVNSTRWGLWRALETIGLPVATSSGGRTKWNRSRTGAPKSHTLDALHVGELENVTSWPSVVLAVKATGRGMYCRTRTDAYGFPRLRLPRTKTVRGFQTGDLVRANVPTGKKAGVHAGRVAVRATGSFNVATRHGTVQGIHHRHVRLLQRADGYGYATHSEARHSAASPPPPEGGGIHAGGN

SEQ ID NO: 12009 - protein, 427 aa, Scytonema sp.
MSKIFVLDTEKRPLDPIHPAQARQLLRNKKAAVFRRFPFTIILKESRSDSTISPLRLKIDPGAKHTGIALVNDSTGEVVFAAELKHRGFAIRDALISRRQLRRSRRARTTRYRQPRFLNRTRPDGWLAPSLQSRIDNIKTWVDKFRKFAAIEAISQELVRFDMQLMANPDIQGSYYQQGTLAGYETREYLLEKWDRQCAYCGVKDVTFQVEHIHPRAKGGSNSIANLTLSCEKCNTKKGTKDIKEFLKKDPTRLEKILKQAKRPLADAAAVNTTRFALLEVLKAIGLPVETGSGGLTKFNRSQQNLEKTHWMDAACVGESTPILNIKGCKPLLITANGHGTRQMCGTDKFGFPSRHRSNKQIHFCFQTGDIIKAVVTNGKKTGEYIGRVLCRATGSFDIATKAGRVSGISHKYCSTTHKKDGYSYAF

SEQ ID NO: 12010 - protein, 345 aa, unidentified
ETKFTNRTRPEGWLTPTANQLLQTHINLVRKMQKFLPISDVVLEVNKFAFMRLDNPNIQKWQYQQGPLYKKESLESAVSEIQEHHCLFCKKPIDHYHHVVPQHKNGSNTIGNIVGLCAKHHDLVHKDSAWEKKLAKKSTGLYKKYGALGVLNQIIPTLTNELSSLFPKHSFVTNGKSTYDYRAAHGVSKDHWLDAYCIACSVLPSNVCDSNINNHMPYVLKQFRRHDRRVLNNENMNRVYTLNNKAVAINRHKAKDQKTVSLEEFRKEHPDDVCKLKVKEHHPTYRNMNRNFPGSVFLVGKQIHVMQGIASSKDGKATKYNDTSATAIAAGKCKFVAKNTGILFV

SEQ ID NO: 12011 - protein, 434 aa, Escherichia sp.; identical to SEQ ID NO: 5780

SEQ ID NO: 12012 - protein, 584 aa, Erysipelotrichaceae sp.
MSRNADLRRAGVKPVYVVAKDHTPLMPTYRRGRVNHLLKEGKAVVINANPFTIRLKFDSKKFTQDLYAGIDTGRENIGSAVSNDDGENVYLADTRSNNRSIKKNMQERAGYRRERRRHDRQSKQRKAKHDDTELKNGDDDVCRSKHECKSVKISYPGAEKPVTHKVIKGKEGKFNNRKRSEGWITPSARQLIQITMAEVKQMCEIMPITHLSIERVCFDFHKMDDATVYGWKYQKGPLYGYKSYKDYIWDQQDGKCALCGKPIEEYHHIIPRSQKGSNQVKNIIGLCKHCHDSVHNDEETQKYLFKLKEGSYVQHEVSLLNSVMPALIDELSVFCAEHGIELIVTDGHTTNDTRDKYGLMKDHSSDAYAISLAGRTPAHVMYAPVIYQKRRFKKKSGGMIAKRNQREYQANEKTVAWNRHKAENQKKPSLEEYIAEYRKTHTAGEADAHFRSLTVKPAKRTYTYHKYGIVSPVHTGDIVRYTKHNKIKGNTKVNTVVATSIELSQAADEPHMYYSNDDKNYKMKFCHTIEGGCLHTVSTSETMKYLLETEAEYQKQKAKKKKSKTANKPVHEELVPQSQAFTFS

SEQ ID NO: 12013 - protein, 477 aa, Azohydromonas sp.; identical to SEQ ID NO: 2409

SEQ ID NO: 12014 - protein, 450 aa, unidentified; identical to SEQ ID NO: 2437

SEQ ID NO: 12015 - protein, 453 aa, unidentified; identical to SEQ ID NO: 10368

SEQ ID NO: 12016 - protein, 468 aa, Burkholderia sp.; identical to SEQ ID NO: 2405

SEQ ID NO: 12017 - protein, 430 aa, unidentified; identical to SEQ ID NO: 4504

SEQ ID NO: 12018 - protein, 531 aa, unidentified
MPMLWKLNRSRQDRISAGPELAVPGLQQKKRTMRYVYVLDMNGKPLMPTCRHGKVRRMLKSGQAKAVDTLPFTIQLLKPTKTRILQPVIAGQDPGRTNIGMAAVRSDGTELYRAHIETRNKEIVSLMNDRRSFRQASRRGERLARKRLAKKLHTTAKHLNGRILPGCKEPLAVKDIINTEARFNNRLRPEGWLTPTATQLLRTHLETFRKLSGILPVTEVVLEVNRFAFMQLDDPDMKKRDIDFCRGPLYGTGGVKAAVSLQQDGLCLLCREREIEHYHHIVPRSRRGSNTISNIAGLCGKCHERIHKDQAAAEKLQSKKDGLSKKYGGTSALNQIIPSLTEELGIRYPGHAHVTNGWSTKEFREKHELEKDHDVDAYCIAASILEDAQPVMQTEPYEIKQFRRHSRALINHQTERTYRYDGKIIAKNRKKRMDQKTDSLEDWVADMTKQYGQGTASRMLSKVTVQKSTRHYNTKGRMMPGAVFIYRGKRFVMTGQLTGGAYYRAYRRDKKNFPAKAVQVVQKNKGLVYVA

SEQ ID NO: 12019 - protein, 410 aa, Tissierella sp.
MVYILNQEGKPLMPTNRHGKVKHLLREGRAKVVKRTPFTIQLLYATTDCVQPIVLGVDAGSKVIGLSATTEKEELFASEVVLRNDIVELLSIRRQNRRTRRNRLRYRKARFLNRVKSKNKGWLAPSIQHKVDSHLKAIANVYKILPISKIIIETASFDIQKIKNPQISGVDYQQGEQEGFWNVREYALWRDGHECQHCHGKSKDKFLNVHHKESRKTGGDSPGNLVTLCETCHTLHHKGKIELNLTKNKSYRDATFMGIMRWQVYNKLKEIYPNISMTYGYITKNNRITNGIEKTHTADAFCIAGSFKAKRSSVVYFQTFKRRHNRQIHKANFLKGGKKKLNQSPYEVKGFRLFDKVLFQEKECFVFGRRATGYFDLRKLDGTVIHRSASVKNIKLLEKKSTLLIERQVA

SEQ ID NO: 12020 - protein, 410 aa, Bacillus sp.
MTHCFVLDAQGNKLSPTRENRAWYLIRKQKATLKSKFPMVIQLKKEISVEEIDTTPILLGIDDGSKFVGIALVQKCKTKNKPVFKGTIEQRTDVKEKIAIRRGYRRYRRQHKRYRPARYDNRSSSNREERIPPSIKQKKDSILRVINPLHKWIRIDGIFLEDVLIDIRALEKGYKPYKWEYQQSNRLDENIRKAVVLRDHNTCQDCGLANARMEVHHITPRRLNGSDSIHNLITLCSTCHQKVTGDELNHCERFYQKVNGRRIYYIDAMHVMQGKTYLQNELKKIAPLSITTGGDTANKRIDWGIEKTHANDAIVICHSKVRPEQCEINNWVIKPMRKHSNKKIESVNGFHHRDYVQYTKRNGESYLAYITALYPEKNQCNMTTIEGKVLKRYGLSRLTLLWRFNKIYWL

SEQ ID NO: 12021 - protein, 535 aa, unidentified
VLRPRYQYPTRWYPSREQGSGNGCLSGEENTDLEQEVSGTLSKGDHSHPGEQDFCVPAITIQGGPAMSVFVVGLNGCRLMPTSERKARLLLKHGKASVYRKVPFTIKLNYKTGSTTQSGYLGIDTGSQHIGVSVVREDGTVLHKEEIGLRDSMSKRKLMQSRASSRRGRRHRKTRYRHPKWRPKAKRVYCEIPDRKGRHWKKKEITFASKRAKGWLPPSLQSKTDHHIRWIKKLQDLLPEGYRLSIELGRFDPARLKDPEIHGELYQKGPQYDYENVRAYVLDRDRYTCQVCGKKGGKLHVHHILYRSHGATDDPQYMATVCSDCHNTENHQQGGILYQWMQKQKKFTRGLRDATFMNILQKRLIEAFPGATFTYENITKADRERLRLPKSHGNDATAIAIVKTGIMTVKDKEPVIYIQQVRRKKRSLHEETPRKGRKEPNRKASRYDKNTKAVTVTKRKNKKISITGCLFDRVELNGKKGWISGFTDKSCYVKDENDQYIRTSPKYKQVSLSKLKILHHCGNWVIGARRSLGKG

SEQ ID NO: 12022 - protein, 333 aa, unidentified
LLRQGRLIVKEVAYMSTVYVLNKDGKPLMPTTRCGHVRRLLKEQKAQVVTSKPFTIQLLYETDDVVQPLYLGIDPGRTNIGVAVVKTDGTAVFTAHLETRNKEIPKLMQGRKKARHARRTNGRRCRRQRRAKANGTISKKCVKQTTAQNGSVSKRAKKIGVIKRHLPGCEKEVLCIGIKNKEAKFSNRARPEGWLTPTANQLLQTHINLVKKIQKFLPISDVVLEINKFAFMRLDNPNVQKWQYQQGPLYQKASLEEAVSEMQEHHCLFCKKPIAHYHHVVPQSENGSDTIGNIVGLCTKHHDLVHKNTAWQKKLAKKKTGLNKRYGALSVLN

SEQ ID NO: 12023 - protein, 396 aa, unidentified; identical to SEQ ID NO: 4508

SEQ ID NO: 12024 - protein, 406 aa, unidentified
MPCSPGKARLLLKEKKARVVRRTPFTIKLLYGSAGYKQPITLGVDAGSKHVGLSASTKKRELYREEFTPRNDVVKLLSKRKQYRRSRRNRKTRYRAPRFNNRVHSKHKGWLAPSVEVKIQEHITVIKRICRILPISLVRVETAEFDTQRLKAMLEGKSLPVGTDYQLGEMYDEYSVRQYVLKRDNYTCQCCGAHTTKKKTVKLHVHHLEGRQVGGNAPNNLITLCVDCHKALHAGKVKLDGKKRGKSFKDAAFMGIMRKTLMARLRDELPIPVQGTYGYITKMRREQNDIKKSHVNDARCISKHPLAEPCSVCYRTKAIRHHNRQTHKANFSKGGTRQRSQMPYVVEGYRLWDKVLYKGQECFVSGRRASGSFTLKKLDGTRISKGVTFKKLRLLETATNYLIERM

SEQ ID NO: 12025 - protein, 544 aa, unidentified
MKQKKQKVMVYILNKKGKPLMPTTRCGHVRKLLDSKKAVVVSSNPFTIRLKYDTPNGVQDVFAGIDSGRENIGSGASNEDGDCLYLGELKTSNKSIKMKMTERAGFRKERRSHDRQNKQRKARKDHTEIQNGNADICRTTISCKSVQISYPAAEKSVTHKIIRGKEGKFANRHRDEGWITPSARQLVQMHMNDLKSMCRILPISHVTLERVAFDFQKLENENIKAWEYGKGKLYGYDSPEEYIHDVQGGKCLICGKPHIDYLHHIIPRSKGGSNKVNNLAGLCYDCHYGPMGVHNCQDTQDRLPELKNEANKQYKVSLLNSVMPVLIEEMDKFCKANSIIFSICGGHDTAKVRDMYDLQKDHCIDGFAISLAGRNVKSVDVMPDRIHQKQRYKKKSKNIIQKRNCREYYDGKKLAAVNRHKGTDQKADSLEEYMNTYAETHTADECKKHFESLTVKPARRTYTFHKEGRICPFHIGDKVRYEKKNKIKGNTKVETFICEGIRFPKDENKAKVEHNKTKSKKMKFCRVLEPGCTPYIDYRKLVLI

SEQ ID NO: 12026 - protein, 420 aa, Moorena sp.
MQNYVFVIDTNKQPLNPIPPKKARRLLDKGKAAVFRMYPFTIILKTAINNPVVTNCQLKIDPGSKVTGFALVQNNQVIWGMELEHRGGLIKKKLESRSAVRRGRRNRHTRYRKPRFLNRKRPEGWLPPSLEHRILTIKTWIKRLIKFCPVNEIWVERVKFDPQKMQVPEINGVEYQQGELAGYEVREYLLEKWGRECTYCGKQSVPLQIEHIHPKSKGGSDRVSNLCLACEKCNQRKGNKPIEEFLKKKPSLLEKIKTKAKQPLKDAAAVNATRNKLVKVLWNIKPLITGTGAQTKYNRIKLGFPKEHWVDAACVGDIEILELRTNQPLLVTCKGQGGRQKAALNKYGYPIRHNPLKPIKGWCSGDIAKNILTGEFGRVNPRSKSNSFNYTVPGKKAISLHVKNLTRVHKKDGYTYGFCR

SEQ ID NO: 12027 - protein, 431 aa, Klebsiella sp.; identical to SEQ ID NO: 2435

SEQ ID NO: 12028 - protein, 453 aa, unidentified
MSTCVCVLSNNGERLMPTFRLGRVRHLLKDGKAKIIKRHPFTIQLLYDSKTNTQPIEICEDVGYNYIGISVKSESHEYVSAQYDTLQDEKKHHDDCRKYRRTRRNRLRYRKPRFDNRKRSEGWLAPSLEHKKQLNIRLIERYVSVIPITRATVEVGSFDTMLLQAIQKGKSKPEGVDYQKGPRYNLATLREAVFYRDNYTCQVCGRKIADGAILHMHHMFYWKGRHGYQLDELVTACEKCHTPANHQKGGKLYGFGEDIKFANLSGAAFMNTVRWQIVNVLYAAFGKPFVTFTYGAMTKEKRIALHLEKSHNNDAYAMGSFHPVNRCAFEHYEKVKRNNRILEKFYDSQYIDTRTGELTNGKSLFNGRISRSHKKDSENLHKYRGKRICKGHRALRRKKLALNPGDLVSLNGEILVVHGTHTKKNGSVNVEFKTPSRGGKKSASLKKLKIVKT

SEQ ID NO: 12029 - protein, 394 aa, Desulfobacterium sp.
MPCKPSKAKRLLKEGKAKVINRMPFTIKLIFGSSGYKQPVIVGMDTGSKVIGCAAIANNQVVYQSEIQIRQDVSKKMQVRKNYRRTRRGRKTRYRPARWANRASMKKKGRLAPSIKSKVESHLREKVFVESLLPVTEWIVETASFDIHKINNPNVNGKSYQDGNQKGFYNIKAYILSRDNYKCQSRQKVEHSKKLNVHHIVFRSKGGTNTPDNLITLCENCHKNLHAGKFKLKTGKSRTKHAAELGIVKSQLKNYWDFKETFGYETKYFREQILKLDKTHYLDAVAICGQADVKLLDKIFHKKHIPSGDYQLTKGKRSEKKIPTGKLFGLRKFDLIRTSKAVGFIKGKRSSGYFALMDIFNNTLTASVNVKKDCQRLTARTTTIIQEMAIPPLP

SEQ ID NO: 12030 - protein, 454 aa, unidentified; identical to SEQ ID NO: 8652

SEQ ID NO: 12031 - protein, 423 aa, unidentified; identical to SEQ ID NO: 3951

SEQ ID NO: 12032 - protein, 417 aa, unidentified
MPCSPAKARLLLEEKKAIVKRRTPFTIQLTIATGEAKQPVALGVDSGYKHIGLSATTEKAELYASEVELRQDITDLLSARLALRRSRRSRKTRYRAPRFDNRVASKREGWLAPSVENRIAAHMSRVEAVMQVLPVTAITVETAAFDTQLLKNPDITGAAYQQGEQLGFWNVREYVLFRDGHVCQHCRGKSKDPILNVHHIESRRTGGDAPNNLITLCETCHKAFHRGEIKLKVRRGKSFKAETFMGIMRRTLFERLKKAHPELNVRNTYGYLTKHKRISYGIAKSHCADAYCIADNLGAKRLEGFFFQKQTRKHNRQIHKLLILKGGLKKKNQAPYEVKGFRLFDKVICKGEEAFIFGRRTSGSFDVRRLDGTRISAGINYKKLRLLEPRTTYLTEFRKEAALPPLHECRGFRTEFL

SEQ ID NO: 12033 - protein, 413 aa, unidentified; identical to SEQ ID NO: 2636

SEQ ID NO: 12034 - protein, 428 aa, Enterococcus sp.; identical to SEQ ID NO: 4335

SEQ ID NO: 12035 - protein, 443 aa, Anoxybacillus sp.; identical to SEQ ID NO: 10273

SEQ ID NO: 12036 - protein, 425 aa, unidentified; identical to SEQ ID NO: 7553

SEQ ID NO: 12037 - protein, 419 aa, unidentified; identical to SEQ ID NO: 10960

SEQ ID NO: 12038 - protein, 396 aa, unidentified
VVRRTPFTIQLTIATGESKQPVSLGVDAGYKHVGLSASTEKAELYASEVELRKDITDLLSARRALRQSRRNRKTRYRAPRFDNRIRTKRKGWLAPSVENRINAHLSRIEAVLRLLPITKITVETASFDMQRLKNPDISGKEYQEGEQLGFWNVREYVLFRDGHVCRHCHGRSKDPVLNVHHLESRRTGGDSPGNLITLCETCHKALHRSEITLKTKRGQSFRAEAYMGLMRWEVLNRLKTSHPGLEVHNTYGYRTKYTRIVNGIDKSHCADAFCIAGNLGAERLGEFFFQKQTRRNNRQIHKLSILKGGIRKRNQAPFEAKGFRLFDKVACQGEEGFIFGRRSSGSFDVRKLDGTRISAGISCKKLRLLEKRRTYLTEIRKEEALPPLPEGRGLRA

SEQ ID NO: 12039 - protein, 413 aa, unidentified
MTGYAFVLDAAGKTLSPTKEQKAWFFVRKKRAKLISKYPLVIQLCRIISDDEICTDEIRCGIDDGGLHVGIAVVQRCKKKNKVLFKGTIEQRDDVKHLLCIRRGYRRHRRYQKRYRQVRFNNRIASTRKGRIAPSILQKRQATMRVIYRLQKWIKITSYWLEDVEIDIRALTDGCKLYKWQYQQSNRLDENIRKAVILRDGCKCVECGKEGSGLEVHHIKPKRLNGSNTLGNLVTLCGKCHQKTEGHELEFMDHYFAILKSSDNKYLNYATHVMIGKKWLRAKLSWLGMLHLTSGGDTANKRIDWGINKSHANDAVCITDLKPDVYDMKDWIIKPMRRQSKAKTDNVLGIRHRDLVEYTYRNGEIHQGYVTALYPELKALNFQSATKHCKKVNAYKCKLLWKFSKIYWLDNAG

SEQ ID NO: 12040 - protein, 424 aa, unidentified; identical to SEQ ID NO: 10503

SEQ ID NO: 12041 - protein, 460 aa, unidentified
MVAVVDLFGKPLMPTNEYRARKLLKQKKAKIFGYRPFTIQLTERKSAEIQPIELCMDTGYIHIGISAKSERHEYLGMQIDTLTDEKLKRDDKRQYRRQRRNRKRYRAPRFDNRRRKEGWIAPSLEHKKEIHIDAIQRICKVMPITDITLEIGNFDTHVLKAVEEGKPLPQGSDYQHGERYGIATLREAVFLRDGYKCQCCEKSVKDGAILHVHHIKYRSQGGTNRMSNLITVCDKCHTQKNHKPGGKLWNWKPKLAEFKGASYMTSIRWTLYNEVTALLPNSSVHITYGAKTKESRRKLDIKKSHVNDAYVMGLFCPNHRTKPVYFKKKRRNNRVLEKFYDAKYIDSRDGKKQSGQELFNGRINRNHRKDSENLHLYRKQKVTKGKRSIRNKHYPIQPHDILLYQKKKYENAGCHNNGSRVILLPEKKSVALKQLTIYQYAGGYYRVPYESNKKEERTGS

SEQ ID NO: 12042 - protein, 442 aa, unidentified; identical to SEQ ID NO: 3791

SEQ ID NO: 12043 - protein, 424 aa, unidentified
MRVFVFNMRGRPLMPCSQRKARLLLRENKAKIYKYHPFTIQLTYTTGETKQDCHIGIDTGSKYIGAAVRSEDKVFWKGEIELRQDIRSNLDTKRIYRRSRRNRKTRYRKPRFLNRKRRDEWLPPSLQSRINHTFHWIDTLSSLVPNPILHIEVGKFDVAKMINPEIHGVDYQHGQTYGFFDERYFVFARDNYTCQCCGKSKNKILNTHHIIYRSNGGTNRVDNLITVCTDCHTSQNHRKGGIFYQWQEQHKKVKQYKEPPFMNTLRKRIFVAYPDAEITYGSETTPKRKAMKLDKTHYNDAIVISCINEIKENPEEWLLIKQFRKKKRSLHEATARKGRKKPNRNQTRNSKNTPYYKGFYLNDKVSVFGKSGYITGFTSNAAYIKDENNDYITLPNKTYKQVSINKMKLECHNNNWQYIIKNAV

SEQ ID NO: 12044 - protein, 351 aa, unidentified
DNRKRSEGWLAPSLKHKKELNVNVVKMYCAVMPITHATVEVGSFDTMLVKAIQEGKAIPEGADYQKGPRYNLATLREAVFYRDNYVCKVCGRKATEGAILHMHHMFYWKGRHGNSLDELLTVCEKCHTPANHQKSGKLYGFGEKIKFADLSGAAFMNTVRWQIVNELYTAFGKPFVTITYGAMTKEKRIALRLEKTHNNDAYAMGEFHPNFRCTFEHYEKVRRNNRILEKFYDSQYIDIRTGEIATGKELFNGRINRNLKKNSESLHKYRGKRTYAGHRALLRKKVNLNPGDLVSFNGEVLIVHGTHTDKKGAINVEFKTPAKNGRKSASLKKLKIVKAAGSIHPAWEKVS

SEQ ID NO: 12045 - protein, 495 aa, unidentified
MAVVYVLSASGKPLMPTTRCGHVRVLLKEGKARVVERIPFTIQLTYQSEEETQPLYLGIDPGRTNIGAAVIREDGECVFTAQLTTRNKDVPKLMKARKLFRMAHRHLKRRCKRQRRAKTNGTTSQKEAFQRLLPGCEEPITCKGIRNKEARFNNRKRPVGWLTPTANHLLLTHINLVKKLQKLLPVTDVVLEVNQFAFMAMDNSNIQRWQYQKGPLFGQGSVEEAVYAAQDGHCLFCKKGIDHYHHVIPRRKNGSETLENRVGLCEEHHRLVHTEASWEKKLAAKKAGMNKKYHALSVLNQIIPQLTEQLTELFPQHAFVTTGQDTYSFREDHSIPKDHYLDAYCIACSVLPDTSGVAIPKVAPYDIRQFRRHDRQACHKANIERKYIDADGNVVASNRNKAIEQKTDSLVEYRVSHSEAEVSQLTVKPHLPQYKDMGRPMPGSLALHNGNVFVLISSDGRHNGFVDYYIDEHGEKHGARKCNILTNNSGLQFCG

SEQ ID NO: 12046 - protein, 465 aa, unidentified; identical to SEQ ID NO: 5914

SEQ ID NO: 12047 - protein, 430 aa, unidentified; identical to SEQ ID NO: 6405

SEQ ID NO: 12048 - protein, 465 aa, unidentified; identical to SEQ ID NO: 3856

SEQ ID NO: 12049 - protein, 418 aa, Bacteroides sp.; identical to SEQ ID NO: 2425

SEQ ID NO: 12050 - protein, 512 aa, unidentified; identical to SEQ ID NO: 3680

SEQ ID NO: 12051 - protein, 493 aa, unidentified
MAAVYVISASGKPLMPTTRCGHIRGLLNAGKARVVEREPFTIQLKYETPDVTQPLYLGIDPGRTNVGSAVVREDGECVFTAQLTTRNKDVPKLMKARKQFRMAHRRLKRRCKRQRRAKAAETLSQKGEFQRLLPGYEEPILCKGIRNKEARFNNRQRPAGWLTPTANHLLLTHLNMVKKLQKLLPITDVVLEVNRFAFMAMENPSIRRWQYQQGPLYGKGSVEDAVYAQQDGHCLFCGKPIAHYHHVVPQHKNGSETLENRVGLCNEHHDLVHKDRAWDAKMKETKAGLNKKYHALSVLNQIIPALTEQLTAMFPQHAFVTTGKDTADFREDYGIAKEHHLDAYCIACSVLAEPTKVAAPTGKPHRLMQFRRHDRQVCHKENIKRVYLSEGKAVATNRHKAIEQKDDSLEKFRKTHTQQEVSALTVKDHQPVYKDMRRFMPGGVFLFNGKVHTLQRSHGRYKGMPFYYIDTDGSKNHAKGCIFLQQNCGLRWV

SEQ ID NO: 12052 - protein, 420 aa, unidentified; identical to SEQ ID NO: 3685

SEQ ID NO: 12053 - protein, 427 aa, Nostoc sp.; identical to SEQ ID NO: 7770

SEQ ID NO: 12054 - protein, 430 aa, unidentified
MPKVYVLNRHGRPLMPCTPAKARHLLDAGKAKVRHRTPFTIQLLYGSTGYAQEVILGVDAGSKTIGLSASTETEELFSAEVKPRNDVVELMSARRQFRRARRNRATRYRKPRFDNRVRSKHKGWLAPSVEVKIQEHMTAIRRACAILPVSKVVVETAEFDLQLLKAVAEGKPVPQGEDYQKGEMYGHYNVRQYVLWRDSYTCQCCGAHATQKKEVRLHVHHLESRKVGGDAPDNLVTLCTACHDKLHKGIIMAADIKKRKRRSTRDATFMGIMRMTLLRRLREQLPVPVVETRGYITKATRENLLVLPKSHTNDALAIAHGPQGFRAEYLPNIRQADRLYTIRPVRHHNRQLHKATILKGGVRKANQAEKYICGFRLYDKVLYNGIECFVWGRRTSGSFLLRQLNGEKVKDGVSYKHLKLLERSQSYLVA

SEQ ID NO: 12055 - protein, 512 aa, unidentified
MSTVYVLNKNGKPLMPTTRCGRVRHLLKEQKARVVTSNPFTIQLLYETDDVVQPLYLGIDPGRTNIGVAVVKTDGTAVFTAHLETRNKEIPKLMQGRKKARRARRTNGRRCRRQRRAKANDTISKKCVKQDTAQSGSASKRAKKIGVIKRHLPGCEKGVLCIGIKNKEAKFSNRTRPEGWLTPTANQLLQTHINLVKKIRKFLPISDVVLEVNKFAFMRLDNPNVQKWQYQQGPLYQKASLEEAVSEMQERHCLFCKKPIAHYHHVVPQSENGSNTIDNIVGLCTKHHDLVHKDTTWQKKLAKKKTGLNKKYGAQSVLNQIIPALTERLNTLFPKHFFVTTGKSTYDYRAAHGVSKDHWLDAYCIACSVLPNDVCDSGINNRVPYELKQFRRHDRRALHKANMSRVYTLNDKAVATNRHKAIKQTTDSLEEFRQNHPDDVYKLKVKEHHPEYRNPKRNFPGCVFLVGKHTHVMQGTSGSHNGQADGYYDTNGNSYSSGKCKFVAKNEGIVFT

SEQ ID NO: 12056 - protein, 426 aa, unidentified
LAKDLYRSIDREETNLRVYVLNKRGEPLMPCSSAKARILLKEKKAVVKRRTPFTIQLTIATGETTQPVTLGVDAGYKHVGLSASTKKAELYASEIELRQDVSELLAGRSALRHARRSRKTRHRAPRFDNRKRDKGWLAPSVENRIGAHVSRVEAVLRILPVTKIIVETASFDVQRLKNPDIQGVEYQQGEQLGFWNVREYVLFRDGHECQHCHGKSKDKVLNVHHIESRRTGGDAPNNLITLCETCHKAFHRGEIELRVKRGRSFQAETFMGVMRWTFFERLRARHSEIEVRNTFGYLTKNTRITHGIEKTHCADASCIAGNLKAKRLGYYFFQKQTRRHNRQIHKLTILKGGARKRHQTPYEIKGFRLYDKVLFQGKTAFIFGRRSSGYFDIRTLDGERISASVSYKKLRLLEKRRTYLIELRRN

SEQ ID NO: 12057 - protein, 500 aa, unidentified
  source 1..500: note = Clostridia sp.
MKNTKQRVYVLDREGKPLMPTTRFGKVRRMLRSGKAKAVRTKPFTIQLQYEPETHIKQRVVLGIDPGRTNIGVCAVREDGISLFAAHVKTRNKDVPEKMKGRKVHRQVSRRGERLARKRLAKKHGTRTDKWNPRSLPGCEEPVSVKDIRNTESRFIDRKRPDGWLTPTATQLLRTHMNVVALVSKILPVAEVAIELNRFAFMKLDDPAIEGVAYQKGPMRGFGSVREAIETIQGERCLLCGKPIEHLHHIVPRSQNGMNTLENLAGLCRKCHERVHKDADVQRAIGGLKKGTKKKHAGASVLNQIMPRLLQNLESQYSLTVTEGWQTKAFRDAHGIGKTHHADAYCIACSALSAQAVFDAPAEPYSVKQYRRHDRARIQAQTNRVYKLDGKAVAWNRHKAMAQDDDSLAEWHEKNVQKYGRRKANSMRSRLLFTKSRRRYNNLNRNLPGSIFLHDGKRRVLRGQQSGGKKYTFEDKRPDEKQANAKDCTLVTPNTGLVFL

SEQ ID NO: 12058 - protein, 426 aa, Calothrix sp.
MSKVFVIDIEKRPLNPIHSAQARQLLRNKKAAIYRRFPFTIIFKELHSSPVQPLRLKLDPGAKTTGIALANDSTGEVIFAAELKHRGFAIRDALIARRQLRRGRRNRKTRYRKPRFINRTKPQGWLAPSLMSRVHNVETWVNRLRKFAPITAISTELVKFDMQLMRNPEIEGKEYQQGALTGYETREYLLEKWNRQCAYCGVKDVPLQIEHIHPRSKGGSNSITNLALSCEKCNIKKGTKDIKDFLKKDPTKLEKILAQAKKPLADAAAVNATRYKLLEVLKSTGLHVECGSGGLTKFNRTSQKLIKTHWIDAACVGKSTPTLNIKGIKPLLVTANGHGTRQMAGTDKFGFPIRHRSNKQIHFEFQTGDIIKAVVTSGKKVGEYVGRVLCRATGSFDIATKTGRISGINHKYCSAIHKKDGYSYAF

SEQ ID NO: 12059 - protein, 431 aa, unidentified
MPNKVYVINKHGRPLMPCSPAKARHLLDAGKAKVKKRTPFTIQLVYGSSGYTQEVILGVDAGSKTIGMSASTTKEELLSAEVKPRNDVVDLLSTRREFRRVRRNRKTRYRKPRFDNRVRSKHKGWLAPSVEVKIQEHITSIKRVCRILPVSKVVIETAEFDLQLLKAIADGKSVPQGEDYQKGEMYGHYNVRQYVLWRDNYTCQCCGAHATKKKEVRLHVHHLESRKTGGDAPRNLITLCDSCHKKHHDGLITEDDFKKRKRRSTRDATFMGIMRKTLIQRLRAELTIPVAETRGYITKATREKLLVLPKSHTNDALAIAQGKHGFNVGYLPGILQIDKIYTIRPVRHHNRQLHKATILKGGIRKSNQTGKYVFGYRLFDKVQFNGQDCFIWGRRTTGIFTIKTINGKMIKDGISFKKLKLVEKSTSYLIA

SEQ ID NO: 12060 - protein, 485 aa, unidentified
LYIKMTSCTCTVFPACNHAKASSSQGKHNLLLRQERFIVKEVANMSTVYVLNKDGKPLMPTTRGGHVRHLLKEQKARVVRAKPFTIQLLYETNDVVQPLYLGIDPGRTNIGVAVVKANGTAVFTAHLETRNKEVPKLMQDRKKARRARRTNGRRCRRQRRAKANGTISKKCVKQDTAQSKNPSKRAKEIGIIKRRLPGYKKDVLCIGIKNKEAKYTNRTRPEGWLSPTANQLLQTHINLVRKIQKFLPISDVVLEVNKFAFMRLDNPDIQKWQYQQGPLYQKGSLENAVSEMQEHHCLFCDKPIDHYHHVVPQSENGSNTIANIVGLCAEHHNLVHKDAAWQKKLAEEKVGLNKKYGALSVLNQIIPALTNKLSVLFPKHFFVTAGKSTHDYRAAHGVSKDHWLDAYCIACSVLPSNVCDSNINNHMPYELKQFRRHDRRVLNNENMNRVYTLDNKAVAINRHKATEQEAASLEEFRKEHPNDVC

SEQ ID NO: 12061 - protein, 431 aa, unidentified; identical to SEQ ID NO: 4306

SEQ ID NO: 12062 - protein, 431 aa, unidentified
MVFVLNKSKKPLDMISNAEARILLRKKLAVIHKVYPFIIRLRDNSRVSKDKSYTVKLDPGSKHTGIAIVDDKNQVVMLAEIEHRGHIIKKNLGSRRAVRQKRRNRKTRYRPARFLNRTKPEGWLAPSVKSRADNVINFIKKYKKLINIDKVMIENVSFDVTQMSSNTKLYGVAYQQGPLYQNKLRSFIFNRSNNKCVYCGAKATEIDHIVPRTKGGTNSVYNLVASCRACNQMKSNKTLEEFGKIMNKNFSHLEPKKLPKDASIVQTARNYMVKEITKLVSDTTLHDACFTKYNRDQLGLPKQHYYDALSVGEIPNSFNFFTDKVLQISAKGRGSRQMCKVNKYGFPRTSAKALKSVRGFQTGDIVKAIVPNGLKQGEYLGRVAIRSRGYFDIKTKNNLVKDIGYKYCHLIQRGDGYSYNYKECDLLSGKK

SEQ ID NO: 12063 - protein, 418 aa, unidentified
MVYVLSKTGQPLMPTENHAKVRVLLKQQKAKIVHRCPFTIQLLYDSTDYTQQVSLGIDAGSRHIGVSATTETKVLYEADVTLRNDIVDLLSTRREARRTRRSRKTRYRKPRFNNRTRKDDWLAPSVKQKMDTHLTTLRKVTEILPVNSITVETASFNIQKIKNPNIASTGYQQGEQLDFWNVREYVLFRDGHKCQCCKWKSKDPVLNVHHIESRKTGGNAPNNLITLCETCHKGYHNGTVSLPKNIRRGMKFNDAAFIGAMRWAFFNRVKETYEPLGIMVNMTYGYITKNTRIEHNLPKDHFIDARCISGHPDATSDGTVFYQKKVRCHNRQIHKQKILKGGIRKRNQAPYLVKGFRLFEKVKYHGKQYFIFGRRSSGFFDLRTLDGTKVNKGSVSYKKIRSLDMPRSYLTEERKAIV

SEQ ID NO: 12064 - protein, 433 aa, Burkholderia sp.; identical to SEQ ID NO: 9535

SEQ ID NO: 12065 - protein, 419 aa, unidentified; identical to SEQ ID NO: 3670

SEQ ID NO: 12066 - protein, 423 aa, Moorena sp.; identical to SEQ ID NO: 7848

SEQ ID NO: 12067 - protein, 235 aa, unidentified
LKVFVLNMRGQPLMPCSPAKARHLLKAGKAVVKRRTPFTIQLRIATGETKQNVTLGVDAGAKHVGLSATTEKEEVFASEVELRQDITGLLAARLSLRRDRRHRKTRYRAPRFLNRVRSKHKGWLAPSVENRIQAHMSRIDAVCRLLPVTRIVIETASFDVQKIRNPEVEGTGYQQGDQLGFWNVREYVLFRDGHVCQHCHGHSKDKILNVHHLESRQTGGDAPNNLITLCETCHK

SEQ ID NO: 12068 - protein, 249 aa, unidentified
MVYVQDINGKPMIPTTRHGKVRRLLKDKKAVVVNLCPFTIKLMYVTSDYKQEIVLGVDAGTKHVGLSATTKSKELYSSEVILRNDIVDLLSTRRELRRSRRNRLRYRKPRFDNRIKSKRPGWIAPSVKYKIDAHIRVVENVCSILPISRIVIEVAQFDTQKINNPNISGKEYQEGDQLGFWNVREYVLARDGHKCQHCKGKSKDPVLNVHHIESRKTGGDSPSNLITLCETCHKEYHKGNMMQNNIKNN

SEQ ID NO: 12069 - protein, 512 aa, unidentified
MSTVYVLNKNGKPLMPTTRCGHIRYLLKEKKARVVASKPFTIQLLYETNDVVQPLYLGIDPGRTNIGVAVVKTDGTAVFTAHLETRNKEIPKLMKKRKDSRRARRTNGRRCRRQRRAKANDTISKKCVKQATAQNGSVSKRAKEIGVIKRHLPGCEKEVLCIGIKNKEAKFSNRTRPEGWLTPTANQLLQTHINLVKKIRKFLPISDVVLEVNKFAFMRLDNPNVQKWQYQQGPLYQKASLEEAVSEMQERHCLFCKKPIAHYHHVVPQSENGSNTIDNIVGLCTKHHDLVHKDTTWQKKLAKKKTGLNKKYGAQSVLNQIIPALTERLNTLFPKHFFVTTGKSTYDYRAAHGVSKDHWLDAYCIACSVLPNDVCDSGINNRVPYELKQFRRHDRRALHKANMSRVYTLNDKAVATNRHKAIKQTTDSLEEFRQNHPDDVYKLKVKEHHPEYRNPKRNFPGCVFLVGKHTHVMQGTSSSHNGQADGYYDTNGNSYSSGKCKFVAKNEGIVFT

SEQ ID NO: 12070 - protein, 551 aa, unidentified
MSYKVVIHHRKENFMKQKTFVYVLNKKGKPLMPTTRCGHIRKLLKEKKAVPVCNNPFTIRLKYETPDIVQSLYLGIDTGRENIGIAVSEENGNCIYLAELETRNKSIKKKMTERREFRSERRRYKRISKQRKAIKNGTTIQNGEDAVIRSKKECKSKTVIYPGMEEGITHKIIQGAEAQFNNRKRKENWITPSGRQLIQMHMNAIKLVQKILPISHIIIERVSFDFQKLENQNIHTWQYGRGPLYGFKDYKNYINSEQNGICLLCRKNHIEYYHHIVSKSNGGSDNINNIAGLCYNCHYGNNGVHKNPKASKQLQTLKEGLKQKYKISLLNSVMPVLIEEVSEFCINNNYKFSVTDGYSTSVTRKQMNLPKTHCIDAYCISMTNKLFQCKMLPSVIYEQRRFKKKSGNIISKRNNREYYVKERDKLVLVAKNRHKATEQSFLSLEEYLSEYALTHTEYECIKQARSLLVKPCRRTYTYHKEKKVASIHPGDIVKYEKHNKKGNTKTEVFIAESIKISTNQICYETKSKNLKLCKRIMSTSVPYVSKRTLVI

SEQ ID NO: 12071 - protein, 442 aa, unidentified
MVTVQQSTHHLPFGRVFIRRNLFMVYVISQDGKPLMPCSDPIARLLLKQGKAKVKKREPFTIKLTYETTNHTQGLTLGVDTGSGTIGTAVSKDNGDIVYMSEVVVRNDITDKMTQRAKYRRNRRNRKTRYRKARWLNRASSIKKDRFSPTMQSKLHSHVREIEYIQSILPVTEMVFETGQFDMQLMKNPSLANPKVRPWGYQKGANYGFENTKAMVLNRDNYTCQCCKGKHKDSKLEVHHIVFRSQGGSDEESNLLTLCHTCHKDLHSGKINPKLSGKVKGNLKYATQMNSIRKQLFRFYPNAIETFGYVTKANRLHLGVDKEHYYDACIIATQGNAFNVKSNLYKKKCVSDGDFQKTKGIRSEQPIVTDKICGFRKFDKVRYFGNDYFIKGRMSTGYAILMDIDGNKIDFSTMPRGYKTPKLSNCKRITARSTVMTQVKVV

SEQ ID NO: 12072 - protein, 485 aa, unidentified; identical to SEQ ID NO: 7403

SEQ ID NO: 12073 - protein, 458 aa, Halomonas sp.; identical to SEQ ID NO: 7364

SEQ ID NO: 12074 - protein, 557 aa, unidentified; identical to SEQ ID NO: 10483

SEQ ID NO: 12075 - protein, 512 aa, unidentified
MSTVYVLNKDGKPLMPTTRCGHIRYLLKEKKARVVASKPFTIQLLYETSDVVQPLYLGIDPGRTNIGVAVVETDGTAVFTAHLETRNKEIPKLMKKRKDSRRARRTNGRRCRRQRRAKANDTISKKCVKQATAQNGSVSKRAKEIGVIKRHLPGCEKEILCIGIKNKEAKFNNRTRPEGWLTPTANQLLQTHINLVKKIRKFLPISDVVLEINKFAFMQLDNPNIQKWQYQQGPLYQKASLEETVSEMQEHHCLFCKKPIAHYHHVVPQSENGSNTIGNIVGLCTQHHDLVHKDATWQEKLAKKKTGLNKKYGALSVLNQIIPALTKELSSLFPKHFFATNGKSTYDYRAAHGISKDHWLDAYCIACSVLPNDVCDSGINNRMPYELKQFRRHNRRALHKENMSRVYTLNDKAVATNRHKAIKQTTNSLEEFRQNHPDDVCKLKVKEHHPEYRNPKRNFPGCVFLVGKHTHVMQGTSGSHNGKADGYYNTNGNSYSSGKCKFVAKNEGIVFT

SEQ ID NO: 12076 - protein, 417 aa, unidentified
MPCSPAKARLLLKEKKAIVKRRTPFTIQLTIATGEAKQPVTLGVDSGYKHIGLSATTEKAELYASQVELRQDITDLLSARLALRRSRRSRKTRYRAPRFNNRVANKREGWLAPSVENRIAAHMSRVEAVMRVLPVTAITVETAAFDTQLLKNPDIAEAAYQQGEQLGFWNVREYVLFRDGHVCQHCRGKSKDPILNVHHIESRRTGGDAPNNLITLCETCHKAFHRGEIELKVRRGKSFKAATFMGIMRWTLFERLKKAHPELRVRNTYGYLTKHKRISHGIAKSHCADAYCIADNLGAKRLEGFFFQKQTRKHNRQIHKLSILKGGLRKKNQAPYEVKGFRLFDKVICKGEEAFIFGRRTSGSFDVRRLDGTRISAGINYKKLRLLEPRTTYLTEFRKEAALPPLHECSGSRAEFR

SEQ ID NO: 12077 - protein, 264 aa, unidentified
LKAIADGKPVPEGEDYQKGEMYGQYNVRQYVLWRDGYTCQCCGVNEDGIKLHVHHKESRKIGGNAPDNLVTLCDKCHKGFHKGTISLTKLIKRGRKSTRDAAFMGIMRKTLIERMGSILPVPVVETKGYITKATRSELLTLPKSHINDALAIAQGKHGFGITDPTTITRVDMQYSVKPVRHHNRQLHKATILKGGIRKSNQAAKYVKGFRLFDKVLYQDQECFIWGRRTSGSFLLRVLDGTKVKDGVGFKHLKLLERSSNYLIA

SEQ ID NO: 12078 - protein, 428 aa, unidentified; identical to SEQ ID NO: 5055

SEQ ID NO: 12079 - protein, 431 aa, unidentified; identical to SEQ ID NO: 3801

SEQ ID NO: 12080 - protein, 417 aa, Defluviitoga tunisiensis
LRVFVLNMRGKPLMPCKPRKARLLLKQGKAKVVKRDPFTIQLTIATGEAKQDISLGVDSGSKYIGISATTKKHVLFEAEVELRNDIVKLLADRRQYRRSRRYRKTRYRQARFLNRKKPEGWLAPSIQHKINSHIKIIDMLTKLLPITDITIEVASFDIQKIKNPDIQDKEYQQGDQLGFYNVREYVLWRDNYQCQGRKGCKNKILNVHHIESRKTGGNSPNNLITLCETCHNDYHAGKLKLNLKRGQMFKDATFMGVMRWATYNALKELYPNVKLTYGYITKHKRIKYGLEKSHRMDARCISGNPLVKPLDTYYYFKCVRKQNRQLHKATPSKGGVRKNNKAPRYLHGFQLFDKVSYQNQECFIFGRRTSGYFDLRKLDGTKVTASASVKKLKLIERANTLLCERREGNSSPAYTIF

SEQ ID NO: 12081 - protein, 424 aa, Caldicoprobacter sp.; identical to SEQ ID NO: 2589

SEQ ID NO: 12082 - protein, 465 aa, unidentified
MSTCACVLSKNGERLMPTIRLGKVRHLLKDGKAKIIKHHPFTIQLLYDSETNIQPIEICEDVGYNYIGISVKSQSHEYVSAQYDTLQDEKSCHDACRRMRRTRRNRLRYRQKRFDNRKRDKGWLAPSLKHKKELNVNVIKMYCEVVPITHATVEVGSFDTMLVKAIEEGKATPEGADYQKGPRYNLATLREAVFYRDNYTCQVCGREASEGAILHVHHMFYWKGRHDNSLSELITVCEKCHTPANHQKGGKLYGFGEDIKFANLSGAAFMNTVRWQIVNVLYAAFGKPFVTFTYGAMTKEKRIALHLEKSHNNDAYAMGSFHPVNRCAFEHYEKVKRNNRILEKFYDSQYIDTRTGELTNGKSLFNGRINRSHKKDSENLHKYRGKRIRKGYRALRRKKVALNPGDLVSLNGEILTVHGTHTKKNGSVNVEFKTPSKSGKKSTSLKKLKIIKTISPMRSAWDKVS

SEQ ID NO: 12083 - protein, 424 aa, Enterococcus sp.
MRVFVRNMQGKPLMPCSNRKARLLLKEGKAKIYQYNPFTIQLCYASREYVQECHIGIDTGTKHIGMAVTSEDKVLFKGEIELRQDVKSNLDTRRSYRRDRRNRKTRYRKARFLNRKKKESWLPPSIENRINHTFKWINKLVALLPNPKLHIEVGKFDVAKMINPDVQGVDYQHGQTYGFYNVRYFVFARDNYTCQCCKKSKNKILQTHHIIYRSNGGSNRAVNLITVCTDCHTYENHQKGGILYQWQENRKKTKQYKEPPFMNVLRKRIFTQYPNAIITYGFETTPKRKELGLEKTHYNDAIVISGITKIKENPNEWLLIKQFRKKKRSLHEATARKGRKEPNRLQKRNAKNTPYYKGFYLNDKVRVFNQVGHITGFTSSGAYIKNSENEYITLPNKSYKQIGISNIRLLHHNNNWQYIHKHIA

SEQ ID NO: 12084 - protein, 477 aa, Acidithiobacillus sp.; identical to SEQ ID NO: 11553

SEQ ID NO: 12085 - protein, 546 aa, Streptomyces sp.
LIANVLRHTRQEVTRSPTHEDTPGSRDETAHGHPATARGTGGTHGRGETGGPSARVRRRHAEVTAPAVAEAANGDGDVPTGCDTYAGGTGAARVFVLSKDGKPLMPCHPARARELLGKGRAVVARQAPFAIRLKDRTHSESDVDGVQLRVDPGSKGTGFALTDEKMETDSCGRNVVVRRGLVTVELRHRGDQIQRSMQQRAGYRHRRRSANCRYRPRRSQNRARAQGWLPPSLQHRVDTTASLVTRMCRYAPVSEIHLEHVAFDTHSMSAGRALRGADHQHGSLVGTHARAYLRTKWGSACAYCGATDVPLNIDHLQPRSRGGSDRISNLVLACVPCNQAKGSRPVAVFLAHEPERLAKVLKQVRVPLRDAAAMNTTRWGLLGALTALGLPVRCWSGSLTRQNRTATGLPKTHSLYALCVGALGREARNAIVRVPGHLLVLNAVGRGSYARTTPDRFGFPRLRRARGKQHFGFISGDLAQATVPSGKWAGTWVGHIAVRARGQHSLATPVGRINVSHRNLRLLQRGDGYSYARRDVIVEDPCEKSA

SEQ ID NO: 12086 - protein, 408 aa, unidentified; identical to SEQ ID NO: 3192

SEQ ID NO: 12087 - protein, 448 aa, unidentified
MSTGLRAVQAEPAGIRKGDALKVFVLNMRGRPLMPCSPARARHLLKAGKAVVRRRTPFTIQLRIATGETKQSVTLGVDAGAKHVGLSAATEKEEVFASEVELRQDITGLLAARLSLRRDRRHRKTRYRAPRFLNRVRSKHKGWLAPSVENRIQAHMSRIDAVCRLLPVTRIVIETASFDVQKIRNPEVEGTGYQQGDQLGFWNVREYVLFRDSHVCQHCHGHSKDKILNVHHLESRQTGGDAPNNLITLCETCHKACHAGKIKLKVKRAQSFRAEAFMGIMRWTLLDRMRKAHSGLPVENTYGYLTKNTRITPGLPKTHCVDAYCIAGNLKAVRRGVCLHQRQVRKHNRQIHKCTVLSKTLKDGTKIGYRKLNQTPHLVKSFRLFDKVRCLEQTGFIFGRRSSGYFDVRRLDGVKLSSGISYRKLTLLEKRSTYLTELRKEDGASSPV

SEQ ID NO: 12088 - protein, 460 aa, unidentified
MVAVVDLSGRPLMPTNEYRARKLLKQKKAKIFGYRPFTIQLTERKSTEIQPIELCMDTGYIHIGISAKSERHEYLGMQIDTLTDEKLKHDDKRQYRRQRRNRKRYRAPRFDNRRRKEGWIAPSLEHKKEIHIDAIQRICKVMPITDLTLEMGNFDTQVLKAVEEGKTLPQGSDYQHGERYGIATLREAVFLRDGYKCQCCEKTVKDGAILHVHHIKYRSQGGTNRMSNLITVCDKCHTPQNHKPGGKLWNWKTKLAEFKGASYMTSIRWMLYNEVTALLPNSSVHITYGAKTKESRRELDIEKSHVNDAYVMGLFHPKHRTQPVYFKKKRRNNRVLEKFYDAKYIDGRDGKKRSGQELFNGRISRNHKKDSENLHLYRKQKVTKGKRSIRNRHYPIQPHDILLYQKNKYETAGCHNNGTRAILLPEKKSVALRQLTIYQYAGGYYRVPYESNKKEERTGS

SEQ ID NO: 12089 - protein, 420 aa, unidentified
MFVYVLDMDGQPLMPTSRFGKVRRLLRDKKAKVVSREPFTIKLLYEPETKIVKDIVLGVDTGSKHVGVACVGNSRVLYQAQVELRDDIKRKMDSRRMYRRNRRYRKTRYRKPRFLNRRNSIRKDRYCPTIISKFHGHEREIEFCKKILPIKDIVLETGKFDTQLMEKPWLQEHKWAYQKGVNYGYANAREHALVRDNYTCQCCGKKNCRVEAHHIVFRSKNGSNDLDNYITLCEDCHKAIHLGKIELKLKGKRRGTLRYATQMSVIRCMLLKRYPDATETYGFVTKANRENLGIGKDHYLDACVIASGGLAFRQSDVLYRKRCVSKQSRQLCKGVRGKQWIPTRKVHGFKRYDKVRYLGEVCFVKARRTDGHFVLMGIANNSLDFRDMGGKQNPSYKSIKRISARRSILCISERIERVDM

SEQ ID NO: 12090 - protein, 420 aa, unidentified; identical to SEQ ID NO: 7490

SEQ ID NO: 12091 - protein, 512 aa, unidentified; identical to SEQ ID NO: 5549

SEQ ID NO: 12092 - protein, 425 aa, Lyngbya sp.; identical to SEQ ID NO: 3008

SEQ ID NO: 12093 - protein, 533 aa, Verrucomicrobium sp.; identical to SEQ ID NO: 5282

SEQ ID NO: 12094 - protein, 427 aa, Anabaena sp.; identical to SEQ ID NO: 3743

SEQ ID NO: 12095 - protein, 406 aa, unidentified
MVYVQDINGKSLMPTTRHGKVRRLLKDKKAVVVNLCPFTIKLMYITPDYKQEIVLGVDAGTKHVGLSATTKSKELYASEVILRNDIVDLLSTRRELRRTRRSRLRYRKPRFNNRIKSKRQEWIAHSVKYKIDAHIRVVEKVYSILPVSHIIIEVAQFDTQKIKNPDISGKEYQEGDQLGFWNVREYVLTRDEHKCQHCKGKSKDKILNVHHIESRKTGGNSPSNLITLCKTCHKEYHKGNIKLKVKRGTSLRDAAAMGIMKWKLLDKLKSLFPNVSMTFGYITKYNRIHNNIEKSHFSDAFVISKNFKAKRLGYYFKEKLVRRHNRQIHKTKILKGGKKKMNQAPFKVFGFRLFDKVEFQGNEYFIYARRLSGYFNIRDINSENKKDVTYKKLTYIGHGLVSVETE

SEQ ID NO: 12096 - protein, 470 aa, unidentified; identical to SEQ ID NO: 2825

SEQ ID NO: 12097 - protein, 442 aa, unidentified; identical to SEQ ID NO: 3234

SEQ ID NO: 12098 - protein, 465 aa, unidentified; identical to SEQ ID NO: 3856

SEQ ID NO: 12099 - protein, 515 aa, unidentified; identical to SEQ ID NO: 5111

SEQ ID NO: 12100 - protein, 442 aa, unidentified; identical to SEQ ID NO: 2903

SEQ ID NO: 12101 - protein, 465 aa, unidentified
MSTCVCVLSNSGERLMPTFRLGKVRRLLKDGKAKIVKHHPFTIQLLYDSKTNTQPIEICEDVGYNYIGISVKSQSHEYVSAQYDTLQDEKACHDSCRKLRRTRRNRLRYRKPRFDNRKRGEGWLAPSLRHKKELNVNVVKMYCAVMPITHATVEVGSFDTMLVKAIQEGKAIPEGADYQKGPRYNLATLREAVFYRDNYTCQVCGRKIADGAILHMHHMFYWKGRHGDSLNELLTVCEKCHTPANHQKSGKLYGFGENVKFADLSGAAFMNAVRWQIVNELYTAFGKPFVTITYGTMTKEKRIALRLEKSHNNDAYAMGEFHPNHRCTFEHYEKVRRNNRTLEKFYDSRYIDIRTGEIATGKELFNGRINRNHKKDSENLHRYRGKRTYAGHRALLRKKVNLNPGDLVSLNGEVLVVHSTHTNKKGAVNVEFKTPGKSGQKSASLKKLKIVKAADSMHSAWEKIS

SEQ ID NO: 12102 - protein, 424 aa, Enterococcus sp.; identical to SEQ ID NO: 6210

SEQ ID NO: 12103 - protein, 420 aa, unidentified; identical to SEQ ID NO: 7764

SEQ ID NO: 12104 - protein, 415 aa, unidentified
MVYVQDINGKPMMPTTRHGKVRRLLKDKKAVVVNLCPFTIKLTYVTSDYKQEIVLGVDAGTKHVGLSATTKGKELYSSEVILRNDIVDLLSTRRELRRSRRNRLRYRKPRFNNRIKSKRPGWVAPSVKYKVDAHIRVIDNVCSILPVSRIVIEVAQFDTQKIKNPNISGKEYQEGDQLGFWNVREYVLARDGHKCQYCKGKSKDKILNVHHIESRKTGGDSPSNLITLCETCHDDYHKGNIDLKIKRGSSLRDAAVMGIMKWRLYEELRSKHNRVSITFGYVTKYNRINHGIEKSHVSDAFVISKNFNAIRLGCYYKVRLVRRHNRQIHKQKIQKGGIKRLNQSTFEVFGFRLFDRVMFENGYYFIFGRRKIGSFDIRDIDSKRQNNITYKKLKLSRCKRFMIQMELNKKNTDMF

SEQ ID NO: 12105 - protein, 408 aa, unidentified
MVYVQDINGKPMMPTTRYGKVRRLLKNKKAAVVNLCPFTIKLMYVTSDYKQKIVLGVDAGTKHVGLSATTKSKELYSSEVILRNDIVDLLSTRRELRRARRDRMRYRKPRFNNRIKSKRPEWVAPSVKYKIDAHIRVIDNVCSILPISRIVIEVAQFDTQKIKNPEISGKEYQEGNKLGFWNIREYVLARDGHKCQYCKGKSKDSILNVHHIESRKTGGDSPSNLITLCETCHKEYHKGNIDLKIRRGKSLRDAAIMGIMKWRLYEELKSKYDRVFMTFGYVTKYNRIHNNIEKSHVSDAFVISKNFDAIRLGYYYKVRLVRRHNRQIHKQKIPKGGIKRLNQSPFEVFGFRLFDRVMFENSYYFIFGRRKTGRFNVRDIDGKNQKDITYKKLKLSRCKRFMIQKEMN

SEQ ID NO: 12106 - protein, 418 aa, unidentified; identical to SEQ ID NO: 2710

SEQ ID NO: 12107 - protein, 427 aa, unidentified; identical to SEQ ID NO: 10130

SEQ ID NO: 12108 - protein, 475 aa, Ferroplasma sp.
MEKNMKERQKLDRRDTYTPADAPQVRGNCDHTLNREETLSVHGLKTPSNNPDVKLQSGMTGHDLRVPVINMRNEPLMPTTPGKARKLLKHNRARVISSNPFTIQLLYATGETKQPVTLGIDAGYKHIGFSAVTEKRELISGEAVIRTDIPKLNVEKSMYRRNRRNRLWYRQPRFMNRGNNSKGWFAPSIDHKLQTHIRLIEKLKRILPVSKVIIEVASFDQQKMKNPEISGIEYQQGELQGYEIREYLLEKFHRKCVYCGKTNVPLEIEHLTPKSRGGSNTVDNLAISCHECNQRKNNLTAEEFGYPEVRKTASMPLRDATFMNTVRWKLTQLTEAIHTFGYITKKNRISPGLDKSHANDAFVIAGGTTQARSTVFNVTQRRRNNRSLQINRKGFRPSIRRRRYPLQPGDVVEFGESRYGVVGVHSYGNYVIIRNGEKKMDVNIKKVKLVKYGKGLRFTTQFLHKLLHGISLGGS

SEQ ID NO: 12109 - protein, 420 aa, unidentified
MQYVYVLNRHGEPLMPCSPGKARLLLKQQKACVVKRTPFTIKLLYGSAGYKQPITLGADAGSKHVGLSASTEKRELYSEEFTPRGDVVELLSTRRQNRRSRRNRKTRYRAPRFDNRVHSKHKGWLAPSVEVKIQEHITIIKRICKILPISLVRVETAEFDTQRLKAMLAGKPLPVGTDYQLGEMYDEYNVRQYVLKRDHYTCQCCGAHNTAEKVVKLHVHHLESRKTGGNAPSNLVTLCTTCHKNLHKGKVTLDGKERGKSLRDAAFMGIMRKTLMARLKEELPIPVQGTYGYITKMRREQNDIKKSHTNDARCISKHPLAEPCSVCYRTKAIRHHNRQTHKANFSKKGIRKRSQMPYLVEGFRLWDKVLYKGQECFVSGRRSSGSFALKKLDGTSISKGVTFKKLRLLEPATNYLIERM

SEQ ID NO: 12110 - protein, 450 aa, unidentified; identical to SEQ ID NO: 2935

SEQ ID NO: 12111 - protein, 426 aa, unidentified
MVYVQNRLGQPLMPTKDHRKVRLLLDGGAAVVVKRTPFTIRLTTKSKTYVQPIILGVDAGSKTIGLSASTEAEELFAAEVTPRNDVVDNLSTRREFRRTRRNRKTRYREPRFNNRVGSKHKGWLAPSVEVKIQEHITAVKRVCALLPVGKVVVETAEFDLQLLKAVEAGLPVPQGENYQKGEMLGHYNVRQYVLWRDGYTCRCCGAHGKGVKFHVHHLESRKTGGDAPDNLVTLCDGCHKKFHKGIITPDILKKRKRRSTRDAAFMGIMRKTLMERLRAEFAIQVIETKGYITKYTRVELLKLDKAHTNDALAIAQGRRGFGVEELAAIPQSDYIFHIRPVRHHNRQLHRATILPGGIRKSNQAPRYVRGFRLFDKVSYLGKECFIWGRRSSGSFLLKLLDGTKVKDGVGCKRISLLERSTNYLIS

SEQ ID NO: 12112 - protein, 346 aa, unidentified
MPDKVYVISRLGHPLMPCSPAKARHLLDDKKAKVVKRMPFTIRLLYGSTKYIQPIILGVDAGSKTIGLSASTAKEEVFAAEVMPRNDVVENLSTRREFRRARRNRTTRYRKPRSDNRVRSNHERWLAPSVKVKIQEHITSIKRVCTILPISKVVIETAEFDLQLLKAIQEGKPIPEGEDYQKGEMYGSYNVCQYVLWRDNYTCICCGVRGTPKNPVRLHVHHFESRKYGGNAPDNHGTLCDDCHKKFHLGIITDVKLKTRRRQSTRDAAFMGIMRKTLMWRLRTELFIPVAETKGYITKATREKLLVLPKSHTRDALAIAQGRHGFGIKELSLIHISEPTRQAEIS

SEQ ID NO: 12113 - protein, 443 aa, Anoxybacillus sp.; identical to SEQ ID NO: 4041

SEQ ID NO: 12114 - protein, 413 aa, unidentified; identical to SEQ ID NO: 3220

SEQ ID NO: 12115 - protein, 451 aa, unidentified; identical to SEQ ID NO: 10609

SEQ ID NO: 12116 - protein, 442 aa, unidentified
MVYVLNKDGQPLMPTNRHGKVRRLLKTKKAKVIKRCPFTIQLLYDTANHTQDITLGIDAGSKHIGLSATTKNKVLFEADVELRNDISKLLEARYTFRRSRRNRKTRYRKKRFDNRVSSKHKGWLAPSIEHKIQSHFAMVEKVHRILPVTKIVVETASFDTQLLKAQLEVKPIPQGTDYQNGELAGWNIREYIFHRDNYTCQWCRGKSKDPVLVTHHHAYWKGDHTNKPSSLITLCNTCNDSKYHKKEANRLWGWEPKITNSYKHAVFMGVMRWTFYNRLKEIYPNVSMTYGYITKNARIENNLPKTHYVDARCISGHPEAKSNGEYFYYKKVRCHNRQLHKANTLKGGIRKRNQAEYTVKGFRLFDRVEYKNNEYFVFGRRASGFFDIRTLDGQKVNKGSISFKKLKLKETSKTYLIERRMADTGVSLAPLTTEVTSLRQTG

SEQ ID NO: 12117 - protein, 413 aa, unidentified
LVYVLNIEGKPLMPCKEAKARKLIRDKKAKVVQRTPYTIQLKFECENITQPITLGIDSGSKTVGMSVTTEDEELYSSESILRNGIVKLLSERRQYRKNKRNRLRYRQARFNNRVSTKKKGWLAPSVRHKINAHLKLVREVHKILPISKIIVEVASFDIQKIKNPEISGKEYQQGEQLDFWNVREYVLFRDGHKCQGKKGCDNKILNVHHIETRKVGGNSPNNLIALCEQCHKDYHESKLELKLKRGRSFRDATFMGIMRWALYNELKELYENVSITYGYITKSNRIKHSIEKTHATDAFCITGNLNAKRIDTRYTQKFVRKNNRSLYKANLLKGGKRKANKAPYIVHGFRLFDKVLSEGKEWFVFGRRISGYFDLRDLQGNKLNKGSYNCKKIRLLGKGRTLLTEKGKRIPAL

SEQ ID NO: 12118 - protein, 460 aa, unidentified; identical to SEQ ID NO: 8636

SEQ ID NO: 12119 - protein, 456 aa, unidentified; identical to SEQ ID NO: 10647

SEQ ID NO: 12120 - protein, 411 aa, unidentified; identical to SEQ ID NO: 6901

SEQ ID NO: 12121 - protein, 512 aa, unidentified
MSTVYVLNKDGKPLMPTTRCGHVRHLLKEQKARVVTSKPFTIQLLYEADDLVQSLYLGIDPGRTNIGVAVVKADGTAVFTAHLETRNKEIPKLMKKRKESRRARRTNGRRCRRQRRAKANGTISKKCVKHDTAQNGSVSKRAKEIGVIKRHLPGCEKDVLCIGIKNKEAKFSNRTRPEGWLTPTANQLLQTHINLVKKIQKFLPISDVVLEINKFAFMRLDNPHVQKWQYQQGPLYQKANLEETVSEMQEHHCLFCKKKIDHYHHVVPQHKNGSNTIDNIIGLCTQHHDLVHKDATWQKRLAKKKTGLNKKYGALSVLNQIIPALTKELSSLFPKHFFVTNGKSTYDYRAAQGVSKDHWLDAYCIACSVLPNDTCDKTINSRVPYELKQFRRHDRRALNNENMSRVYTFNGKMVATNRHKATEQTTDSLEEFRQRQPNDVCNLKVKEHHPTYRNMNRNYPGSVFLVGNQVHVMQGIAGSKDGEATTYKDTNANSIAAGKCKFVAKNSGILFV

SEQ ID NO: 12122 - protein, 465 aa, unidentified
MSTCVCVLSNNGERLMPTIRLGKVRHLLKDGKAKIIKHHPFTIQLLYDSETNIQPIEICEDVGYNYIGISVKSQSHEYVSAQYDTLQDEKSCHDACRRMRRTRRNRLRYRQKRFDNRKRDKGWLAPSLKHKKELNVNVIKMYCEVVPITHATVEVGSFDTMLVKAIEEGKATPEGADYQKGPRYNLATLREAVFYRDNYTCQVCGREASEGAILHVHHMFYWKGRHDNSLSELITVCEKCHTPANHQKGGKLYGFGEDIKFANLSGAAFMNTVRWQIVNELYAAFGKPFVTFTYGAMTKEKRIALHLEKSHNNDAYAMGEFHPNCRCTFEHYEKVRRNNRILEKFYDSRYIDIRTGEIATGKELFNGRINRNHKKDSENLHKYRGKRLYKGHRALVRKKVNFNPGDLVSLNGEVLVVHGTHTNKKGAVNVKFKTPAKNGRKSANLKKLKIVKAAGSIHPAWEKVS

SEQ ID NO: 12123 - protein, 413 aa, Sutterella sp.; identical to SEQ ID NO: 7714

SEQ ID NO: 12124 - protein, 420 aa, unidentified
MVYVLNKDGQPLMPTNRHGKVKHLLKSGKAKVVKRCPFTIRLLYESTTHTQNLTLGVDTGSGTIGTAVSKDNGDIIYMSEIIVRNDITDKIKQRARYRRNRRIRKTRYRKPRWLNRKNSIRLNRFSPTMISKLHSHVKEIEYIKSILPITTLVLETAQFDTHLMKNPSLANPKIRHWGYQKGTNYGFENTKAMVLNRDNYTCRYCKGKHKDSKLEVHHIIFRSQGGSDEESNLITLCHTCHRDLHNGKINLKLNGKAKGTLKYATQMNSIRKQLFKIYPDAIETFGYVTKANRLAIGIDKKHYYDACTIATHGKPFTVKTKLCKKKCVSEGDFQKTKGVRSEQPIVTDKICGFKKFDKVRYFGNDYFIKGRMSTGYAVLMDIDGYKIDFSMMPKGCKTPKLSNCKRITARTSQMLQAVTI

SEQ ID NO: 12125 - protein, 420 aa, unidentified; identical to SEQ ID NO: 7360

SEQ ID NO: 12126 - protein, 421 aa, unidentified; identical to SEQ ID NO: 4235

SEQ ID NO: 12127 - protein, 512 aa, unidentified; identical to SEQ ID NO: 3720

SEQ ID NO: 12128 - protein, 423 aa, unidentified; identical to SEQ ID NO: 3951

SEQ ID NO: 12129 - protein, 527 aa, Streptomyces sp.
VLHQQLALEFESADTPRIGDETGLEDRFQAVPGAEAGRGEIPGGSSAAGGVTPNSAVGEEARECHPFVFVLDRHGHPLQPCTPARARKLLTKGRAVVHRHTPFVIRLKDRAASESAVDGVEVGIDPGSKHTGLAVFTAVAGQRRARYALQLGHRGAQIRKKLQQRADYRRGRRSRNLRYRAPRFFNRRRPEGWLAPSLRHRVETTVSWVGRIARWAPVCAVHVERVAFDTHVISAGRPLQGAEYCRGTLHGYEIREYLLAKWGRTCAYCGSKGVPLNIEHIRPRSRGGSDRVSNLAIACIRCNQAKDNQPIEDFLKGKPKLLARILAQAKAPMRDAAAVQSTRWALWRSLSAMLPTYTASGGRTKWNRTRNKLPKSHTLDALAVGKLDTITETVTTVLVAACTGRGVHQRTSPDKHGFPRRTSPRTKRVHGFATGDLVTATVPAGKYAGTHTGRVMVRTSGLFDIRTPHGLAAAVKHTHVRLIQRSDGYAYTRHPESPQPEVTLRRSAPRDQRIRSFPGLTPWGSGK

SEQ ID NO: 12130 - protein, 442 aa, unidentified; identical to SEQ ID NO: 4522

SEQ ID NO: 12131 - protein, 406 aa, unidentified
MRSKPLMPCSPAKARHMLKAGKAVVVRRTPFTIKLTIATGETKQDVTLGVDAGARHVGISATTEKEEVFASEVALRQDITGLLADRLAFRRARRNRKTRYRAPRFNNRVRSKHKGWLAPSVENRIQAHMSRIEAVCRLLPVTKIVIETASFDIQKIRNPEVEGTGYQQGDQLGFWNVREYVLFRDGHVCQHCHGRSRDRILNVHHLESRKTGGDAPNNLITLCETCHKAYHAGKIKLKVKRGQSFRAEAFMGIMRWTLLDRVRKTHPELPVENTYGYLTKHKRIALGLPKTHCADAFCIAGNLKALRRGDFLFQQQTRKHNRQIHRCSILKGGVRKLNQAPFLVKGFRLFDKVRIGGQIGFVFGRRVRGIFNIRRLDKTVIGTDINCKKLSLLETRKTFLTELRKE

SEQ ID NO: 12132 - protein, 482 aa, unidentified
LVWNVQAPWDVYPSPTLCGLCLKVLRGRNGDADKKPIPTLTKDENRPSGRTTGLRAEQAEPAGIRKGDTLKVFVLNMRGKPLMPCSPAKARHMLKAGKAVVVRRTPFTIKLTIATGETKQDVTLGVDAGARHVGISATTEKEEIFASEVKLRQDITGLLADRLAFRRARRNRKTRYRSPRFNNRVRSKHKGWLAPSVENRIQAHMSRIEAVCRLLPVTKIVIETASFDIQKIRNPEVEGTGYQQGDQLGFWNVREYVLFRDGHICQHCRGRSKDPILNVHHLESRKTGGDAPNNLITLCETCHKAYHAGKIKLKVKRGQSFRAEAFMGIMRWTLLDRVRKTHPKLPVENTYGYLTKHKRIALGLPKTHCADAFCIAGNLKALRRGDFLFQQQTRKHNRQIHRCSILKGGVRKLNQAPFLVKGFRLFDKVRIGGQIGFVFGRRVRGTFNIRRLDKTVIGTDINCKKLSLLETRKTFLTELRKE

SEQ ID NO: 12133 - protein, 396 aa, unidentified
VVRRTPFTIQLTIATGESKQPVSLGVDAGYKHVGLSASIEKAELYASEVELRKDITDLLSARRALRQSRRNRKTRYRAPRFDNRIRTKRKGWLAPSVENRINAHLSRIEAVLRLLPITKITVETASFDMQRLKNPDISGKEYQEGEQLGFWNVREYVLFRDGHVCRHCHGRSKDPVLNVHHLESRRTGSDSPDNLITLCETCHKALHRGEITLKAKRGQSFRAQAFMGIMRREVLNRLKASYPELKVHETYGYLTKHARIANGIVKSHGADAFCIAGNLGAERLGEFFFQKQTRRNNRQIHKLSILKGGIRKRNQAPFEAKGFRLFDKVACQGEEGFIFGRRSSGSFDVRKLDGTRISAGISCKKLRLLEKRRTYLTEIRKEEALPPLPEGRGLRA

SEQ ID NO: 12134 - protein, 406 aa, unidentified; identical to SEQ ID NO: 8999

SEQ ID NO: 12135 - protein, 442 aa, unidentified; identical to SEQ ID NO: 2834

SEQ ID NO: 12136 - protein, 509 aa, unidentified
MSTCVCVLSNSGERLMPTFRLGKVRRLLKDGKAKIVKHHPFTIQLLYDSKTNTQPIEICEDVGYNYIGISVKSEFHEYVSVQYDTLQDEKEHHDDCRKYRRTRRNRLRYRQARFDNRKRDDGWLAPSLEHKKELNVNVIKMYCEVMPITHAIVEVGSFDTMLVKAIEEGKATPESTDYQKGPRYNLASLREAVFYRDNYTCQVCGRKANEGAILHVHHMFYWKGRHGNSLNELVTVCEKCHTPANHQKGGKLYGFGENIKFANLSGAAFMNTVRWQIVNELYAAFGKPFVTFTYGAMTKEKRIALHLDKSHSNDAYAMGNFHPVDRCAFEHYEKVKRNNRILEKFHDSRYIDIRTGKEAKGKELFNGRISRSHKKDSENLHKYRGKRIRKGYRALRRKKVALNSGDLVSLNGETLIVHGTHTNKKGNVRVEFKVAALNGKKSASLKKLKIVKTSTPMHSAWAKVSQTPKKENAEYLHLLSVPQKYSWSMHSSPPKSQTTIDGVPYAQIL

SEQ ID NO: 12137 - protein, 451 aa, unidentified
MSVAVISKTGERLMPTSEYRARKLLKSGKAIKYSYHPFTIQLTERKTGNIQPIELCMDTGYIHIGISVKSEKHEYLTEQIDTLTDERSRHNARRMYRSQRRNRKRYRQPRFNNRKKDKGWIAPSLEHKKNIHVQAISRINNVMPLTDITMEMGNFDTQVLKAKEEGRPLPQGVDYQHGERYSIATLREAVFARDGYKCQCCGRTIKDGAILHVHHIKYRSQGGTNSISNLATVCDKCHTPKNHKPGGKLYGWKPKLPSFKGATFMTTIRWQLYNEAKALFPDIDIHITYGAATKERRRELNIDKSHINDAFVMGQFHPRHRIKAVLYKKKRRNNRCLEKFYDAKYIDSRDGKKRSGQELFNGRINRNHKKNSENLHQYRLQKVTAGKRTVRKQHYSVQPHDIIIYESRKRETTGCHCNGARVMLLPDKKSVSIKKIKIYRYAGGYFKSTFN

SEQ ID NO: 12138 - protein, 408 aa, unidentified; identical to SEQ ID NO: 3192

SEQ ID NO: 12139 - protein, 417 aa, unidentified
MPCSPAKARLLLKERKAIVKRRTPFTIQLTIATGEAKQPVALGVDSGYKHIGLSATTEKAELYASEVELRQDITDLLSARLALRRSRCSRKTRYRAPRFNNRVASKHKGWLAPSVENRIAAHLSRVEAVMRVLPVTAITVETAAFDTQLLKNPDITGAAYQQGEQLGFWNVREYVLFRDEHVCQHCRGKSKDSILNVHHIESRRTGGDAPNNLITLCETCHKAFHRGKIKLKVRRGKSFKAETFMGIMRWTLFERLKKAHPELNVRNTYGYLTKHKRISYGIAKSHCADAYCIADNLGAKRLEGFFFQKQTRKHNRQIHKLLILKGGLKKKNQAPYEVKGFRLFDKVICKGEEAFIFGRRTSGSFDVRRLDGTRISAGINYKKLRLLEPRTTYLTEFRKEAALPPLHECRGFRAEFL

SEQ ID NO: 12140 - protein, 406 aa, unidentified; identical to SEQ ID NO: 10859

SEQ ID NO: 12141 - protein, 424 aa, Xenococcus sp.
MQNYVFVLDTVKNPLNPVHPGQARRLLTEGKAAVFRRYPFTIILKEEAKETQKNVKLKLDPGSQKTGIALLQNNRVIWGAELQHRGQHIKDKLTSRRQLRKGRRGRKTRYRQPRFLNRTRPKGWLPPSLQHRVDTTLTWVKRLIRYCPVDSISVELVKFDLQKQENPEISGVEYQHGTLYGWEVREYLLNKFNRTCQYCGAQNVPFEVDHIKARSKGGSDRVSNLTLACHDCNQSKGNQDIKDFLKEKPDLINRILKQAKTPLKDAAAVNSTRWKLFNSLKEFGFPVETGSGGLTKFNRKQLKVPKTHWQDAACVGQLSKDLIFKTNQPLLIKATGHGTRQRCRPNKFGFPKSHASKAKFFRGFQTGDLVSASILKGKFTGQYLGRIAIRFRPSFVLQLPDKKFDVHPKYLTHVHKNDGYNYVY

SEQ ID NO: 12142 - protein, 428 aa, unidentified
LKVFVLNMRGQPLMPCSPAKARHLLKAGKAAVRRRTPFTIQLRIATGETKQSVTLGVDAGAKHVGLSATTEKEEVFASEVELRQDITGLLAARLSLRRDRRHRKTRYRAPRFLNRVRSKHKGWLAPSVDNRIQAHMSRIDAVCRLLPVTKIVIETASFDIQKIKDPSVEGTDYQQGNQLGFWNVREYVLFRDGHVCQHCHGRSKDKILNVHHLESRQTGGDAPNNLITLCETCHKAYHAGKIKLKVKRGQSFRAEAFMGIMRWTLLDRVRKAHPGLPVENTYGYLTKHTRITHGLPKTHCVDAYCIAGNLKAVRRGVYLHQRQMRKHNRQIHKFTVLSKRLEDGTKIGYRKLNQSPYLVHGFRLFDKVRCLGQIGFIFGRRSSGYFDVRRLDGVKLSPSISWRKLTLLEKRSTYLTELRKQDGASSPV

SEQ ID NO: 12143 - protein, 442 aa, Lactobacillus sp.
MKHENANRVFLLNKDGKPLMPCRPRKARLLLKSGKAFVVKKYPFTIQLKYGSYGYKQKVSLGVDTGQRHIGFAVVSQDKVLHQSEVELRQDVHTNLYTRKIYRRGRRTRKTRYRQARFLNRVHGKRDGLWLPPSVKSKVSHNIAWIKRYLAVLPNPDLHIEVGKFDMAKIVNPDISGKQYQEGSLKDWKNYEYYVLARDEYTCQLCYKHGEGVKLVVHHIVYRSQGGTDRVDNLITLCTNCHTTKNHQPGGKLYKWMKAKKKVTKQLKGATFMNILHKRIMTTFPEASFQYGSQTYVDRKNLLLPKGHFMDAIAISGIKPVGQMPETVTMISQFRKKKRSLHEATARKGRKQPNTSSKRNEKNTKYACGLWLNDYVRVIGNHVKGYVKGLKSNGYYVYLTDGLGNYVLNNGKNYINGQQCRLIMHNGNWQKAEQKLSLYEFK

SEQ ID NO: 12144 - protein, 443 aa, Anoxybacillus sp.
MVEENMTCFMQRKGENPMVFVLDTNKRPLAPCHEAVARKLLKQGKAAIYRRFPFTIILKKSVDESEIKATYRLKIDYGSRHTGLAILRGQEVVWLGQLDHRTDIKERMDKRRAFRRARRNRKTRYRKPRFLNRRRKDGWLPPSLESRVQNIQTWVNRLKKLCPIGYISYENAKFDTQLMRNPEINGVEYQQGTLQGYEVREYLLEKFGRKCCYCGKENVPLEVEHIIPKSRGGTDRVDNLCLACHDCNQRKGSKTAEEFGYPHIQKQVKETLKDTSAINSTRWKVYEVLKQSGCEVECGTGARTKMNRIRLDLPKTHYFDACCVGESTPNHLYFKTKEVLFIRAKGRGSRSRTNLDRYGFPRGYLARQKFFFGFQTGDMVKAVVPRGKYQGVWFGEVACRKTGSFDIKGKDGKRIAQGINYRYVQVIQRFDGYAYGKGVAELA

SEQ ID NO: 12145 - protein, 689 aa, Acrocarpospora sp.
MLRDLAERATVVGAGSGRLVLALDVRHPVGGPESSESVRYARPLRQPRVICHIGQHMTRPYSDGRPPNVSDPCPVGTTFTEEYGQPSGTSTGTCSLSADKAPDLPAEFQPDSRGDDPRQRPRLEGRSLRCGSCCIDWLHVDQTSHHHWRCSQMASLNTRSQTRQWMLPQSAALESAPAENAHGVSTERGSDVADYSVAPGVQHGRGEIGQSAPAVRRHPKAGSPVAGDRGGNAPVVFVLDKHGTPVQPTSPARARRLLDSGRAVVARHTPFVIRLKDRIIAESTVQGVQVGIDPGSKHTGIAVFTGDGATRTGKYSVRLDHRGGLIRDRLASRANYRRRRRSANLRYRAPRFANRAKPKGWLAPSLRHRVDTTMSWVSRLTRWAPVRVIHFERVSFDTHALSAGRPLDGVEYQQGTLAGYEVRQYLLEKWGRACVYCGRENLPLQVDHLHPRVRGGSDWVSNLTLACRRCNRAKNATPVEEFLQDRPALLARVVKKAKLPLRDAAAVNATRWALWRALEATGLPVVTGSGGRTKWNRSRTGAPKSHTLDALHVGELDTVTGWPSQVLLVKATGRGRYCRTRTDAYGFPRLRLPRIKQVRGFVTGDLVRANVPKGKNAGVHTGRVAVRSTGRFNITTVHGTVQGINHRHVRLLQRADGYGYTTTKESTVETSSGYARASDGLPTPAAAAA

SEQ ID NO: 12146 - protein, 326 aa, unidentified
MDTGSKHIGSAAVANGQVVYQTQIEIRNDVSGKMEQRAMYRRTRRSRKTRYRPARFDNRGKVGKIAPSIKSKVDSHLREKKFVESILPISEWKVELASFDIHKISNPSVSKLQSVKLHVHHIKFRSQGGSDTPGNLITLCEDCHDSLHAGKLGDRVHEKLTKKTASKTKHATEMGIVKSQLKKSEWVFTETFGYETKFKRETCLNLPKTHFFDAIAICLGEGEIVNGSSFVYLKRHIANGDFQQTSGRRSEEKIPTGKIQGFKKFDKVLWEGKEFFIKGRMSTGYAILMGIDNKKVTLKPIPKFLFMKRLTAIKSCLSMSRGLENS

SEQ ID NO: 12147 - protein, 493 aa, unidentified; identical to SEQ ID NO: 2644

SEQ ID NO: 12148 - protein, 445 aa, Scytonema sp.; identical to SEQ ID NO: 2723

SEQ ID NO: 12149 - protein, 442 aa, unidentified; identical to SEQ ID NO: 3218

SEQ ID NO: 12150 - protein, 413 aa, unidentified; identical to SEQ ID NO: 3616

SEQ ID NO: 12151 - protein, 412 aa, unidentified; identical to SEQ ID NO: 8978

SEQ ID NO: 12152 - protein, 514 aa, unidentified
MSTVYVLNKDGKPLMPTTRCGHVRHLLKEQKARVVTSKPFTIQLLYEADDLVQSLYLGIDPGRTNIGVAVVKADGTAVFTAHLETRNKEIPKLMKKRKESRRARRTNGRRCRRQRRAKANDTISKKCVKQDTAQSGSASKRAKKIGVIKRHLPGCEKGVLCIGIKNKEAKFSNRTRPEGWLTPTANQLLQTHINLVKKIRKFLPISDVVLEINKFAFMQLDNPNIQKWQYQQGPLYQKASLEEAVSEMQEHHCLFCKKPIAHYHHVVPQSENGSDTIGNIIGLCTKHHDLVHKDTAWQKKLAKKKTGLNKKYGALSVLNQIIPALTKGLGSRFQGYFYVTTGKSTYDYREVHGVSKDHWLDAYCIACSVLPNDVCDSDINNRVPYELKQFRRHDRRALHKANINRVYTLNGKSVATNRHKAIKQTTDSLEEFRQCQPDDVCKLKVKEHHPEYRNPERNFPGCVFLVGKHTHVMQGTSGSHNGQADGYYDTNGNSYSSGKCKFVAKNEGIVFTLN

SEQ ID NO: 12153 - protein, 456 aa, unidentified
MAVLVLDRHKNPLMPCSEKRARKLLERGRARIHRLMPFSIRLVDRTVNESMLQPVKIKLDPGSKTTGIAVVRHSETMDDATGEIHVTVHVLNLFELHHRGQQISESLTARRQMRRRRRGNLRYRKPRFLNCGNKGKGWLAPSLQHRVDTTGAWVHRLQRLAPVTGIAQELVRFDLQQMENPEISGVEYQQGTLAGYETREYLLNKWNRECAYCGTRNVPLQIEHITPKAKGGSPRISNLTLACRSCNQQKGAQEINVFLAKDPQRLARIQAQAKRPLKDAAAVNTTRWVLFNTLKITGLPVTTGSGGLTKFNRTRLDIPKTHALDAACVGDMDEIRDWNKPTLAIKATGRGSYQRTRLNAYGFPRGYLTRQKRIKGFQTGDRVKAEVTQGKKIGSYLGRVAVRASGSFNLQTAQGVIRGMGYRYCKVIQRADGYGYSQPLNPKEAELRSARYPSPA

SEQ ID NO: 12154 - protein, 442 aa, unidentified; identical to SEQ ID NO: 2834

SEQ ID NO: 12155 - protein, 515 aa, Streptomyces sp.; identical to SEQ ID NO: 6191

SEQ ID NO: 12156 - protein, 437 aa, unidentified
  VARIANT 437: note = X can be any naturally occurring amino acid
MNKVFVLDTTKQPLAPCHPAKARKLLRDGQAALYRAYPFTIILLRAVEEPVAPPLRLKIDPGSKVSGLAIVHDASGEIVWAAEVAHRGEPIRAALVQRASVRGNRRSRKTRYRKPRFLNRRRRAGWLPPSVASRVENIMIWVRRLCQLCPIQALALELARFDTQALQNPEISGVEYQQGELAGYEVKQYVLEKWGRQCAYCAATQVPLEIDHIVARDRGGSHRVSNLTLACVPCNQKKSNHNVRDFLAHDPARLARIVAQAKTPLKDAAVVNSTRWALYEALLALGLPLEVGTGGRTKWNRSMRGLPKTHWLDAACVGASTPEVLWTSGTLRPLQIRATGHGSRQMCAMDKYGFPRTRAKQAKRVQGFQTGDIVKAVVPSGKPTVGALGEAGHLCRARRRARFRQFQYPHRQWFGGGHQLSLLPPSPPRRWLCLFLX

SEQ ID NO: 12157 - protein, 456 aa, Halomonas sp.; identical to SEQ ID NO: 9152

SEQ ID NO: 12158 - protein, 475 aa, Blautia sp.; identical to SEQ ID NO: 4128

SEQ ID NO: 12159 - protein, 218 aa, unidentified
MSVAVMSKTGMRLMPTSEYRARKLLKSKKATVYRYNPFTIQLTERETGDVQTVELCMDTGYLHIGTSVKSEKHEYLGVQIDTLTDEKQKHDACRMYRRQRRSRKRYRQSRFNNRKRSDGWIAPSLEHKKDIHIQTISRICNAMPITNITLEMGNFDTQVLKALEENRPLPQGTDYQHGERYGIATLREAVFARDKYTCQCCRKTIADGAILHVHHIIN

SEQ ID NO: 12160 - protein, 414 aa, unidentified
MPCSPAKARLLLKEKKAIVVRRTPFTIQLTIATGETKQPVSLGVDAGYKHVGLSASTEKAELYASEVELRQDITDLLSARRALRQSRRNRKTRYRAPRFDNRIRTKRKGWLAPSVENRINAHLSRIEAVLRLLPVTKITVETASFDLQLLKNPDISGKEYQEGEQLGFWNIREYVLCRDGHVCQHCYGRSKDPVLNVHHLESRRTGGDSPGNLITLCETCHKALHRGEITLKAKRGQSFRAEAFMGIMRWEVLNRLKASHPELEVNNTYGYRTKHARIANDIAKSHCADAFCIAGNLGAERLGEFFFQKQTRRNNRQIHKLSILKGGIRKRNQAPFEVNGFRLFDKVACKGEEGFIFGRRSSGFFDVRKLDGTRISAGISYKKLHLLEKRRTYLTEIRKEEALPPLPEGRGLRA

SEQ ID NO: 12161 - protein, 200 aa, unidentified
LGKDSHSLRRGQFCQSLTVTTTRKETTSMYVYVLNQHGEPLMPCSPRKARTMLRDHKATVVRRTPFTIRLLHGCSGYTQRITLGVDAGSKFIGLSACTESKELFAAEVKPRNDVVDLLSTRRELRRSRRNRKTRYRVARFDNRVHSKHKGWLAPSVEVKIQEHITAIKRTCAILPISMVIVETAEFDTQRLKAMLEGKPL

SEQ ID NO: 12162 - protein, 544 aa, unidentified
MKQKKQKVMVYILNKKGKPLMPTTRCGHVRKLLDSKKAVVVNSNPFTIRLKYDTPNGVQDVFAGIDSGRENIGSGASNEDGDCLYLGELRTSNKSIKMKMTERVGFRRERRKHDRQNKQRKARKDHTEIQNGNADICRTTISCKSVQISYPAAEKSVTHKIIRGKEGKFANRHRDGDWITPSARQLVQMHMNDLKSMCKILPISHVTLERVAFDFQKLENENIKVWEYGKGKLYGYDSPEEYIHDVQNGKCLVCGKPHIDYLHHIIPRSKGGSDKVSNIAGLCYDCHYGPMGVHNCQNTQDRLPELKSEANKQYKVSLLNSVMPVLIEEMDKFCKANSIMFSICEGHDTAKVRDMYDLQKDHCLDGFAISLVGRNVKSVDVMPDRIHQKQRYKKKSKNIIQKRNCREYYDDKKLVAVNRHKGTDQKADSLEEYMNTYAETHTTDECKKHFDSLVVKPARRTYTFHKEWRICPFHIGDKVRYEKKNKIKGNTKVDTFICEGIRFVKDENKAEVKHNKTKSKKMKFCRVLESGCTPYVDYRKLALM

SEQ ID NO: 12163 - protein, 493 aa, unidentified
MAAVYVISASGKPLMPTTRCGHVRGLLNAGKARVVEREPFTIQLKYETPDVTQPLYLGIDPGRTNVGSAVVREDGECVFTAQLTTRNKDVPKLMKARKQFRMAHRRLKRRCKRQRRAKAAETLSQKGEFQRLLPGYEEPIICKGIRNKEARFNNRQRPAGWLTPTANHLLLTHLNMVKKLQKLLPITDVVLEVNRFAFMAMENPSIRRWQYQQGPLYGKGSVEDAVYAQQDGHCLFCGKPIAHYHHVVPQHKNGSETLENRVGLCNEHHDLVHKDRAWDAKMKETKAGLNKKYHALSVLNQIIPALTEQLTAMFPQHAFVTTGKDTADFREDYGIAKEHHLDAYCIACSVLAEPTKVAAPTGKPHRLMQFRRHDRQGCHKENIKRVYLSEGKAVATNRHKAIEQKDDSLEEFRKTHTQQEVSALTVKDHQPVYKDMRRFMPGGVFLFNGKVHTLQRSHGRYKEMPFYYIDTDGSKNHAKGCIFLQQNCGMRWA

SEQ ID NO: 12164 - protein, 355 aa, unidentified
LSASTEKRELYREEFTPRNDVVELLSTRRQNRRSRRNRKTRYHAPRFDNRVHSKHKGWLAPSVEVKIQEHITVIKRICRILPITLVRVETAEFDTQRLKAMLKGKPLPVGTDYQLGEMYDEYNVRQYVLKRDNYTCQCCGAHPTEKKPIRLHVHHIESRHVGGNAPNNLITLCVACHKALHEGKITLDKGKKRGKPLRDAAFMGIMRNTLLARLKDELNIPVKQTYGYITKLLREKNKIPKSHVNDARCIAKAPNAKPCDTMLYTRALRHHNRQIHKAKILNGGIRKKNQAPYLVKGFRLWDKVRYNGEECFITGRRSSGYFALKKYDGTVISNSASYKKLMLLEAATNYITERS

SEQ ID NO: 12165 - protein, 436 aa, unidentified
MTKTLTKQTTQACVLDQQGKPLMPTTRLGKVYRLLKTQKAHIVSYEPFTIQLDYEPDTHIIQPMTLGVDSGAIHSGYSVANEHREYYNAEVIARDDISKRLSDRRMYRQNRRSRKIRHRKPRFNNRKNKKKGWLPPSLEQKVAVQLNEIDHLHRYFPIKTIIVEVAEFDIQKIKNPDISGVEYQQGTLQGYNIRNYLLEKHGRKCFYCGKSVSKFEIEHMLPKSRGGSNRIDNLTLSCHDCNQKKDTLTAEEFIRQTLPAKKAAAKLKQLPNEKRLFKYMAHMNATRWALYNAIDKKYANVKMTYGYITKYNRIQADLPKAHHIDAKCITSFVTVPSMKQTIVKIKMRRHNRQLHRATFSKGHVRKAACLPTVTFGFQLYDLVCFNNHHYYIKGRRSSGYFKLTSVESLKDEERSYKKLTLLAHTNAYLINHYADL

SEQ ID NO: 12166 - protein, 512 aa, unidentified; identical to SEQ ID NO: 8071

SEQ ID NO: 12167 - protein, 451 aa, unidentified
MSVAVISKTGERLMPTSEYRARKLLKSGKAIKYSYHPFTIQLIEREAGDIQPIELCMDTGYIHIGISVKSEKHEYLAEQIDTLTDERCRHDACRMYRRQRRGRRRYRQVRFNNRKRDQGWIAPSLEHKKKIHIQAISRINKVMPITDITLEMGNFDTQVLKAKEEDKPLPQGADYQHGGRYGIATLREAVFSRDGYKCQCCGRTIKDGAIFHVHHIKYRSQGGTNSMLNLATVCDKCHTPKNHKPGGKLYDWKPKLSSFKGATFMTTIRWQLYSEVKALFSDIDIYITYGAATKERRRELDIDKSHVNDAFVMGQFHPKHRIKAVLYKKKRRNNRCLEKFYDTKYIDSRDGKKRSGQELFNGRINRNHKKDSENLRQYRLQKVTAGKRTVRKQHYKIQPHDIVIYENRKRETAGCHCNGTRMILLHDKKSASIKKVKIYRYAGGYFKSAFN

SEQ ID NO: 12168 - protein, 458 aa, Lactobacillus sp.; identical to SEQ ID NO: 5912

SEQ ID NO: 12169 - protein, 431 aa, unidentified
MPNKVYIINKHGRPLMPCSPAKARHLLDAGKAKVKKRTPFTIQLVYGSSGYTQEVILGVDAGSKTIGMSVSTTKEELLSAEVKPRNDVVDLLSTRREFRRARRNRKTRYRKPRFDNRVRSKHKGWLAPSVEVKIQEHITSIKRVCRILPVSKVVIETAEFDLQLLKAIEESKPVPQGEDYQQGEMYGHYNVRQYVLWRDGYTCQCCGAHATKKKEVRLHVHHLESRKVDGDAPDNQVTLCESCHEKLHKGLIAEKDFKKRKRKSTRDATFMGIMRKTLMQRLCSELPIPVIETRGYITKATREKLLVLPKSHTNDALAIAQGKQGFNVGYLPGIVQINKIYTIRPVRHHNRQLHKATILKGGIRKSNQTEKYVFGYRLFDKVQFNGQDCFIWGRRTTGIFTIKTINGKMIKDGISFKKLKPVEKSTGYLIA

SEQ ID NO: 12170 - protein, 423 aa, unidentified
MKVAVLDTNKQPLAPTSPRRARLLLKNGKAAIFRRYPFTVILKREVVNPSLPDLKLKIDPGSKISGIAIVNQASGEVVFAAELHHRGHVIRASLDSRRSLRHSRRQRKTRYRKPRFDNRMRPEGWLPPSLESRIENVYTWSQRLRRAYPITGLAMELVKFDMQLMENPEINGIEYQQGELAGFELREYVLVKFNHTCIYVGAGSPCDEILNVDHVIPQSKGGSNRVSNLVLSCRKHNEEKGNLSLEEYGKKRGIDFSRIKAQARAPLKDAAAVSATRWALFNRLKMTGLPVETGSGGLTKFNRVQRGLPKTHWIDAACVGASTPLRINAECVRPLSIKATGHGSRQMCQTDKYGFPIRYRTRNKTFTGFKTGDIVKAGIAKKTFAQGYAGRVTIRQRPSFILNGSDVHPKYLKRVHRSDGFAY

SEQ ID NO: 12171 - protein, 415 aa, Bacillus sp.; identical to SEQ ID NO: 2431

SEQ ID NO: 12172 - protein, 324 aa, Enterococcus sp.
VTLREDKNNSIKKKMDQRRMYRRNRRSCKTRYRKARFNNRKNSKRKERFSPTMTSKLHSHQKEIEFIKSILPIAKLIFETGTFDPRLMKNPSLANPKVKPWGYQQGPNYGFENTKARVLVRDNHTCQICNKKPKNERLEVHHIVFRSQGGSDEENNLVTLCHSCHVELHKGLIHPNFEGSLKSALKYATQMNSIRIQLLKLYPDAIETFGYVTKANRLNLGLPKEHYVDAAVIATAGNQVKFACNLMIKRCIPKGDFQRTKGVRSEKTIPKGKIDGFKKYDKVRYFGNEYFIKGRRTSGYFTLMDIYGQTISFNVIQAEVAHPL

SEQ ID NO: 12173 - protein, 408 aa, unidentified
RTNGRRCRRQRRAKANGTLSKKCVKQTTAQNGSVSKRAKKIGVIKRHLPGCEKEALCIGIKNKEAKFNNRTRPEGWLTPTANQLLQTHINLVKKIQKFLPISDVVLEVNKFAFMRLDNPNIQKWQYQQGPLYQKANLEEAVSEMQEHHCLFCKKPIAHYHHVVPQSENGSDTIDNIVGLCTKHHDLVHKETAWQEKLAKKKTGLNKKYGALSVLNQIILALTKGLSFLFPKHFFVTTGKNTYDYRTAHSVSKDHWLDAYCIACSVLPNDVCDSSINSHVPYELKQFRRHDRRALHKENMSRVYTLNGKKVATNRHKAIEQTTDSLEEFRQRQPNDVYKLKVKEHHPEYRNPKRNFPGCVFLVGKRTHVMQGSSGSHNGKADGYYDTNGNSYSSGKCKFVAKNEGIVFA

SEQ ID NO: 12174 - protein, 434 aa, Selenomonas sp.
MSFLATWARRKILLQRKVAEMLTTKKYAFVLDAEGKRFDPTIEQNAWRLVRQHKARLVSKFPMVIQLNKVVDNPNNDEIRCGIDDGANHVGLALVQKCQNKNKILFKGTIEQRKDVKHLLTIRRGYRRYHRYHKQHRPARFLNRASSRRRGRLMPSIIQRKQAMLRVIDRLRQWIRIDGYWLEDVKIDIRALTDGYRPYRWQYHKSNRLDNNLRLATIYRDGHKCMECGKTKTHFEVHHITPRETGGANTISNLITLCPACHARTFGRELQFANRYYVMIGSAVHVEGLDDAQRVMQGKHWFREQLQQRGTLSLTTGADTANKREDWNIVKTHANDAVCITDLEPDSIDIENWTIKPMRRKNKAGVDEVCGFHHRDYVTYTYRNGEVHTGYVTAMYPDKGQLNLQSPTKHCKRVNALKTRLLWRFNKIYWFKCA

SEQ ID NO: 12175 - protein, 420 aa, unidentified; identical to SEQ ID NO: 2681

SEQ ID NO: 12176 - protein, 414 aa, unidentified
MPCSQRKARILLKEDKARIIGYKPFAIQLTVPTGESTQEVHLGVDTGAKHIGIAATSENKVLAKGEIELRDDIHKNMQTRSALRRDRRNRNTRYREARFLNRKRKDGWLPPTVQSKLDATFMWIDKFCNLLPSPILHIEVGKFDIQKMMNPDIKNKEYQNGRCAGYYDVRYFVFARDNYTCQVCKKLNKILHTHHLVYKSKGGSDRADNLITVCTDCHSSENHKESGILYNWMFKHKKVKQYKEATFMNIIRKRTFRKYPNSVITYGSETTPHRKELVLEKTHYNDAIAISKIENIKENPQEYFYIKQFRKKKRSLHESIPTRGRRKEKNVNAERRNKNSPYRAGWFMNDMVSFQNKVGWIYGFSGGESGKECVLRDINGEIIRDSKRSKNNPNVKFSSLKFICHNNNWQYAIL

SEQ ID NO: 12177 - protein, 427 aa, Enterococcus sp.; identical to SEQ ID NO: 2410

SEQ ID NO: 12178 - protein, 418 aa, unidentified; identical to SEQ ID NO: 5294

SEQ ID NO: 12179 - protein, 425 aa, Mastigocladopsis sp.
MQTNYVFLVDTNKQPLNPIHPARARELLNKNKAAIYRQFPFTLVLHKAIDNPLVRLLTLKLDPGSKTTGIALLDGENVIWAAELQHRGWSIKDALNSRRSLRSSRRSRKTRYRMARFDNRKRPEGWLPPSLMHRVLTVETWVKRLCRYAPIAQTVMELVKFDTQKMQNPEIDGIEYQQGQLAGYEVRQYLLEKWGRKCVYCDKEGVPLQIEHIHPKSKGGSNRVSNLALSCKRCNLKKGTQLVDEFLKKDAKRLEKIKQQAKKPLKDAAAVNATRWTLFHTLKGILPTTTGTGAQTKYNRTLFQLEKQHWIDAACIGDIKAIKLLTLQPLLIKANGWGTRQMAGTNKYGFPIRHRTRQSLHFGFQTGDIVKAVVLSGKKVGQYVGRVLCRAKGSFDIVTKTGRVGDINHRFCKPIHKKDGYSYAF

SEQ ID NO: 12180 - protein, 442 aa, unidentified; identical to SEQ ID NO: 3234

SEQ ID NO: 12181 - protein, 465 aa, Burkholderia sp.; identical to SEQ ID NO: 5838

SEQ ID NO: 12182 - protein, 419 aa, Moorena sp.; identical to SEQ ID NO: 2999

SEQ ID NO: 12183 - protein, 414 aa, unidentified; identical to SEQ ID NO: 2588

SEQ ID NO: 12184 - protein, 413 aa, unidentified; identical to SEQ ID NO: 2636

SEQ ID NO: 12185 - protein, 500 aa, Erysipelotrichaceae sp.
MVYVLSASGKPLMPTEDHRQVRLLLKRKKAVVVRRTPFTIQLVNRVHNYTQPVSLGIDAGSKHIGVSATTEDRVLYEADAELRNDIVELISTRREARHARRNRKTRYRAPRFDNRRRSEGWLAPSVKQKVDCHIKVIADVHKILPISKMIIETASFDTQLLKATLEGKPLPQGTDYQSGEQLGFWNTREYVLFRDNHECQCCHGRSKDPVLNVHHIESRKTGGDSPDNLITLCETCHTGYHKGTVKLPAGIKRGMKFNDAAFMGIMRWSVYNRLKDLYPYVSLTYGYKTKNTRIRAGLPKEHCIDARCISGNPSALSDGIVYFQRKMRCHNRQIHKFKVNRGGLRKLNQAPYLVKGFRLWDRVLYNSEKCFIQGRRSSGFFQLKKLDGTLVSASASCKKLRLVETGKHFIMERRRAIPPRPAEDGASLPINDEKREIMAIDINQIKGFQLTHTIKGRSTTTTFAKKDFSLFKEWVNICKENGYEYDVSLIKEDGSIEPIH

SEQ ID NO: 12186 - protein, 406 aa, unidentified
MVYVQDIDGKPLMPTTRHGKVRRLLKSNKAVVVNLCPFTIRLTYISDSYKQEIVLGVDAGTKHVGLSATTKSKELYSSEVILRNDIVDLLSTRRELRRTRRNRLRYRKPRFNNRVKNKRPGWIAPSVRYKVDAHIRVIDNVCSILPISRIVIEVAQFDTQKINNPEISGKEYQEGDQLGFWNVREYVLARDGHKCQYCKGKSKDSILNVHHIESRKTGGNSPSNLITLCETCHKEYHKGNIKLKVKRGTSFRDAAAMGIMKWKLLDKLKSLYPNVSMTFGYITKHNRIKHEIKKSHISDAFVISKNFEAKRPGYYFKEKLVRRHNRQIHKMKILKGGKKKMNQAPFKVFGFRLFDKVEFQGNEYFIYARRLSGYFNIRDINSENKKDVTYKKLTHIGHGLISVETG

SEQ ID NO: 12187 - protein, 411 aa, unidentified
MVYVQDIDGKPMMPTTRNGKVRRLLKDNKAVVVNTCPFTIKLTYKTSDYKQGIVLGVDAGTKHVGLSATTKSKELYSGEVILRNDIVELLSTRRESRRTRRNRLRYRKPRFENRVKSKRLGWVAPSVRHRIDAHIRIINNVCSILPVSRVIVEVAQFDTQKIKNPEISGKEYQEGDQLGFWNVREYVLARDGHKCQHCKGKSKDPILNIHHIESRKTGGDSPSNLITLCETCHKEFHKGNIKLKVKRGKSLRDAAVMGIMKWRLYDKLKSLYPNVRMTFGYITKHDRINHGIEKSHVSDAFVISRNFDSERLGYYYKLKLVRRHNRQIHKMKIPKGGKKRMNQSPFKVFGFKLFDKVMFQGEERFIYARRLSGQFKIKDIDGNNERNISYKKLRYVSHGLISIKTNLFLSQ

SEQ ID NO: 12188 - protein, 417 aa, unidentified
MPCSPAKARLLLKEKKAIVKRRTPFTIQLTIATGEAKQPVALGVDSGYKHIGLSATTEKAELYASEVELRQDITDLLSARLALRRSRRSRKTRYRAPRFDNRVASKRKGWLAPSVENRIAAHMSRVEAVMRVLPVTAITVETAAFDTQLLKNPDIAGEAYQQGEQLGFWNVREYVLFRDGHVCQHCRGKSKDPILNVHHIESRRTGGDAPNNLITLCETCHKAFHRGEIKLKVKRGKSFKAETFMGIMRWTLFERLKKAHPELRVRNTYGYLTKHKRISHGIAKSHCADAYCIADNLGAKRLEGFFFQKQTRKHNRQIHKLSILKGGLRKKNQAPYEVKGFRLFDKVICKGEEAFIFGRRTSGSFDVRRLDGTRISAGINYKKLRLLEPRTTYLTEFRKEAALPPLHKCRGFRAEFL

SEQ ID NO: 12189 - protein, 465 aa, unidentified
MSTCVCVLSNNGERLMPTIRLGKVRHLLKDGKAKIIKHHPFTIQLLYDSKTNTQPIEICEDVGYNYIGISVKSQSHEYVSAQYDTLQDEKACHDSCRKLRRTRRNRLRYRKPRFDNRKRGEGWLAPSLEHKKELNVNVIKMYCEVMPITHAIVEVGSFDTMLVKAIEEGKATPESADYQKGPRYKLATLREAVFYRDNYTCQVCGRKVADGAILHMHHMFYWKGRHGDSLNELLTVCEKCHTPANHQKGGKLYGFGENVKFADLSGAAFMNTVRWQIVNELYAAFGKDFVTVTYGAMTKEKRIALRLEKSHNNDAYAMGEFHPNCRCTFEHYEKVRRNNRILEKFYDSRYIDIRTGEIATGKELFNGRINRNHKKDSENLHRYRGKRTYAGHRALLRKKVNLNPGDLVSLNGEILVVHGTHTKKNGSVNVEFKVPSKSGKKSASLKKLEIIKTSNSMRSAWKKVS

SEQ ID NO: 12190 - protein, 456 aa, unidentified
MTNIYILDINGKPLMPCHNGAFVRCRLKNKEAKVVKRKPFTVQLMYEVKNNYKQDIYLGVDAGYKYIGFSASTGNQELFSGELEQDCGMVERNKERRMYRRQRRSRLRYRKARFNNRKAAKPQGWTAPSLQRKRDTHLRFIMMLSSIMPITDINVEIGLFDPALMKATAEGRTIKGTDYQHGEAEGFENMKSYIRYRDSYTCQNPNCKCHKMKKEDREKLKLHVHHIGYYKHDRSSRPGNLITLCELSHTPETHQPGNLLYGWKPKMKSLRETAFMNTVHKEIVDTLKAVYPDKTVRYTYGYKTNLTRRDWHVPKSHHDDAFCIAGQYSLKRADTVYFNQQRRNNRSLEIFYDAKYIDSRDGKRKTGKELYCGRNTRNKNFNKENLHQYRSKKVSKGKRNIRKQRHKYQPNDIVVFEGQKYKIRGSHCKGSRVILDTKKSVSVKKIHILKHCSGIC

SEQ ID NO: 12191 - protein, 460 aa, unidentified; identical to SEQ ID NO: 7734

SEQ ID NO: 12192 - protein, 470 aa, Blautia sp.; identical to SEQ ID NO: 2925

SEQ ID NO: 12193 - protein, 456 aa, Halomonas sp.
MAVFVLGKNKQPLMPCSEKRARLLLERGRAVVVNLTPFMIRLRDRCQRDCTLQPTLLGIDPGSKETGLTLMRLEDNATDEQAPAIRHVLCLFQLVHRGFQIRQALEQRAGFRRRRRSKNLRHRKPRFDNRTRKKGWLPPSLQHRVDTTMAWVGKLCRWAPVTHLSMELVRFDLQKMENPEISGIEYQQGTLLGYEVREYLLEKWGRKCAYCGTGDTPLEIEHVVAKSRNGSSRVANLTIACHDCNQAKDSQWLADFFATNKGLKKRLKANGLSAEVRLERVQRQLKLPLRDATAVNATRWALFGAMKSTGLPVAVGSGGRTKYNRQRLGIPKTHALDAACVGKFDTLKGWRVPTQVIKAMGRGRYQRTRLDKFGFPRGYLMRQKQVKGFQTGDRVRAIVPAGKKAGTHTGRVAIRKTGSFNIQTEQGAVQGISWPYCTLLQRGDGYGYHQIPTTQH

SEQ ID NO: 12194 - protein, 566 aa, Parasutterella sp.; identical to SEQ ID NO: 11555
  VARIANT 122: note = X can be any naturally occurring amino acid

SEQ ID NO: 12195 - protein, 419 aa, unidentified; identical to SEQ ID NO: 3927

SEQ ID NO: 12196 - protein, 406 aa, unidentified; identical to SEQ ID NO: 7406

SEQ ID NO: 12197 - protein, 439 aa, Campylobacter sp.; identical to SEQ ID NO: 4429

SEQ ID NO: 12198 - protein, 417 aa, unidentified
MPCSPAKARLLLKEKKAIVKRRTPFTIQLTIATGEAKQPVALGVDSGYKHIGLSATTEKAELYASEVELRQDITDLLSARLALRRSRRSRKTRYRAPRFDNRVANKREGRLAPSVENRIAAHMSRVEAVMRVLPVTAITVETAAFDTQLLKNPDIAGAAYQQGEQLGFWNVREYVLFRDGHVCQHCRGKSKDPILNVHHIESRRTGGDAPNNLITLCETCHKAFHRGEIKLKVRRGKSFKAETFMGIMRWTLLERLKKAHPELRVRNTYGYLTKHKRISHGIAKSHCADAYCIADNLGAKRLEGFFFQKQTRKHNRQIHKLSILKGGLRKKNQAPYEVKGFRLFDKVICKGEEAFIFGRRTSGSFDVRRLDGTRISAGINYKQLRLLEPRTTYLTEFRKEAALPPLHECRGFRAEFL

SEQ ID NO: 12199 - protein, 420 aa, unidentified; identical to SEQ ID NO: 8221

SEQ ID NO: 12200 - protein, 455 aa, Halomonas sp.; identical to SEQ ID NO: 3688

SEQ ID NO: 12201 - protein, 431 aa, unidentified; identical to SEQ ID NO: 2933

SEQ ID NO: 12202 - protein, 627 aa, unidentified
  source 1..627: note = Lachnospiraceae bacterium UBA7780
MQELEACICAVGDTMNAPTALVQVVALLQFMVKFRVHGIRNTVTLLPQKVPHWMHSNAVYDSELSFQKDVTVYMYVRVIAKDGTPLMPTRRCGNVRYLLETGMAVAIRTKPFTIRLKYETSKYVQALYAGIDTGRENIGSAVSKENGENVYLADTRSNNGTVHSKMYDRAGFRRKRCRHDRQNKQRKAKFDGTEMKKGDADKVRTTHDCISRKVSYPVAEKSVTHKVIQGKEGKFNNRKHPDGWITPSAKQLVQITMNEVKFMCDTMPIRQLSVERVSFDFQKLANVNIRAWEYGKGPLYGYRSYKDYFCDEQKGKCPFCGEDIAHYHHIMPRHRRGTDTVRNIIGVCESCHEKIHSGQITDEMLHEVKDGVAESFEVGLLNSVMPALIDAMKQFCDARNIRLVVMDGRTTSETRNRYHIRKDHCTDAYCISLAGRNIDPADVKLDDFIFMKRRFKKKSKNIINTLNQRVYYDGKKPVAYNRHRAMDQKTDSLEEYMTKYRRTHTGAETDKHFRSLTVRPAKRTYTFHKNGTIAAVHAGDVVRYVKYNKTYGNTKIDTFVALSCEMFGEGHVKYGNGTQGRKLKFCKTIASGALQCVGIEKTDTYLREVALEEAKRRAARVRRKRTG

SEQ ID NO: 12203 - protein, 426 aa, unidentified
MLKPNFVLVIDTNLKPLTPCTPCIARKLLEAGKAAIYRQYPFTIVLKKTVEANPEPIELKLDPGSKVTGIALVQGEKVIFGAELTHRGQAIKISLESRRANRRGRRARHTRYRQSRCLNRTRPKGWIAPSLAHRVETTLTWVKRFIKLAPIGSITQELVRFDLQQHENPELSGIEYQQGELAGYEVREYLLNKWDRKCTYCGIENVPLQIEHIHPKAKGGSNRISNLCLACAKCNLKKGTQDIEQFLSKKPDLLKKIKAQQKRPLKDAAAVNTTRWTLFNRLQETRLPVSTGSGGKTKFNRTRLKLDKTHWLDAACVGNVEALSVLISQPILIKATGHGSRQACRTDKYGFPSRYVPRFKFVKGFQTGDIVKAIVASGKKIGTYVGRVAVRSSGSFNISDKTGLISGVSHKYCQSIHKKDGYGYSL

SEQ ID NO: 12204 - protein, 417 aa, unidentified
MVYVISKDGQPLMPIRRNGKARRLLNKGRARVVHREPFTIQLLFETEDNVTPLTLGVDTGSSKIGCAVVTPKKEVLYISEVQVRNDIKTKMERRKVYRRARRTRKLRYRKSRFLNRRNSTKKDRFSPTMISKINSHIREIEFIKSILPITTLVLETGTFDPHLLKMEGQLFNRHWGYQRGPNYGFANSKAACLNRDDYTCQCCKTKKGTLHAHHIIYRSQGGADTLDNLITLCEECHRKLHNGELVSFESKLKGKKKGQLKHATQMNSIRVQLLKYYPDAIETYGFITKENRQLIELEKTHYNDAIVIAMGSLDTPKLRINILYKKQHIAKGQYKLHQGQRSHQKLPRGKVYGFLNKDIIEYRGNIYLIKSLMSSGYCALSDINGVVQKFENPKTVKLNSIKRISARNTTRCISQKL

SEQ ID NO: 12205 - protein, 442 aa, unidentified; identical to SEQ ID NO: 7213

SEQ ID NO: 12206 - protein, 451 aa, unidentified; identical to SEQ ID NO: 4938

SEQ ID NO: 12207 - protein, 346 aa, unidentified; identical to SEQ ID NO: 2872

SEQ ID NO: 12208 - protein, 470 aa, unidentified; identical to SEQ ID NO: 2949

SEQ ID NO: 12209 - protein, 421 aa, unidentified
MQYVYVLNKHGEPLMPCSPGKARLLLKQQKACVVKRTPFTIKLLYGSAGYKQPITLGVDAGSKHVGLSASTEKRELYREEFTPRNDVVDLLSTRRQNRRSRRNRKTRYRAPRFDNRVHSKHKGWLAPSVEVKIQEHITVIKRICRILPITLVRVETAEFDTQRLKAMLKGKPLPVGTDYQLGEMYDEYNVRQYVLKRDNYTCQCCGAHPTEKKPVRLHVHHLESRHVGGNAPNNLITLCVACHKALHEGKITLDKGKKRGKPLRDAAFMGIMRNTLLARLKDELNIPVKQTYGYITKLLREKNKIPKSHVNDARCIAKAPNAKPCDTMLYTRALRHHNRQIHKAKILNGGIRKKNQAPYLVKGFRLWDKVRYNGEECFITGRRSSGYFALKKYDGTVISNSASYKKLMLLEAATNYITERS

SEQ ID NO: 12210 - protein, 417 aa, unidentified; identical to SEQ ID NO: 2758

SEQ ID NO: 12211 - protein, 328 aa, unidentified
VYKRQTRYRAPRFDNRIRTKCEGWLAPSVENRINAYLSRIEAVLRLLPITKITVETASFDTQLLKSPDIAGEEYQKGEQLGFWNVREYVLFRDGHVCQHCHGRSKDPVLNVHHLESRRTGGDSPGNLITLCETCHKALHRGEITLKAKRGQSFRAEAFMGIMRWEVLNRLKASHPELEVNNTYGYRTKHARISNGIAKSHCADAFCIAGNLGAERLGEFFFQKQTRRNNRQIHKLSILKGGIRKRNQAPFEIKGFRLFDKVVCKGEEGFIFGRRSSGYFDVRKLDGTRISAGISCKKLHLLEKRRTYLTEIRKEEALPPLPEGSGLRA

SEQ ID NO: 12212 - protein, 431 aa, unidentified
MPNKVYVINKHGRPLMPCSPAKARHLLDEGKAKVKKRTPFTIQLVYGSSGYTQEVILGVDAGSKTIGMSASTTKEELLSAEVKPRNDVVDLLSTRREFRRARRNRKTRYRKPRFDNRVRSKHKGWLAPSVEVKIQEHITAIRRVCGILPVSKVVIETAEFDLQMLKAIADGKPVPQGEDYQQGEMYGHYNVRQYVLWRDNYTCQCCGAHPTKKKEVRLHVHHLESRKVGGNAPGNLVTLCDRCHEKLHKGLITEKDLKKRKHRSTRDATFMGIMRKTLMQRLCSELPIPVVETRGYITKATREKLLVLPKSHTNDALAIAQGKHGFNASYLPGIVQSDKIYTIRPVRHHNRQLHKAAILKGGIRKSNQAEKYVFGYRLFDKVQFNEQDCFIWGRRTTGIFTIKTINGKMIKDGISFKKLKLLEKSTSYLIA

SEQ ID NO: 12213 - protein, 423 aa, Moorena sp.; identical to SEQ ID NO: 2845

SEQ ID NO: 12214 - protein, 424 aa, unidentified; identical to SEQ ID NO: 8578

SEQ ID NO: 12215 - protein, 248 aa, unidentified
VSSFFLAAILSKEHGIMQYVYVLNKHGEPLMPCSPGKARLLLKQQKACVVKRTPFTIKLLFGSAGYKQPITLGVDAGSKHVGLSASTEKRELYSEEFTPRSDVVELLSTRRQNRRSRRNRKTRYRVPRFDNRVHSKHKGWLAPSVEVKIQEHITVIKHICKILPISLVRVETAEFDTQRLKAMLAGKPLPVGTDYQLGEMYDEYNVRQYVLKRDHYTCQCCGTHNTAKKVVKLHVHHLESRKTGGNAP

SEQ ID NO: 12216 - protein, 417 aa, unidentified
MPCSPAKARLLLKEKKAIVKRRTPFTIQLTIATGEAKQPVALGVDSGYKHIGLSATTEKAELYASEVELRQDITDLLSARLALRRSRRSRKTRYRAPRFDNRVASKRKGWLAPSVENRIAAHMSRVEAVMRVLPVTAITVETAAFDTQLLKNPDIAGEAYQQGEQLGFWNVREYVLFRDGHVCQHCRGKYKDPILNVHHIESRRTGGDAPNNLITLCETCHKAFHRGEIKLKVKRGKSFKAETFMGIMRWTLFERLKKAHPELRVRNTYGYLTKHKRISHGIAKSHCADAYCIADNLGAKRLEGFFFQKQTRKHNRQIHKLSILKGGLRKKNQAPYEVKGFRLFDKVICKGEEAFIFGRRTSGSFDVRRLDGTRISAGINYKKLRLLEPRTTYLTEFRKEAALPHLHECRGFRAEFL

SEQ ID NO: 12217 - protein, 428 aa, Beggiatoa sp.
MQRVFVLDHNKQPLMPCHPARARKLLKKGKAAVYRRYPFAIIMTHRVGGDLQTVEIKFDPGSRTTGIALVGDFDRGKEVIWAGNLNHRGHQIKSNLNSRRAIRRARRNRKTRYRQARFNNRRRPKGWLPPSLRSRVDNTKNWMHKLARLAPLTQIAVETVRFDTQKLQKPEISGVEYQQGELAGYELREYLLEKWGRECAYCGAKNIPLEIEHIQARSKGGSDRVSNLTLACTPCNIDKGNKDIKEFLSLKPKRLKKIQATATAPLKDAAAVNATRYATGNVLKCFSLPITFSSGGRTKFNRVKLGYLKDHWIDAACVGESGSQVVIPKAITPLIITSKGRGSRQKCRMNQYGFPRTGPKKQKQVKGFQTGDIVKAIVTKGKKIGTYIGRVVVRSRGSFDIGSGEKKVGSISYKYCQLLQRADGYEYT

SEQ ID NO: 12218 - protein, 421 aa, unidentified; identical to SEQ ID NO: 2610

SEQ ID NO: 12219 - protein, 515 aa, unidentified; identical to SEQ ID NO: 11080

SEQ ID NO: 12220 - protein, 413 aa, unidentified
MTSYSFVLDANGKPLAPTKEQKAWFFIRKKRATLVSKYPMVIQLKKEIPEKEICQDEIRCGIDDGGLHVGIALVQKCKTKNKVVFKGTIEQRNDVKHLMEVRRGYRRYHRYHKRYRQARFDNRKSSKREGRIAPSILQKRQATIRVIHWLNKWINITNYWLEDVSVDIRALTDGYQSYRWQYQKSNRLDENIRKAAILRDDGKCMECGKSNCRLEVHHIKPRRRNGSNTLDNLITLCESCHQKTEGQEELYMDRYFSLLKSSDNKNLNDAQHVMIGKMWLRKQLSGLGVLYLTSGGDTANKRIDWNIEKSHANDAVCITDLQPDTCDMKEWTMKPMRRQSKAKTDHVLGIHHRDLVEYTFKNGETHRGYVTALYPEQKAINFQSPTKHCKKVNARKCKLLWKYSKIYWFENAS

SEQ ID NO: 12221 - protein, 415 aa, unidentified; identical to SEQ ID NO: 11876

SEQ ID NO: 12222 - protein, 512 aa, unidentified
MSTVYVLNKDGKPLMPTTRCGHIRYLLKEKKARVVASKPFTIQLLYETNDVVQPLYLGIDPGRTNIGVAVVKTDGTAVFTAHLETRNKEIPKLMKKRKDSRRARRTNGRRCRRQRRAKANDTISKKCVKQATAQNGSVSKRAKEIGVIKRHLPGCEKEILCIGIKNKEAKFNNRTRPEGWLTPTANQLLQTHVNLVKKIRKFLPISDVVLEINKFAFMQLDDPNIQKWQYQQGPLYQKASLEEAVSEMQEHHCLFCKKPIANYHHVVPQSENGSNTIGNIVGLCTKHHDLVHKDTVWQKKLAKKKTGLNKKYGAQSVLNQIIPALTERLNTLFPKHFFVTTGKSTYDYRAAHGVSKDHWLDAYCIACSVLPNDVCDSGINNRVPYELKQFRRHDRRALHKANMSRVYTLNDKAVATNRHKAIKQTTDSLEEFRQNHPDDVYKLKVKEHHPEYRNSKRNFPGCVFLVGKHTHVMQGTSGSHNGQADGYYDTNGNSYSSGKCKFVAKNEGIVFT

SEQ ID NO: 12223 - protein, 413 aa, unidentified
MTGYAFVLDVNGKQLAPTKEQKAWFLIRKKRVILVSKYPMVIQLNKEIPDEEICKDEIRCGIDDGGLHVGIALVQKCQTKNKVIFKGIIEQRNDVKHLMEVRRDYRNYHRYHKRYRQARFNNRSSSKREGRIAPSILQKRQAIIRVINRLNKWINITNYWLEDVSIDIRALTDGYKSYSWQYQRSNRLDENIRKAVILRDNCECKECGKGNCRLEVHHIKPRRLNGSNTMDNLITLCENCHQKTEGQEELYMSRYFDLLKSSDNKRLNYAQHVMIGKKWLREELSNLGILYLTNGGDTANKRIDWGIEKSHSNDAICITDLQPDICNIKEWTIRPMRRQSKAKTDNVLGIKHRDLVEYTFKNGETYKGYVTALYPEQKAINFQSPTKHCKKVNARKCKLLWKYSKIYWLENAG

SEQ ID NO: 12224 - protein, 440 aa, Clostridium sp.; identical to SEQ ID NO: 5468

SEQ ID NO: 12225 - protein, 413 aa, unidentified; identical to SEQ ID NO: 3023

SEQ ID NO: 12226 - protein, 263 aa, unidentified
MINPDINGVDYQHGQTYGFFDERYFVFARDNYTCQVCGKSKGKILQTHHIIYRSNGGTDRVDNLITVCTDCHTSANHKKDGILYKWQAEHKKVKQYKEPPFMNTLRRRIFDKYPDVIITYGSETTPKRKEIGLEKTHYNDAIVISGIEAIKENPNEWLLIKQFRKKKRSLHEATARKGYKEPNRTQKRNSKNAPYYKGFWLNDKVFVLGQVGYITGFASYSAYIKNKNNEYITLPSKSYKQVGITMLKLLSHNNNWRYIRNAV

SEQ ID NO: 12227 - protein, 453 aa, unidentified
MTAVYVISADGQKLMPTLRNGKVRHLLKEGKAKICKYRPFTIQLTYDTPNQVQPIEIGMDSGYQHIGLSVKTEKKEIFSAEFTLLTDEKKRHDDCRKYRRTRRNRLRYRKPRWLNRTKTTPKGWLAPSLLHKAEAHIKLVKDICSVAPITNITTEVGEFDPALLKAMHEGKEPPQGTDYQQGPLYFADSLRKAVFQRDNYTCKICHKSALKDKDVILKIHHALYWKNRHGNNLSELITVCDRCHTSANHAPNGKLYGLEPKVARLESAAYMNIVRWYIINTLKKELPNIQVNFCYGALTARKRKDLKLEKSHTNDAFCIGNFLPSLRSVATEYFKKKRRNSRILEKFYDAKYIDIRDGKIKKGAELSTGRTNRSIPRNNENNLRKFRSEKKSKGRRQIRKTRYSFQQNDFVFYKKRLYKVIGMQNLGKYISLQGFKPVPISLVQLYKHANAWT

SEQ ID NO: 12228 - protein, 477 aa, Caldanaerobius sp.
LTREDRGSAIRGVTSPVRGSERREGRMVFVLDKKKKPLMPCTEKRARKLLQSGRAVVHRLMPFVIRLKDRTAEESNFQPLRLKFDPGSKATGFSVLREESAEKSAAIIMGEIHHKQGIKDSLDSRRALRRGRRNRKTRYRKPRFDNRRREEGWLPPSLEARVEETVRAAEKLMKWLPITSISTEHVKFDTQLMQNPEISGIEYQQGELYGYEIREYLLEKYGRKCAYCGAENVPLQIEHVVPRNPKHGPRGTNRVSNLTISCERCNQDKGNKQPEEWLEELQKSKRKIDRVRAENLLKVIANLKKPLKDAAMMNATRWALYERLKRTGLPVECGTAARTKKQRIEHGFPKTHYFDACCVGASTPKTIEIKTKYTEIWTAVGRGSRKMCNTDKYGFPISHRQRKKRYFGFQTGDVVEAEVPSGKYKGTWRGRVAVRASGYFDIKDSKGNRICQGISYRYVRLLQYADGWQYEKEKAAY

SEQ ID NO: 12229 - protein, 452 aa, unidentified
MMVAVLSSIGVRLMPTTCFKARKFIKSGKAVIHSYDPFTIRLTQRENGGTQPIEYCCDTGYQHIGISIKSAKHEYVGVQVDALKDEKKHHQDATTYRRTRRRKTRYRAARFDNRKATKSKGWLAPSIRHKKDIHLVQVQKYAKVFPITSIVFEMGEFDTQKLKAIEEGRPAPAGVEYQQGEQYGFDDVRNAVFTRDGYRCVCCGRGIEDGAILHAHHLKYRSLGGTNRMGNLVTVCNRCHTPANHQKSGLLWNLMNKYKVKNFKGATFMTAIRWQMYDELKAMFPDTEIHLTYGSRTKEARRLLGVRKSHINDAYCMGDFHPTHRSEHWLYIKKRRNNRVLAKFYDAKYIDSRDGEKKSGKDLFSGRTKRSRELNVENLHRYRQQKVSKGRVSIRRRHYPIQPGDTVIYEGRKYITKGVQNLGTYLKIGEKVVPVRKIRIHHYAGGYIKQMM

SEQ ID NO: 12230 - protein, 423 aa, unidentified
MSNYVFLIDANKKPMNPVHPSHARKLLDSGKASVFRRYPFTLLLKRVVENIVVHPLTLKIDPGSKVTGISLVTDRNEAIWGVELEHRGQQIEDALQSRRAVRRGRRNRNTRYRQARYFNRKRPQGWLAPSLMHRVLTTETWIKRLRKFAPIGDIKLELVQFDTQQLENPEISGIEYQQGELQGYEVREYLLEKWARKCAYCDAENIPLQIEHIQARAKGGSNRIYNLCLACEKCNLKKASQDIRDFLKGKSDLASRILSWAKSPLKDAAAMNSTRWKLFKTLKVTGLLVTTGTGGQTKFNRTRLGLPKEHWIDAACVGVTPSLKILTTRILRVKATGMGGRQRCQTDKFGYPQKHRPLRPIFGFCTGDIVRADVPKGKYKGTFTARVCPMSDGRGEFVIDKKRRSIRLEYCTTVHRKDGYSYA

SEQ ID NO: 12231 - protein, 276 aa, unidentified
VETAEFDTQRLKAMLKGKPLPVGTDYQLGEMYDEYNVRQYVLKRDNYTCQCCGAHPTEKKPIRLHVHHIESRHVGGNAPNNLITLCVACHKALHEGKITLDKGKKRGKPLRDAAFMGIMRNTLLARLKDELNIPVKQTYGYITKLLREKNKIPKSHVNDARCIAKAPNAKPCDTMLYTRALRHHNRQIHKAKILKGGIRKKNQAPYLVKGFRLWDKVRYNGEECFITGRRSSGYFALKKYDGTVISNSASYKKLNVAGSSDKLYHGKELRAHSSHD

SEQ ID NO: 12232 - protein, 410 aa, Bacillus sp.
MTHCFVLDAQGRKLSPTKENRAWYLIRTKKATLKSKFPLVIQLVREIPESEIDSSSIQLGIDDGSKLVGIALVQECKTKNKPVFKGTIELRTDVKEKIAVRRGYRRYRRQHKKYRPARFDNRSASKKEGRIPPSIKQRKDSILRVVNQLHKWIRIDRIFLEDVLIDIRALEKGYKPYKWEYQQSNRLDENIRKAVVLRDHNTCQDCGLTNTRMEVHHITPRRLNGSDSIHNLITLCSRCHGKVTGVELKHCMRFFQKVKGRKIYYSDAMHVMQGKTYIQNELKKISPLSLTTGGDTANKRIDWGIEKTHANDAIVICNLNVAPDHCENKNWAIKPMRKHSTKKIESVNGFHHRDFIKYTKRNGERYLAYITALYPEKNQCNMTTLEGKILKRYGISRLTLLWRFSKIYWL

SEQ ID NO: 12233 - protein, 441 aa, unidentified
MSVSVFVLDRKHRPLMPCRPARARRLLKSGRARVVKLFPFTIRLTDRLIEDSKLQTVLVKIDPGSRQTGVALVRADEKAHHHALFFINLVHRGESIRDALTARRNCRRRRRGNLRHRAPRFLNRTKPQGWLPPSLRHRVDTATAWVAKLVKLAPVTGLVEELVKFDAQKLQNPEISGTEYQQGTLFEYEVREYLLEKFGRKCVYCGAENVPLNIDHVVPKARGGSNRISNLVLSCVNCNQKKDSQPVDVFLKNRPEVLDRIKRRLKTSLAHAATVNATRWSLFNALKVFGLPVETGSGALTKLNRHTFGVPKEHRLDALCAGRVNGVHYPEGMGILQVRCTGRGNYQRTRVDKYGFPRGYLTRQKRVHGFATGDMVEVVVPSGKKAGTYRGRVAVRKSGYFNIQTPEGVIQGIGWRHCRLLSFNDGYGYAWLRPAAHSSPV

SEQ ID NO: 12234 - protein, 442 aa, unidentified; identical to SEQ ID NO: 2903

SEQ ID NO: 12235 - protein, 451 aa, unidentified
VLSAWNPFQHWRRITTGRKTEETNLRVLVWNKRGKPLMPCSPAKARLLLKEKKAIVVRRTPFTIQLTIATGETKQPVSLGVDAGYKHVGLSASTEKAELYASEIELRQDITDLLSARRALRQSRRNRKTRYRAPRFDNRIRTKRKGWLALSLENRINAHLSRIEAVLRLLPVTKITVETASFDLQLLKNPDISGKEYQEGEQLGFWNIREYVLCRDGHVCQHCYGRSKDPVLNVHHLESRRTGGDSPGNLITLCETCHKALHRGEITLKAKRGQSFRAEAFMGIMRWEVLNRLKASHPELEVNNTYGYRTKHARISNGIAKSHCADAFCIAGNLGAKRLGEFFFQKQTRRNNRQIHKLSILKHGLRKRNQAPFEVKGFRLFDKVVCQGEEGFIFGRRSSGSFDVRKLDGTRISAGISYKKLRLLEKRRTYLKEIRKEEALPPLPEGRSLRA

SEQ ID NO: 12236 - protein, 446 aa, Lactobacillus sp.
MQNRVFVINKHGEALMPCKPRTARKLLQSGKAKPIKKEPFTIQLLYGASGYKQPINLGVDSGQRHIGLAVTSQDKVLFQSEVELRQDVKKLLERRKTYRQGRRNRKTRYRPMRFLNRIKSRKNNWLPPSVQSKVNHNINWIKRMLTVLPNPELHIEVGKFDMQKMKDPAIKGEGYQKGDLYGYQTVKQYVLARDQYKCQVCKKKGGKYKGKIVKLKIHHIIYRSQGGTNAPANLITVCADCHTYQNHQPGGILYAWYQKKKKVTKPLKGATFMNILRRRLWNAFPDAKFQYGAQTTLQRANLGLAKSHYNDAVTISGIEHISEKPTSIVMFKQFRKKKRFLHEATARKGCKDKEGHRNKNVTSKRNAKNTKEANGFWLNDYVRIKNSKLKGYISGFTGSSCYIKDCLGNYLTLNTYKQTNLSNVEFINHRNNWCNTSISEQRYVME

SEQ ID NO: 12237 - protein, 418 aa, unidentified
MVYVLSKTGQPLMPTENHAKVRVLLKQQKAKIVHRCPFTIQLLYDSTDYTQPVSLGIDAGSRHIGVSATTETKVLYEADVTLRNDIVDLLSTRREARRTRRSRKTRYRKPRFNNRIRKDGWLAPSIQQKVDTHLTVVHKATEILPVNSITVETASFDIQKIKNPDISGTGYQQGEQLDFWNVREYVLFRDGHKCQCCKGKSKDPVLNVHHIESRKTGGNAPNNLITLCETCHKGYHNGTVSLPKNIRRGMKFNDAAFMGIMRWAFFNRVKETYEPLGIMVNMTYGYITKKTRIDHNLPKDHFINARCISGHPDAVSDGTVFYQKKVRCHNRQIHKQKILKGGIRKRNQAPYLVKGFRLFEKVKYHGKQYFIFGRRSSGFFDIRTLDGTKVNKGSVSCKKIRSLDMPSSYLTEERKAIV

SEQ ID NO: 12238 - protein, 461 aa, Parasutterella sp.; identical to SEQ ID NO: 3646

SEQ ID NO: 12239 - protein, 515 aa, unidentified; identical to SEQ ID NO: 5111

SEQ ID NO: 12240 - protein, 427 aa, unidentified
MRVFVLDKNRKPLDPCHPAKARKLLKSGRAKVLRRYPFTIIIKDLEVENCVTHDHQLKIDPGAKTSGLAIIQGNRVIWGAELTHRGEHIREALTSRRQLRRSRRNRKTRYRQPRFLNRTRSKGWLPPSLMSRVHNVLTWVNKLIKFCPISGISQELVRFDTQKMLNPEISGIEYQQGTLYGYELREYLLEKWDRTCAYCGAKNTRLEIEHIKPRSKGGTNRVSNLAIACHNCNQAKGNQEVEEFLSSKPSILKRILSQAKKPLAGAAAVNATRWKLYNELKLIGLPVEVGSGGLTKYNRCRQNLPKTHWLDAANVGKVSTLHIEDYQPLLIAAKGHGTRQICRTDKFGFPWLHCSQRKIHKGFQTGDIVKAVVTKGKKIGTYIGRVATRKTGSFDITTVRGKVSGISYKYCQAIHRKDGYSYQFHGG

SEQ ID NO: 12241 - protein, 415 aa, unidentified; identical to SEQ ID NO: 4916

SEQ ID NO: 12242 - protein, 456 aa, unidentified
MAVFVLDKKKQPLMPCSEKRARLLLARGRAVVHKRYPFTIRLKNRVGGEAQPLRLGIDPGSKTTGLALMREPDSQQRHVLCLFELIHRGFQIKKALQQRAAFRRRRRSANLRYRAPRFNNRIKPKGWLAPSLQHRVDTVMAWVNRLSKSAPITGISQELVRFDTQKLESPEISGVEYQQGTLLGYEVREYLLEKWGRECAYCGTADTPLEIEHVVPRSRGGSNRVSNLTLSCHPCNAEKDSQTLTDFFATNKGLKKRLKANGLSADAQLERVQRQLKQPMRDASAVNATRWALFSALKTTDLPVAVSSGGRTKYNRQRLNIPKTHALDAACVGAFGKLYDWTVPTLTIKAMGRGSYQRTRLTKHGFPRGFLMRQKQVHGFQTGDMVRAIVPTGKKAGTHTGRVAIRKTGSFNIQAEYGAVQGISHKYCTLIQRSDGYGYYVTLFSNLTGEAGRAVA

SEQ ID NO: 12243 - protein, 424 aa, Enterococcus sp.; identical to SEQ ID NO: 8112

SEQ ID NO: 12244 - protein, 453 aa, unidentified
MQKLLVEFKNTPENTPQVLCSVSGVLNRDKSLSVPYKVLANNISYEDLLSGKRGQDLRVPVINMRGKPLMPTRLRKARILLKQEKAIVVQRSPFTIQLKYPTGETKQTLKLGIDAGYSTIGFSAVTEKKELLSGELTLRKRISKLLKQRRSYRRARRNRLWHRKPRFNNRSKPEGWFAPSIQHKLETHLRLIEKLKKILPVTKIIVEVAKFDQQKMSKPEIKGVEYQQGELQGYEVREYLLEKWKHKCVYCGKSNIPLEIEHIIPKIRGGTDRVSNLTIACHKCNQKKGDKTAAEFGYPEVQKKAKQTLKSATFMNIVRWRLVNTLKCAWTYGYITKHDRIKMKLEKSHINDAFVIAGGTTQSRSVPYMTTQTRRNNRSIQTNRKGFKPSIRRQRYKLQPDDLVKYIKSLFRVKGVFNYGKWVRLISLTKANKIINVNIKKVELVKYGKGIQF

SEQ ID NO: 12245 - protein, 504 aa, unidentified; identical to SEQ ID NO: 5865

SEQ ID NO: 12246 - protein, 451 aa, unidentified; identical to SEQ ID NO: 10609

SEQ ID NO: 12247 - protein, 426 aa, Parasutterella sp.; identical to SEQ ID NO: 3045

SEQ ID NO: 12248 - protein, 431 aa, unidentified; identical to SEQ ID NO: 3801

SEQ ID NO: 12249 - protein, 433 aa, unidentified
MSTGLRAVQAEPAGIRKGDALKVFVLNMRGQPLMPCSPAKARHLLKAGKAVVRRRTPFTIQLRIATGETKQSVTLGVDAGAKHVGLSAATEKEEVFASEVELRQDITGLLAARLSLRRERRQRKTRYRAPRFLNRVRSKHKGWLAPSVENRIQAHMSRIDAVCRLLPVTKIVIETASFDIQKIKDPSVEGTDYQQGDQLGFWNVREYVLFRDGHVCQHCHGHSKDKILNVHHLESRKTGGDAPNNLITLCETCHKAYHAGKIKLKVKRGQSFRAEAFMGIMRWTLLNRMRKAHPSLPVENTYGYLTKHKRIALGLPKTHCADAFCIAGNLKALRRGDFLFQQQTRKHNRQIHRCSILKGGVRKLNQAPFLVKGFRLFDKVRIGGQIGFVFGRRVRGTFNIRRLDKTVIGKDINCKKLSLLETRKTFLTELRKE

SEQ ID NO: 12250 - protein, 376 aa, Bacillus sp.; identical to SEQ ID NO: 4597

SEQ ID NO: 12251 - protein, 532 aa, unidentified; identical to SEQ ID NO: 3169

SEQ ID NO: 12252 - protein, 512 aa, unidentified; identical to SEQ ID NO: 6489

SEQ ID NO: 12253 - protein, 404 aa, unidentified
LLKEKKAIVKRRTPFTIQLTIATGETKQPVSLGVDAGYKHVGLSASTEKAELYASEVELRQDITDLLSARRALRQSRRNRKTRYRAPRFNNRLRTKRKGWLAPSVENRINAHLSRIEAVLRLLPVTKITVETASFDLQLLKNPDISGKEYQEGEQLGFWNIREYVLCRDGHVCQHCYGRSKDPVLNVHHLESRRTGGDSPGNLITLCETCHKALHRGEITLKAKRGQSFRAEAFVGIMRWEVHNRLRALHPGIEVSNTYGYRTKHARIANGIAKSHCADAFCIAGNLGAERLCEFFFQKQTRRNNRQIHKLSILKGGIRKRNQAPFEVKGFRLFDKVACQGEEGFIFGRRSSGFFDVRKLDGTRISAGISYKKLHLLEKRQTYLMEIRKEEAFPPLPEGRGLRA

SEQ ID NO: 12254 - protein, 404 aa, unidentified
  source 1..404: note = Clostridiaceae bacterium UBA2240
MPTNRHGKVKHLLKDGKAKVVRRTPFTIQLLYDSPEYTQPITLGVDAGSKVVGLSATTEKKELFVSEATLRDDITELLSTRRQNRRTRRNHLRYRMARFLNRTASKKEGWLAPSVKHKVDSHLKVIGNVHRILPISRIVIETASLDIQKIRNPEISGREYQQGEQLGFWNTREYVLWRDNHECQHCHGKSKDRILNVHHKESRKTGGDSPGNLVTLCETCHKSHHAGRIKLKLTPNKSYRDASFMGIMRWYVFNSLNELYPEVSITYGYITKNNRIRNNIEKTHSADAYCISGNLNAMRIDEIYYQVFKRKHNRQIHKANFLKGGKKELDQSAYEVKGFRLFDHVRYRDEDCFIFGRRISGYFDLRKLDGSVVHRSASFKELTLLKRQNTILIERKECKGVLLS

SEQ ID NO: 12255 - protein, 451 aa, unidentified
VLSARNPFQHWRRITTGRKTEETNLRVLVWNKRGKPLMPCSPAKARLLLKEKKAIVVRRTPFTIQLTIATGETKQPVSLGVDAGYKHVGLSASTEKAELYASEIELRQDITDLLSARRALRQSRRNRKTRYRAPRFDNRIRTKRKGWLAPSVENRINSHLSRIEAVLRLLPVTKITVETASFDLQLLKNPDISGKEYQEGEQLGFWNIREYVLCRDGHVCQHCYGRSKDPVLNVHHLESRRTGGDSPGNLITLCETCHKALHRGELTLKAKRGQSFRAEAFMGIMRWEVLNRLKASHPELEVNNTYGYRTKHARISNGIAKSHCADAFCVAGNLGAKRLGEFFFQKQTRRNNRQIHKLSVLKHGLRKRNQVPFEVNGFRLFDKVACKGEEGFIFGRRSSGFFDVRKLDGTRISAGISYKKLHLLEKRQTYITEIRKEKALPPLPEGRGLRA

SEQ ID NO: 12256 - protein, 451 aa, unidentified; identical to SEQ ID NO: 7526

SEQ ID NO: 12257 - protein, 419 aa, unidentified; identical to SEQ ID NO: 5032

SEQ ID NO: 12258 - protein, 502 aa, unidentified; identical to SEQ ID NO: 6776

SEQ ID NO: 12259 - protein, 388 aa, Ammonifex sp.
MAPTSVGYPKVFVVDAEGKPLLPCHPARARKLLKSGKAEVLRGSPFAIKLKQAVENPVGSLRAKVDDGSKWVGIALVNEFTGEVVFRGVLVQRGDVVRLLTLRREYRRNRRYRVVRHRECRNQNRKQVVPFPSIRQKKEAIYRVLADLAKIAPISGVDVELVSVGVKNPALPGRDTREKVLNRDGACVLCGSTEKLQRHHLVPRAKGGTDTPENQVLLCAECHRKLHSGEVVSSRKGKTFAWRAHAVLGKAYLLALLSCFGEVRACEGWQTEKWREGLGLAKSHANDALSLFPPERLLKIFGPEHLIYPLRRRRWEDNPTKTCEERNGFRHWDVVRAVRAGKVVFGCVRSLKARAMTLRTAGDGNFEVSYSKAKLLHRPRGLAYVPVW

SEQ ID NO: 12260 - protein, 465 aa, unidentified
MSTCVCVLSKNGERLMPTIRLGKVRHLLKDGKAKIVKHHPFTIQLLYDSKTNTQPIEICEDVGYNYIGISVKSESHEYVSAQYDTLQDEKDCHDDCRRMRRTRRNRLRYRKPRFDNRKRGEGWLAPSLRHKKELNVNVVKMYCEVMPVTHAIVEVGSFDTMLVKAIEEGKTTPEGAGYQKGPRYKLATLREAVFYRDNYTCQVCGRKANEGAILHVHHMFYWKGRHGNSLSELVTVCEKCHTPANHQKGGKLYGFSEDIKFANLSGAAFMNTVRWQIVNELYAAFGKPFVTFTYGAMTKEKRIALHLEKSHNNDAYAMGSFHPVDRCAFEHYEKMKRNNRILEKFYDSRYINIRTGEVASGKELFNGRINRNHKKDSENLHKYRGKRIRKGYRALRRKKVALNPGDLVSLNGEILTVHGTHTKKNGSVNVKFKTPSKSGKKSVSLKKLKIIKTISPMRSAWDKVS

SEQ ID NO: 12261 - protein, 448 aa, Variovorax sp.; identical to SEQ ID NO: 9585

SEQ ID NO: 12262 - protein, 419 aa, Butyricicoccus sp.; identical to SEQ ID NO: 3927

SEQ ID NO: 12263 - protein, 416 aa, unidentified; identical to SEQ ID NO: 8117

SEQ ID NO: 12264 - protein, 330 aa, unidentified
  REGION 1..330: note = Ga0315277_10026199
MEKRVGYRGRRRTANLRHRPPRFRNRRREKGWLTPCMRSRVGNIRTWTAGLMRVCPITAFSLELVKFDTQAMQNPEISGVEYQRGTLVGWEVREYLLEKWDRKCAYCGAKDVPFEVEHILPKSRGGTDRVSNLTLACHECNQAKGNQTAAEFGHPEVQAEAKQSLKDAAAVTTTRWAVYAVLRDTGLPVETGTGGRTKYNRTRLGLPKAHWIDAACVGASTPDALGVRRTSWQSRPLIIRAMGRGSRQMCRMDKHGFPRTAAKSIKRVHGFQTGDLVRAIVPTGKHAGTHVGRVAVRASGSFQVGTVDGIGYHHCRLLQRTDGYEYVSHS

SEQ ID NO: 12265 - protein, 442 aa, Sutterella sp.; identical to SEQ ID NO: 7529

SEQ ID NO: 12266 - protein, 478 aa, Geobacillus sp.; identical to SEQ ID NO: 5807

SEQ ID NO: 12267 - protein, 453 aa, Erysipelotrichaceae sp.
MSVAVLSSTGQKLMPTSNYRARKLLKSGRAAIECYRPIFTIRLIDREEGKTQPIEYACDTGYQHVGVSIKSEKHEFVHAQYDMLSNEPERHNDRRKYRRTRRNRQRYRKPRFDNRSRKNQEMAPSLRHRRENQINLFESFCKVMPITSATFEMGKFDTQLLQAIADGKPLPEGKDYQRGSKYLYQTEREAVFSRDHYTCQVCGKSVKDGVILHTHHIGYWKGYRSNRISNLLTVCEHCHTAKNHKPGGALWGLEPQSTNLAAATYMSTVRWAIYRELVLKYPEIDIHIQYGAKTSVTRKSLHLAKTHANDAYCVGSLHPRHRTTELVYQKKRRNNRILAKFYDAKYIDIRDGAKKSGAVLSCGRINRRESRRSDKNQRIYRGNKCSSGRTSVRKNRYAYQPGDTIVFHSQRFVVNGSHCKGARVILDTGKSVKATDLTCIKKEGGWHFLPAQA

SEQ ID NO: 12268 - protein, 438 aa, Fervidobacterium sp.; identical to SEQ ID NO: 4816

SEQ ID NO: 12269 - protein, 453 aa, Lactobacillus sp.; identical to SEQ ID NO: 4050

SEQ ID NO: 12270 - protein, 430 aa, unidentified
MPKVYVLNRHGRPLMPCTPAKARHLLDAGKAKVRHRTPFTIQLLYGSTGYTQEVILGVDAGSKTIGLSAATETEELFSAEVKPRNDVVELMSARRQFRRARRNRTTRYRKPRFDNRVRSKHKGWLAPSVEVKIQEHMTAIRRACAILPVSKVVVETAEFDLQLLKAVAEGKPVPQGEDYQKGEMYGHYNVRQYVLWRDSYTCCICGVHGSVRKGVPLHVHHLESRRVGGDAPDNLVTLCTACHDKLHKGIIMAADIKKRKRRSTRDATFMGIMRMTLLRRLREQLPVPVVETRGYITKATRENLLVLPKSHANDALAIAHGPQGFRAEHLPNIRQADRLYTICPVRHHNRQLHKATILKGGVRKANQAEKYICGFRLYDKVLYNGIECFVWGRRTSGSFLLRQLNGEKVKDGVSYKHLKLLEHSQSYLVA

SEQ ID NO: 12271 - protein, 414 aa, unidentified; identical to SEQ ID NO: 2588

SEQ ID NO: 12272 - protein, 278 aa, unidentified
MVYVLANDGQPLMPTERHGKVCRMLKSGIAKVVKKCPFTIQLQYESERNVQPVALGIDAGSKHVGVSATTKAKVLYESDVELRDDIVKLLATRRQLRRRRRSRKTRYRPARFDNRRRKEGWLTPSIRQKIESHLTVVANVCKILPVSQIIVETASFDIQKIKNPDIQGIEYQQGEQMDFWNIREYVLFRDGHTCQCCKGKSKDKVLNVHHIESRKTGGNAPNNLITLCETCHKGYHNGTVTLPKNIKRGMKFKDAAFMGIMRWTFYNTLKEQYEPDIP

SEQ ID NO: 12273 - protein, 413 aa, unidentified; identical to SEQ ID NO: 2636

SEQ ID NO: 12274 - protein, 413 aa, unidentified; identical to SEQ ID NO: 8345

SEQ ID NO: 12275 - protein, 420 aa, unidentified; identical to SEQ ID NO: 5513

SEQ ID NO: 12276 - protein, 408 aa, unidentified; identical to SEQ ID NO: 3192

SEQ ID NO: 12277 - protein, 512 aa, unidentified
MSTVYVLNKDGKPLMPTTRCGHVRHLLKEQKARVVTSKPFTIQLLYETDDVAQPLYLGIDTGRTNIGVAVVRTDGTAVFTAHLETRNKEIPKLMQERKKARRARRTNGRRCRRQRRAKANGTISKKCVKQDTAQNGSVSKRAKKIGVIKRHLPGCEKEVLCIGIKNKEAKFSNRTRPEGWLTPTANQLLQTHINLVKKIQKFLPISDVVLEINKFAFMRLDNPNIQKWQYQQGPLYQKASLEEAVSEMQEHHCLFCKKPIAHYHHVVPQSENGSNTIGNIVGLCTKHHDLVHKDTAWQKKLAKKKTGLNKKYGALSVLNQIIPALTKELSSLFPKHFFATNGKSTYDYRAAHGVSKDHWLDAYCIACSVLPNDVCDSNINSRVPYELKQFRRHDRRALHKANMNRVYTLDGKKVATNRHKAIKQTTDSLEEFRQRQPDDVCKLKVKEHHPEYRNPERNFPGCVFLVGKHTHVMQGTSGSHNGQADGYYDTNGNSYSSGKCKFVAKNKGIVFA

SEQ ID NO: 12278 - protein, 379 aa, unidentified
KLLYGSAGYKQPITLGVDAGSKHVGLSASTEKRELYSEEFTPRSDVVKLLSTRKQNRRSRRYRKTRYRAPRFDNRVHSKHKGWLAPSVEVKIQEHITVIKRICKILPISLVRVETAEFDTQRLKAMLAGKPLPVGTDYQLGEMYDEYNVRQYVLKRDNYTCQCCGAHTTAKKLVKLHVHHLESRKTGGNAPSNLVTLCTTCHKNLHKGKVTLDGKERGKPLRDAAFMGVMRKTLMARLKEELPIPVQGTYGYITKMRREQNDIKKSHTNDARCISKHPLAEPCSVCYRTKAIRHHNRQTHKANFSKKGIRKRSQMPYLVEGFRLWDKVLYKGQECFVSGRRSSGSFALKKLDGTSISKGVTFKKLRLLEPATNYLIERM

SEQ ID NO: 12279 - protein, 442 aa, unidentified
MSTSVFVLDKKHRPLMPCRPARARRLLRAGRARVVKRFPFVIRLVDRTVEQSEVQPVLIKLDPGSRETGAAVVRDDGKKRHHALAFFVIEHRGGAIRDALKARSAFRRRRRSQNLRCRSPRFLNRVKPKGWLPPSLRHRVETTLSFVRRMCRYLPVSGIAAELVKFDSQKLQNPEVSGVKYQQGTLFEYEVREYLLEKFGRKCVYCGAEGVPLNIDHVVPRAKGGSNRVSNLVLACVSCNQKKGARSLEDFLKGKPEVLARVRRELKTPLRDAAAVNATRWVLFNELKATGLPVETGSGALTKLNRHAFGVEKEHWLDALCVGRLNGVVTRKGLNVLEIRCMGRGSRQRTRLTKYGFPRGYLMRQKCVHGFATGDMVEANVPKGKKAGLWRGRVAVRVSGSFNIQTPKGVIQGVGWKHCRLISHNDGYGYAWLGHAPHSSPA

SEQ ID NO: 12280 - protein, 380 aa, Anoxybacillus sp.
ESEIKATYRLKIDYGSRHTGLAILRGQEVVWLGQLDHRTDIKERIDKRRAFRRARRNRKTRYRKPRFLNRKRKEGWLPPSLESRMQNIKTWVERLRKICPIEHISYENAKFDTQLMRNPEINGVEYQQGTLQGYEVREYLLEKFGRKCCYCGKEGVPLEVEHIIPKSRGGTDRIDNLCLACRDCNQRKGSQTAEEFGYPHIQEMVKKTLKDASVVNATRRKVYEVLKQSGCEVECGTGARTKMNRIRLGLPKIHYFDACCVGKSTPLQLHFKTKEVLFIKAKGRGSRSRTNLDRYGFPRGYLARQKYFFGFQTGDMVKANVPKGKYQGVWFGEVACRKTGSFDIKGKDGKRIAQGINYRYVQVIQRFDGYAYGKGVAELA

SEQ ID NO: 12281 - protein, 431 aa, unidentified; identical to SEQ ID NO: 10549

SEQ ID NO: 12282 - protein, 431 aa, unidentified
MPNKVYVINKHGRPLMPCSPAKARHLLDAGKAKVKKRTPFTIQLVYGSSGYTQEVILGVDAGSKTIGMSASTTKEELLSAEVKPRNDVVDLLSTRREFRRAQRNRKTRYRKPRFDNRVRSKHKGWLAPSVEVKIQEHITAIRRVCGILPVSKVVIETAEFDLQMLKAIADGKPVPQGEDYQQGEMYGHYNVRQYVLWRDGYTCQCCGAHTTKKKEVRLHVHHLESRKVGGDAPDNQVTLCESCHEKLHKGLIAEKDFKKRKRRSTRDATFMGIMRKTLMQRLCSELPIPVIETRGYITKATREKLLVLPKSHTNDALAIAQGKQGFNVGYLPEIAQIDKIYTIRPVRHHNRQLYKATILKGGIRKSNQTKKYVFGYRLFDKVQFNEQDCFIWGRRTTGIFTIKTINGKMIKDGISFKKLKLVEKSTSYLIA

SEQ ID NO: 12283 - protein, 512 aa, unidentified
MSTVYVLNKDGKPLMPTTRCGHVRHLLKEQKARAVRTKPFTIQLLYETDDVVQPLYLGIDPGRTNIGVAVVKTDGTAVFTAHLETRNKEIPKLMKKRKDSRRARRTNGRRCRRQRRAKANGTISKKCVKQDTAQNGSVSKRAKEIGVIKRHLPGCEKEVLCIGIKNKEAKFNNRTRPEGWLTPTANQLLKTHINLVKKIQKFLPISDVVLEVNKFAFMQLDNPVIKKWQYQQGPLYQKGDLESAVSEMQEQHCLFCKKPIEHYHHVVPQHKNGSNTIANIVGLCAKHHNLVHKDTAWQEKLAKKKTGLNKKYGALSVLNQIIPALTKELSSLFQKHFFVTTGKSTYDYRAAHGISKDHWLDAYCIACSVLPNDVCDSTINSRAPYELKQFRRHDRRALNNANMSRIYTFNGKKVAFNRHKAVEQVVDSLEEFRKKNQNTVCKLKVEKHHQTYRNPNRNYPGSIFLVKKQIHIMQGIVSSRNGKATTYYDTNTNKIAAGKCRFVAKNTGILFV

SEQ ID NO: 12284 - protein, 512 aa, unidentified; identical to SEQ ID NO: 10788

SEQ ID NO: 12285 - protein, 419 aa, unidentified; identical to SEQ ID NO: 4877

SEQ ID NO: 12286 - protein, 413 aa, unidentified; identical to SEQ ID NO: 3476

SEQ ID NO: 12287 - protein, 408 aa, unidentified
MVYVQDIDGKPMMPTTRHGKVRRLLKANKATVVNLCPFTIRLMYATSGYKQEIVLGVDAGTKHVGLSATTKSKELYSSEVILRSDIVELLSTRRESRRARRNRLRYRKPRFENRVKSKRLGWVAPSVRHRIDAHIRVIDNVCSILPVSRVIVEVAQFDTQKIKNPDISGDEYQEGDQLGFWNVREYILARDGHKCQHCKGKSKDPILNVHHIEYRKTGGDSPSNLITLCETCHKEYHKGNIDLKVKRGKSLRDAAVMGIMKWKLYEELKSRYDNVLMTFGYITKYNRIKYGIEKSHISDAFVISKNFNALRLGYHYKVRLVRRHNRQIHKQNVLKGGAKKPNQSPFEVFGFRLFDRVMFEGNYYFIFGRRKSGSFNIRDINGGNQRNVTYKKLKLSIGKRFMIQKEMN

SEQ ID NO: 12288 - protein, 465 aa, unidentified; identical to SEQ ID NO: 3603

SEQ ID NO: 12289 - protein, 474 aa, unidentified; identical to SEQ ID NO: 9173

SEQ ID NO: 12290 - protein, 426 aa, unidentified
MSNSTNYVFVLDAKKKPLAPCQPAMARSLLKAGKAKVFKRYPFTIILNKLVDEENQGLQLKIDPGSKQTGFAMVTQSEEVIFAMVLIHRGQQIKNALLRRRTLRRTRRHRKTRYRKCRFLNRKRKKGWLPPSLRHRVLTVETWVNRLSQLSPVSSLAIELVKFDTQKIQNPEISGVEYQQGELFGYDVREYLLEKWGRSCAYCGATDTPLEVEHIIPRSKGGSNRVSNLAIACHQCNQNKGAIDIREFLKDQPSVLTHVLKVAKTPLKDAAAVNSTRTSIFETLKVKGLPVVTGSGAGTKYNRRRLNLPKEHWIDAACIGEVEKLTILTNQPLVVTAMGHGCRQMVQMDKYGFPRKGYKAKKPVPGWKTGDIINVVKGRNAGLKGVRIKTVRSKGNFDIRHGDKILSVSRNHIQPVHRRDGYNYSF

SEQ ID NO: 12291 - protein, 427 aa, unidentified
LRVFVLNKRGKPLMPCSPAKARLLLKEKKAIVVRRTPFTIQLTIATGESKQPVSLGVDAGYKHVGLSASTEKAELYASEVELRKDITDLLSARRALRQSRRNRKTRYRAPRFDNRIRTKRKGWLAPSVENRINAHLSRIEAVLRLLPITKITVETASFDMQRLKNPDISGKEYQEGEQLGFWNVREYVLFRDGHVCRHCHGRSKDPVLNVHHLESRRTGSDSPDNLITLCETCHKALHRGEITLKAKRGQSFRAQAFMGIMRREVLNRLKASYPELKVHETYGYLTKHARIANGSVKSHGADAFCIAGNLGAERLGEFFFQKQTRRNNRQIRKLSILKGGIRKRNQAPFEAKGFRLFDKVACQGEEGFIFGRRSSGSFDVRKLDGTRISAGISCKKLRLLERRRTYLTEIRKEEALPPLPEGRGLRA

SEQ ID NO: 12292 - protein, 414 aa, unidentified; identical to SEQ ID NO: 2588

SEQ ID NO: 12293 - protein, 546 aa, unidentified
MVFPAYNYAKASSSQGKHNLLLRQERLIVKEVAYMSTVYVLNKDGKPLMPTTRCGHVRYLLKEKKARVVASKPFTIQLLYETDDVVQPLYLGIDPGRTNIGVAVVKADGTAVFTAHLETRNKEIPKLMKKRKDSRRARRTNGRRCRRQRRAKANGTISKKCVKQTTAQNGSVSKRAKEIGVIKRHLPGCEKDVLCIGIKNKEAKFSNRTKSEGWLTPTANQLLQTHINLVKKIRKFLPISDVVLEINKFAFMQLDNPNVQKWQYQQGPLYQKANLEEAVSEMQEHHCLFCKKPIAHYHHVVPQSENGSNTIGNIVGLCTKHHDLVHKDTAWQKKLAKKKTGLNKKYGALSVLNQIIPALTKELSSLFPKHFFATNGKSTYDYRAAHGVRKDHWLDAYCIACSVLPNDVCDKNINSRVPYELKQFRRHDRRALNNENMSRVYTFNGKMVATNRHKATEQTTDSLEEFRQRQPNDVCNLKVKEHHPTYRNMNRNYPGSVFLVGNQIHVMQGIASSKDGEATTYKDTNANSIAAGKCKFVAKNSGILFV

SEQ ID NO: 12294 - protein, 313 aa, Microcoleus sp.
LSKVFVLDTNKQTLNPIHPGRARLLLSQGKAAVFRQYPFTIILKKEVSNPVVQPLRVKIDPGAKTTGLAIVNDNTGEVVWVAELQHRGFQLRDALTSRRQLRRSRRNRKTRYRKPHFLNRTRPPSWLPPSLNSRVANILTWVKRLSALCQITAISQELVRFDTQKMQQADISGVGYQQGTLAGYEIREFLLEKWHRTCAYCSARGTKLEIEHIKLKPLLIAAKGHGTRQACRTDKWGFPQRYCSRNKVHKGFQTGDIVKAIVTKGKKVGTYVGRVATRASGSFNISARNGLVQGINHKYCKFMHKKDGYSYAN

SEQ ID NO: 12295 - protein, 427 aa, Enterococcus sp.
MQVFVRNIQGKPLMPCSNRKARLLLKEGKAKIYQYNPFTIQLCYPCREYVQECHIGIDTGSKHIGVAVTSEDKVLFKGEVELRQDVKSNLDTRRSYRRDRRNRKTRYRKARFLNRKKSKKKDVWLPPSIENRMNHTFKWIDTFLSLVPNPQLHIEVGKFDIAKMINPEIQGIDYQQGQTYGFYDVRYFVFARDNYTYQCCGKSKGKILQTHHIIYRSNGGSNRADNLITVCTDCHTYENHQKGGVLYQWQENHKKTKQYKEPPFMNILRKRIFAKYSNAVITYGSETTPKRKELGLEKTHYNDAIVISGISTIKENPDEWLLIKQFRKKKRSLHEATARKGRKEPNCLQKRNAKNKPCYKGFYLNDKVEVFGRIGHITGFASGGVYIKNSENEYITLPNKSYKKVGVSKLKLLHHNNNWQYINKRIA

SEQ ID NO: 12296 - protein, 457 aa, unidentified; identical to SEQ ID NO: 6471

SEQ ID NO: 12297 - protein, 425 aa, Aphanothece sp.; identical to SEQ ID NO: 6227

SEQ ID NO: 12298 - protein, 310 aa, Fischerella sp.; identical to SEQ ID NO: 3573

SEQ ID NO: 12299 - protein, 413 aa, unidentified; identical to SEQ ID NO: 4790

SEQ ID NO: 12300 - protein, 431 aa, unidentified
MPDKVYVISRLGHPLMPCSPAKARHLLDDKKAKVVKRMPFTIRLLYGSTKYIQPIILGVDAGSKTIGLSASTAKEEVFAAEVMPRNDVVENLSTRREFRRARRNRTTRYRKPRSDNRVRSNHERWLAPSVKVKIQEHITSIKRVCTILPISKVVIETAEFDLQLLKAIQEGKPIPEGEDYQKGEMYGSYNVCQYVLWRDNYTCICCGVRGTPNNPVRLHVHHFESRKYGGNAPDNHRTLCDDCHKKFHLGIITDVKLKTRRRQSTRDAAFMGIMRKTLMWRLRTELFIPVAETKGYITKATREKLLVLPKSHTRDALAIAQGRHGFGIKEYAYVEPANHIYTVRPVRHHNRQLHKASILKGGIRKRNQASKYVFGFRLYDKVLYQGKACFVWGRRTSGTFLLRTIDGIKVKDGVSYRNLTLLERSSNYLIA

SEQ ID NO: 12301 - protein, 423 aa, unidentified; identical to SEQ ID NO: 3951

SEQ ID NO: 12302 - protein, 475 aa, unidentified; identical to SEQ ID NO: 4985

SEQ ID NO: 12303 - protein, 470 aa, unidentified
MSVFVVGLNGCRLMPVSERKARLLLKGGKASVYRKVPFTIKLNYKTGSTVQPGYLGIDTGSQHIGVSVVRQDGTVLHKEEIGLRDSMSKRKLLESRASLRRGRRYRKTRYRHPKWKPKTKRIYSEKADRKGRHWKKQKNMFTSKRQAGWLPPSLQSKTDHHIQWIRKLLHLLPEGYRLSIELGRFDPARMKDPGIHGELYQKGPQYDYENVRAYVLARDGYTCRVCKKKGGKLHVHHILYRSRGASDDPKYMAAVCSNCHTTENHLPGGILYQWMQDQKKFTRGLRDATFMNILKKRLRRAFPDAVFTYGNITKADREKLGLPKSHGNDATAIALVKTEVKSVKDEEPVIHIQQVRRKKRSLHEETPRKGRKEPNRTASRSDKNTKSVTVAKGSGEKKASMTACLFDRVELDGKKGWITGFTGTSCYVKDKEDNYICTSPKYKQVSISKLRILHHCGNWVIGAEKPLGKG

SEQ ID NO: 12304 - protein, 424 aa, Petrotoga sp.; identical to SEQ ID NO: 10084

SEQ ID NO: 12305 - protein, 420 aa, unidentified
MQYAYVLNKRGEPLMPCSPGKARILLKQQKACVVKRTPFIIKLLHGSAGYKQPITLGVDAGSKHVGLSASTEKRELYSEEFTPRNDVVELLSTRRQNRRSRRNRKTRYRAPRFNNRVHSKHKGWLAPSVEVKIQEHITVIKRICRILPVTLVRVETAEFDTQRLKAMLAGKPLPVGTDYQLGEMYDEYNVRQYVLKRDNYTCQCCGAHTTAKKTVKLHVHHLESRKVGGNAPSNLITLCTTCHNNLHKGKITLDGKKRGKTLRDAAFMGIMRNTLLTRLRNELNIPVQNTYGYITKLLREQNDIKKSHVNDARCISKHPLAKPCSVCYRTKAIRHHNRQIHKAKILKGGIRKANQAPYIVKGFRLWDKVLYNEQECFISGRRSSGYFALRKFDGTTITNSISFKKLRLLEPATNYLIERK

SEQ ID NO: 12306 - protein, 413 aa, unidentified; identical to SEQ ID NO: 2636

SEQ ID NO: 12307 - protein, 414 aa, unidentified
MPCSPAKARLLLKEKKAIVVRRTPFTIQLTIATGESKQPVSLGVDAGYKHVGLSASTEKAELYASEVELRQDITDLLSARRALRQSRRNRKTRYRAPRFDNRIRTKRKGWLAPSVENRINAHLSRIETVIRLLPVTKISVETTSFDMQLLKNSDIAGKEYQESEQLGFWNVREYVLFRDGHVCQHCHGRSKDPVLNVHHLESRRTGGDSPGNLITLCETCHKELHRGEITLKAKRGQSFRAETFMGIMRWEVLDHLKASHPKLEVQNTYGYRTKHARIVNGIAKSHCADAFCIAGNLGAERLGEFLFQKQTRRNNRQIHKLSILKGGIRKRNQVPFEVKGFRLFDKVACKGEEGFIFGRRSSGYFDVRKLDGTRISAGISYKKLRLLEKRQTYLTEIRKEEALPPLPEGRGLRA

SEQ ID NO: 12308 - protein, 470 aa, unidentified; identical to SEQ ID NO: 2825

SEQ ID NO: 12309 - protein, 266 aa, unidentified
MFVDMVYVQDIDGKPMMPTTRHGKVRRLLKDKKAVVVNLCPFTIRLTYVTSDYKQEIVLGVDAGTKHVGLSATTKSKELYSSEVILRNDIVDLLSTRRELRKARRNRLRYRKPRFDNRVKSKRLGWIAPSVKYKVDAHIRVVENVCSILPISRIVIEVAQFDTQKIKNPEISGKEYQEGDQLEFWNTREYVLARDGHKCQYCKGKSKDKILNVHHLESRKTGGDSPSNLITLCETCHKEYHKGNIDLKIKRGSSLRDAAVMELIFV

SEQ ID NO: 12310 - protein, 423 aa, Arthrospira sp.; identical to SEQ ID NO: 2857

SEQ ID NO: 12311 - protein, 512 aa, unidentified; identical to SEQ ID NO: 3971

SEQ ID NO: 12312 - protein, 442 aa, unidentified; identical to SEQ ID NO: 2903

SEQ ID NO: 12313 - protein, 406 aa, unidentified
MVYVLDKNGQPLMPTDRHRKVRLMLQSGQAKVIKRCPFTIQLNYDSGHQTQEISLGIDAGSKHIGVSATTKIKVLYEADVELRNDIVNLLSSRRERRRGRRNRKIRYRQAKFNNRRRGNGWLAPSIRQKIGTHLIVVENICKMLPISRIMVETASFDIQKIKNPDIQGAEYQQGDQLGFWNNREYVLFRDNHTCQCCKGKSKDKILNVHHIGSRKTGGNAPNNLITLCETCHTGYHKGTVQLPKAIKRGMRFKDAAFMGIMRWAFYEALKQQYEPVGTPVHDTYGYITKHTRIAYNLPKEHYVDARCISGNPEASSNGEYYYQKKVRCHNRQIHKLTVLKGGIRKQNQATYLVKGYRLFDKVSYQGKGYFVFGRRKSGFFDIRTLSGKQVNKGSLSCKKRKRLNSG

SEQ ID NO: 12314 - protein, 414 aa, unidentified; identical to SEQ ID NO: 2588

SEQ ID NO: 12315 - protein, 341 aa, Pseudoalteromonas sp.; identical to SEQ ID NO: 6143

SEQ ID NO: 12316 - protein, 414 aa, unidentified
MPCSPAKARLLLKEKKAIVVRRTPFTIQLTIATGESKQPVSLGVDAGYKHVGLSASIEKAELYASQVELRQDITDLLSARRALRRARRNRKTRYRAPRFDNRIRTKRKGWLAPSVENRINAHLSRIEAVLRLLPVTKITVETASFDMLLLKNPDIAGKEYQEGEQLGFWNVREYVLFRDGHVCQHCYGRSKDPVLNVHHLESRRTGGDSPGNLITLCETCHEALHRGEIALKTKRGHSFRAEAFMGMMRWEVLNRLKASYPELKVHETYGYLTKHARIANGIVKSHGADAFCIAGNLGAERLGEFFFQKQTRRNNRQIHKLSILKGGIRKRNQAPFEIKGFRLFDKVACKGEESFIFGRRSSGSFDVRKLDGTRISAGISCKKLRLLEKRRTYLTEIRKEEALPPLPEGRGLRA

SEQ ID NO: 12317 - protein, 421 aa, Lactobacillus sp.
  VARIANT 302..327: note = X can be any naturally occurring amino acid
MQNRVFVINRQGEPLMPCTQRKCRKLLQSGKAKVIRKEPFTIQLLFGSTGYKQPVSIGVDSGQHHIGLAVTSQDKVLFQGEVSLRQDVKKLLDTRRSYRRGRRDRNTRYRPPRFLNRAKPVGWLPPSVASKIQHNINWIQRLQAVLPKAELHIEVGKFDMAKMVQPGITGLGYQQGDLYGYETTKQYVLDRDNYTCRICHGKTKDPKLKIHHIIYRSTGGTNQVSNLLTVCATCHTQANHQPGGKLYALQAKRFQSHHSLKGATFMNILRRRLFTAFPEAKFQYGAQTTLNRAKLELPKAHXXXXXXXXXXXXXXXXXXXXXXXXXXKGRKTPNTTSKRNAKNTKAINGFHLNDYVQLPNGLRGNISGFSGKTACYVKAGDDHYLTINPKYKQVNLSKLKVIRHQNNWNVAEINTSDYMMA

SEQ ID NO: 12318 - protein, 519 aa, Streptosporangium sp.; identical to SEQ ID NO: 5462

SEQ ID NO: 12319 - protein, 424 aa, unidentified; identical to SEQ ID NO: 8578

SEQ ID NO: 12320 - protein, 470 aa, unidentified; identical to SEQ ID NO: 2825

SEQ ID NO: 12321 - protein, 426 aa, Lactobacillus sp.; identical to SEQ ID NO: 3294

SEQ ID NO: 12322 - protein, 439 aa, unidentified; identical to SEQ ID NO: 3280

SEQ ID NO: 12323 - protein, 255 aa, unidentified
MLAGKPLPVGADYQLGEMYDEYNVRQYVLKRDNYTCQCCGAYPTEKKPVRLHVHHIESRHVGGNAPNNLITLCAVCHKALHEGKITLGNGKKRGKPLRNAAFMGIMRNTLLARLKDELNIPVKQTYGYITKLLREENHVEKSHTNDARCIAKAPNAKPCDTMFRTRALRHHNRQIHKAKILKGGTRKKNQAPYLVKGFRLWDKVRYNGEECFITGRRTSGYFAIKKYDGTVISNSASYKKLTLLEAATNYITERS

SEQ ID NO: 12324 - protein, 451 aa, unidentified; identical to SEQ ID NO: 2436

SEQ ID NO: 12325 - protein, 427 aa, Enterococcus sp.; identical to SEQ ID NO: 3871

SEQ ID NO: 12326 - protein, 494 aa, unidentified
MTMVYVQNKDGKPLMPTTRYCYVRLLLKEKKARVVCTTPFTIRLNYDTPNITQDLILGIDPGRTNIGVAVVKEDGSCVFSAHLETRNKEVPLLMKKRAAFRRQHRTQDRRRKRQRRAIAAGTTVESNTIERLLPGYEKPIVCHHIRNKEARFNNRSRPAGWLTPTANHLLQAHINLIAKAAKFLPITKVVVELNRFAFMAMDNPNIRRWEYQQGPLYGLGSVKDAVYAQQDGHCLFCKKPIDHYHHVVPRHKGGSETLANRCGLCEKHHALVHKDKAWAEKLVTRKGGMNKKYHALSVLNQIIPHLMEYLGSETPYDVYATDGKSTKGFRIAKNVPKEHYTDAYCIACSILDADTKVSAPAEPFKLKQFRRHDRQSCIRQMVDRKYLLDGKVVATNRHKSIEQKSDSLEEFREAYGDAAVSQLTVRPHSPQYKDMARIMPGAVMDFDGIVGVFKGSSGRNNGTPNYYNSTKGARVLTKRCALLAKNAGMVFIPA

SEQ ID NO: 12327 - protein, 346 aa, unidentified
MVYVQDINGKPMMPTTRYGKVRRLLKDKKAVVVNLCPFTIKLMYVTSDYKQEIVLGVDAGTKHVGLSATTKSKELYSSEVILRNDIVDLLSTRRELRKARRNRLRYRKPRFDNRVKSKRPGWIAPSVKYKVDAHICVINNVCSILPISRIVIEVAQFDTQKIKNPEISGKEYQEGDQLEFWNTREYVLARDGHKCQYCKGKSKDSILNVHHIESRKTGGDSPSNLITLCETCHKEYHKGNIDLKIRRGKSLRDAAVMGIMKWRLYEELKSRYDRVFMTFGYITKHNRIKYGIEKSHTSDAFVISKNINAKRIERQYLKRLIRRHNRQIHKMKILKGGEEEKQSSSF

SEQ ID NO: 12328 - protein, 430 aa, unidentified; identical to SEQ ID NO: 3252

SEQ ID NO: 12329 - protein, 420 aa, unidentified
MQYAYVLNKRGEPLMPCSPGKARILLKQQKACVVKRTPFTIKLLFGSAGYKQPITLGVDAGSKHVGLSASTEKRELYSEEFTPRSDVVELLSTRRQNRRSRRNRKTRYRVPRFDNRVHSKHKGWLAPSVEVKIQEHITIIKRICKILPISLVRVETAEFDTQRLKAMLAGKPLPVGTDYQLGEMYDEYNVRQYVLKRDHYTCQCCGAHNTAKKVVKLHVHHLESRKTGGNAPSNLITLCTTCHKNLHKGKVTLDGKERGKPLRDAAFMGIMRKTLMARLKEELPIPVQGTYGYITKMRREQNDIKKSHVNDARCISKHPLAEPCSVCYRTKAIRHHNRQTHKANFSKGGIRKRSQMPYVVEGYRLWDKVLYKGQECFVSGRRASGSFTLKKLDGTRISKGVTFKKLRLLEPATNYLIERK

SEQ ID NO: 12330 - protein, 518 aa, unidentified
MTPKKRKEASRMSEYIYVIGVDGDPQMPTKRKRHVEKLLQAGRARVFRQIPFTIQLTYENKPVLQPITIAEDPGRSNIGMAVVSLSGELLSAAVVQTRNKEIVKLMEKRKQHRRASRNGERKARQRLAKKCHTMIKAGSLMRKLPMYGKDKRVRCNMIKNTEARFCNRKREDGWLTPSAGHLVRTHINLIHKMQKFLPITDVAIEINQFAFLSLEDPSISGVDFQNGPLKGYDDLNAAVEALQDGHCLMCNSPIEHRHHIVPRSMQGSNTIGNIAGLCCKCHERVHKDSAFEDSLKKKKAGLNKRYAAVSALNQAIPFICKRLEQEFGKEHVHYCSGRDTSMVRRSLGYHKTKEEQLHEVDAWCIAVLSLQQIPEKAPSFDHVHEILQFRRQDRSRIKAQTSRAYYHERKKIAKNRKKAEGQREDSLQEWRKRQVERYGEEQTRKMISQLKVKKSIRRYNRLDRLMPGAVFYYQGIRYVMRGQHCEGTYLQAVGMGSKDFPAKKCKIVAHNEGLVFVS

SEQ ID NO: 12331 - protein, 413 aa, unidentified; identical to SEQ ID NO: 2636

SEQ ID NO: 12332 - protein, 423 aa, unidentified
MRVFVLNKNRQPLDPCKPARARILLSAGKAKVYRRYPFTIILTEEIKNPVTHEHQLKIDPGAKTTGLAIIQGQRVIWGAELTHRGFQIRDNLTSRRQLRRSRRSRKTRYRKPRFSNRTRPKGWLAPSLTSRVQNILTWVKKLIRFCPVTGISQELVRFDTQKLQNPEISGIEYQQGTLYGYELREYLLEKWNRKCAYCGATGTQLEIEHIKPKSRGGSNRVSNLTIACHSCNQAKSNQDIELFLSKKPSLLKRILRQAKRPLADAASVNITRWKLYHDLKSIGLPVEVGSGGLTKFNRCRQSLPKAHWLDAANVGKVETLIIEVTLPLLITAKGHGTRQLCRTNKYGFPIRHCSRIKFHKGFQTGDIVHAVVTKGKKVGTYVGRVATRKSGSFNISTKLGLVQGISHKYCQFIHRKDGYAYAI

SEQ ID NO: 12333 - protein, 424 aa, Anaerostipes sp.; identical to SEQ ID NO: 3434

SEQ ID NO: 12334 - protein, 447 aa, unidentified; identical to SEQ ID NO: 5316

SEQ ID NO: 12335 - protein, 407 aa, unidentified
QPLMPTDRHRKVRLMLQSGQAKVIKRCPFTIQLNYDSGHQTQEISLGIDAGSKHIGVSATTKIKVLYEADVELRNDIVDLLSSRRELRRGRRNRKTRYRQAKFNNRRRGNGWLAPSIRQKIGTHLTVVENICKILPISRIMVETASFDIQKIKNPDIQGAEYQQGDQLGFWNVREYVLFRDGHTCQCCKGKSKDKILNVHHIGSRKTGGNAPNNLITLCETCHTGYYKGTVQLPKAIKRGMRFKDAAFMGIMRWAFYEALKQQYEPVGTPVHNTYGYITKHTRIAYNLPKEHYVDARCISGNPEASSNGEYYYQKKVRCHNRQIHKLTVLKGGIRKQNQATYLVKGYRLFDKVSYQGKGYFVFGRRQSGFFDIRTLSGEKVNKGSLSCKKLKFIATRTYYLTERRAV

SEQ ID NO: 12336 - protein, 423 aa, unidentified
MQYVYVLNKHGEPLMPCSPRKARLLLNQKKACVVKRTPFTIKLLYGSTGYKQPIILGVDAGSKHIGISATTEKCELYREEAIPRNDVVDLLSARRAFRRSRRNRKTRYRAPRFNNRVHSKHKGWLAPSVEVKIQEHITLIKRVCRILPVTLVRVETAEFDTQRLKAMLEGKPLPVGTDYQHGEMYDEYNVRQYVLKRDNYTCQCCGAHPTKTKAVKLHVHHIETRRTGGNAPNNLITLCTACHKALHAGKVTLNGKKRGKPLKDAAFMGIMRKTLMERLLKELKIPVQETYGYITKYLREKHSIPKSHTNDARCISKNLLAIPCDTCYYTKAIRHHNRQLHKATILKGGIRKANQAPYTVKGYRLWDKVFYHGSECFITGRRTSGYFALKKLDGTVVSNSASYKKLRLLEVATNYITEKKVKG

SEQ ID NO: 12337 - protein, 474 aa, unidentified; identical to SEQ ID NO: 9173

SEQ ID NO: 12338 - protein, 431 aa, unidentified; identical to SEQ ID NO: 3801

SEQ ID NO: 12339 - protein, 242 aa, unidentified
LQFYRKEHGIMQYVYVLSKHGEPMMPCSPGKARLLLKQQKACVVRRTPFTIKLLYGSAGYKQPITLGVDAGSKHVGLSASTEKRELYREEFTPRNDVVELLSTRRQNRRSRRNRKTRYRAPRFDNRVHSKHKGWLAPSVEVKIQEHITIIKRICKILPISLVRVETAEFDTQRLKAMLAGKPLPVGTDYQLGEMYDEYNVRQYVLKRDNYTCQCCGAHTTAKKLVKLHVHHLESRKTGGNAP

SEQ ID NO: 12340 - protein, 420 aa, unidentified; identical to SEQ ID NO: 8840

SEQ ID NO: 12341 - protein, 422 aa, Streptomyces sp.
VARQTPFVIRLKDRDAEKSEVEGVAVRIDPGSRETGIAITADIAYPLTATPDVIVSRRGLYSLELRHRGSQIRDKMHLRAAYRHRRRSRKTRYRAPRYSNRQRPEGWLPPSLKHRVDTTYSWVRRLQKWAPVTEIHIERTSFDVHALSAGVPLQGIEYQQGTLQGYEVRQYLLEHWRRRCAYCGASGVALQIEHIRPRSRGGSDRLSNLTLACEPCNLAKGSFPVEVFLKGEPRRLARILGQAKAPLRDAAVMNATRWTLWRRLQEFGVPVHSWSGGRTKYNRSRHGLPKTHSLDALAVGDVPDGTVIGGIPTTVLLVSCTGRGTHARTRTDKHGFPRLKLPRTKQFFGYATGDLVTATVPTGKNAGTHVGRVAVRSSGRFNIRGAHGLVQGIHHRHVRLLQRADGYGYARRAEDPQISAPR

SEQ ID NO: 12342 - protein, 347 aa, unidentified
LPIYRKEHGVMQYVYVLNKHGEPLMPCSPGKARLLLKQQKAHVVKRTPFTIKLLYGGAGYKQPITLGVDAGSKHVGLSASTEKRELYREEFTPRNDVVDLLSTRKQNRRSRRNRKTRYRASRFDNRVHGKHKGWLAPSVEVKIQEHITVIKRTCRILPVALVRVETAEFDTQRLKAMLEGKPLPVGTDYQLGEMCDEYNVRQYVLNRDHYTCQCCGAHTTTKKTVKLHVHHLESRKVGGNAPSNLITLCTTCHDALHKGKVSLDNKKRGKPMRDAVFMGIMRKTLMARLREELPIPVQGTYGYITKMWREQNDIKKSHVNDARCISKHPLAEPCSVCYRTKAIRHHN

SEQ ID NO: 12343 - protein, 417 aa, unidentified
MPCSPAKARLLLKERKAIVKRRTPFTIQLTIATGEAKQPVALGVDSGYKHIGLSATTEKAELYASEVELRQDITDLLSARLALRRSRRSRKTRYRAPRFNNRVASKHKGWLAPSVENRIAAHLSRVEAVMRVLPVTAITVESAAFDTQLLKNPDITGAAYQQGEQLGFWNVREYVLFRDGHVCQHCRGKSKDPILNVHHIESRRTGGDAPNNLITLCETCHKAFHRGEIKLKVRRGKSFKAETFMGIMRRTLFERLKKAHPELNVRNTYGYLTKHKRISYGIAKSHCADAYCIADNLGAKRLEGFFFQKQTRKHNRQIHKLLILKGGLKKKNQAPYEVKGFRLFDKVICKGEEAFIFGRRTSGSFDVRRLDGTRISAGINYKKLRLLEPRTTYLTEFRKEAALPPLHECRGFRAEFL

SEQ ID NO: 12344 - protein, 440 aa, Lactobacillus sp.; identical to SEQ ID NO: 5150

SEQ ID NO: 12345 - protein, 408 aa, Bacillus sp.; identical to SEQ ID NO: 9968

SEQ ID NO: 12346 - protein, 420 aa, unidentified; identical to SEQ ID NO: 6017

SEQ ID NO: 12347 - protein, 414 aa, unidentified
MPCSPAKARLLLKEKKAIVVRRTPFTIQLTIATGEAKQPVSLGVDAGYKHVGLSASTEKAELYASEVELRQDVSDLLSARRALRQSRRSRNTRYRAPRFDNRIRTKRKGWLAPSVENRINAHLSRIETVLRLLPITKITVETASFDTQLLKNPDIAGKEYQKGEQLGFWNVREYVLFRDGHVCQHCHGRSKDPVLNVHHLESRRTGGDSPGNLITLCETCHKALHRSEITLKAKRGQSFRAESFMGIMRWEVLNRLKASHSELEVNNTYGYRTKYARIANDIAKSHCTDAFCIAGNLGAERLGEFFFQKQTRRNNRQIHKLSILKGGIRKRNQAPFEIKGFRLFDKVVCKGDEGFIFGRRSSGYFDVRKLDGTRISAGISYKKLHLLEKRRTYLTEIQKEEGLPPLPEGRGLRA

SEQ ID NO: 12348 - protein, 428 aa, Moorena sp.; identical to SEQ ID NO: 4771

SEQ ID NO: 12349 - protein, 378 aa, Kandleria sp.
  source 1..378: note = isolate UBA4329
SRYPMVIQLKKKIPDQEICKDEIRCGIDDGGLHVGVALVQKCQTRNKVIFKGTIEQRNDVKHLMDVRRGFRRYHRYHKRYRPARFDNRKSSKRKVRIAPSILQKRQATIRVINQLNKWVNITNYWLEDVAIDIRALTDGYKPYRWQYQKSNRLDENIRKAVILRDGCRCMECGKSNCRLEVHHIKPRRLKGSNTLGNLITLCTGCHQKTEGVEELYMNRYFALLNSSDNKSLSYAQHVMIGKKWLREQLSKLGMLHLTNGGDTANKRIDWGIAKSHSNDAICITDLQPDTCEIKEWVIKPMRRQSKAKTDNVLGIKHRDLVEYTFMNGETHRGYVTALYPEENALNFQSPAKHCKKVNARKCKVLWKYSKIYWLNDVS

SEQ ID NO: 12350 - protein, 495 aa, unidentified; identical to SEQ ID NO: 12045

SEQ ID NO: 12351 - protein, 455 aa, unidentified
VIKSSEGKERCPLHQTPSNIDEGCLLPERAWRQNLRVFVINQRGKPLMPCSPAKARVLLREKKVRVKRRTPFTIQLTTATGEARQDVSLGVDAGYRHVGLSASTEKAELYASEAVLRDDITDLLSARLALRRARRNRKTRYRAPRFSNRVHSKNKGWLAPSVEHKIASHLKLVENVCRLLPVTNITVETASFDMQAIKNPDIKGTEYQQGEQLGFWNVREYVLWRDGHQCQHCRGKSGDPILNVHHLESRRTGGDAPNNLVTLCETCHKAYHAGRIDLKLKRGRSMRAEAFMGIMRWTFFYRLKEIHADKTVENTYGYLTKHTRITHGIEKSHCADAYCIVGNLSAERLPEYLYQKQVRKHNRQIHKLTIGRGGIRKRQQTPFEVKGFRLFDKVRLGGEEGYIFGRRSSGYFDVRRLDGQKLSAGVSFKKLHLLEKRKTYLTVLLPRLKTKVSAP

SEQ ID NO: 12352 - protein, 456 aa, unidentified; identical to SEQ ID NO: 3495

SEQ ID NO: 12353 - protein, 431 aa, unidentified
MPNKVYVINKHGRPLMPCSPAKARHLLDEGKAKIKKRTPFTIQLVYGSSGYTQEVILGVDAGSKTIGVSALTKKEELFAANVIPRNDVVDLLSTRREFRRVRRNRKTRYRKPRFDNRVRSKHKGWLAPSVEVKIQEHITAIRRVCGILPVSKVVVETAEFDLQLLKAIADGKPVPQGEDYQKGEMYGHYNVRQYVLWRDNYTCQCCGTHPSKKKEVRLHVHHLESRKVGGDAPDNQVTLCESCHEKLHKGLIAEKDFKKRKRRSTRDATFMGIMRKTLMQRLCSELPIPVVKTRGYITKATREKLRVLPKSHINDALAIAQGKQGFNVGYLPGILQIDKIYTIRPVRHHNRQLHKATILKGGIRKSNQTEKYVFGYRLFDKVQFNGQDCFIWGRRTTGIFTIKTINGKMIKDGISFKKLKLVEKSTSYLIA

SEQ ID NO: 12354 - protein, 416 aa, unidentified
MVYVLDKNGQPLMPTDRHRKVRLMLQSGQAKVIKRCPFTIQLNYDSGHQTQEISLGIDAGSKHIGVSATTKIKVLYEVDVELRNDIVDLLSSRRELRRGRRNRKTRYRQAKFNNRRRGNGWLAPSIRQKIGTHLTVVENICKILPISRIMVETASFDIQKIKNPDIQGAEYQQGDQLEFWNVREYVLFRDGHTCQCCKGKSKDKILNVHHIESRKTGGNAPNNLITLCETCHTGYHKGTVQLPKAIKRDMRFKDAAFMGIMRWAFYEALKQQYEPVGTPVHNTYGYITKHTRIAYNLPKEHYVDARCISGNPEASSNGEYYYQKKVRCHNRQIHKLTVLKGGIRKQNQATYLVKGYRLFDKVSYQGKGYFVFGRRQSGFFDIRTLSGEKVNKGSLSCKKLKFIATRTYYLTERRAV

SEQ ID NO: 12355 - protein, 268 aa, unidentified
LLKAIADGKPVPQGEDYQKGEMYGHYNVRQYVLWRDDYTCQCCGAHATKKKEVRLHVHHLESRKVGGDAPDNQVTLCESCHEKLHKGLITAKDFKKRKRRSTRDATFMGIMRKTLMQMLCSELPIPVVKTRGYITKATREKLLVLPKSHTNDALAIAQGKRGFNVGYLPEIAQIDKICTIRPVRHHNRQLHKAAILTGGIRKSNQAEKYVFGYRLFDKVQFNGQDCFIWGRRPTGIFTIKTINGKMIKDDISFKKLKPVEKSTSYLIA

SEQ ID NO: 12356 - protein, 477 aa, unidentified; identical to SEQ ID NO: 3241

SEQ ID NO: 12357 - protein, 376 aa, unidentified
MPNKVYVINKHGRPLMPCSPAKARHLLDAGKAKVKKRTPFTIQLVYGSSGYTQEVILGVDAGSKTIGISASTKKEEVFAADVTPRNDVVDLLSTRREFRRARRNRKTRYRKPRFDNRVRSKHKGWLAPSVEVKIQEHITAIRRVCGILPVSKVVVETAEFDLQLLKAIEEGKPVPQGEDYQQGEMYGHYNVRQYVLWRDNYTCQCCGAHATKKKEVRLHVHHLESRKVGGDAPDNQVTLCDRCHEKLHKGLITEKDLKKRKRRSTRDATFMGIMRKTLMQRLCSELPIPVIETRGYITKATREKLLVLPKSHTNDALAIAQGKHGFNVGYLPGIEQIDKIYTIRPVRHHNRQLHKAAILKGGIRKSNQVEKYVFGY

SEQ ID NO: 12358 - protein, 414 aa, unidentified; identical to SEQ ID NO: 4015

SEQ ID NO: 12359 - protein, 357 aa, Calothrix sp.; identical to SEQ ID NO: 4929

SEQ ID NO: 12360 - protein, 441 aa, unidentified
VGVPQQCEIFSKERKLLMVFVLNRSKKPLDMISNAEARILIKKKLAVIHKVYPFTIRLRDNSAVSNDKNYTVKVDPGSKHTGIAITDDKDQVVMLAELEHRGHVIKKKMDSRRAVRCHRRNRKTRYREARFLNRTRPEGWLAPSVKSRADNVINFIKKYKKLLNINKVMIEHVSFDTAQMTANNNLIGIGYQQGPLYQTKLREFIFSKTNGRCSYCGAKATEIDHIVPRANGGTNSTYNLTPACRSCNELKGKLSLKDFGKIVGKDFSKLEPKKLPRNAAIVQSARNYMVKEITKIVSDTKTYNTWLTKYNRDQLGLPKQHYYDALSVGNVENYKFLTNEVLQISAKGRGSRQMCRVDRYGFPRTSPKGSKSVEGFQTGDMVKVIILKGSKKGEYLGKVAVRSSKKFDIQTKTKTIKSIWYKHFHIVQRSDGYLYSYKERI

SEQ ID NO: 12361 - protein, 407 aa, unidentified
VLDANNKQLTPTKEQKAWFLIRKKRATLVSKYPMVIQLKKKIPDKEICKDEVRCGIDDGGLHVGVALVQKCQTRNKVVFKGVIEQRNDVKHLIDVRCGYRRYHRYHKRYRSARFNNRNSSKREERIAPSILQKRQATIRVINQLNKWINITNYWLEDVAIDIRALTDGYKPYRWQYQKSNRLDENIRKAVILRDGCKCMECGKSNCRLEVHHIKPRRLKGSSTLDNLITLCTKCHQKTESVEELYMDRYFALLNSSDNKNLNYAQHVMIGKKWLREQLSNLGMLYLTNGGDTANKRIDWDIAKSHSNDAICITDLRPDTCEIKEWAIKPMRRQSKAKTDNVLGIKHRDLVEYTFRNGKTHRGYVTALYPEQNAINFQSPTKHCKKVNAKKCKVLWKYSKIYWLDNVG

SEQ ID NO: 12362 - protein, 413 aa, unidentified
LKVFVLNMRGKPLMPCSPAKARHMLKAGKAFVVRRTPFTIKLTIATGETKQDVTLGVDAGARHVGISATTEKEEVFASEVALRQDITGLLADRLAFRRARRNRKTRYRAPRFNNRVRSKHKGWLAPSVENRIQAHISRIEAVCRLLPVTKIVIETASFDIQKIRNPEVEGTGYQQGDQLGFWNVREYVLFRDGHVCQHCHGRSRDKILNVHHLESRKTGGDAPNNLITLCETCHKAYHAGKIKLKVKRGQSFRAEAFMGIMRWTLLDRVRKTHPKLPVENTYGYLTKHKRIALGLPKTHCADAFCIAGNLKALRRGDFLFQQQTRKHNRQIHRCSILKGGVRKLNQAPFLVKGFRLFDKVRIGGQIGFVFGRRVRGIFNIRRLDKTVIGTDINCKKLSLLETRKTFLTELRKE

SEQ ID NO: 12363 - protein, 430 aa, Desulfobacter sp.
LSVFVLDTNRKPQNPVHPAKARLLLTEGKAAVFRQFPFTIILKEKVLDVASNPLRIKIDPGSRETGIAVINDDSGEIIFAMELRHRGQQIKNNLESRRAIRRSRRNRKTRYRKPRFDNRTRAEGWLPPSLKSRVHNIETWVNRLCRFCNIQAISMELVRFDMQKIQNPEISGVAYQQGELMGYEVREYLLEKWDRTCAYCGKTDIPLEIEHIVPKSKGGSNRVSNLTLACTACNRKKGNKPLEQFLSRKPGLLKRIQKQSKVPLKDAGAVNTTRWDLFRTLKKTGLPVETGSGGLTKFNRTTRGLHKTHWLDAACVGKSTPEKMFQIDKAVLIVKADGHGSRQMCRVNKFGFPRTTAKSTEKKVKGFQTGDIVKAVVTSGKKVGTYTGRVAVRKSGSFNIKTVDKTVQGISWKYCRLLHASDGYSYNTTC

SEQ ID NO: 12364 - protein, 408 aa, unidentified; identical to SEQ ID NO: 6729

SEQ ID NO: 12365 - protein, 518 aa, unidentified
MANLKLIDELLEKTEYIYVLGIDGKPQMPTNRKVRVRSLFKSGMAKVVDTVPFTMQLLYENKPVLQPITIAEDPGRTNIGAAVLTQFGDLVFSAVVETRNKSIKKLMSDRKAHRQASRHGERKARQRLAKKYKSMIKAGMIMRKLPQYAADKFVTCKVIKNTEARFCNRKRMPDWLMPTVNHLVQTHINLIKKVEKYLPITDVAIEVNRFAFMQMENPDASGVDFQNGPLKGFDDVKAAIREQQHGKCLMCKNDIEHFHHIIPRSKGGSNTIQNQVGLCKKCHAKVHTDAEFQAKLKDKKEGLIKKYGALSALNQAVPFICKELLKIYGAEHVHFCTGKDTSLIRSSLGYDKTKDNQMHEVDAYCICLAAIGADKTKRPDFNNVFKIKQFRRQDRSIINYQRERTYYLDGKKIATNRKPRFEQKGDALSDWYSEQVKLKGKKYADKLTGRITVKKSTRGYNSKDRVMPGTIFYYGGKRLVLSGQTTRGKYYKAYGDPKTNYPAAKCQIYKHNEGLAFV

SEQ ID NO: 12366 - protein, 512 aa, unidentified; identical to SEQ ID NO: 4031

SEQ ID NO: 12367 - protein, 453 aa, Scytonema sp.
MSKVFVIDTNKKPLNPIHSAQARQLLRNGKAAVFKRFPFTIILKEARPEAPVQSLRLKIDPGSKTSGIAIVNDSTGEVVFAAELKHRGFAIHESLTSRKQLRRSRRNRKTRYRQPPKHEWFRKGNKQPCPKQRRSWIAPSLMSRVHNIKTWVERLRKVAPIKAISQELVRFDMQLIRHPNIQGKEYQQGFLFGYETREYLLEKWKRECAYCGIKNVPFQIEHIHCRAKGGSDSITNLTLSCEKCNLKKGTKDIKDFLKKAPARLEKILKQAKQPLADAAAVNSTRFKLLEVLKETGLPVETGSGGLTKFNRTQQGLEKTHWIDSACVGKSTPEKLNVKGVKPLLITANGHGTRQICRTDKYGFPNRHCSRTKFHFGFQTGDIVKAIVTNGTVGASSRGTRPTRCLKKVGEYVGRIATRATGSFNISTKDGLVQGISQKYCKQIHKKDGYSYVF

SEQ ID NO: 12368 - protein, 512 aa, unidentified
MSTVYVLNKDGKPLMPTTRGGHVRHLLKEQKARVVRTNPFTIQLLYETDNLVQPLYLGIDPGRTNIGVAVVKTDGTAVFTAHLETRNKEIPKLMQGRKKARRARRTNGRRCRRQRRAKANGTISKKCVKQATAQNGSVSKRANEIGVIKRHLPGCEKEVLCIGIKNKEAKFSNRTRPEGWLTPTANQLLQTHINLVKKIQKFLPISDVVLEINKFAFMRLDNPNVQKWQYQQGPLYQKASLEEAVSEMQEHHCLFCKNTIDHYHHVVPQHKNGSNTIGNIVGLCAKHHDLVHKDTSWQEKLAKKKTGLNKRYGALSVLNQIIPALTKELSSLFPKHFFATNGKSTYDYRAAHGVSKDHWLDAYCIAGSVLPNDACDNNINNRVPYELKQFRRHDRRALHKENMSRVYTLNGKSVATNRHKAIKQTTDSLEEFRQRQPNDVCKLKVKEHHPEYRNPKRNFPGCEFLVGKHTHVMQGTSGSHNGKADGYYDTNGNSYSSGKCKFVVKNEGIVFT

SEQ ID NO: 12369 - protein, 430 aa, Desulfobacter sp.
LNVFVLDTNKKPQNPVHPAKARLLLTEGKAAVFRQFPFTIILKETVLDVASNPLRIKIDPGSRETGIAVINDDSGEIVFAMELRHRGQQIKNNLESRRAIRRSRRNRKTRYRKPRFDNRTRAEGWLPPSLKSRVHNIETWVNRLCRFCNIQAISMELVRFDMQKIQNPEISGVAYQQGELMGYEVREYLLEKWDRTCAYCGKTDIPLEIEHIVPKSKGGSNRVSNLTLACTACNRKKGNKPIEQFLSRKPRLLKRIQKQSKVPLKDAGAVNTTRWDLFRTLKKTGLPVETGSGGLTKFNRTTRGLHKTHWLDAACVGKSTPEKIFQIDKAVLIVKADGHGSRQMCRMNKFGFPRTTAKSTEKKVKGFQTGDIVKAVVTSGKKVGTYIGRVAVRKSGSFNIKTVDKTVQGISWKYCRLLHASDGYSYNTTC

SEQ ID NO: 12370 - protein, 456 aa, Halomonas sp.; identical to SEQ ID NO: 10947

SEQ ID NO: 12371 - protein, 414 aa, unidentified
MPCSPAKARLLLKEKKAIVKRRTPFTIQLTIATGETKQPVSLGVDTGYKHVGLSASTEKAELYASEVELRQDVSDLLSARRALRQSRRNRKTRYRAPRFDNRIRTKRKGWLAPSVENRINAHLSRIEAVLRLLPVTKITVETASFDMQLLKNPEISGKEYQEGEQLGFWNVREYVLFRDGHVCQHCHGRSKDPVLNVHHLESRRTGGDSPGNLITLCETCHKALHRGEITLKAKRGQSFRAEAFMGIMRWEVLNRLKASHPELEVNNTYGYRTKHARISNGIAKSHCADAFCIAGNLGAKRLGEFFFQKQTRRNNRQIHKLSILKHGLRKRNQTPFEIKGFRLFDKVACKGEEGFIFGRRSSGFFDVRKLDGTRISAGISYKKLHLLEKRRTYLTEIRKEEALPPLPEGSGLRA

SEQ ID NO: 12372 - protein, 434 aa, Selenomonas sp.
MSFLMTWARRKILQKWKVAEMPTIKKYAFVLDAEGKQLDPTIEQNAWRLVRQHKARLVSKFPMVIQLNKVVDTPNSDMVHCGIDDGANHVGLALVQKCQTKNKVLFKGTIEQRKDVKHLLDVRRGYRRYHRYHKQYRPAKFLNRASSRRIGRLMPSIIQRRQAVLRVIDRLRQWVHIDGYWLEDVKIDIRALTDNYQPYRWQYQKSNRLDNNLRLAAIHRDGCKCMECGKEKTRFEVHHITPQEAGGADTISNLITLCPKCHTRTFGREAQFADRYYAMIGSAGHVEGLDDAQRVMQGKHWFREQLQQRGMLRLTTGGDTANKREDWSIVKTHANDAVCITDLEPENVEVEEWCIKPMRRKSKAGIDEVCGFRHRDYVTYTYRNGDTHTGYVTAMYPDKRQLNFQSPTKHCKRVPALKARLLWRYNRIYWFKCA

SEQ ID NO: 12373 - protein, 431 aa, unidentified
MPNKVYIINKHGRPLMPCSPAKARHLLDEGKAKVKKRTPFTIQLVYGSSGYTQEVILGVDAGSKTIGMSASTTKEELLSAEVKPRNDVVDLLSTRREFRRAQRNRKTRYRKPRFDNRVRSKHKGWLAPSVEVKIQEHITAIRRVCGILPVSKVVVETAEFDLQLLKAIADGKPVPQGEDYQQGEMYGHYNVRQYVLWRDGYTCQCCGAHATKKKEVRLHVHHLESRKVGGDAPDNQVTLCESCHEKLHKGLIAEKDFKKRKRKSTRDATFMGIMRKTLMQRLCSELPIPVIETRGYITKATREKLLVLPKSHTNDALAIAQGKQGFNVGYLPGIVQINKIYTIRPVRHHNRQLHKATILKGGIRKSNQTEKYVFGYCLFDKVQFNGQDCFIWGRRTTGIFTIKTINGKMIKDGISFKKLKLAEKSTSYLIA

SEQ ID NO: 12374 - protein, 414 aa, unidentified
MPCSPAKARLLLKEKKAIVKRRTPFTIQLTIATGETKQPVGLGVDAGYKHVGLSASTDKAELYASQVELRQDITDLLSARRALRRARRNRKTRYRAPRFNNRIRTKRKGWLAPSVENRINAHLSRIEAVLRLLPVTKITVETASFDMLLLKNPDIAGKEYQEGEQLGFWNVREYVLFRDGHVCQHCYGRSKDPVLNVHHLESRRTGGDSPGNLITLCETCHEALHRGEIALKTKRGHSFRAEAFMGMMRWEVLNRLKASHSELEVNNTYGYRTKHARIVNGIDKSHCADAFCIAGNLGAERLCEFFFQKQTRRNNRQIHKLSILKGGIRKRNQAPFEIKGFRLFDKVACKGEESFIFGRRSSGYFDVRKLDGTRISAGISYKKLRLLEKRRTYLTEIRKEEALPLLPEGRGLRA

SEQ ID NO: 12375 - protein, 493 aa, unidentified; identical to SEQ ID NO: 3781

SEQ ID NO: 12376 - protein, 406 aa, unidentified; identical to SEQ ID NO: 5685

SEQ ID NO: 12377 - protein, 775 aa, unidentified
  REGION 1..775: note = Ga0315296_10011343
VVVRPQGKLDHIPIPKPERGGITIRSENVLGIDFGPEHVGLALVRREPAGEQVLYAASITLRDLSPVMKERRALRRQRRSESWYRQPRVPQRGGGSARGAGAQEDEQAVEGVPEEEEEDRSRARSAPEYRRAQGCNKPKRKCKYVDPKTGEVCGANTPRKEKVRDLLLWDICQHLPVEPEQRLAILSYVNQVNIVRPEVLACLALEERALLENHRALARASKSKPLPQLLCELKIKKQLQSQILAIASGDPERKAADLKGRMAFCRKHFLLHHQQTRIPKPSAWLPPSIRCRHADLERVCREEVAPRWPVHRIRLERAQFDLQAIQRDPQGRGKDWDPEEWQRGPCWGRRNIYSAKRHEQGNRCAYCGKEPKKENRLELEHVKPGGGNTWDNLVLACRKCNQRKGKAEARGAGLKFSVDPDTGVSLAPRGLGESVVARYMTQTDQGYRELVARLQQLFPDAQIEYRYGYQTDHIRKRWIGSAQFAETALSLGYKQSPPRPKKRRKQWSELAHLKRKPRRHSDPLKSHVMDAVAIAGSLQRDSPPELCQADKITIRPSRRQLFDTNPLGRGSDGRFYQRVKICGTQGGLSFRRVKHVVDARKRAILERVRDLLIEQAKGNEESPPSAFTPDAAQLIPFTSVRLAKRDASKTNTRRLHAPDDDRLPQQKGGHWYKAAGGPNWATVVYRLGGREQVAVLRNPAAFPDASSDIPAGAQVLFSFRKGKLVSFEQDGQTTRARITKNNSDGTLTVERLDDGREVTRSARCFRPVPLLAPNA

SEQ ID NO: 12378 - protein, 470 aa, unidentified; identical to SEQ ID NO: 2925

SEQ ID NO: 12379 - protein, 443 aa, unidentified
LTKDENRPSGRTTGLRAEQAEPAGIRKGDTLKVFVLNMRGKPLMPCSPAKARHMLKAGKAVVVRRTPFTIKLTIATGETKQDVTLGVDAGARHVGISATTEKEEVFASEVALRQDITGLLADRLAFRRARRNRKTRYRAPRFNNRVRSKHKGWLAPSVENRIQAHMSRIEAVCRLLPVTKIVIETASFDIQKIRNPEVEGTGYQQGDQLGFWNVREYVLFRDGHICQHCRGRSKDPILNVHHLESRKTGGDAPNNLITLCETCHKAYHAGKIKLKVKRGQSFRAEAFMGIMRWTLLDRVRKTHPKLPVENTYGYLTKHKRIALGLPKTHCADAFCIAGNLKALRRGDFLFQQQTRKHNRQIHKCSILKGGVRTLNQAPFLVKGFRLFDKVRIGGQIGFVFGRRVRGTFNIRRLDKTVIGTDINCKKLSLLETRKTFLTELRKE

SEQ ID NO: 12380 - protein, 428 aa, unidentified; identical to SEQ ID NO: 6717

SEQ ID NO: 12381 - protein, 428 aa, Moorena sp.; identical to SEQ ID NO: 4771

SEQ ID NO: 12382 - protein, 431 aa, unidentified
MPNKVYVINKHGRPLMPCSPAKARHLLDAGKAKVKKRTPFTIQLVYGSSGYTQEVILGVDAGSKTIGVSALTKKEELFAANVIPRNDVVDLLSTRREFRRARRNRKTRYRKPRFDNRVRSKHKGWLAPSVEVKIQEHITTIRRVYGILPVSKVVVETAEFDLQLLKAIADGKPVPQGEDYQKGEMYGHYNVRQYVLWRDNYTCQCCGAHATKKKEVRLHVHHLESRKVGGDAPDNQVTLCESCHEKLHKGLIAEKDFKKRKRRSTRDATFMGIMRKTLMQRLCSELPIPVVKTRGYITKATREKLLVLPKSHTNDALAIAQGKRGFNVGYLPEIAQIDKIYTIRPVRHHNRQLHKATILKGGIRKSNQTEKYVFGYRLFDKVQFNGQDCFIWGRRTTGIFTIKTINGKMIKDGISFKKLKPVEKSTSYLIA

SEQ ID NO: 12383 - protein, 420 aa, unidentified; identical to SEQ ID NO: 9391

SEQ ID NO: 12384 - protein, 438 aa, unidentified
LITGKYISSTRPWQEEKFSERKVSEMTNYAFVLDADGKQLAPTKEQKAWFLIRKKRAALVSKYPMVIQLNKEVPDEEICKDEIRCGIDDGGLHVGIALVQKCQTQNKVVFKGTIEQRNDVKHLMDIRRGYRHYHRYHKRYRQARFNNRSSSKQKGRITPSILQKRQATVRVINQLNKWINITDYWLEDVAIDIRAMTDGYKPYKWQYQKSNRLDENIRKAVILRDGCKCMECGKSNCKLEVHHIKPRRSKGSNTLGNLITLCAKCHHKTKGVEELYMDRYFALLNSSDNKNLNYAQHVMIGKKWLREQLSSLGILHLTNGGDTANKRIDWDIAKSHSNDAICITNLRPDECEIKEWTIKPMRRQSKAKTDNVLGIKHRDFVEYTFKNGETHRGYVTALYPEQNALNFQSPTKHCKKVNVRKCKVLWKYSKIYWLDNVS

SEQ ID NO: 12385 - protein, 414 aa, unidentified; identical to SEQ ID NO: 7107

SEQ ID NO: 12386 - protein, 410 aa, Bacillus sp.
MTKNKNKEYCFVLDVEGGKLAPTSVNNGWYLIRKKRAKLVAKYPMVIQLHKSVEDVDYKIRLGIDDGSLHVGVGLVQECKTKNKPIFKATIEHRKDVSKLMEQRRGYRRYKRNHKRYRQAKFGNRASSRREGRIAPSILQKRQTIIRFVNKISKWIDIASIHLEDVAIDIRALTDDKKLYNWQCQKSNRLDENMRKAVIIRDKYECMECRKSNCMLEVHHIVPRRLRGSNTLDNLITLCSKCHQKTEGKEEKFVDKYQKLINGKSLRLDFAQHVMQGKNWLQQHLSQYGTLLLTSGGDTANRRIDWSIEKAHSNDALVICGLEIHDTNIKDWVIKPIRKKTKAIHSETYGFKHRDIVQYTDTKKVTHVGYISAMYPDKLQINIQTKEKHLKRVNARKSVLKWRFRGLYFL

SEQ ID NO: 12387 - protein, 451 aa, unidentified; identical to SEQ ID NO: 5203

SEQ ID NO: 12388 - protein, 411 aa, unidentified; identical to SEQ ID NO: 6901

SEQ ID NO: 12389 - protein, 461 aa, unidentified
MVYVINKQGQALMPTERFGKVRRLLKNGLANVVCRIPFTIQLDYDTTNFVQPISLGVDAGSKHIGISATTSEKELYAADVELRNDIVEKLSTRKEQRRTRRNRLRYRKVRFNNRVSSKRKGRLAPSIENKIQTHLTVVEKIHKFLPVTNIIVETAAFDIQKIKNPSISNEEYQQGEQLHFFNVREYVLHRDGYQCQHCKGKSKDPILNVHHIESRKVGGNSSQNLITLCKSCHKAYHKGKIELKVKRGASFRDSAFMSTMRWSFYEKLKNIYPNVSMTFGYITKNTRITNGLPKDHYVDARCISGNPTTKPLGYYFYQKKVRCQNRQIHKVNFLKGGRKKLNQAPFLVKGYRLFDLVEYQKDLYYIFGRRDSGFFDIRKLDGTKVNKGSISCKQMRLIDIRKTIIIEKRIASKFMKKGDKVREIGDTLTGTIVYIANGYADVKYPNMKGVCSLPVQFLEKV

SEQ ID NO: 12390 - protein, 413 aa, unidentified
MTNYAFVLDVNGKQLAPTKEQKAWFLIRKKRATLISKYPMVIQLKKEISDEQICKDEICCGIDDGGLYVGVALVQKCKTKNKVVFKGTIEQRNDVKHLMEVRKGYRGYHRFHKRYRQARFNNRKSSKRKERIAPSILQKRQAIIRVIKQLNKWINIANYLLEDVAIDIRALTDGYKLYRWQYQQSNRLDENIRKTVILRDDCKCMECGKSNCRLEVHHIKPRRLNGSNTLDNLISLCETCHQRTEGQEELYMDRYFSILNSTDNKNLNYAQHVMIGKKWLREQLSELGTLILTTGGDTANKRIDWNIEKSHSNDAICITGLQTDTCNVKEWTIKPMRRQSKAKTDNVLGIKHRDLVEYTFRNGETHRGYVTALYPEQNALNFQSPTKHCKRVNAKKCKLIWKYSKIYWLDNVS

SEQ ID NO: 12391 - protein, 442 aa, unidentified; identical to SEQ ID NO: 4418

SEQ ID NO: 12392 - protein, 454 aa, Clostridium sp.
LDTVAVINASGKKLMPTNSYRARKLLKSKRAVIHKYRPVFTIKLVDRVDGYTQPIEYKCDTGYQNIGISICSDTKEFVNEQRNLLKDEVKRHNSCRKYRRTRRNRLRYRKARWNNRKGMISKDGFAPSIRNKRDMHIRLYEEYCKVFPITKAVFEMGQFDTQVLKAIEAGLPVPVGIDYQRGEQYGYATLREAVFARDNYTCICCGKSAVKDGVKLRIHHIGYLSGDRSNRMTNLGSVCENCHTSKNHKPGGKLYNLKPRLKTFKGATFMTMVRYSMIKQLKVTTPGVDIKVTYGATTKLARKELNIKKTHSNDAYCMGEFHPKHRSDFKHYKKCRRNNRVLSKFYDAKYRDLRDGSVKTGSQLSCGRTNRKISRHTELDERIYRAHKITKGRVSTRRQHYSLRPGDKVLYNGKIYFVSGMQSNGASVKLTNGKAYSLKKVRVLQHCNAWTAVV

SEQ ID NO: 12393 - protein, 477 aa, unidentified; identical to SEQ ID NO: 2707

SEQ ID NO: 12394 - protein, 423 aa, unidentified
MSNLIFVLDSNQKPLTPCKPSMAHKLLTANKAAVFRMYPFTIILKKIVSATPEPTTLKIDPGSKTTGIALLQGEKVIWGAELTHRGQAIKASLESRRAIRRGRRNRHTRYRQARFLNRKRPKGWLAPSLQHRVETTLCWVNRLIKLVPISSIVQELVRFDLQQLENPEISGVEYQQGELLGYEVREYLLNKWDRKCAYCGVENVPLQVEHIHPKAKGGTNRISNLCLACEKCNTKKGSQDIEKFLAKKPDILKHILSQAKRPLKDAAAVNSTRWALFNRLKETGLPVSTGSGGLTKFNRTRLNLSKTHWLDAACVGSVESLEILTSKPLLIKATGHGTRQMCRTDKYGFPSRYVPRFKFVKGFQTGDIVKAVVTSGKKIGTYLGRVAVRTSGSFNISAPELVSGISFKYCKIVHHKDGYSYAF

SEQ ID NO: 12395 - protein, 465 aa, unidentified
MNTCVCVLSNNGERLMPTFRLGKVRHLLKDGKAKIVKHYPFTIQLLYNSKTNIQPIEICEDVGYNYIGISVKSESYEYVSAQYDTLQDEKEHHDDCRKMRRARRNRLRYRKPRFDNRKRSEGWLAPSLEHKKQLNISLVERYVSVIPITHATVEVGSFDTMLLQAIQKGEAKPEGADYQEGPRYNLATLREAVFYRDNYACQVCGRKITDGAILHMHHMFYWKGRHGYKLDELVTACEKCHTPANHQKGGKLFGFGEDKEFADLSGAAFMNAVRWQIVNALHTTYSKEFVTITYGAMTKEKRIALQLEKSHNNDAYAMGEFHPSRRCAFEHYEKVRRNNRILEKFYDSRYIDIRTGKETAGKELFNGRISRNHKKDSENLHKYRGKRVYKGHRALMRKKINLNPGDVVSLNGETLVVHGTHTDKKGAVNVEFKAPAKNGQKSASLKKLKIVKTANSMHSAWEKVS

SEQ ID NO: 12396 - protein, 473 aa, unidentified; identical to SEQ ID NO: 3562
  source 1..473: note = uncultured beta proteobacterium

SEQ ID NO: 12397 - protein, 534 aa, Acrocarpospora sp.
LTTFHVSEQTHQAVLPQRLALESVGADNPEGGDETAYRLPTLPGAGVEHGRGEIGSGGTRLLRRHPEPSSDGKGAARKGATHPVVFVLDKHGHPLDPCHPARARRLLAAGQAVVVRHTPFVIRLRDRVAADSTVQGVQVGIDPGSKHTGIAVFTERGEDRAGKYSIQLDHRGGQIRDKLTARAALRGGRRSRTLRYRAPRFNNRTKPKGWLAPSLRHRVDTTMSWVTRLSRWAPVRAVHVERVAFDTHTLTAGRPLQGVEYQQGTLAGYEVREYLLAKWGRTCAYCGATGVPLNIDHIHPRSRGGSDRVGNLTLACIPCNQTKNATPIEEFLKSKPALLAKLLKHAKAPLRDAAAVNATRWALWRTLAATGLPVATSSGGRTKWNRSRTGAPKSHTLDALHVGHLDAVTGWPSVVLVVKATGRGTYCRTRTDKYGFPRLRLPRVKQVHGYATGDLVRAVVPSGKNAGTHVGRVAVRSTGKFNITTAHGTRQGTHHRHVRLLQRADGYAYTSQGETHATGRSGLEGPPAPVSSPG

SEQ ID NO: 12398 - protein, 454 aa, unidentified
VSYTARYVPAYRFKHITKKEVPYMVYVLDIDGQPLMPTSRHGKVRRLLNSHLAKVVKRCPFTIQLLYQSTKETQPVSLGVDAGSRHIGLSATTEREVVYQEELVPRNDIVKLLSARRTLRRTRRNRKTRYRKPRFNNRVHSKHKGWLAPSVEVKIQEHITTIKRICQILPISEIQVETAEFDLQRLKAMKEGKPLPVGTDYQLGEQYDFYNTRQYVLHRDGYTCQCCGTHDNNIKLHVHHIESRQTGGDAPNNLITLCEHCHKLLHAGKTILPKDKKRGRSYRDATFMGVMRKTLQERLKKEIDVPVEGTYGYITKYWREKTGLEKSHTNDAICISKHPYAKPLDTYYLTKAVRHHNRQIHKSNFSKGGIRKRNQAPYLVKGFRLFDKVLYQGKSYFIFGRRATGYFDIRTLDGTKVNKGSIKYKKLRIQDTAKAYLKEARAIPHVNKFTCVLA

SEQ ID NO: 12399 - protein, 499 aa, unidentified
MSTSVFVLDKKHRPLMPCRPARARRLLRAGRARVVKRFPFVIRLVDRTVEQSEVQPVLIKLDPGSRETGAAVVRDDEKKRHHALAFFVIKHRGGAIRDALKARSAFRRRRRSQNFRCRSPRFLNRVKPKGWLPPSLRHRVETTLSFVRRMCRYLPVSGIATELVKFDSQKLQNPEVSGVKYQQGTLFEYEVREYLLEKFGRKCVYCGAEGVPLNIDHVVPRAKGGSNRVSNLVLACVSCNQKKGARSLEDFLKGKPEVLARVRRELKTPLRDAAAVNATRWVLFNELKATGLPVETGSGALTKLNRHAFGVEKEHWLDALCVGRLNGVVTRKGLNVLEIRCMGRGSRQRTRLTKYGFPRGYLMRQKCVHGFATGDMVEANVPKGKKAGLWRGRVAVRVSGSFNIQTPKGVIQGVGWKHCRLISHNDGYGTRGSATRLIPPCLNLWTTHPLSSRSTAVFDSGTEGCLRQPQATSGNPRSSASRINSLPPKAAGGFMPRST

SEQ ID NO: 12400 - protein, 442 aa, unidentified; identical to SEQ ID NO: 3218

SEQ ID NO: 12401 - protein, 438 aa, unidentified; identical to SEQ ID NO: 4848

SEQ ID NO: 12402 - protein, 408 aa, unidentified
MVYVQDINGKPMMPTTRYGKVRRLLKDKKAVVVNLCPFTIKLTYVTSDYKQKIVLGVDAGTKHVGLSATTKSKELYSSEVILRNDIVDLLSTRRELRKTRRNRLRYRKPRFNNRIKSKRPEWVAPSVKYKIDAHIRVIDNVCFILPISRIVIEVAQFDTQKIKNPNISGKEYQEGDQLGFWNVREYVLARDGHKCQYCKGKSKDSILNVHHIESRKTGGSSPSNLITLCETCHKEYHKGNINLKIKRGKSLRDAAVMGIMKWKLYEELKSKYDRVFMTFGYVTKYNRINHGIEKSHVSDAFVISKNFNAIRLGYYYKVRLVRRHNRQIHKQKIPKGGIKRLNQSPFEVFGFRLFDRVMFENNYYFIFGRRKTGRFNIRDIDGKNQRDITYKKLKLSRRKCFMVQNEMN

SEQ ID NO: 12403 - protein, 302 aa, unidentified
PSVENRINAHLSRIEAVLRLLPITKITVETASFDMQRLKNPDISGKEYQEGEQLGFWNVREYVLFRDGHVCRHCHGRSKDPVLNVHHLESRRTGSDSPDNLITLCVTCHKALHRGEITLKAKRGQSFRAQAFMGIMRREVLNRLKASYPELKVHETYGYLTKHARIANGIVKSHGADAFCIAGNLGAERLGEFFFQKQTRRNNRQIHKLSILKGGIRKRNQAPFEAKGFRLFDKVACQGEEGFIFGRRSSGSFDVRKLDGTRISAGISCKKLRLLEKRRTYLTEIRKEEALPPLPEGRGLRA

SEQ ID NO: 12404 - protein, 419 aa, unidentified
MLVYVINRHGKPLMPCKPQKARKLLKEQKAKVVKRTPFTIQLLYGSSGYKQDVTLGVDTGSKTIGLSATTENKEVFSAEVELRTDIVDLLSTRRTLRRSRRSRKTRYRQPRFLNRKKPEGWVAPSVQNKIDTHIKVVKMVHAILPITKVVVEVAQFDIQKIKNQNIQGEDYQQGEQLGFYNVREYVLFRDKHTCQHCNGKSKDPILNVHHIESRKTGGNSPDNLITLCETCHRKYHKGEIELKVKRSSSFRDAAFMGIMRWAFYDKLKELYSNVSLTFGYITKNVRIKHNLEKSHRIDARCISGNPLAKENGCWYFFKQVRKQNRQLHKTNPKKGVRRENKAPGYVHGYQLFDKVEYLDRECFVFGRRSSGYFDLRTLDGEVVSRSASVGKLKLVERSSSLLCERREVSFLTGLKPCVS

SEQ ID NO: 12405 - protein, 418 aa, unidentified; identical to SEQ ID NO: 4950

SEQ ID NO: 12406 - protein, 428 aa, unidentified
LKVFVLNMRGQPLMPCSPAKARHLLKAGKAVVRRRTPFTIQLRIATGETKQSVTLGVDAGAKHVGLSAATEKEEVFASEVELRQDITGLLAARLSLRRERRQRKTRYRAPRFLNRVRSKHKGWLAPSVENRIQAHLSRIDAICGLLPVTKIVIETASFDIQKIKHPDVEGTDYQQGDQLGFWNVREYVLFRDGHVCQHCHGHAKDKILNVHHLESRQTGGDAPNNLITLCETCHKACHAGKIKLKVKRGQSFREEAFIGIMRWTLLDRVRKAHPGLPVENTYGYLTKNTRITLGLPKAHCVDGYCIAGNLKAVRRGVYLHQRQVRKHNRQIHKCTVLSKTLKDGTKIGYRKLNQTPHLVKNFRLFDKVRCLGQTGFIFGRRSSGYFDVRRLDGVKISSCINYRKLTLLEKRSTYLTELRKEDGASSPV

SEQ ID NO: 12407 - protein, 423 aa, Arthrospira sp.
MSNHIFVLDTNRKPLTPCKPGVARSLLKAGKASVFRRYPFTIILNKEVDANPEPLELKLDPGSKVTGIALKQGNHIIFAAELQHRGQQIKEALLSRRQLRRSRRNRKTRYRPARFLNRTRPEGWLAPSWQHRVDTLMTWVHRFRRLAPVGRITQDLVRFDLQLMENPEISGVEYQQGELQGYEVREYLLEKWGRTCAYCGAQNVPLEVEQIQPRSKGGSDRVSNLTMACHSCNQAKGNGDIRDFLSGQPDVLSRLLRQAKSPLKDAAAVNSTRWALFKALKATGLPVTTGTGGQTKFNRLRLNLPKAHWLDAACVGPVESLEVLTSKPLLILAKGHGTRQMCGTNKYGFPNRHRSRRQIHKGFQTGDMVTALVTAGKKIGSYLGRVLCRASGSFDITTASVRVAGISHKYCQPIHRKDGYAYA

SEQ ID NO: 12408 - protein, 470 aa, unidentified; identical to SEQ ID NO: 5320

SEQ ID NO: 12409 - protein, 441 aa, unidentified
MSKVFVVDANKHPLNPVHPGYARLLLKQGKAAVLRHYPFVLILHAEVEMPQLEPLRVKLDPGSKTTGLALVKDATGEVIFAAEITHRGAEIKHALDGRRGVRRGRRQRDTRYRKPRFLNRRRPKGWLPPSLESRVCNVVTWVKRLRRLCPLAAISQELVRFDLQAMETPEIAGIAYQQGTLAGYEAREYLLEKWGRKCCYCGATRLPLQIEHIQCRAKGGSDRISNLCLACGPCNLKKGTVDIQVFLAKKPDLRKRILARARAPLADAAAVNSTRWALYERLQAVGLPVECGSGGRTKFNRASRGLEKTHWHDAACVGASTPEILQIQGIVPLLITAQGYGCRQMCNVNEIGFPCSKPKGAKKVKGFQTGDIVRAIVTSGTKQGTYMGRVLVRATGSFDIRTKDGRVQGISHRFCTPIHRRDGYSYKQGADHAAHPTQSTR

SEQ ID NO: 12410 - protein, 431 aa, unidentified; identical to SEQ ID NO: 6055

SEQ ID NO: 12411 - protein, 417 aa, unidentified; identical to SEQ ID NO: 12198

SEQ ID NO: 12412 - protein, 431 aa, unidentified
MPNKVYVINKHGRPLMPCSPAKARHLLDAGKAKVKKRTPFTIQLVYGSSGYTQEVILGVDAGSKTIGMSASTTKEELLSAEVKPRNDVVDLLSTRREFRRARRNRKTRYRKPRFDNRVRSKHKGWLAPSVEVKIQEHITAIRRVCGILPVSKVVVETAEFDLQLLKAIADGKPVPQGEDYQQGEMYGHYNVRQYVLWRDNYTCQCCGAHATKKKEVRLHVHHLESRKVGGDAPDNQVTLCESCHEKLHKGLIAEKDFKKRKRKSTRDATFMGIMRKTLMQRLCSELPIPVVETRGYITKATREKLLVLPKSHTNDALAIAQGKQGFNVGYLPEILQIDKIYTIRPVRHHNRQLHKAAILKGGIRKSNQAGKYVFGYRLFDKVQFNGQDCFVWRRRTTGIFTIKTINGKMIKDGISFKKLKLVEKSTGYLIA

SEQ ID NO: 12413 - protein, 428 aa, unidentified
LKVFVLNMRGRPLMPCSPAKARHLLKAGKAVVKRRTPFTIQLRIATGETKQNVTLGVDAGAKHVGLSAATEKEEVFASEVELRQDITGLLAARLSLRRDRRHRKTRYRAPRFLNRVRSKHNGWLPPSVENRIQAHLSRIDAICGLLPVTKIVIETASFDIQKIKHPDVEGTDYQQGDQLGFWNVREYVLFRDGHVCQHCHGHAKDKILNVHHLESRQTGGDAPNNLITLCERCHKACHAGKIKLKVKRGQSFREEAFMGIMRWTLLDRVRKAHPGLPVENTYGYLTKNTRITQGLPKAHCVDAYCIAGNLKAVRRGVHLYQRQVRKHNRQIHKCTVLSKTLKDGTKIGYRKLNQTPHLVKNFRLFDKVRCLGQTGFIFGRRSSGYFDVRRLDGVKISSCINYRKLTLLEKRGTCLTELRKEDGASSPV

SEQ ID NO: 12414 - protein, 431 aa, Klebsiella sp.; identical to SEQ ID NO: 3801

SEQ ID NO: 12415 - protein, 441 aa, Ktedonobacter sp.
MSKVFVVDANKHPLNPVHPGYARLLLKQGKAAVLRHYPFVLILHAEVEMPQLEPLRVKLDPGSKTTGLALVKDATGEVIFAAEITHRGAEIKHALDGRRGVRRGRRQRDTRYRKPRFLNRRRPKGWLPPSLESRVCNVVTWVKRLRRLCPLAAISQELVRFDLQAMENPEIAGIAYQQGTLAGYEAREYLLEKWGRKCCYCGATRLPLQIEHIQCRAKGGSDRISNLCLACGPCNLKKGTVDIQVFLAKKPDLRKRILARARAPLADAAAVNSTRWALYERLQAVGLPVECGSGGRTKFNRASRGLEKTHWHDAACVGASTPEILHLQGIVPLLITAQGYGCRQMCNVNEIGFPCSKPKGAKKVKGFQTGDIVRAIVTSGTKQGTYMGRVLVRATGSFDIRTKDGRVQGISHRFCTPIHRRDGYSYKQGADHAAHPTQSTR

SEQ ID NO: 12416 - protein, 450 aa, unidentified; identical to SEQ ID NO: 4205

SEQ ID NO: 12417 - protein, 419 aa, unidentified; identical to SEQ ID NO: 10184

SEQ ID NO: 12418 - protein, 427 aa, Lachnospira sp.
MKQGNRVFVLNMRDEPLMPCSQRKARILLKKGKAVINKYNPFTIQLTYATGETKQDCHIGVDTGAKHIGIAITSEDKVFYKAEVELRQDVSSNLDTKRIYRRSRRNRKCRYRKPRFQNRKRTDKWLPPSLQNRVNHTFNWIDKFSALVPNPILHIEVGKFDTAKMINPDINGVDYQHGQTYGFFDERYFVFARDNYTCQVCGKSKGKILQTHHIIYRSNGGTDRVDNLITVCTDCHTSANHKKGGILYKWQAEHKKVKQYKEPPFMNALRRRIFDKYPDAIITYGSETTPKRKEIGLEKTHYNDAIVISGIETIKENPDEWLLIRQFRKKKRSLHEATARKGRKEPNRTQKRNRKNTPCCKGFWLNDKVSVLGQVGYITGFTSGGAYIKNKNDEYITLPSKSYKQVGISNLRLLSHNNNWQYIRNAV

SEQ ID NO: 12419 - protein, 403 aa, unidentified
MPNKVYVINKHGRPLMPCSPAKARHLLDAGKAKVKKRTPFTIQLLFGSTGYTQEVILGVDAGSKTIGLSASAETEELLSAEVKPRNDVVDLLSTHREFRRARRNRKTRYRKPRFDNRVRSKHKGWLAPSVEVKIQEHITSIKRVCRILPVSKVVIETAEFDLQLLKAIADGKPVPQGEDYQKGEMYGHYNVRQYVLWRDDYTCQCCGAHATKKKEVRLHVHHLESRKVGGDAPDNQVTLCESCHEKLHKGLIAEKDFKKRKRRSTRDATFMGIMRKTLMQRLYSELPIPVIETRGYITKATREKLLVLPKSHTNDALAIAQGKRGFNVGYLPEIAQIDKIYTIRPVRHHNRQLHKAAILKGGIRKSNQAGKYVFGYRLFDKVQFNGQDCFIWGRRTTGIFTIK

SEQ ID NO: 12420 - protein, 437 aa, Clostridium sp.; identical to SEQ ID NO: 10814

SEQ ID NO: 12421 - protein, 454 aa, unidentified
VSYTARYVPAYRFKHITKKEVPYMVYVLDIDGQPLMPTSRHGKVRRLLNSHLAKVVKRCPFTIQLLYQSTKETQPVSLGVDAGSRHIGLSATTEQEVVYQEELVPRNDIVKLLSARRALRRSRRNRKTRYRKVRFNNCVHSKHKGWLAPSVEVKIQEHITAIKRICQILPISDIHVETAEFDLQRLKAMEEGRPLPVGTDYQLGEQYDFYNTRQYVLHRDEYTCQCCGTHDNNVKLHVHHVESRQTGGEAPNNLITLCEHCHKSIHAGKMMLPKGKKRGKSYRDAAFMGIMRNTLLERLKKEVNVPVTMTYGYITKYWREKAGLEKSHINDAICISKHPYARPLETYYLTKAVRHHNRQIHKTKFSKGGIRKRNQAPYLVKGFRLFDKVLYQGESYFIFGRRITGYFDIRTLDGTKVNKGSTSYKKLRIQDTAEAYLTEVRAIPHMNEFTCVLA

SEQ ID NO: 12422 - protein, 431 aa, Escherichia coli
MNRVFVLSKTGKTLMPCHPARARQLLHDKKAVIKRLYPFTIQLTHRSEEYIQPVELKFDPGSKQTGIGIVLHGKNRFSAIYGTVLTHRGNEIKNNLDSRRMIRRSRRNRKTRYRQVRFLNRVRSKHKGWLAPSVQSRVDNIVEWSKRFIRYVTVGFITVESVKFDMQKMENADVDGIEYQRGTLFDYEVKEYLLEKYNYSCVYCGAKNVPFEKEHVIPRSRGGSNRISNLVLSCRSCNEKKDNLPIEEFLKDNPALLKKIKAQLKSSLKDAAAVNITRKQIVKELENLNVPVLTGTGAETKYNRVSQGYKKEHYIDALCAGTTGTKVYIPSTLKPLLIKKERRNNRQMCLVDKYGFPRGKAKGSKIVHGFKTGDIVKAVVLKGKKKGTYKGKVAVRSSGSFNIKVKQGVVEGIGWKNCVMLYRFDGYSYAY

SEQ ID NO: 12423 - protein, 402 aa, unidentified
QPIEYKCDTGYQNIGISICSDTKEFVNEQRDLLKDEVKRHSDSRKYRRTRRNRLRYRKARWNNRKGMISKDGFAPSIRNKRDVHVRLYEEYYKVFPITKAVFEMGQFDTQVLKAVEAGLPIPDGTDYQRGEQYGYATLREAVFARDNYKCICCGKSAIKDGVKLRIHHIGYLSGDRSNRMANLGSVCESCHTSKNHKPGGKLYNLKPELKTFKGATFMTTVRYSMVKQLKAATPDVDIRVTYGAATKLARKALNVKKTHSNDAYCMGEFHPKHRSDFKHYRKCRRNSRVLSRFYDAKYRDLRDGSVKTGSQLSCGRTNRKISRHTELDGRIYRAHKISRGRVSIRRQHYSLRPGDKVLYDGKAYFVTGMQNSGTRVKLTNRKVCSLKKVHVLQHCNAWTAVI

SEQ ID NO: 12424 - protein, 431 aa, unidentified; identical to SEQ ID NO: 4463

SEQ ID NO: 12425 - protein, 426 aa, Sutterella sp.
LAKDHYRSIDREETNLRVYVLNKRGEPLMPCSAAKARILLKEKKAKVKRRTPFTIQLTIATGETTQPVNLGVDAGYEHIGLSASTEKAELYASEIELRQDISELLAARRALRGARRSRKTRYRAPRFDNRKRDKGWLAPSVENRIGAHVSRVEAVLRILPVTKIIVETASFDVQRLKNPDVQGVEYQEGEQLGFWNVREYVLFRDGHECQHCHGKSKDRVLNVHHIESRRTGGDAPNNLITLCETCHKAFHRGEIELKVKRGRSFQAETFMGVMRWTFFERLRARHPEIEVRNTYGYLTKDTRIANKIEKSHCADAFCIAGNLKAKRLGYYFFQKQTRRHNRQIHKLTILKGGVRKRHQTPYEIKGFRLYDKVLYRGKTAFIFGRRSSGYFDIRTLDGERISAAVNSKKLRLLEKRRTFLIELRRN

SEQ ID NO: 12426 - protein, 415 aa, unidentified; identical to SEQ ID NO: 10543

SEQ ID NO: 12427 - protein, 421 aa, unidentified
  source 1..421: note = Clostridia bacterium
MLQKQEYALVLDSDGNKLAPTKVQKAWFLIRKKRAKLIQRYPMVIQLTKKVNMIKDGTTLECGIDDGSKYVGIALVQKCKTKNKVFFKGTIELRQDVKKKMDIRREYRRYRRSHKHYRPARFNNRVSMIKKGLPPPSIKQKKDSIIRVVNSLNKFVNIDNIHLEDVKINIREMVEGKKLYGDEYNIPNKENANLRIATLIRDNYTCQECSKKTNLEVHHIIPRSKNGSNSIYNTITLCADCHQKTEGKEFLFAGKYLRQIGSDFLKGLNYAQHVMQGKKYLRARLREIVNLDTTDGLTTSERREMWGIDKSHSNDAVCITGLKPNDIEITEYTIIPQRRKSKAKSKGLNGFKHRDIVTYHHTNNIDYIGNITAIYTDGTNTLNVKTKEKHFKRVSYKRCKLFYRFDKIWWLQDKFIQFYII

SEQ ID NO: 12428 - protein, 514 aa, Nocardiopsis sp.; identical to SEQ ID NO: 3215

SEQ ID NO: 12429 - protein, 536 aa, unidentified; identical to SEQ ID NO: 4526

SEQ ID NO: 12430 - protein, 423 aa, unidentified
MVYVLSIDGQPLMPTDRHGKVRHLLKDGRAEVVKCCPFTIRLLYDSTHYTQDIVLGVDAGSKHIGLSGTTETKELYASDVELRNDIVDLISTRRQNRRFRRNRKTRYRKARFLNRLSDKKDWLAPSIRQKVDTHMTVVSRVCKILPVTKIIVETASFDIQKIKDPDISGTGYQHGEQLDFWNVREYVLFRDGHTCQCCKGKSKDPVLNVHHIESRKTGGDAPNNLITLCETCHKGYHSGAVQLPKAIHRGMRFKDAAFMGIMRWAFYNKLKEVYEPQDIEIRMTFGYLTKNTRIRHHLPKEHYIDARCISGHPEAIPNNEVFYQKKVRCHNRQIHKNTILKGGIRKRNQTGYLVKGFRLFDKVAYKGREYFIFGRRQSGFFDLRNLSGCKVNKGSLSYRKIGFLEPRQYYLCERRVMDTQGCA

SEQ ID NO: 12431 - protein, 522 aa, unidentified
MNYIDFVFVTDKDNLPCNPINEGYAGKLLRTGKAKIVNHDPLVIKRLDDYSSKNENRHTITLKVDTGFGNIGFSASDNKHEYIAGQVELLSGISDRLVTRKGYRTQRRSRLRYRRNKNIDYKTVNNPTYKNGNEDGWLAPSVIHKIESHVRVIDKIALWIPIDKVIIETANFDIQQIKATLNGIAINGIDYQKGEMYGFENVKQYVRERDNYTCQICKEKLTDKRHVVIEVHHIIPRSKGGSNKPDNMISLCHCCHKKVHENNNDNKLFRELQQRKIINTYKDATFMNTMRWELYNRLKENYDVSISFGYITRMNRKNAGLKKYHYTDAVCISEYHRITLTRNVYLVEQKRCNDRCMESFFDAKYIDSRDGKVKKGSELCKLRVATASSKRSTKKEDIDNKRIYRQEKVSKGKRRYENHSYCLKPGDLIYINYGNHKGNIAEVTTMQKNPNGTYKIVFSYANPKCKIPSINIKEKEYEELTHNQCEKVKIVRTRRGMIWRKVNRLEFEENTAEQIDKKVKNK

SEQ ID NO: 12432 - protein, 414 aa, unidentified; identical to SEQ ID NO: 2588

SEQ ID NO: 12433 - protein, 442 aa, Anaerostipes sp.; identical to SEQ ID NO: 2903

SEQ ID NO: 12434 - protein, 312 aa, unidentified
MSTCVCVLSNSGERLMPTFRLGKVRRLLKDGKAKIVKHHPFTIQLLYDSKANTQPIEICEDVGYNYIGISVKSQSHEYVSAQYDTLQDEKACHDSCRKLRRTRRNRLRYRKPRFDNRKRGEGWLAPSLRHKKELNVNVVKMYCAVMPITHATIEVGSFDTMLVKAIQEGKAIPEGADYQKGPRYNLATLREAVFYRDNYVCKVCGRKATEGAILHVHHMFYWKGRHGNSLSELITVCEKCHTPANHQKGGKLFGFGEDKEFANLSGAAFMNAVRWQIVNALYATYGKEFVTITYGAMTKEKRIILGIEKTHN

SEQ ID NO: 12435 - protein, 417 aa, unidentified; identical to SEQ ID NO: 5520

SEQ ID NO: 12436 - protein, 461 aa, unidentified
VQPLYLGIDPGRTNIGVAVVKADGTAVFAAHLETRNKKIPKLMQDRKKARRARRTNGRRCRRQRRAKANGTISKKCVKQDTAQSKNPSKRAKEIGVIKRHLPGCKKDVLCVGIKNKEAKYTNRARLEGWLTPTANQLLQTHINLVKKIQKFLPISDVVLEVNKFAFMRLDNPNIQKWQYQRGPLYQKGSLENAVSEMQEHHCLFCEKPIEHYHHVVLKSENGSNTIANIVGLCAEHHNLVHKDVAWQEKLVEEKTGLNKKYGALSVLNQIIPALTKELSFLFPKHSFMTNGKSTHDYRAAHGISKDHWLDAYCIACSVLPIDVCDSTINNCVPYELKQFRRHDRRALNNENMNRVYTLNDKVVATNRHKATEQEAASLEEFRKEHPNDVCKLKVKEHHPTYRNMNRNYPGSVFLVGKQIHVMQGIASSKDGKATKYNDTRATTIAAGKCKFVAKNSGILFV

SEQ ID NO: 12437 - protein, 442 aa, unidentified; identical to SEQ ID NO: 2903

SEQ ID NO: 12438 - protein, 427 aa, unidentified; identical to SEQ ID NO: 4977

SEQ ID NO: 12439 - protein, 419 aa, Moorena sp.; identical to SEQ ID NO: 2828

SEQ ID NO: 12440 - protein, 425 aa, unidentified; identical to SEQ ID NO: 7553

SEQ ID NO: 12441 - protein, 442 aa, unidentified
MVTVQQSTHHLPFGRVFIRRNLFMVYVISQDGKPLMPCSDPIARLLLKQGKAKVKKREPFTIKLTYETTNYTQGLTLGVDTGSGTIGTAVSKDNGDIVYMSEVVVRNDITDKMTQRAKYRRNRRNRKTRYRKARWLNRASSIKKDRFSPTMQSKLHSHVREIEYIQSILPVTEMVFETGQFDMHLMKNPSLANPKVRPWGYQKGANYGFENTKAMVLNRDNYTCQCCKGKHKDSKLEVHHIVFRSQGGSDEESNLLTLCHTCHKDLHSGKINPKLSGKVKGNLKYATQMNSIRKQLFRFYPNAIETFGYVTKANRLHLGVDKEHYYDACTIATQGNAFNVKSNLYKKKCVSDGDFQKTKGIRSEEPIVTDKICGFRKFDKVRYFGNDYFIKGRMSTGYAILMDIDGNKIDFSTMPRGYKTPKLSNCKRITARSTVMTQVKVV

SEQ ID NO: 12442 - protein, 440 aa, unidentified
  REGION 1..440: note = Ga0315273_10003408
VNITPNGKPEGRVAPSRREMNRVLVVDTNHKPQDPVHPAEARKLLEGQQAAVLRMRPFTIILKVAVEDEPRPLRVKIDPGSRTTGVVLVDEESNQVVWAAEIDHRGVTIKKRMDARRSLRCSRRNRKTRHRQCRFQNRRRIGGWLPPSLRSRVQNIETWVRRLSRWSPVRFISMELVKFNTQLMENPEISGMEYQQGELRGYEVREYLLEKWGRNCVYCGVMGVPLQVEHINPRSRGGTNRISNLAFSCRDCNIEKGTMTAEEFGYPKIQEQARRPLRDAAAVNITRKEIGERLRDTGFPVEEGTGGRTKFNRVGQGYPKAHWIDAACVGKSGENVHLDPTQSVLKIKAMGRGSRQACRMDRFGFPRTGPKGNRVIHGFRTGDLVKAVVLTGKFRGTHSGRIVIRSSGSFTIGGIITTSWKNCKVSQQMDGYTSGSFVND

SEQ ID NO: 12443 - protein, 442 aa, unidentified; identical to SEQ ID NO: 2903

SEQ ID NO: 12444 - protein, 512 aa, unidentified; identical to SEQ ID NO: 8424

SEQ ID NO: 12445 - protein, 436 aa, unidentified
MTKTLTKQTTQVCVLDQHGKPLMPTTRLGKVYRLLKTQKAHIVSYEPFTIQLDYEPDTHIIQPMTLGVDSGAIHSGYSLANEHREYYSAEVIARDDITKRLSNRRMYRQNRRSRKTRYRKPRFKNRKNKKKGWLPPSLEQKVAVQLNEIDHLHRYFPIKNIIVEVAEFDIQKIKDPNISGIGYQQGTLYGYNIRNYLLEKHNRKCFYCGKTVSNFEVEHMIPKTRGGSNRIDNLTLSCHDCNQKKDTLTAEEFIKQTLPAKKAAAKLKQLPNEKRLFKYMTQMNTTRWALYNAINEKYANVEMTYGYITKYNRIQAGLPKAHHIDAKCITGFATVPSIDQTVVKIKMRRHNRLLHRSTFNKGHIRKAASLPTVIFGFQLYDLVMFDNHLYYINSRRSSGSFKLKSLEDLKDENRNYKKLTRLAHTNAYLTKRYVNT

SEQ ID NO: 12446 - protein, 518 aa, unidentified; identical to SEQ ID NO: 7468

SEQ ID NO: 12447 - protein, 425 aa, Planktothrix sp.; identical to SEQ ID NO: 10115

SEQ ID NO: 12448 - protein, 416 aa, unidentified; identical to SEQ ID NO: 4565

SEQ ID NO: 12449 - protein, 443 aa, Fervidicola sp.
MVFVLNKDKTLLAPCHEAVARRLLKQGKAVVSKIYPFTIRLKEQKDTSTFRPNYRLKIDYGSRHTGIVILKNDCEVVFMMQIHHRTDVKENMDRRRAFRRSRRNRKTRYRKPRFLNRKKNESWLPPILQSRVENIKTWVRRLCELCPITAISYENTKFDTQKLRNPEISGIEYQQGTLQGYEVREYLLEKFGRKCVYCGATNVPLEIEHVIPKSRGGTDRIDNLVIACHECNQKKGNKTAEEFGYPEIQKLVKESLKDCAIVNATRWRIYEVLIETGLPVECGSGALTKMNRMKLGLPKDHHFDAVCVGHSTPDRIWFRTRTILHVIAKGRGTRQIANVDKNGFSRGYRARQKLFYGFQTGDMVKAVVPKGKYKGTWIGTIACRKNGYFDIKDKTGERIAQGISHKYCKIIRRFDGYCYELEQTKINGTFPLQPAEVGEEMCQ

SEQ ID NO: 12450 - protein, 424 aa, unidentified
  source 1..424: note = Nitrospiraceae bacterium
MHRVFVPITSKQPLMPCSPARARLLLKAKRAAVFRRKPFTIIPKGRTLGGIQPVVWQLDPGSQITGMALVGEFPHQGRIMLWASELYHRGDHIRQKLLARSSVRRGRRARKTRYRPARFKNRRRPEGWLPPSLQSRLDNVMNWTRKVQRCVLIRSIAMELVRFDTQQLMNPEVTGVEYQQGELFGFEVREYLLEKWRRTCAYCHKTNVPMEIEHLIPRSRGGSNRVGNLTLACTSCNQRKGNQTASEFGYPQLMTQARQPLKDAAAVNSTRWALYRQLQALGLPVSVWSGGQTKYNRTQQGYPKAHWIDAACVGINGSQVRLDPQTQPLAISATGRGTRQVVKTDHFGFPRSKAARVKRTHGFQTGDLVRLTQPYGKYGGKWVGPLAGVRATGKFDLLTSRGRVTAPASRFTLYQRTEGYIYAA

SEQ ID NO: 12451 - protein, 515 aa, unidentified; identical to SEQ ID NO: 3339

SEQ ID NO: 12452 - protein, 413 aa, unidentified
MTSYAFVLDVNGKQLAPTKEQKAWFLIRKKRAALVSKYPMVIQLKKEIQENEICKDEIRCGIDDGGLHVGIALVQKCKTKNKVVFKGTIEQRNDVKHLMEVRRGYRRYHRYHKRYRQARFNNRKSSKREGRIAPSILQKRQATIRVINQLNKWINITNYWLEDVSIDIRVLTDGYKPYCWQYQKSNRLDENIRKAAILRDGGKCMECGKSNCRLEVHHIKPRRRNGSNTLDNLITLCESCHQKTEGQEELYMDRYFSMLKSSDHKNLNYAQHVMIGKKWLRKQLSSLGVLYLTNGGDTANKRIDWNIEKSHANDAVCITDLQPDTYDMKEWTMKPMRRKSKAKTDNVLGIRHRDLVEYTFKNGETHRGYVTALYPEQKAINFQSPTKHCKKVNARKCKLRWKYSKIYWFENVS

SEQ ID NO: 12453 - protein, 480 aa, unidentified
MKGKNMIITLDKNKRPLGFMSERRCRILLEKKRAVLYRYFPTIVILKDVDARKLSGLSSYRIKIDPGAKYTGIAIVMDDTNEFMYAMQIEHRGEQIKKNLDTRRSARRNRRSRETGYRRSKWGNQCTAKEQRQSYDSRRDENWLPPSVKSTADNIISWIRRLCRWINITNCSIESVRFDTQLMENPEIEGVEYQQGTLYGYEVKEYLLEKYGHTCQYCGGKSNDPILEWEHMIPRSRGGSDRLKNASLACHDCNQDKGNHTLEEWQTILQDRIPKERGKQKELDQIRQKFVQHVMEGKAPVKGLRYAAWVNSSRRYLQRHLYLRFPELECSSGGRTKYNRNALEYPKEHHYDALCVGEIPEDGFVDRTHGYYLYAKATGRGTRLRGQINQCGVIIRKWRDRSKTAFGFQTGDLVVADVPKDTNYKYKGHFSGRVMIRKSGSFDIRTLSGELVTVNAKFCRLLQNNSGYQMIIKRVIPLGN

SEQ ID NO: 12454 - protein, 408 aa, unidentified
MVYVQDINGKPMMPTTRHGKVRRLLKDKKAVVVNLCPFTIRLTYVTSDYKQEIVLGVDAGTKHVGLSATTKSKELYSSEVILRNDIVDLLSTRRELRKTRRNRLRHRKHRFNNRIKSRRPGWTAPSVKYKVDAHIRVIDNVCSILPISRIVIEVAQFDTQKINNPNISGKEYQEGDQLGFWNVREYVLARDGHKCQHCKGKSKDPVLNVHHIESRKTGGDSPSNLITLCETCHKEYHKGNIDLKIRRGKSLRDAAVMGIMKWRLYEELKSKYDNISMTFGYVTKYNRIKHGIEKSHVFDAFVISKNFDAIRLGYYYKVRLVRRHNRQIHKQKIPKGGIKRLNQSPFEVFGFRLFDRVMFENSYYFIFARRKTGSFNIRDIDGKNQRDITYKKLKLSRCKRFMVQKEMD

SEQ ID NO: 12455 - protein, 442 aa, unidentified; identical to SEQ ID NO: 4418

SEQ ID NO: 12456 - protein, 480 aa, unidentified; identical to SEQ ID NO: 2726

SEQ ID NO: 12457 - protein, 494 aa, unidentified; identical to SEQ ID NO: 6841

SEQ ID NO: 12458 - protein, 404 aa, unidentified
MVYVQDIDGKPLMPTTRHGKVRRLLKSNKAVVVNLCPFTIRLTYISDSYKQEIVLGVDAGTKHVGLSATTKSKELYSSEVILRNDIVDLLSTRRELRKARRNRLRYRKPRFDNRVKSKRPGWIAPSVKYKVDAHIRVVENVCSILPISRIVIEVAQFDTQKIKNPEISGKEYQEGDQLEFWNTREYVLARDGHKCQYCKGKSKDSILNVHHIESRKTGGDSPSNLITLCETCHKEYHKGNIDLKIRRGKSLRDAAVMGIMKWRLYEELKSRYDRVFMTFGYITKHNRIKYGIEKSHTSDAFVISKNINAKRIERQYLKRLIRRHNRQIHKMKILKGGRRKTIKLLLRFSVLGCLIKCCITIKYSLFMEGENQGVSISGISTEKIQKMFHAKSLNSLEGRGIRLY

SEQ ID NO: 12459 - protein, 414 aa, unidentified
MPCSPAKARLLLKEKKAIVVRRTPFTIQLTIATGETKQPVSLGVDAGYKHVGLSASTEKAELYASEIELRQDITDLLSARRALRQSRRNRKTRYRAPRFDNRIRTKRKGWLAPSVENRINSHLSRIEAVLRLLPVTKITVETASFDLQLLKNPNISGKEYQEGEQLGFWNIREYVLCRDGHVCQHCYGRSKDPVLNVHHLESRRTGGDSPGNLITLCETCHKALHRGELTLKAKRGQSFRAEAFMGIMRWEVLNRLKASHPDLEVNNTYGYRTKHARISNGIAKSHCADAFCVAGNLGAKRLGEFFFQKQMRRNNRQIHKLSVLKHGLRKRNQVPFEVNGFRLFDKVACKGEEGFIFGRRSSGFFDVRKLDGTRISAGISYKKLHLLEKRQTYITEIRKEKALPPLPEGRGLRA

SEQ ID NO: 12460 - protein, 472 aa, unidentified
MNTCVCVLSNNGERLMPTFRLGKVRRLLKDGKAKIVKHHPFTIQLLYDSKTNTQPIEICEDVGYNYIGISAKSKSHEYVSAQYDTLQDEKEHHDDCRKMRRTRRNRLRYRKPRFDNRKRGEGWLAPSLRHKKELNVNVVKMYCAVMPITYATVEVGSFDTMLVKAIQEGKVIPEGADYQKGPRYNLATLREAVFYRDNYVCKVCGRKATEGAILHMHHMFYWKGRHGNSLNELLTVCEKCHTPANHQKSGKLYGFGEDVKFADLSGAAFMNTVRWQIVNELYAAFGKPFVTITYGAMTKEKRIALQLEKSHNNDAYAMGEFHPNHRCAFEHYEKVRRNNRILEKFYDSQYIDIRTGEIATGKELFNGRINRNHKKDSENLHKYRGKRTYAGHRALLRKKVNLNPGDLVSLNGEPLVVLGTHTRKNGAVNVEFETPSKSGRKSASLKKLKIVKAADSIHPAWEKVSQIIQRKE

SEQ ID NO: 12461 - protein, 318 aa, Parasutterella sp.
PRFDNRIRTKRKGWLAPSVENRIDAHLSRIEAVLRLLPVTKITVETASFDLQLLKNPDISGKEYQEGEQLGFWNIREYVLCRDGHVCQHCYGRSKDPVLNVQHLKSRRMGGDSPGNLITLCETCHKALHRGEITLKVKRGQSFRAEAFMRIMRWEVLNRLKASHPELEVNNTYGYRTKHARIANDIANSHCADAFCIAGNLGAERLSEFFFQKQTRRNNRPIHKLSILKGGLRKRNQAPYEIKGFRLFDKVACQGEEGFIFGRRSSGYFDVRKLNGTHISAGISYKKLRLLEKRQTYLIEIRKEEALPPLPEGRGLRA

SEQ ID NO: 12462 - protein, 406 aa, unidentified; identical to SEQ ID NO: 7798

SEQ ID NO: 12463 - protein, 521 aa, Nonomuraea sp.; identical to SEQ ID NO: 10621

SEQ ID NO: 12464 - protein, 396 aa, unidentified
VVRRTPFTIQLTIATGESKQPVSLGVDAGYKHVGLSASTEKAELYASEVELRKDITDLLSARRALRQSRRNRKTRYRAPRFDNRIRTKRKGWLAPSVENRINAHLSRIEAVLRLLPITKITVETASFDMQRLKNPDISGKEYQEGEQLGFWNVREYVLFRDGHVCRHCHGRSKDPVLNVHHLESRRTGSDSPDNLITLCETCHKALHRGEITLKAKRGQSFRAQAFMGIMRREVLNRLKASYPELKVHETYGYLTKHARIANGIVKSHGADAFCIAGNLGAKRLGEFFFQKQTRRNNRQIHKLSILKGGIRKRNQAPFEAKGFRLFDKVACQGEEGFIFGRRSSGSFDVRKLDGTRISAGISCKKLRLLEKRRTYLTEIRKEEALPPLPEGRGLRA

SEQ ID NO: 12465 - protein, 512 aa, unidentified
MSTVYVLNKDGKPLMPTTRGGHVRHLLKEQKARVVRTKPFTIQLLYETDDVVQLLYLGIDPGRTNIGVAVVKTDGTAVFTAHLETRNKEITKLMKKRKNSRRARRTNGRRCRRQRRAKANGTISKKCVKQDTAQNGSVSKRAKEIGVIKRHLPGCEKEVLCIGIKNKEAKFSNRVRPEGWLTPTANQLLQTHINLVKKIRKFLPISDVVLEINKFAFMQLDNPNIQKWQYQQGPLYQKANLEEAVSEMQEHHCLFCKKPIAHYHHVVPQSENGSDTIGNIVGLCTKHHDLVHKDTAWQKKLAKKKTGLNKKYGALSVLNQIIPALTKELSSLFPKHFFATNGKSTYDYRSAHGVSKDHWLDAYCIACSVLPNDVCDSGINNRVPYELKQFRRHDRRALNNENMSRVYTLNDNVVATNRHKATKQTTDSLEEFRQNHPDDVCKLKVKEHHPTYRNMNRNYPGSVFLIGKQVHVMQGIAGSKDGEATTYKDTNANSIAAGKCKFVAKNSGILFV

SEQ ID NO: 12466 - protein, 415 aa, unidentified; identical to SEQ ID NO: 3582

SEQ ID NO: 12467 - protein, 414 aa, unidentified; identical to SEQ ID NO: 4347

SEQ ID NO: 12468 - protein, 400 aa, unidentified
LPIYRKEHDIMQYVYVLNKHGEPLMPCSPGKARLLLKQQKAHVIKRTPFTIKLLYGSTGYKQPITLGVDAGSKHVGLSASTEKRELYREEFTPRNDVVDLLSTRKQNRRSRRNRKTRYRPPRFDNRVHSKHKGWLAPSVEVKIQEHITVIKRICRILPVALVRVETAEFDTQRLKAMLEGKPLPVGTDYQLGEMYDEYNVRQYVLKRDNYTCQCCGAHTTAKKAVKLHVHHLESRKMGGNAPGNLITLCITCHDALHKGKVSLDNKKRGKPMRDAAFMGIMRRTLMSRLREELPITVQGTYGYITKMQREQNDIKKSHVNDARCISKHPLAEPCSVCYRTKAIRHHNRQTHKANFSKGGIRKRSQMPYVVEGYRLWDKVLYKGQECFVSGRRASGSFTLK

SEQ ID NO: 12469 - protein, 431 aa, unidentified
MPNKVYVINKHGRPLMPCSPAKARHLLDAGKAKVKKRTPFTIQLVYGSSGYTQEVILGVDAGSKTIGVSASTKKEELFAANVIPRNDVVDLLSTRRESRRARRNRKTRYRKPRFDNRVRSKHKGWLAPSVEVKIQEHITAIRRVCGILPVSKVVVETAEFDLQLLKAIADGKPVPQGEDYQKGEMYGHYNVRQYVLWRDDYTCQCCGAHATKKKEVRLHVHHLESRKTGGDASGNLVTLCESCHEKLHKGLITEKDLKKRKHRSTRDATFMGIMRKTLMQMLCSELPIPVVETRGYITKATREKLRVLPKSHINDALAIAQGKQGFNVGYLPGILQIDKIYTIRPVRHHNRQLHKAAILKGGIRKSNQAGKYVFGYRLFDKVQFNGQDCFIWGRRTTGIFTIKTINGKMIKDGISFKKLKPVEKSTSYLIA

SEQ ID NO: 12470 - protein, 422 aa, unidentified
LRVFVINQRGKPLMPCSPAKARVLLREKKARVKRRTPFTIQLTTATGEARQDVSLGVDAGYRHVGLSASTEKAELYASEAVLRDDITDLLSARLALRRARRSRKTRYRAPRFLNRVHSKNKGWLAPSVEQRIASHLKLVENVCRLLPVTKITVETASFDMQAIKNPDIKGAEYQQGEQLGFWNVREYVLWRDGHQCQHCRGKSGDPILNVHHLESRRTGGDAPNNLVTLCETCHKAYHAGRIDLKLKRGRSMRAEAFMGIMRWTFFNRLKEIHSGKTVENTYGYLTKHTRITHGIEKSHCADAYCIAGNLRAERLPDYLWQKQVRKHNRQIHKLTIGKGGIRKRQQTPFEVKGFRLFDKVRLGDEEGFIFGRRSSGYFDVRRLDGQKLSAGVSFRKLHLLEKLTTYLTVLLPRLKTRVSAPE

SEQ ID NO: 12471 - protein, 424 aa, unidentified; identical to SEQ ID NO: 8578

SEQ ID NO: 12472 - protein, 480 aa, unidentified; identical to SEQ ID NO: 2726

SEQ ID NO: 12473 - protein, 408 aa, unidentified; identical to SEQ ID NO: 10304

SEQ ID NO: 12474 - protein, 406 aa, unidentified
MVYVQDIDGKPMMPTTRHGKVRQLLKDKKAVVINTCPFTIKLMYKTSDYKQEIVLGVDAGTKHVGLSATTKSKELYSGEVILRSDIVELLSTRRESRRTRRNRLRYRKPRFNNRIKSKRLGWVAPSVRHRIDAHIRVIDNICSILPVSRVIVEVAQFDTQKIKNPDISGDEYQEGDQLGFWNVREYVLARDGHKCQHCKGKSKDPILNVHHIESRKTGGDSPSNLITLCETCHKEYHKGNIDLKVKRGKSLRDAAVMGIMKWKLYEELKSRYPNVSMTFGYITKYNRIKYGIEKSHTSDAFVISRNFNAKRIERQYLKRLIRRHNRQIHKMKILKGGKKKNNQAPFEVFGFRLFDKVLYNNEICFIYGRRKSGCFDIRDFDGKNSKNVTYKKLKLIRGKRYPIILK

SEQ ID NO: 12475 - protein, 419 aa, unidentified
MVYVISQDGKPLMPCSDPIARLLLKQGKAKVKKREPFTIKLTYETTNYTQGLTLGVDTGSGTIGTAVSKDNGDIVYMSEVVVRNDITDKMTQRAKYRRNRRNRKTRYRKARWLNRASSIKKDRFSPTMQSKLHSHVREIEYIQSILPVTEMVFETGQFDMHLMKNPSLANPKVRPWGYQKGANYGFENTKAMVLNRDNYTCQCCKGKHKDSKLEVHHIVFRSQGGSDEESNLLTLCHTCHKDLHSGKINPKLSGKVKGNLKYATQMNSIRKQLFRFYPNAIETFGYVTKVNRLHLGVAKEHYYDACTIATQGNAFNVKSNLYKKKCVSDGDFQKTKGIHSEQPIVTDKICGFRKFDKVRYFGNDYFIKGRMSTGYAILMDIDGNKIDFSTMPRGYKTPKLSNCKRITARSTVMTQVKVV

SEQ ID NO: 12476 - protein, 449 aa, Allochromatium sp.
MAVFVLDKQKKPLMPCTEKRARLLLERGRAVVVRLAPFTIRLKDRLGGALQPLRLKLDPGSRVTGLALVRESETCDPDTGAVERLEHGLWFGELAHRGQAIREALTLRRHYRRARRSRKTRYRAPRFLNRLRREGWLPPSLQHRLDTTVNWVQRLRRLAPITALSQELVRFDTQAMQNPEISGVEYQQGELAGYEVREYLLEKWRRRCAYCGATHVPLEIEHIVPRARGGSDRVSNLTLACRPCNQRKGNRSIEDFLQRQPARLHQIQAQAKAPLQDAAAVNATRWALLNALKTTGLPVETASGGRTKFNRTRLDIPKTHALDAACVGAVDQVHDWNRPVLSIRATGRGAYSRTRTSKNGFPRGYLRRHKRVQGFQTGDWVRAEVPKGKKAGVHVGRVAVRLTGSFNIQAPAGTVQGISYRHCRLLQRADGYGYAFQPKPKMEKARRAA

SEQ ID NO: 12477 - protein, 458 aa, Lactobacillus sp.; identical to SEQ ID NO: 5037

SEQ ID NO: 12478 - protein, 420 aa, unidentified; identical to SEQ ID NO: 8472

SEQ ID NO: 12479 - protein, 449 aa, unidentified
MIYAFVLAEDGTRLMPTDIRHARRLLKKKEAVIAGHNPFTIQLTRPSERHVQPVECCFDTGSVHIGVSIKSEKHEFVHNQYDNLKDEKKRHANRLKMRRARRNRKRYRKARFDNRKKNKGWIAPSLKNKEQNHLRIAEKYNKVCPIIQATIEVGSFDTAAMKEYEETGNVLEGKDYQHGPRYGYATLREAVFYRDGYKCRCCKKGIRKGVILRIHHLGFRKGDRSNRMSNLITVCTECHTAANHKPGGKLYDWHPKVKPLKDAAFMNVVRWKLYNDMKAMFPEWKMSITYGAETKMRRNERNIEKTHANDAYVMGEFQPKHRQKEQFFIKQRRHNRVLQKFHDAKYRDVRSGKKKSGSTLSCGRTSRSESRRSDKNQRIYRANKVKKGSVSIRTQQYEIRPNDQVLINGKWRTTSGVHNNGTRCIVNKKSIGIDKIQGIRHCGGWARIA

SEQ ID NO: 12480 - protein, 415 aa, unidentified
MVYVLDKDGHPLIPTNRHGKVRRMLKSGQVKVVKKCPFTIQLMYESEHNVQPVSLGIDAGSKHIGVSATTKTTVLYEADVELRDDIVKLLATRRQMRSFRRSRKTRYRPKRFDNRRRGKGWFAPSIRQKINTHLVTVARVCEILPVTQIIVETASFDIQKIKNPKIQGVEYQRGEQTDFWNVREYVLFRDGHVCQCCKGKKKDPILNVHHIESRKSGGDAPNNLITLCETCHKGYHNGTIKLPKRIKRGMKFKDAAFMGIMRWTFYNTLKEKYEPDIPVSMTYGYLTKNTRIQHNLPKEHYIDARCISGNPDAKSDGVYYYQKKIRCHNRQIHKFNTLRKGVRKLNQSEYLVKGYRIFDKVRYQGKEYFVFGRRKTGFFDIRTLSGEKANNGSLSIKKIAFVDTRKNYITERRTV

SEQ ID NO: 12481 - protein, 224 aa, unidentified
RDHYTCQCCGTHNTAKKVVKLHVHHLESRKTGGNAPSNLVTLCTTCHKNLHKGRVTLDGKERGKPLRDAAFMGIMRKTLMVRLKEELPIPVQGTYGYITKMRREQNDIKKSHVNDARCISKHPLAEPCSVCYRTKAIRHHNRQTHKANFSKGGIRKRSQMPYVVEGYRLWDKVLYKGQECFVSGRRASGSFTLKKLDGTRISKGVTFKKLRLLEPATNYLIERM

SEQ ID NO: 12482 - protein, 418 aa, unidentified
MVYVLSQHGQPLMPTENHAKVRALLKHGKAKVIQRCPFTIQLLYESTTHTQKINLGIDAGSKTIGVSATTESKVLYESEVVLRNDIVELLSGRRALRRSRRNRKTRYRKPRFDNRRRPDGWLTPSIRQKIKTHVTVVENVMKILPVTKIIVETASFDIQKIKNPEIEGAEYQYGEQLDFWNVREYVLFRDGHTCQCCKGKSKDNILNVHHIESRKTGGNAPNNLITLCETCHKAYHKGVITLPKEIHRGMRFRDAAFMGIMRWAFYDRLKELYTPFGVEVINTYGYITKNTRIEHGLPKEHYVDARCISGNPAAKPLGHYYFQKKVRCHNRQIHKNTILKGGIRKRNQAAYLVNGYRLFDKVKYQNQEYFIFGRRSSGFFDIRTLDGTKVNKGSISCKKLQLVEKSKHYLTEQRKVAA

SEQ ID NO: 12483 - protein, 470 aa, Thermoanaerobacterium sp.; identical to SEQ ID NO: 6736

SEQ ID NO: 12484 - protein, 411 aa, unidentified
MVYVQDIDGKPMMPTTRHGKVRRLLKDNKAVVVNTCPFTIKLTYKTSDYKQEIVLGVDSGTKHVGLSATTKSKELYASEVILRSDVVDLLSTRRGLRRTRRSRLRYRKQRFNNRVKSKKDGWIAPSVRHKIDSHIRIISFVYSILPVSKLIVEVAQFDTQKIKNPEISGKEYQEGEQLGFWNVREYVLARDGHKCQHCKGKSKDPILNIHHIESRKIGGDSPSNLITLCETCHKEFHKGNIKLKVSRGKSLRDAAVMGIMKWELYEELKSKYDNVLMTFGYITKYNRINHGIEKSHVSDAFVISRNFDSERLGYYYKRKLVRRHNRQIHKMKILKGGIRKRNQAPFKVFGFRLFDKVMFQGEEHFIYARRLSGQFNIRDINGENKKDVSCKKLKYVSHGLVSVKTNLFLSQ

SEQ ID NO: 12485 - protein, 512 aa, unidentified; identical to SEQ ID NO: 3720

SEQ ID NO: 12486 - protein, 426 aa, unidentified; identical to SEQ ID NO: 11500

SEQ ID NO: 12487 - protein, 451 aa, unidentified; identical to SEQ ID NO: 3199

SEQ ID NO: 12488 - protein, 442 aa, Ktedonobacter sp.
MNDASLGGPCIGENRKETMSRVLIVDQQRRPLMPCTPARARLLLKQKKAAVLRRCPFTLILHESRSEAVVQPLRLKIDPGSKVSGLALVNDTSGEVVWAAEVTHRGEQVHKDLQKRAGVRRGRRQRHTWYRPARYLNRRRPKGWLPPSLESRVQNVETWTQRLIFWAPVGSLSYEAVRFDTQALQNPEIEGTQYQHGTLAGLEVKEYLLLKWGQRCAYCEKMGLPLQLEHIIPKIRGGSNRVTNLTLACEQCNGKKGNQTAEEFGFPHLQAQAKAPLKDAAAVNSTRRVLHQRLMRTGLPIEASSGGHTKWNRGERDIAKTHWLDAANVGPSTPARLLFQHVRPWLIEANRRQDRQLCLVNALGFPRSKPKKKSPKHDFRTGDIVRAVVPAHLENPGIYVGRMAAKASGAFTITTKQRKVSDIGYRYCTRLQHTDGYSYLIK

SEQ ID NO: 12489 - protein, 493 aa, unidentified; identical to SEQ ID NO: 3154

SEQ ID NO: 12490 - protein, 408 aa, unidentified
MVYVQDIDGKPMMPTTRHGKVRRLLKDSKAVVVNTCPFTIKLMYKTSDYKQEIVLGVDAGTKHVGLSATTKSKELYASEVILRSDVVELLSTRRELRRTRRNRLRYRKPRFDNRVKNKYHGWVAPSVRYRIDAHIRIIDSICSILPISRIIVEVAQFDTQKIKNPDIYGNEYQEGDQLGFWNVREYVLARDGHKCQHCKGKSKDPILNVHHIESRKTGGDSPSNLITLCETCHKEYHKGNIDLKVKRGKSLRDAAVMGIMKWKLYDELKSRCDNVSMTFGYITKYNRIKYRIEKSHISDAFVISKNFNALMLEYHYKVKLVRRHNRQIHKQKVLKGGVKKPNQSPFEVFGFRLFDRVMFEGNCYFIFGRRKSGSFNIRDIDGGNQRDVTYKKLKLLRCKRFMIQKETN

SEQ ID NO: 12491 - protein, 502 aa, unidentified; identical to SEQ ID NO: 2616

SEQ ID NO: 12492 - protein, 414 aa, unidentified
MVYVINKQGQALMPTERFGKVRRLLKNSLAHVVCRIPFTIQLDYDTTDYTQPVSLGIDAGSKHIGISATTSEKEMYAADVELRNDIVDKLSTRRELRRTRRSRLRYRKARFNNRVSSKRKGWLAPSVENKIQTHLTVVEKIHKFLPITNIVVEIASFDIQKINNPIISGSEYQQGEQLDFFNVREYVLFRDNHICQHCKGKSKDKVLNVHHIESRKAGGDSPNNLITLCETCHKAYHRGEFELNVKRGKSFRDAAFMGIMRWSFYDRLKNIYPNVSMTFGYITKNARITNNLPKEHYVDARCISGNPVAKPLGYYFYQKKVRCQNRQIHKVNFLKGGRKKLNQAPFLVKGFRLFDLVEYQKELYYIFGRRSSGSFDIRKLDGTKVNKGSINCKYLRLIATRKSILTEKRMQVNL

SEQ ID NO: 12493 - protein, 430 aa, unidentified
MPKVYVLNRHGRPLMPCTPAKARHLLDAGKAKVRHRTPFTIQLLYGSTGYTQEVILGVDAGSKTIGLSAATETEELFSAEVKPRNDVVELMSARRQFRRARRNRTTRYRKPRFDNRVRSKHKGWLAPSVEVKIQEHMTAIRRACAILPVSKVVVETAEFDLQLLKAVAEGKPVPQGEDYQKGEMYGHYNVRQYVLWRDSYTCRICGVHGSVRKGVPLHVHHLESRRVGGDAPDNLVTLCTACHDKLHKGIIMAADIKKRKRRSTRDATFMGIMRMTLLRRLREQLPVPVVETRGYITKATRENLLVLPKSHTNDALAIAHGPQGFRAEYLPNIRQADRLYTIRPVRHHNRQLHKATILKGGVRKANQAEKYICGFRLYDKVLYNGIECFVWGRRTSGSFLLRQLNGEKVKDGVSYKHLKLLERSQSYLVA

SEQ ID NO: 12494 - protein, 465 aa, unidentified; identical to SEQ ID NO: 3070

SEQ ID NO: 12495 - protein, 480 aa, unidentified
LYTKPLDNIGEGSLPPSGEINLKGMTFMVYVKSIDGKALMPTSNAKARKLLKQKKAKVVSLRPFVVKLTYKTKTEYTQKLNLGVDSGYYNIGFSVIDAKQEYIAGEVKLLEGMKKRLLKKASYRRIRRSRLRYRKARWNNRVKSKKKGWLAPSLKHKLDTHIKFIDYLKNILPIGKITIEVANFDIQKMKYDLISGVDYQNGDMFGFWNVREFVLHRDGHKCQNPNCIHKDKKEQILKVHHIRYRSEGGSDRPENLITLCSKCHTPANHKKGKFLYDWCVNGKKVRGFKDATFMSMIRWYLVNDLKSKHNNVSITYGYITKNHRIQNGIEKSHLNDAFAIAKGTNQARTKDRFLVIQDRLKNRSLEKFYDSKIIDIRTEKKVSGGDLNCGRSTKNKNLNTENLRKYRGVKISKGQRRIRKQKYFYQPNDLVKYDGKVYTVKGTQNEGKYIALKEIKKVPKVELLIPYVFKKGLNWSYGLC

SEQ ID NO: 12496 - protein, 338 aa, unidentified
MSTVYVLNKDGKPLMPTTRCGHVRHLLKEQKARVVTSKPFTIQLLYEADDVVQSLYLGIDPGRTNIGVAVVKADGTAVFTAHLETRNKEIPKLMKKRKESRRARRTNGRRCRRQRRAKANGTISKKCVKHDTAQNGSVSKCAKEIGVIKRHLPGCEKDVLCICIKNKEAKFSNRTRPEGWLTPTANQLLQTHINLVKKIQKFLPISDVVLEINKFAFMRLDNPNVQKWQYQQGPLYQKANLEETVSEMQEHHCLFCKKKIDHYHHVVPQHKNGSNTIDNIIGLCTQHHDLVHKDATWQKRLAKKKTGLNKKYGALSVLNQIIPALTKELSSLFPKHFL

SEQ ID NO: 12497 - protein, 420 aa, unidentified
MQYAYVLNKRGEPLMPCSPGKARILLKQQKACVVKRTPFTIKLLHGSAGYKQPITLGVDAGSKHVGLSASTEKRELYSEEFTPRNDVVELLSTRRQNRRSRRNRKTRYRAPRFNNRVHSKHKGWLTPSVEVKIQEHITVIKRICRILPVTLVRVETAEFDTQRLKAMLAGKPLPVGTDYQLGEMYDEYNVRQYVLKRDNYTCQCCGAHTTAKKAVKLHVHHLESRKVGGNAPSNLITLCTTCHNNLHKGKITLDGKKRGKTLRDAAFMGIMRNTLLTRLRNELHIPVQNTYGYITKLLREQNDIKKSHVNDARCISKHPLAEPCSICYRTKAIRHHNRQIHKAKILKYGIRKANQAPYIVKGFRLWDKVLYNGQECFISGRRTSGYFALRKLDGTTITNSISFKKLQLLEPATNYLIERM

SEQ ID NO: 12498 - protein, 460 aa, Lactobacillus sp.
LDEWQESLFPALRKRRKNMKHENANRVFLLSRDGKPLMPCRPRKARLLLKSGKAFVVKKYPFTIQLKYGSYGYKQKVSLGVDTGQRHIGFAVVSQEKVLCQSEVELRQDVHKNLYTRKIYRRSRRNRKTRYRQACFLNRVHGKRDGLWLPPSVKGKVNHNIAWIKRYLAVLPNPDLHVEVGKFDMAKMLNPQISGKQYQEGSLKGWKNYEYYVLARDKYTCQLCRKHGKGVKLVVHHIIYRSQGGTDRVSNLITLCTDCHTTNNHQPGGKLYKWMKAKKKVTTHLKGATFMNILRKRMMAAFPEASFQYGSQTYVDRKNLNLPKGHFMDAIAISGIKSVGQMPETVTMISQFCKKKRSLHEATARKGRKQPNKAAKRNAKNTKYARGIWLNDYVRAIGNNAKGYVQGFKSNGYFVYLTDGLGNYVLNNGKNYINRKQCQLIMHNGNWQKAEQKLSLYEFK

SEQ ID NO: 12499 - protein, 413 aa, unidentified
MVYVLNENGQPLIPTENHAKVRVLLKQGKAKVVNNCPFTIQLLYSSTNYTQPVTLGVDAGSKHIGLSATTEDRELYAADVELRNDIVKLLAARRASRRSRRNRKTRYRKPRFNNRKRDKGWLAPSIREKIGTHLKVVDDTCKLLPVSKIIVETASFNIQKIKNPDVKSTDYQQGEQLGFWNVREYVLFRDGHKCQCCKGKSKDKILNVHHIESRQTGGNAPNNLITLCETCHTGYHKGTVKLPAKIKRGMKFKDAAFMGIMRWAFCGELKKRYPDVSLTYGYITKKTRIENGLPKEHYVDARCISGHPSAKPLGTVFYIKKVRCHNRQIHKLKILKKGVRKRNQAEYEVYGFRLYDKVSWKGRICFVFGRRSTGRMDLRLLDGTHVNASVSYKNIKLLRMRSNYLIEVKNAIG

SEQ ID NO: 12500 - protein, 456 aa, Halomonas sp.; identical to SEQ ID NO: 2881

SEQ ID NO: 12501 - protein, 442 aa, unidentified; identical to SEQ ID NO: 2903

SEQ ID NO: 12502 - protein, 493 aa, unidentified; identical to SEQ ID NO: 2644

SEQ ID NO: 12503 - protein, 412 aa, unidentified; identical to SEQ ID NO: 6105

SEQ ID NO: 12504 - protein, 493 aa, unidentified; identical to SEQ ID NO: 2644

SEQ ID NO: 12505 - protein, 487 aa, unidentified; identical to SEQ ID NO: 11019

SEQ ID NO: 12506 - protein, 406 aa, unidentified
MVYVQDINGKPMMPTTRYGKVRRPLKDKKAVVVNLCPFTIKLMYVTSDYKQEIVLGVDAGTKHVGLSATTKSKELYSSEVILRNDIVDLLSTRRELRKARRNRLRYRKPRFDNRVKSKRPGWIAPSVKYKVDAHICVINNVCSILPISRIVIEVAQFDTQKIKNPEISGKEYQEGDQLEFWNTREYVLARDGHKCQYCKGKSKDSILNVHHIESRKTGGDSPSNLITLCETCHKEYHKGNIDLKIRRGKSLRDAAVMGIMKWRLYEELKSRYDRVFMTFGYITKHNRIKYGIEKSHTSDAFVISKNINAKRIERQYLKRLIRRHNRQIHKMKILKGGKKKNNQAPFEVFGFRLFDKVLYNNKIFFVYGRRKSGSFNIRDFNGENSKDVSRKKFKLIRGKRHPIILK

SEQ ID NO: 12507 - protein, 413 aa, unidentified; identical to SEQ ID NO: 6529

SEQ ID NO: 12508 - protein, 424 aa, Mastigocoleus sp.; identical to SEQ ID NO: 6040

SEQ ID NO: 12509 - protein, 518 aa, unidentified; identical to SEQ ID NO: 7468

SEQ ID NO: 12510 - protein, 535 aa, unidentified; identical to SEQ ID NO: 6116

SEQ ID NO: 12511 - protein, 447 aa, unidentified; identical to SEQ ID NO: 8397

SEQ ID NO: 12512 - protein, 430 aa, unidentified
MPKVYVLNRHGRPLMPCTPAKARHLLDAGKAKVRHRTPFTIQLLYGSTGYTQEVILGVDAGSKTIGLSAATETEELFSAEVKPRNDVVELMSARRQFRRARRNRTTRYRKPRFDNRVRSKHKGWLAPSVEVKIQEHMTAIRRACAILPVSKVVVETAEFDLQLLKAVAEGKPVPQGEDYQKGEMYGHYNVRQYVLWRDSYTCRICGVHGSVRKGVPLHVHHLESRRVGGDAPDNLVTLCTACHDKLHKGIIMAADIKKRKRRSTRDATFMGIMRMTLLRRLREQLPVPVVETRGYITKATRENLLVLPKSHTNDALAIAHGPQGFRAEYLPNIRQADQLYTICPVRHHNRQLHKATILKGGVRKANQAEKYICGFRLYDKVLYNGIECFVWGRRTSGSFLLRQLNGEKVKDGVSYKHLKLLERSQSYLVA

SEQ ID NO: 12513 - protein, 413 aa, unidentified
MTSYSFVLDANGKQLAPTKEPKAWFLIRKKRAALVSKYPMVIQLKKKIQENEICKDEIRCGIDDGGLHVGIALVQKCKSKNKVVFKGTIEQRNDVKHLMEVRRNYRRYHRYHKRYRQARFDNRKSSKRKGRIAPSILQKRQATIRVINRLNKWINITNYWLEDVSIDIRVLTDGYKSYSWQYQKSNRLDENIRKATILRDGGKCMECGKSNCRLEVHHIKPRRRNGSNTLDNLITLCESCHQKTEGQEELYMDRYFSLLKSSDNKNLNYAQHVMIGKMWLRKQLSGLGVLYLTSGGDTANKRIDWNIEKSHTNDAVCITDLQPDTCDIKEWAIKPMRRQSKAKTDHVLGIHHRDLVEYTFKNGETHRGYVTALYPEQKAINFQSPTKHCKKVNARKCKLLWNYSKIYWFENAS

SEQ ID NO: 12514 - protein, 443 aa, unidentified; identical to SEQ ID NO: 4257

SEQ ID NO: 12515 - protein, 489 aa, Polaromonas sp.
MQCEFLISGVGVAVFVLDNQGKALMPCTEKRARLLLARGRARVHRLTPMVIRLVDRQAAACDFQPLRLKLDPGSKTTGVALVRDVESIEVATGEIHCGVAVLNLMELVHRGRHISEALTARRQMRRRRRSNLRYRAPRFLNRGNKKSGWIAPSLQHRVDTSIAWVKRIQHWAPVRAISSERVRFDMQALQNPEISGVEYQQGTLYGYELREYLLEKWGRQCAYCDAKDTPLQIEHIRPKALGGSNRASNLTLACQCCNQKKAARSIEDFLARDKKRLDRILAQATKPLRDAAAVNATRWTLANALKATGLPVELASGGQTKFNRCRLGVPKTHALDAACVGQVRFIQDWSKPTLTLKAMGRGSYQRTRLDKFGFPRGYLMRSKRVHGFGTGDMVRADVTKGVKAGHHAGRVAVRASGSFNIQTRRNGISGVIQGISHKHCRVIQRNDGYGYFFNRTDHTGREQVRPKASDAAHPALYLPAMNGRVSRAI

SEQ ID NO: 12516 - protein, 442 aa, unidentified
VSFTVRYVLAYCCKHITKKEVPCMVYVLDINGQPLMPTTRHGKVRRLLNNHLAKAVKRCPFTIQLLYQSTKETQPVSLGVDAGSKHIGLAAATEKKVVYQEELIPRNDVVKLLSVRRALRYSRRNRKTRYRKSRFNNRVHSKHKGWLAPSVEAKIQEHITAIKRICQILPVSEIHVETAEFDLQRLKAIEEGKPLPVGTDYQLGEQYDFYNTRQYVLHRDGYTCQCCGTHDNNVKLHVHHIESRQTGGNAPNNLITLCEHCHKALHEGKLKLPKGKKRGKSYRDATFMGITRKTLLERLKKEVDVPVTGTYGYITKYWREKAGLEKSHINDAVCISKHPYVEPLDTYYLTKAVRHHNRQIHKVNFSKGGIRKRNQAPHLVKGFRLFDKVLYQGKECFIFGRRVSGRMDIRLLDGIRINASVGYKNLELLELRKAYLTERRTC

SEQ ID NO: 12517 - protein, 413 aa, unidentified; identical to SEQ ID NO: 2636

SEQ ID NO: 12518 - protein, 481 aa, unidentified
MVFVLDKHKKPLMPCSEKRARLLLKKGRAVVHRLHPFTIRLKDRALEESVVQPLKLKIDPGAKTTGIAVINETDQSRGEVVFLAEIKHKAGIKKAMDTRRSLRHSRRYRKTRYRKPRYQNRKPEKCVSCGRNAKHGSRYCRSCLQTKSFVDNGYRKVRLPVSLEARVTQTFTAVNKLKKLIPLSAIATEHVKFDTQKLQNPEVTGIEYQQGELFGYEVREYLLEKWGRKCAYCGRKNVPLEVEHIVPKSRGGTNRVSNLTLACHDCNQKKGNLTAEEFGYSEVQKQAKQPLKDAAMMNATRWKLYCRLKEIGLPVECSTGARTKKQRIEHGLPKTHYYDACCVGTTPNKLVFRTQYVAVWTALGRGTRRMCNPDKYGFPRGHRQRRKFHFGFQTGDIVKAEVPKGKYAGVWMGRVAVRASGGFDLKDASGNRICQGINYRYCRLIQRTDGWQYEKYLRKEGNEADRIPPTTKVVGFLRCVP

SEQ ID NO: 12519 - protein, 430 aa, unidentified; identical to SEQ ID NO: 4504

SEQ ID NO: 12520 - protein, 436 aa, unidentified
MTRTLTKQTTQACVLDQQGKPLMPTTRLGKVYRLLKTQKAHIVSYEPFTIQLDYEPDTHIIQPMTLGVDSGAIHSGYSVANEHREYYSAEVIARDDISKRLSDRQMYRKNRRYRKTRYRKPRFKNRKNKKKGWLPPFLEQKVAVQVNEIDHLYRYFPIETIIIEVAEFDIQKIKDPDISGVEYQQGTLQGYNIRNYLLEKHERKCFYCGKSVSDFEVEHMLPKSRGGSNRIDNLTLSCHDCNQKKDTLTAEEFIKQTLPAKKAAAKLKQLPNEKRLFKYMTQMNATRWALYNAINEKYANVKITYGYITKYNRIQAGLLKAHHIDAKCITGFATVPSIDQTVVKIKLRRHNRQLHRATFSKGHARKAACLPTITFGFQLYDLVYFDNHYYYIKGRRSSGIFALVSIEGLKDTNRSYKKLTQLAHTNAYLINRYVNA

SEQ ID NO: 12521 - protein, 489 aa, unidentified; identical to SEQ ID NO: 5672

SEQ ID NO: 12522 - protein, 472 aa, unidentified
  source 1..472: note = Oxalobacteraceae bacterium
LSVFVLDQKLRPLMPCREKRARKLLAAGRARIHRLYPFCIRIVDRALEDSVLQPLVIKIDPGSKVTGLAVCRISEAVDDDGVVAPVMHIQFLMELLHRGQTIKQSLHARSSMRRRRRGNLRYRQPRFDNRTRQTGWLPPSLLHRVLTIETWVNRIRNMAPITQIAQELVRFDMQKMQNPEIAGIEYQQGTLAGYELREYLLEKWNRECSYCGAKDLPLQMEHIVAKANGGSNRASNLCLGCESCNQKKGAKDIRAFLKNDPIRLAQILKHAKMSLRDAAAVNATRNALLKVLKATDLPVETGTGGRTKWNRSRLGIVKTHALDAACVGVVADVVSINAPALQITCMGRGTHSRTLLDQYGFPRTTLPRTKTFFGFKTGDMITAEVTKGKRIGSHKGRVAVRSSGYFNIQSGIKGMKAVQGIPHKDCRIAQRADGYNYLWKSVSDQPKAKASTAVQSAPCLTALKDGVSRSIF

SEQ ID NO: 12523 - protein, 431 aa, unidentified; identical to SEQ ID NO: 3801

SEQ ID NO: 12524 - protein, 411 aa, unidentified; identical to SEQ ID NO: 6901

SEQ ID NO: 12525 - protein, 442 aa, unidentified
MVTVQQSTHHLPFGRVFIRRNLFMVYVISQDGKPLMPCSDPIARLLLKQGKAKVKKREPFIIKLTYETTNYTQGLTLGVDTGSGTIGTAVSKDNGDIVYMSEVVVRNDITDKMTQRAKYRRNRRNRKTRYRKARWLNRASSIKKDRFSPTMQSKLHSHVREIEYIQSILPVTEMVFETGQFDMHLMKNPSLANPKVRPWGYQKGANYGFENTKAMVLNRDNYTCQCCKGKHKDSKLEVHHIVFRSQGGSDEESNLLTLCHTCHKDLHSGKINPKLSGKVKGNLKYATQMNSIRKQLFRFYPNAIETFGYVTKVNRLHLGVAKEHYYDACTIATQGNAFNVKSNLYKKKCVSDGDFQKTKGIRSEQPIVTDKICGFRKFDKVRYFGNDYFIKGRMSTGYAILMDIDGNKIDFSTMPRGYKTPKLSNCKRITARSTVMTQVKVV

SEQ ID NO: 12526 - protein, 406 aa, unidentified
MVYVQDIYGRPLMPTTRHGKVRRLLKSKKATVVNLCPFTIRLLYDTTGYKQEITLGVDTGTKHVGLSATTKSKELYASEVILRSDVVDLLSTRRELRKIRRYRLRYRKPRFMNRIKSKKRGWIAPSIRQKIDSHIRIIGFVYSILPVSKLIIEVAQFDTQKIKNPEISGKEYQEGEQLGFWNVREYVLARDEHKCQHCKGKSKDPVLNVHHIESRKTGGDSPSNLITLCKTCHKEFRKGNIKLKVNRGESLRDAAVMSIMKWELYDELKSLYPNVKMTFGYITKYNRINHGIEKSHVSDAFVISRNFDSERLGYYYKRKLVRRHNRQIHKMKAPKGGNKRMNQSPFKVFGFRLFDKVMFQGKERFIYARRLRGIFNIRDINGENKKDISYKKLEYVSHGLISIVAG

SEQ ID NO: 12527 - protein, 414 aa, unidentified
MPCSPAKARLLLKEKKAIVKRRTPFTIQLTIATGETKQPVGLGVDAGYKHVGLSASTDKAELYASQVELRQDITDLLSARRALRRARRNRKTRYRAPRFNNRIRTKRKGWLAPSVENRINAHLSRIEAVLRLLPVTKITVETASFDMLLLKNPDIAGKEYQEGEQLGFWNVREYVLFRDGHVCQHCYGRSKDPVLNVHHLESRRTGGDSPGNLITLCETCHEALHRGEIALKTKRGHSFRAEAFMGMMRWEVLNRLKASHSELEVNSTYGYRTKHARIVNGIDKSHCADAFCIAGNLGAERLCEFFFQKQTRRNNRQIHKLSILKGGIRKRNQAPFEIKGFRLFDKVACKGEESFIFGRRSSGYFDVRKLDGTRISAGISYKKLRLLEKRRTYLTEIRKEEALPPLPEGRGLRA

SEQ ID NO: 12528 - protein, 477 aa, unidentified; identical to SEQ ID NO: 2707

SEQ ID NO: 12529 - protein, 414 aa, unidentified; identical to SEQ ID NO: 6490
  source 1..414: note = Lachnospiraceae bacterium UBA4368

SEQ ID NO: 12530 - protein, 404 aa, unidentified
LLKEKKAIVVRRTPFTIQLTIATGESKQPVSLGVDAGYKHVGLSASTEKAELYASEVELRPDVSDLLSARRTLRQSRRNRKTRYRAPRFDNRIRTKRKGWLAPSVENRINAHLSRIGAILRLLPVTKITVETASFDTQLLKNPDISGKEYQEGEQLGFWNVREYVLFRDGHACQHCHGRSKDPVLNVHHLESRRTGGDSPGNLLTLCETCHKALHRREIKLKTKRGQSFRAEAFMGIMRWEVLNRLKASHPELEVHNTYGYRTKHTRIVNGIDKSHCADAFCIAGNLGAKRLGEFFFQKQTRRNNRQIHKLSILKHGLRKRNQAPFEVKGFRLFDKVVCQGEEGFIFGRRSSGSFDVRKLDGTRISAGISYKKLCLLEKRRTYLKEIRKEEALPPLPEGRSLRA

SEQ ID NO: 12531 - protein, 425 aa, unidentified; identical to SEQ ID NO: 2698

SEQ ID NO: 12532 - protein, 356 aa, unidentified
MSYVFVIDQEKRPLDPVHPGRARKLLSSGKAAVYRRFPFVLILKHPVSEAHPQPLRLKIDPGSKTTGLAVLNDTSGQVLWAAELVHRGEEVHQALQKRAGVRRGRRSRHTRYRAARFSNRRRKRGWLAPSLCSRMQNVQTWTRRLMRWCPLGAISYEAVRFDTQAIQNPEIKGVAYQHGTLAGLEVKEYLLLKWRHKCVYCQKGDIPLEVEHIVPKRRGGSDRITNLTLACEACNQQKGSQTAQAFGFPHLQAQALQPLKDAAAVNSTRWALYERLKATGLPIEVSTGGQTKWNRKQRGIPKSHWLDAVCVGPSTPERVQWQHVIPLLITARGRHGYFKITGTHGMVEGIHGRHCP

SEQ ID NO: 12533 - protein, 421 aa, Moorena sp.
MQNRVFVIDVNKQPLNPIHPGRARKLLKQGKAAVFRTYPFTIILKKTVPDPVNEPHRIKLDPGAKVTGMALVNQRTDAVVWAAELTHRGDMIRQKLADRRRVRRNRRHRKTRYRPARFDHRKRPDGWLAPSLQHRVETTMTWVERLGKCCSITDLSMELVRFDTQKLQNPEISGVQYQQGVLFGYELREYLLTKWRHECAYCGAQKVPLEIEHIHPKSKGGSDRVSNLAIACHQCNQKKGNKPVEQFLKKKPEVLKRLLAQANAPLKDAAAVNSTRWALFNRLQETGLAIEIGTGGLTKYNRTLQGLPKTHWLDAACVGKSTPMLNIATSQPLQITCTGRGGRQKAAINKYGYPIRHNPLKPIKGWQTGDIAKHRVHGIGRITPRSRGSFVLSKPDKTKKSVKPIDLKPVFRRDGYSYKWA

SEQ ID NO: 12534 - protein, 378 aa, Moorena sp.; identical to SEQ ID NO: 11223

SEQ ID NO: 12535 - protein, 468 aa, Petrotoga sp.; identical to SEQ ID NO: 3825

SEQ ID NO: 12536 - protein, 435 aa, unidentified
MSVAVMSKTGMRLMPTSEYRARKLLKSKKATVYGHNPFTIQLTERETGDVQPVELCMDTGYLHIGTSVKSEKHEYLGVQIDTLTDEKQKHDACRMYRRQRRSRKRYRQSRFNNRKRSDGWIAPSLEHKKDIHIQIISRICNAMPITNITLEMGNFDTQVLKALEENRPLPQGTDYQHGERYGIATLREAVFARDKYTCQCCRKTIADGAILHVHHIIYRSRGGTNRMSNLATVCDRCHTPANHKPGGKLYNWKPKLASFKGATFMTTVRWKMYNEVKSKFSDIKIHITYGAETKEQRRAFDITKSHVNDAFVMGQFHPKHRSRPVCYKKKHRNNRCLEKFYDAKYIDSRDGKKRSGQELFNGRINRNHKKDSENLHQYRQQKVSAGRRTIRKQHYSIQPHDIVVFNRQQFETSGCHCNGARAILLPQKKSVFPGA

SEQ ID NO: 12537 - protein, 494 aa, unidentified
MSTVYVLNKDGKPLMPTTRYCYVRLLLKENKARVVSTTPFTIQLNYDTPDITQDLILGIDPGRTNIGVAVVKEDGQCVFSAHLETRNKDVPLLMEKRAAFRRNHRNLDRRRKRQRRAKAAGTIVENETIERLLPGYEKPIVCHHIRNKEARFNNRSRPAGWLTPTANHLLQAHINLIAKIAKLLPVTKVVVELNRFAFMAMDNPNIRRWEYQQGPLYGLGSVEDAVYAQQDGHCLFCDKPIDHYHHVVPRNKNGSETLANRCGLCAKHHDLVHKDKAWAEKLVTRKGGMNKKYHAQSVLNQIISFLMEYLGRETPYDVYATDGKSTKGFRIAKNVPKEHYTDAYCIACSILDANTKVSTPAEPFELKQFRRHDRQSCIRQMVDRKYLLDGKVVATNRHKSIEQKSDSLEEFREAYGDAAVSQLTVRPHLPQHKDMTRIMPGAVMDFDGIVGVFKGSSGRNNGTPNYYNSTKGARVLTKRCALLAKNAGMVFIPA

SEQ ID NO: 12538 - protein, 420 aa, unidentified; identical to SEQ ID NO: 3089

SEQ ID NO: 12539 - protein, 455 aa, unidentified; identical to SEQ ID NO: 12351

SEQ ID NO: 12540 - protein, 411 aa, unidentified; identical to SEQ ID NO: 5226

SEQ ID NO: 12541 - protein, 391 aa, unidentified
MSKKPNYVFVLDTKRQPLTPCKPSVARKLLNARKAKVFRLYPFTIILNKEVADSSESLTLKIDPGSKVTGLAILSCSKLLWVAELIHRGQTIKAALESRRSLRRSRRNRHTRYRKPKFLNRTRTKGWLAPSLQHRVETTLTWVNKLSRLVPIRFIFQELVRFDLQQIENPEISGVEYQQGELVGYEVREYLLNKWDRKCTYCGAENVPLQVEHIHPKAKGGTNRISNLCLACEPCNIKKGTKSIEQFLSKKPDVLKKILAQAKRPLKDAASVNSTRWALLNGLKDTGLDVTTGSGGLTKFNRTRLQLPKTDYFDAACVGDTLELFVLANQPLLIKATGHGSRQMCRTDKFGFPSRYVPQFKLIKGFQTGDILTYSPFLKKGDSPSLTALDY

SEQ ID NO: 12542 - protein, 458 aa, unidentified
MSTCVCVLSNNGERLMPTFRLGKVRHLLKDGKAKIVKHHPFTIQLLYDSKTNTQPIEICEDVGYNYIGISVKSESYEYVSAQYDTLQDEKEHHDDCRRYRRTRRNRLRYRKRRFDNRKRNKGWLAPSLEHTKQLNISLIERYVSVIPITHATVEVGSFDTMLLQSIQKGEAKPEGADYQEGPRYNLATLREAVFYRDNYTCQVCGRKIADGAILHMHHMFYWKGRHGYKLDELVTACEKCHTPANHQKGGKLFGFGEDKEFADLSGAAFMNAVRWQIVNALHTTYSKEFVTITYGAMTKENRIALQLEKSHNNDAYAMGDFHPVHRCGFRHYQKRRRNNRVLEKFYDATYIDTRTGNKAKGKELFNGRISRNYKKDSENLHKYRSKKVSKGRRSIRRRRYAIQPYDTVRLEGKTYITSGCHNKGTRLLIPVNGKSKSVAISKVQVVCHAGPWIKLSKY

SEQ ID NO: 12543 - protein, 422 aa, unidentified
LNKRGKPLMPCSPAKARLLLKEKKAIVVRRTPFTIQLTIATGESKQPVSLGVDAGYKHVGLSASTEKAELYASEVELRKDITDLLSARRALRQSRRNRKTRYRAPRFDNRIRTKRKGWLAPSVENRINAHLSRIEAVLRLLPITKITVETASFDMQRLKNPDISGKEYQEGEQLGFWNVREYVLFRDGHVCRHCHGRSKDPVLNVHHLESRRTGGDSPGNLITLCETCHKALHRGEITLKAKRGQSFRAQAFMGIMRREVLNRLKASYPELKVHETYGYLTKHARIANGIVKSHGADAFCIAGNLGAERLGEFFFQKQTRRNNRQIHKLSVLKHGLRKRNQVPFEVNGFRLFDKVACKGEEGFIFGRRSSGSFDVRKLDGTRISAGISCKKLRLLEKRRTYLTEIRKEEALPPLPEGRGLRA

SEQ ID NO: 12544 - protein, 414 aa, unidentified; identical to SEQ ID NO: 6226

SEQ ID NO: 12545 - protein, 424 aa, unidentified; identical to SEQ ID NO: 3434

SEQ ID NO: 12546 - protein, 417 aa, unidentified
MPCSPAKARLLLKEKKAIVKRRTPFTIQLTIATGEAKQPVTLGVDSSYKHIGLSATTEKVELYASQVELRQDITDLLSARLALRRSRRSRKTRYRAPRFDNRVASKRKGRLAPSVENRIAAHMSRVEAVMRVLPVTAITVETAVFDTQLLKTPDIAGAAYQQGEQLGFWNVREYVLFRDGHVCQHCRGKSKDPILNVHHIESRRTGGDAPNNLITLCETCHKAFHRGEIELKIKRGKSFKAETFMGIMRWTLFERLKKAHPELNVHNTYGYLTKHKRISYGIAKSHCADAYCIADNLSAKRLKGFFFQKQTRKHNRQIHKLSILKGGLRKKNQAPYEVKGFRLFDKVICKGEEAFIFGRRTSGSFDVRRLDGTRISAGINYKKLRLLEPRTTYLTEFRKEAALPPLHKCRGFRAEFL

SEQ ID NO: 12547 - protein, 404 aa, Salipiger sp.
LLRDGKAAVFRRYPFTIILKRKVPDAEPAPVEVKIDPGSKTTGLALVQGDKVLWGGELTHRGHQIRDRLQMRRERRRGRRNKLRYRKPRYRTKAQINNADRKRKKGWLAPSLLHRVETIMTWMDRFRRYAPVGSIAMELVKFDLQQMQNPEISGVEYQQGDLAGFEVKEYLLAKWGRKCAYCGAEGRPLEVEHIQPRSRGGSNRVSNLTLACEPCNQAKGNKPVEAFLSSKPDLLARIMKQAKRPLRDAASVNSTRWVLFTALKLTGLPVTAGTGGRTKYNRKRMGWAKAHWLDAAAVGNVDALTLRTDKPLLISAKGQGGRQKGVFDKHGQPRRNKAGAAQIRPLKPIHGWRSGDIAKARGLEGRISPRTRGSFELRAAGQKPRSFPPRDFVAIHRNDGYAYQ

SEQ ID NO: 12548 - protein, 423 aa, Arthrospira sp.
MSNHIFVLDTNRKPLTPCKPGVARSLLKAGKASVFRRYPFTIILNKEVDANPEPLELKLDPGSKVTGIALKQGNHIIFAAELQHRGQQIKEALLSRRQLRRSRRNRKTRYRPARFLNRTRSKGWLAPSWQHRVDTLMTWVQRFRRLAPVGRIAQELVRFDLQLMENPEISGVEYQQGALQGYEVREYLLEKWGRTCAYCGAQNVPLEVEHIQPRSKGGSDRVSNLTMACHSCNQAKGNGDIRDFLSGQPDVLSRLLRQAKSPLKDAAAVNSTRWALFKALKATGLPVTTGTGGQTKFNRLKLNLPKAHWLDAACVGPVESLEVLTSKPLLILAKGHGTRQMCGTNKYGFPNRHRSRRQIHKGFQTGDMVTALVTAGKKIGSYLGRVLCRASGSFDITTASVRVAGISHKYCQPIHRKDGYAYA

SEQ ID NO: 12549 - protein, 413 aa, unidentified; identical to SEQ ID NO: 3476

SEQ ID NO: 12550 - protein, 418 aa, unidentified
MVYVINKQGQALMPTERFGKVRRLLKNGLAHVMYRIPFTIQLDYDTTNFIQPISLGIDAGSKHIGISATTSEKELYAADVELRNDIVEKLSTRREQRRTRRNRLRYRRARFNNRVSSKRKGWLAPSIENKIQTHLTVVEKIHKFLPITNIIVETAAFDIQKIKNPSISGKEYQQGEQLNFFNVREYVLHRDGHQCQHRKGKSKDPILNVHHIESRKVGGNSSQNLITLCESCHKAYHKGEIELEVKRGTSFRDSAFMSTMRWSFYKKLKNIYPNVSMTFGYITKHTRITNGLPKNHYVDARCISGNPTAKHLEYYFYQKKVRCQNRQIHKVNFLKGGRKKLNQAPYLVKGYRLFDLVEYQKDLYYIFGRRESGFFDIRKLDGTKVNKGSISCKQMRLIDIRKTIIIEKRMQGAIHPIN

SEQ ID NO: 12551 - protein, 518 aa, unidentified; identical to SEQ ID NO: 7468

SEQ ID NO: 12552 - protein, 460 aa, Petrotoga sp.; identical to SEQ ID NO: 4123

SEQ ID NO: 12553 - protein, 509 aa, unidentified
MPDTDYIYVLGADGKPQMPTKRKRHVKRLLDTGKARIACHVPYTIQLLYENTPVLQPVMLAEDPGRTNIGMAVLSVKGELLMSAVVETRNRKIVRLMNHRRGYRRASRNGERKARQRLAKRFSTMLKAGMLMRKLPKFAADKFITCHYIRNTESRFCNRKRPDGWLTPTSRQLVETHINLIHKIQKYLPVTDIAMEVNRFAFLSLENPSVSGVDFQNGPLKGFDSLHDAVNELQHGKCLLCDKKIEHYHHIVPRFMNGSNTIGNIAGLCMECHNKVHKRAAYQKKLNDVKKGLDKKYGALSALNQAVPFICKRLEAEFGKEHVSYCTGRDTAKMRSSFGFQKTKDNQMHETDAWCIGILALNRIPDVVPNFGQTYCIRQFRRQDRSFVYAQTERVYKLDGVIVAKNRKKRTEQKTDSLEDWYNRQVVLYGKKKADFMRSRLTAVKSKRRYNDLTRVMPGAIFMYNGERYVLSGRLSKGLLFRAVGDAKTNYPASKCKIIRHNEGLVFVC

SEQ ID NO: 12554 - protein, 456 aa, unidentified; identical to SEQ ID NO: 4174

SEQ ID NO: 12555 - protein, 428 aa, unidentified
LKVFVLNMRGRPLMPCSPAKARHLLKAGKAVVRRRTPFTIQLRIATGETKQNVTLGVDAGAKHVGLSAATEKEEVFASEVELRQDITGLLAARLSLRRERRQRKTRYRAPRFLNRVRSKHNGWLPPSVENRIQAHLSRIDAICGLLPVTKIVIETASFDIQKIKHPDVEGTDYQQGDQLGFWNVREYVLFRDGHVCQHCHGHAKDKILNVHHLESRQTGGDAPNNLITLCETCHKACHAGKIKLKVKRGQSFRAEAFIGIMRWTLLDRVRKAHPGLPVENTYGYLTKNTRITQGLPKTHCVDAYCIAGNLKAVRRGVYLHQRQVRKHNRQIHKCTVLSKTLKDGTKIGYRKLNQTPHLVKNFRLFDKVRCLGQTGFIFGRRSSGYFDVRRLDGVKLSSGISYRKLTLLEKRSTYLTELRKEDGASSPV

SEQ ID NO: 12556 - protein, 430 aa, Oscillochloris sp.
MVFVLATDRTPLDPTTFHRADHLLRCGRASVFRTYPFTIIVHDRTAVASVTHPHRLKLDPGSKTTGIAVVAEESGRVVWAGELTHRGQQIRDRLLTRRASRRSRRQRKTRYRQPRFLNRRRPEGWLAPSLQHRVETTLTWVNRLRRFVPITAISTELVRFDTQFMQDAEISGVAYQQGTLAGYEVREYLMEKWGRRCAYCGAKEIPLQIEHIVPRARGGSDQVSNLALACEPCNIRKGTQTAAEFGHLDIQAQARRPLKDAAAVNATRWVLYQRLTATGLLVEVGTGGRTKYNRTRLGLAKTHWHDAACVGASTPHGLEVRGVQPLLIRATGHGSRQACRMDKYGFPRTGPKGARVVKGFKTGDMVRAVVTTGTKVGVYVGRVAVRTTGSFNITTATGTIQGLNHRFFTHLHRADGYTYPGDGASSHPGS

SEQ ID NO: 12557 - protein, 407 aa, unidentified; identical to SEQ ID NO: 3417

SEQ ID NO: 12558 - protein, 451 aa, unidentified
MSVAVMSKTSMRLMPTSEYRARKLLKSKKATVYGYHPFTIQLTERETGDVQPVELCMDTGYLHIGMSVKSKKHEYLGVQIDTLTDEKQKHDACRMYRRQRRSRKRYRQSRFNNRKRSDGWIAPSLEHKKDIHIQTISRICNAIPITNITLEMGNFDTQVLKALKKNRPLPQGTDYQHGERYGIATLREAVFARDKYTCQCCRRTIADGAILHVHHIIYRSRGGTNRMSNLATVCDRCHTPANHKPGGKLYNWKPKLASFKGATFMTAVRWKMYNEVKSKFSDINIHITYGAETKEQRRAFDITKSHVNDAFVMGQFHPKHRSRPVCYKKKRRNNRCLEKFYDAKYIDSRDGKKRSSQELFNGRINRNHKKDSENLHQYRQQKVSSGRRTIRKQHYSIQPHDIVVFNRQQFETSGCHCNGARAILLPQKKSVAIKKLSIHKYAGGYFKSDFT

SEQ ID NO: 12559 - protein, 456 aa, unidentified; identical to SEQ ID NO: 8309

SEQ ID NO: 12560 - protein, 442 aa, unidentified; identical to SEQ ID NO: 2903

SEQ ID NO: 12561 - protein, 413 aa, Blautia sp.; identical to SEQ ID NO: 3290

SEQ ID NO: 12562 - protein, 414 aa, unidentified
MPCSPAKARLLLKEKKAIVKRRTPFTIQLTIATGETKQPVSLGVDAGYKHVGLSASTEKAELYASEVELRQDVSDLLSARRALRQSRRNRKTRYRAPRFDNRIRTKRKGWLAPSVENRINAHLSRIEAVLRLLPVTTITVETASFDMQLLKNPEISGKEYQEGEQLGFWNVREYVLSRDGHVCQHCHGRSKDPVLNVHHLESRRTGGDSPGNLITLCETCHKALHRGEITLKAKRGQSFRAEAFMGIMRWEVLNRLKASHPEQEVQNTYGYRTKHARIENGIAKSHCADAFCIAGNLGAERLGEFFFQKQTRRNNRQIHKLSVLKHGLRKRNQAPFEIKGFRLFDKVACKGEEGFIFGRRSSGYFDVRKLDGTHISAGISYKKLRLLEKRQTYITEIRKEEALPPLSEGRGLRA

SEQ ID NO: 12563 - protein, 376 aa, unidentified
LWISYLLVGNKEELVGAALRYRKARFNNRISSKRKGWLAPSVENKIQTHLTVVEKIHKFLPITNIVVETASFDIQKIKNPSISNEEYQQGEQLDFFNVREYILFRDGHTCQHCKGKSKDKVLNVHHIESRKTGGDSPNNLITLCETCHKAYHRGEFELNVKRGKSFRDAAFMGIMRWNLYDRLKNIYPNVSMTFGYITKNTRITNNLPKEHYVDARCISGNPVAKPLGYYFYQKKVRCQNRQIHKVNFLKGGRKKLNQAPFLVKGFRLFDLVEYQKDLYYIFGRRDSGFFDIRKLDGTKVNKGSISCKQMRLIDIRKTIIIEKRIASKFMKKGDKVREIGDTLTGTIVYIANGYADVKYPNMKGVCSLPVQFLEKV

SEQ ID NO: 12564 - protein, 436 aa, unidentified
MPCHPARARTLLKKGRARVHKVFPFTIRLTDRELENSSVQPMLIKIDPGSKETGIALVREEKNKGHHALYFINLQHRGQQIRNALYKRRCLRRSRRSRNLRYRSPRFLNRRRAEGWLAPSLQHRADSILSWVSRLRKIAPVERISQELVKFDTQLIQNSKIEGIEYQQGELVGYELREYLLEKFGRKCIYCGADNVPLNIDHVIPKSKGGSNRASNLVLACVQCNQKKGSRSVEEFLKDKPEVLRQIKNQLKQPLKDAASVNATRWKLFNKLKLTGFPFEVGSGALTKFNRKKFGIPKAHWLDALCVGNVPSVTNWRNLNVLNIKCCGRGAYQRTRTDKYGFPRGICMRQKKVYGFSTGDMVKAIIPKGKKKGVYVGKVAVRKTGSFNLQTSGQTIQGISYRYCRLITHSDGYSYSWKSCPIPPRVETRGILGEVR

SEQ ID NO: 12565 - protein, 442 aa, unidentified
MGEGLQPTERSRRQNLRVFVLNKRGQPLMPCSPAKARLLLKEKKAVVRHRTPFTIQLTQATGETVQPVTLGVDVGSKFIGLSASTEKAEHYASEAELRTEVVDLLSSRREMRRARRNRKTRYRAPRFDNRIHSKNKGWLAPSVENKINTHLSCVDNVRKCLPVTKIVVETAAFDIQKIKNPDIEGTDYQQGDQLGFWNVREYVLCRDGQQCCHCHGKSKDPILNVHHLESRKTGGNAPNNLITLCETCHKAYHDGKITLKQKRRQVFRDAAFMGIMRWTFFNRLKAQCPEIEVRNTYGYLTKNTRIRHGLEKSHHTDAFCIAGNLEAKRLGVYFFQKQTRKHNRQIHKMSILKGGVRKLQQAPYEVKGFRLFDKVRYDGREAFIFGRRSSGYFDIRLLTGEKVSAGVSYKKLVLLEKRKTFLTQLIKENAIPPATEVAGFLA

SEQ ID NO: 12566 - protein, 428 aa, unidentified; identical to SEQ ID NO: 4440

SEQ ID NO: 12567 - protein, 462 aa, unidentified
MSVLVIGRNGRALMPTNPRKARLLLKKKTASVVCRHPFTIQLLYKTGCATQEGSIGIDTGSQHIGVGITCGDKVILKDEHALRSSMEKRSLLATRAVMRRGRRYRKVRYRKPKWRHHTKRMYFEKANRRGQHWRKVKTTTQSPRSKGWLPPSLQSKCDHHFRIIDRYLKYLPDPITRNLVIETGRFDMARMNDPTIHGEMYQRGPMYDAENRRAYIFARDNYQCACCKAKAGTTRKADGTTVKLVAHHILFRSRGATDNPKYIISVCDHCHTTKAHQPGGILYSWMENNKKVARGLRDATFMNILRKRLFARYPQAAFTYGNITAADRKKLRLPKSHANDAVAISLFGKEASTVKNICQTMHYKQIRKSKRSLHEAIPRKGRKNPNTKAVRNKKNTTQVNGFKLWDSVLANGKKLFICSFTGTSAYLIDKNGCYISQPGKTYKQWPLSKLKRLHPNGNWLMA

SEQ ID NO: 12568 - protein, 367 aa, unidentified
YKHVGLSASTEKAELYASEVELRQDVSDLLSARRALRQSRRSRNTRYRAPRFDNRIRTKRKGWLAPSVENRINAHLSRIETVLRLLPVTKITVETASFDTQLLKNPDIAGKEYQKGEQLGFWNVREYVLFRDGHVCQHCHGRSKDPVLNVHHLESRRTGGDSPGNLITLCETCHKELHRGEITLKAKRGQSFRAETFMGIMRWEVLDRLKASHPKLEVQNTYGYRTKHARIVNGIAKSHCADAFCIAGNLGAERLGEFFFQKQTRRNNRQIHKLSILKGGIRKRNQAPFEVKGFRLFDKVACQGEEGFIFGRRSSGFFDVRKLDGTRISAGISCKKLHLLEKRRTYLTEIRKEEALPPLPEGRGLRA

SEQ ID NO: 12569 - protein, 418 aa, unidentified
MVYVLSKTGQPLMPTENHAKVRVLLKQQKAKIVHSCPFTIQLLYDSTDYTQPVSLGIDAGSRHIGVSATTETKVLYEADVTLRNDIVDLLSTRREARRTRRSRKTRYRKPRFNNRIRKDGWLAPSVRQKVDTHLTTVRKVTEILPVNSITVETASFDIQKIKNPDIAGTGYQQGEQLDFWNVREYVLFRDGHKCQCCKGKSKDPVLNVHHIESRKTGGNAPNNLITLCETCHKGYHNGTVSLPKNIRRGMKFNDAAFMGIMRWAFFNRVKETYEPLGIMVNMTYGYITKNTRIEHDLPKDHFIDARCISGHPDATSGGTVFYQKKVRCHNRQIHKQKILKGGIRKRNQAPYLVKGFRLFEKVKYHGKQYFIFGRRSSGFFDIRTLDGTKVNKGSVSCKKIRSLDMPRSYLTEERKAIV

SEQ ID NO: 12570 - protein, 414 aa, unidentified
MPCSPAKARLLLKEKKAIVVRRTPFTIQLTIATGETKQPVSLGVDAGYKHVGLSASTEKAELYASEVELRQDITDLLSARRALRQSRRNRKTRYRAPRFDNRIRTKRKGWLAPSVENRINAHLSRIEAVLRLLPVTKISVETASFDMQLLKNPDIAGKEYPEGEQLGFWNVREYVLFRDRHVCQHCYGRSKDPVLNVHHLESRRTGGDSPGNLITLCETCHKALHRGDITLKAKRGKSFRAEAFMGIMRWEVHNRLRALHPGIEVSNTYGYRTKHARIANGIAKSHCADAFCIAGNLGAERLCEFFFQKQTRRNHRQIHKLSILKGGIRKRNQAPFEVKGFRLFDKVACQGEEGFIFGRRSSGFFDVRKLDGTRISAGISCKKLHLLEKRRTYLTEIRKEEALPPLPEGRGLRA

SEQ ID NO: 12571 - protein, 419 aa, Paenibacillus sp.; identical to SEQ ID NO: 3664

SEQ ID NO: 12572 - protein, 576 aa, unidentified; identical to SEQ ID NO: 5774

SEQ ID NO: 12573 - protein, 443 aa, Anoxybacillus sp.
MVEENMTCFMQRKGENPMVFVLDTNKRPLAPCHEAVARKLLKQGKAAIYKRYPFTIILKEIVDNFRPKTPYRLKIDHGSKHTGLAILRGQEVVWLGQLDHRTDIKERIDKRRAFRRARRNRKTRYRKPRFLNRRRKDGWLPPSLESRVQNIQTWVNRLKKLCPIGYISYENTKFDTQLMRNPEISGIEYQQGTLQGYEVREYLLEKFGRKCCYCGKENVPLEVEHIIPKSRGGTDRVDNLCLACHDCNQRKGSKTAEEFGYPHIQKQVKESLKDASAVNSTRWKVYEVLKQSGCEVECGTGARTKMNRIRLDLPKTHYFDACCVGESTPNHLYFKTKEVLFIRAKGRGSRSRTNLDRYGFPRGYLARQKFFFGFQTGDMVKAVIPRGKYQGVWFGEVSCRKTGSFDIKGKDGKRIAQGINYRYVQVIQRFDGYTYRREGMNIA

SEQ ID NO: 12574 - protein, 413 aa, unidentified; identical to SEQ ID NO: 3587

SEQ ID NO: 12575 - protein, 524 aa, unidentified
  source 1..524: note = Lachnospiraceae bacterium UBA2826
METQQAQMPVAYSQILERRYQRMFEVNIMVQNADSTPLMPIHHYGRAKRMLRSGKARIVSRRPFVIRLTYQIENPGLDIVTLGIDPGRTNIGLALIDSKGRDLGSYVLQTDNKSVPKHMKDRRMHRQASRRGERKRRQRRAVSADRTGMLRKTRIYRMLPGCKRPVRCKSIRNSKARFNNRKRPEGWLTPTARNLLDTHLQAVKRLAEYYPIQNIAIEINRFDFAKMENPGILNWQYQKGKLFGFADRDEAVFSLQHGRCLLCGRQKIEHYHHIVPRSRGGSESIDNIAGLCMKCHELVHKSGAAAAKLQAKKQGELKKYHALSVLNQIMQCLLTELSALYPTYVTTGQKTHRSRMEYGLPEKEKDDNTHHIDAWIIAVDAMGICPEEIPTFSNMQMILQFRRHDRAGIHYQKERTYYLDGRIVCKNRHKRTGQTDGVSKYISLAEYRAQHPHEVSRLSVRKSTRGYNDMKRELPGALVRYKGHTLTVSGKHNDRYQFVEKEICREAPIRQCKVICHNRGLVFA

SEQ ID NO: 12576 - protein, 439 aa, unidentified
MVFVLDKSKKPLDMITNAKARILLRNNLAIIHKVYPFTIRLIDNSCGSRNKAYTVKFDPGSKHTGIAIVDNTNKVVMLAELEHRGHLIKRNLDKRRAVRRSRRQRKTHYRAARFLNRTRPQGWLAPSVKSRADNVINFVKKYKKLLNINKVMIENVSFDTAQMNSDKKLWGNDYQQGNLYNKNLREFIFSKTKGRCSYCGEKAEEIDHIVPRAKGGSNSTHNLTPACRSCNEKKSNLSLKEFGKLMNKDYSQLEPKKLPKDAAIVQSARNYMVKEIAKLVPDTITYEAWMTKYNRDQLGLSKQHYYDALSVGETPTKFNFLTDKILQISAKGRGSRQMCRMDSYGFPRTFAKASKSVKGFQTGDMVKAIVPFGLKQGEYLGKVAVRSSGSFNIQTKTKTIQGIRYRYCHIIQRSDGYSYDYKERDFFSAMNCRVSVAEL

SEQ ID NO: 12577 - protein, 512 aa, unidentified; identical to SEQ ID NO: 5549

SEQ ID NO: 12578 - protein, 512 aa, unidentified; identical to SEQ ID NO: 4350

SEQ ID NO: 12579 - protein, 442 aa, unidentified; identical to SEQ ID NO: 2903

SEQ ID NO: 12580 - protein, 378 aa, Moorena sp.
MQNYVLVIDTNKRPLNPISPKKARRLLDKGKAAVFRMYPFTIILKTAIYNPVVLPCHIKIDPGSKTTGFALVQNNQVIWGMELEHRGELIKKKLESRKAVRRGRRNRHTRYRKPRFLNRRRKDGWLPPSLEHRILTIQTWVKRLIKFCPVNEIWVERVKFDTQKMPNPEINGIQYQQGELAGYEVREYLLEKWGRECTYCGKQSIPLQIEHIHPKSKGGSNSAKPTLRERVSNLCLACEKCNQRKGNKSIEDFLKKKPNLLQKIKTKAKQPLPDAAAVNTTRNKLVKVLRSIKLVVTGTGAQTKYNRTKLGLPKQHWIDAACVGDIETLVLRTSQPLLVTCKGPGGRQKAALNKYGYPIRHNPLKPIKGACYWGHSQA

SEQ ID NO: 12581 - protein, 525 aa, unidentified
VSLPVKQVNRDKTSTGNSFKAPQRARRRTCRSAGAEQGRNCHLERNIIMIIALDKNKRPLGFLTERRCRILMERKRAVLYRVFPTVVILMDMDVRKLQDLPSYRIKIDPGSKYTGIAIVRNDTDELVYAMQIEHRGDAVRAGLQKRKMARRNRRSRETGYRRAKWGNRCLSDGDKKSYNSSRKDGWLPPSIRSVADNVLTWVQRLSRWVNITDCSLEAVRFDTQLLENPNIKGEEYQHGTLFGYEIREYLLEKFGHTCQYCGGESGDPVLEWEHIHPKSRGGSNRVKNALLSCSSCNRDKDNQTPEEWIGQVSFRLSHEKGKKRELDSKRIELIQKVIDGKPEGQPMRYAAWVSSSRRYLENHLFQIFRDVECSSGGRTKYNRTKLGYPKEHHYDALCIGTVPEKGYHDRTNGYYLYAKATGRGTRLRGTLNKCGIIVTKWTSRKKNFFGFQTGDIVVAEVPHKTPKPYKHEGRFVGRVMVRASGSFDIRTTGGRLATVKAGFCRLLQANSGCAYSMERAISLGH

SEQ ID NO: 12582 - protein, 425 aa, unidentified; identical to SEQ ID NO: 10997

SEQ ID NO: 12583 - protein, 416 aa, unidentified
VISQDGKPLMPCSDPIARLLLKQGKAKVKKREPFTIKLTYETTNHTQGLTLGVDTGSGTIGTAVSKDNGDIVYMSEVVVRNDITDKMTQRAKYRRNRRNRKTRYRKARWLNRASSIKKDRFSPTMQSKLHSHVREIEYIQSILPVTEMVFETGQFDMQLMKNPSLANPKVRPWGYQKGANYGFENTKAMVLNRDNYTCQCCKGKHKDSKLEVHHIVFRSQGGSDEESNLLTLCHTCHKDLHSGKINPKLSGKVKGNLKYATQMNSIRKQLFRFYPNAIETFGYVTKANRLHLGVDKEHYYDACTIATQGNAFNVKSNLYKKKCVSDGDFQKTKGIRSEQPIVTDKICGFRKFDKVRYFGNDYFIKGRMSTGYAILMDIDGNKIDFSTMPRGYKTPKLSNCKRITARSTVMTQVKVV

SEQ ID NO: 12584 - protein, 442 aa, unidentified; identical to SEQ ID NO: 3218

SEQ ID NO: 12585 - protein, 414 aa, unidentified
MVYVINKQGQALMPTERFGKVRRLLKNSLAHVMCRIPFTIQLDYDTTDYTQPVSLGVDAGSKHIGISATTSDKELYAADVELRNDIVDKLSTRRELRRTRRSRLRYRKARFNNRVSPKRKGWLAPSVENKIQTHLTVVEKIHKFLPITNIVVETAAFDIQKINNPSISGSEYQQGEQLDFFNVREYILFRDGHTCQHCKGKSKDKVLNVHHIESRKTGGDSPKNLITLCETCHKAYHRGELELNVKRGRSFRDAAFMGIMRWSFYDRLKNIYPNVSMTFGYITKNTRITNNLPKEHYVDARCISGNPVAKPLGYYFYQKKVRCQNRQIHKANFLKGGRKKLNQAPFLVKGFRLFDLVEYQKELYYIFGRRSNGSFDIRKLDGTKVNKGSINCKHLRLISTRKSILTEKRILVNL

SEQ ID NO: 12586 - protein, 428 aa, unidentified
LKVFVLNMRGQPLMPCSPAKARHLLKAGKAVVKRRTPFTIQLRIATGETKQNVTLSVDAGAKHVGLSATTEKEEVFASEVELRQDITGLLAARLSLRRDRRHRKTRYRAPRFLNRVRSKHKGWLAPSVENRIQAHMSRIDAVCRLLPVTKIVIETASFDIQKIKDPSVEGTDYQQGDQLGFWNVREYVLFRDGHVCQHCHGRSKDKILNVHHLESRQTGGDAPNNLITLCETCHKAYHAGKIKLKVKRGQSFRAEAFMGIMRWTLLDRVRKAHPGLPVENTYGYLTKHTRITHGLPKTHCVDAYCIAGNLKAVRRGVYLHQRQMRKHNRQIHKFTVLSKRLEDGTKIGYRKLNQSPYLVHGFRLFDKVRCLGQIGFIFGRRSSGYFDVRRLDGVKLSPSISWRKLTLLEKRSTYLTELRKQDGASSPV

SEQ ID NO: 12587 - protein, 427 aa, Parasutterella sp.; identical to SEQ ID NO: 3787

SEQ ID NO: 12588 - protein, 442 aa, unidentified; identical to SEQ ID NO: 3161

SEQ ID NO: 12589 - protein, 455 aa, unidentified
VLQTTNPFQHWRRITTDRKVEQTEPVRYPSMENTLKVFVLNMRGQPLMPCSPPKARKLLRAGKAVPVRRTPFVIQLTVPTGETKQPITLGVDAGYKHVGLSATTAKEELLASEVELRQDVTGLLSNRLALRRARRNRKTRYRAPRFDNRVRSKHKGWLAPSVENRIQAHISRIEAVCRVLPITKIVIETASFDIQKIKNPEVEGTDYQQGEQLGFWNVREYVLFRDGHVCQACKGRSKDLILNVHHIESRKTGGDAPGNLITLCEACHKAYHAGKLKQFSPRRGASFRAETFMGIMRWTVLNRLRERHPELPVTNTYGYLTKHKRIVAGLPKTHCADAFCIAGVLDAKRRGEYLFQKQTRRHNRQIHKLTILKGGVRKRHQAPYLVHGFRLFDKVLCKGEVGFIFGRRSSGAFDVRRLDGTKISAGISYKKLSLLEKRKMFLTELRKEGRDSSRV

SEQ ID NO: 12590 - protein, 415 aa, Bacillus sp.; identical to SEQ ID NO: 2671

SEQ ID NO: 12591 - protein, 278 aa, unidentified
ICRILPVTLVRVETAEFDTQRLKAMLAGKPLPVGTDYQLGEMYDEYNVRQYVLKRDNYTCQCCGAHTTAKKTVKLHVHHLESRKVGGNAPSNLITLCTTCHNNLHKGKITLDGKKRGKTLRDAAFMGIMRNTLLTRLRNELNIPVQNTYGYITKLLREQNDIKKSHVNDARCISKHPLAKPCSVCYRTKAIRHHNRQIHKAKILKGGIRKANQAPYIVKGFRLWDKVLYNEQECFISGRRSSGYFALRKFDGTTITNSISFKKLRLLEPATNYLIERK

SEQ ID NO: 12592 - protein, 430 aa, unidentified; identical to SEQ ID NO: 4817

SEQ ID NO: 12593 - protein, 414 aa, Parasutterella sp.
MPCSPAKARLLLKEKKAIVVRRTPFTIQLTIATGESKQPVSLGVDAGYKHVGLSASTEKAELYASEVELRPDVSDLLSARRTLRQSRRNRKTRYRAPRFDNRIRTKRKGWLAPSVENRINAHLSRIGAILRLLPVTKITVETASFDTQLLKNPDISGKEYQEGEQLGFWNVREYVLFRDGHACQHCHGRSKDPVFNVHHLESRRTGGDSPGNLLTLCETCHKALHRREIKLKTKRGQSFRAEAFMGIMRWEVLNRLKASHPELEVHNTYGYRTKHTRIVNGIDKSHCADAFCIAGNLGAERLCEFFFQKQTRRNNRQIHKLSILKHGLRKRNQAPFEVKGFRLFDKVVCQGEEGFIFGRRSSGSFDVRKLDGTRISAGISCKKLRLLEKRRTYLKEIRKEEALPPLPEGRSLRA

SEQ ID NO: 12594 - protein, 424 aa, unidentified
  source 1..424: note = Cyanobacteria bacterium UBA8553
MFVFVLDINKKPLNPTHPARARKLLKTGKAAVFKRYPFTMILKEEIVEPSNQELRIKIDSGAKTTGIAILRNEVVLWAAELTHRGFQIREALTSRRQLRRSRRNRKIRYRQPRFNNRCRTDGWLPPSLISRVDNILTWAKRLLRLSPITAISTELVRFDTQLMQNPEISGIEYQQGELAGYELREYMLEKWHRKCAYCGVTDTQLEIEHIIAKSKGGSNRVSNLTLSCTKCNQKKGNKPIEQFLKNKPEVLKLILAQAKRSLADTAAVNATRWKLLNSLKELGLPVETGTGGRTKYNRCRQNLPKTHWLDASNVGASTPEDLKVLVSKPLVIKATGHGNRQMCGTNAYGFPIRHRSNIKKHFGFQTGDIVKAVVTKGKKIGSYTGRVLCRATGNFDVTTASGRVAGISHKYCSFIHRSDGYAYQ

SEQ ID NO: 12595 - protein, 412 aa, Deinococcus sp.; identical to SEQ ID NO: 3738

SEQ ID NO: 12596 - protein, 433 aa, Moorena sp.
MRVFVLDQNRTPLDPCKPARARILLKQGRAKVFRTYPFTIILTEVVEGAVTHEHQLKIDPGAKTTGLAILSNNVLIWGAELTHRGFQIRDALTSRRQLRRSRRNRKTRYRKPRFLNRKRPDGWLPPSLTSRVHNILTWVKKLIRLCPIAGISQELVRFDPQKMENPEISGTDYQQGTLYGYEIREYLLEKWNRKCAYCGATDTQLEIEHIKSKSKGGSDRVSNLAIACRDCNQAKGNQDIEQFISCKPDVLKWVRSQAKRPLADATAVNATRWKLYNELKLTGLSVETGSGGQTKYNRYRFNLPKTHWLDAACVGEVPSIYVENDQTLLIAAKGHGTRQICRTDKYGFPKRHCSRTKIHKGFQTGDIVKAVVTKGKKIGTYVGRVATRQTGSFNISTSHGLIQGISHKYCTPIHKKDGYAYQINALSSLSFPR

SEQ ID NO: 12597 - protein, 417 aa, unidentified
MPCSPAKARLLLEEKKAIVKRRTPFTIQLTIATGEAKQPVALGVDSGYKHIGLSATTEKAELYASEVELRQDITDLLSARLALRRSRRSRKTRYRVPRFDNRVASKRKGRLAPSVENRITAHMSRVEAVMRVLPVTAITVETAAFDTQLLKNPDITGAAYQQGEQLGFWNVREYVLFRDGHVCQHCRGKSKDPILNVHHIESRRTGGDAPNNLITLCETCHKAFHRGEIKLKVRRGKSFKAETFMGIMRRTLFERLKKAHPELNVRNTYGYLTKHKRISYGIAKSHCADAYCIADNLGAKRLEGFFFQKQTRKHNRQIHKLLILKGGLKKKNQAPYEVKGFRLFDKVICKGEEAFIFGRRTSGSFDVRRLDGTRISAGINYKKLRLLEPRTTYLTEFRKEAALPPLHKCRGVCAEFL

SEQ ID NO: 12598 - protein, 413 aa, unidentified; identical to SEQ ID NO: 2636

SEQ ID NO: 12599 - protein, 447 aa, unidentified
VPAYRIKHITKKEAPYMVYVLDIDGQPLMPTSRHRKVRKLLNSHLAKVVKRCPFTIQLLYQSTKETQPVSLGVDAGSRHIGLAATTEQKVVYQEELVPRNDVVKLLSARRALRSSRRSRKTRYRKPRFNNRVHSKHKGWLAPSVEVKIQEHITAIKRICQILPISDIHVETAEFDLQRLKAMEEGRPLPVGTDYQLGEQYDFYNTRQYVLHRDEYTCQCCGTHDNNVKLHVHHIESRQTGGDAPNNLITLCEHCHKLLHAGKTILPKVKKRGKSYRDATFMGIMRKTLLERLKKEIDVPVEGTYGYITKYWRERAGLEKSHINDAICISKHPYARPLETYYLTKAVRHHNRQIHKTKFSKGGIRKRNQAPYLVKGFRLFDKVLYQGESYFIFGRRITGYFDIRTLDGTKVNKGSTSYKKLRIQDTAEAYLTEVRAIPHMNEFTCVLA

SEQ ID NO: 12600 - protein, 512 aa, unidentified
MSTVYVLNKDGKPLMPTTRCGHVRHLLKEQKARAVASKPFTIQLLYETDDVVQPLYLGIDPGRSNIGVAVVKTDGMAVFTAHLETRNKEIPKLMKKRKDSRRARRTNGRRCRRQRRAKANGTISKKCVKQTTAQNGSVSKRAKEIGVIKRHLPGCEKDVLCIGIKNKEAKFNNRTRPTGWLTPTANQLLQTHINLVKKIQKFLPISDVVLEVNKFAFMQLDNPNIQKWQYQKGPLYQKESLKSAVSEMQEHHCLFCKKKIDHYHHVVPQHKNGSNTIDNIVGLCTQHHDLVHKDTTWQKKLAKKKTGLNKKYGALSVLNQIIPALTKELSSLFPKHFFVTNGKSTYDYRAAHGVSKDHWLDAYCIACSVLPNDTCDKTINSRVPYELKQFRRHDRRALNNENMSRVYTFNGKMVAANRHKATEQTTDSLEEFRQRQPNDVCNLKVKEHHPTYRNMSRNYPGSIFLVEKQVHIMQGIAGSKDGKATTYKDTNANSIAAGKCKFVAKNSGILFV

SEQ ID NO: 12601 - protein, 447 aa, unidentified
VQSVTLGCDPGRTNIGLAAVRSDGTDLYRSHCETRNKEIVDLMDARRAARRASRRGERLARKRLAAKHETATTFPDGRKLPGYEKPIMLKDIINTEARFNNRVRPAGWLTPTATQLLRTHLNLIKRISRILPVSDIALEINKFAFMQLDEPDKNKWNIDFQHGPLYGTGGLKAAVRQLQNDTCLLCQENVIEHFHHLIPRSKRGDNTINNIAGLCQKCHEAVHKSADTAEKLSTLKKGQTKRYGGTAVLNQIIPKLVEELGKTYHEHLHLTYGWQTKEFRTKHKLEKTHDTDAYCIAAGTMQTVKPNIRTDVYEIKQFRRHNRANIHHQTERTYKLNGQTVAKNRRKRTDQKTDSLAEWFENTVKQYGQQKAEHLRAELKVRKSTRYYNSKDRMMPGAVFQYEGNRYVVTGQLSGGQYFRAYGKGNRNFPAKKIRIISLNRGLVYVA

SEQ ID NO: 12602 - protein, 412 aa, unidentified
MVYVISQDGKPLMPCSNPIARLLLKQGKAKVKKREPFTIKLTYEAPNYTQDLTLGVDTGSGTIGTAVSKDNGDIVYMSEVVVRNDITDKMTQRVKYRRNRRNRKIRYRKARWLNRANSIKNDRFSPTMQSKLHSHVKEIEYIKSILPITEMVFETGQFDTHFMKNPSLANPKVKHWGYQKGTNYGFENTKAMVLNRDSYTCQCCKGKHKDSKLEVHHIVFRSQGGSDEESNLITLCHTCHKDLHSGKINPKLSGKVKGNLKYATQMNSIRKQLFRLYPNAIETFGYVTKANRLHLGVNKEHYYDACTIATQGNAFNVKSNLYKKKCVSDGDFQKTKGVCSEQPIVTDKICGLDCQHFFRQIFLGYFSDIVQAFDTLRKNVCGDDYTSLHNPIVLSSVLPAYGMFHSIQILFL

SEQ ID NO: 12603 - protein, 446 aa, Pseudomonas sp.; identical to SEQ ID NO: 9324

SEQ ID NO: 12604 - protein, 512 aa, unidentified
MSTVYVLNKDGKPLMPTTRGGHVRHLLKEQKARVARTKPFTIQLLYETDDAVQPLYLGIDPGRTNIGIAVVKADGTAVFTAHLETRNKEVPKLMQDRKKARRARRTNGRRCRRQRRAKANGTISKKCVKQTTAQNGSVSKRAKDIGVIKRRLPGCEKDVLCIGIKNKEAKFNNRTRPEGWLTPTANQLLQTHINLVKKIQKFLPISDVVLEINKFAFMRLDNPNIQKWQYQQGPLYQKANLEEAVSEMQEHHCLFCKKPIEHYHHVVPQHKNGSNTIDNIVGLCTKHHDLVHKETAWQEKLAKKKTGLNKKYGALSVLNQIIPALTKELSSLFPKHFFATNGKSTYDYRAAHGVSKDHWLDAYCIACSVLPSNVCDSNINNHMPYELKQFRRHDRRVLNNENMNRVYTLNNKAVAINRHKAKDQKTVSLEEFRKEHPDDVCKLKVKEHHPTYRNMNRNFPGSVFLVGKQIHIMQGIASSKDGKATKYNDTSATAIAAGKCKFVAKNTGILFV

SEQ ID NO: 12605 - protein, 425 aa, Nodularia sp.; identical to SEQ ID NO: 3165

SEQ ID NO: 12606 - protein, 414 aa, unidentified
  REGION 1..414: note = Ga0315273_10075764
VNHQQHRADQNLRVSDIVYVLNLRGEPLMPCRQQKSRKLLKEGRAKVVKRAPFTIQLCAPTGETKQSVVLGIDTGFGNIGFSAVSEKEELISGTVKLDGRTKERLSERRMYRRNRRNKLWYRQPRFNNRASTKKQGWLPPSVERRYRTHLSLIARIKTLLPISQVILEIAKFDIQKLENSSISGKEYQQGDMYGYQSVRSYLMSREKGLCEHCGKDFIGSPSHIHHRKPKGQSGSNRLANLMLVHKKCHLKIHKHPKLLKKHQKSSVKEYRQSTFMSIISKRFWKDIPNLIVTFGNVTWVDRNKLGLEKTHSNDAFVIANGSTQTRCQPFEIIQRHKNNRVLQLNRKGFKPSIKRKRSKIGPQDLFWIGKIKYTCKGMFNKGTYILYGDVKKKEYVKMKLVERYFGQGSLVWNI

SEQ ID NO: 12607 - protein, 424 aa, Moorena sp.
MRVFVLDKNRKPLDPCKPARARILLKQGKARVLKRYPFTIIMQDLEVRNCVTHEHQLKIDPGAKTTGLAIVQDNKVVWGAELTHRGFQIRDALISRRQLRRSRRNRKTRYRKPRFLNRKRSVGWLAPSLMSRVHNILTWTNKLSKLCPIVGISQELVRFDTQKMENPEISGVEYQQGTLWGYELREYLLEKWNRQCAYCGAANIQLEIEHIKPKSKGGSDRVCNLAIACKKCNQRKGSQEIQQFLSGKPSILKRVLSQAKRPMADAAAVNTTRWKLYNQLKSTGLPIETGSGGLTKYNRCRQNLPKTHWLDAANVGQVDKLYIEDFQPLLIKAKGHGTRQMCRTDKFGFPSRYVPRFKFVKGFQTGDIVKAIVTKGKKIGTYTGRVATRQTGSFNISTNHGLIQGISHKYCSTVHRKDGYSYSF

SEQ ID NO: 12608 - protein, 413 aa, Sharpea sp.; identical to SEQ ID NO: 4953

SEQ ID NO: 12609 - protein, 444 aa, Calothrix sp.; identical to SEQ ID NO: 11946

SEQ ID NO: 12610 - protein, 376 aa, unidentified
SVSKRAKEIGVIKRHLPGCEKDVLCIGIKNKEAKFNNRTRPTGWLTPTANQLLQTHINLVKKIQKFLPISDVVLEVNKFAFMQLDNPNIQKWQYQKGPLYQKESLKSAVSEMQEHHCLFCKKKIDHYHHVVPQHKNGSNTIDNIVGLCTQHHDLVHKDATWQKRLAKKKTGLNKKYGALSVLNQIIPALTKELSSLFPKHFFVTNGKSTYDYRAAHGVSKDHWLDAYCIACSVLPNDTCDKTINSRVPYELKQFRRHDRRALNNENMSRVYTFNGKMVAANRHKATEQTTDSLEEFRQRQPNDVCNLKVKEHHPTYRNMSRNYPGSIFLVEKQVHIMQGIAGSKDGKATTYKDTNANSIAAGKCKFVAKNSGILFV

SEQ ID NO: 12611 - protein, 456 aa, unidentified; identical to SEQ ID NO: 11534

SEQ ID NO: 12612 - protein, 431 aa, unidentified; identical to SEQ ID NO: 4483

SEQ ID NO: 12613 - protein, 434 aa, Anoxybacillus sp.; identical to SEQ ID NO: 8088

SEQ ID NO: 12614 - protein, 544 aa, unidentified; identical to SEQ ID NO: 9634

SEQ ID NO: 12615 - protein, 420 aa, Moorena sp.
MQNYVLVIDTDKQPLNPISPKKARRLLDKGKAAVFRMYPFTIILKAAIANPTISPCQIKIDPGSKVTGFALVQDDQVIWGMELEHRGGLIKKKLESRSGVRGGRRNRNTRYRKPRFLNRKRPEGWIPPSLEHRVLTIETWVRRLTKFCPVNEIWIEIVKFDTQKMQDPEINGVEYQQGELAGYEVREYLLEKWGRECAYCGKQNIPLQIEHIHPKSKGGSDRVSNLCLACEKCNQRKGNRPIEEFLKKKPDLLQKIKNKALSPLRDAAAVNTTRNKVVKVLKEIKPVLTGTGAQTKYNRTKLGLPKQHWIDAACVGDVEALVLRTYQPLVVTCKGQGGRQKAALNKYGYPIRHNPLKPIKGWSSGDIAKNLLTGEFGRVNPRSKSNSFNYTVRGKKAISLHVKNLLRVHRKDGYTYGFSQ

SEQ ID NO: 12616 - protein, 431 aa, Klebsiella sp.; identical to SEQ ID NO: 2435

SEQ ID NO: 12617 - protein, 416 aa, unidentified
MVYVLDKNGQPLMPTDRHRKVRLMLQSGQAKVIKRCPFTIQLNYDSGHQTQEISLGIDAGSKHIGVSTTTKIKVLYEVDVELRNDIVDLLSSRRELRRGRRNRKTRYRQAKFNNRRRGNGWLAPSIRQKIGTHLTVVENICKMLPISRIMVETASFDIQKIKNPDIQGAEYQQGDQLEFWNVREYVLFRDGHTCQCCKGKSKDKILNVHHIESRKTGGNAPNNLITLCEPCHTGYHKGTVQLPKAMKRGMRFKDAAFMGIMRWAFYEALKQQYEPVGTPVHNTYGYITKHTRIAYNLPKEHYVDARCISGNPEASSNGEYYYQKKVRCHNRQIHKLTVLKGGIRKQNQATYLVKGYRLFDKVSYQGKGYFVFGRRQSGFFDIRTLSGEKVNKGSLSCKKLKFIATRTYYLTERRAV

SEQ ID NO: 12618 - protein, 465 aa, unidentified; identical to SEQ ID NO: 3603

SEQ ID NO: 12619 - protein, 426 aa, Scytonema sp.; identical to SEQ ID NO: 3553

SEQ ID NO: 12620 - protein, 447 aa, unidentified
RCRKLLEVRRAVFYRHYPAVIILKDVDARNIYKLPSYRIKIDPGAVHTGIAIVCNETNEVMYFLQIEHRGSEVKKALITRKQTRRNRRSRETRYRRCKFKNGGDFDSSRKNGWLPPSVKSTADNVIHWVEKLCRYINITECSFEAVRFDSQLMDNPEIGGEEYQQGTLSGYELREYLMEHFRHTCQYCGGESGDPVLEWEHKIPRSRGGSDSVKNASLACSCCNRDKGNRTLEEYLEDSKHISPKGKSEKALNEARISHISGILEKGTIYGSNRYSAWVNSTRRYIEKYLFLMFDDVECCSGGRTKYNRIKLKLPKDHHYDALCVGSVPKEGYTDRTNSYVLYVKATGRGTRFRGQCNSCGVITVKYKNNSKRKFGFQTGDIVQLNKPKGKDTGQYTGKVAVRSSGSFDLIRKGCKRITANYKYFRMMQYSDGYEYLGPLRPIPHSA

SEQ ID NO: 12621 - protein, 442 aa, Deinococcus sp.; identical to SEQ ID NO: 5259

SEQ ID NO: 12622 - protein, 447 aa, unidentified; identical to SEQ ID NO: 3915

SEQ ID NO: 12623 - protein, 420 aa, unidentified
MQYVYVLNKHGEPLMPCSPRKARLLLKQKKACVVKRTSFTIKLLYGSTGYKQPITLGVDAGSKHIGISAATEKYELYCEEATPRNDVVDLLSARRAFRRSRRNRKTRYRAPRFNNRVHSKHKGWLAPSVEVKIQEHITLIKRVCRILPVTFVRVETAEFDTQRLKAMLEGKPLPVGTDYQLGEMYDEYNVRQYVLKRDNYTCQCCGAHPTKTKAVKLHVHHIETRRTGGNAPNNLITLCTACHKALHAGKVTLDGKKRGRSLKDAAFMGVMRKTLMERLLKELKIPVQGTYGYITKYLREKHSIPKSHTNDARCISKNPLAIPCDTCYYTKAIRHHNRQLHKATILKGGIRKANQAPYTVKGYRLWDKVSYNGSECFITGRRTSGYFALKKLDGTVVSNSASYKKMRLLEVATNYITERR

SEQ ID NO: 12624 - protein, 557 aa, unidentified
MIYNLGSTRERGFMKQKKQKVMVYILNKKGKPLMPTTRCGHVRKLLDSKKAVVVNSNPFTIRLKYDTPNGVQDVFAGIDSGRENIGSGASNEDGDCLYLGELKTSNKSIKLKMTERAGFRKERRRHDRQNKQRKARKDHTEIQNGNIDICRTTISCKSVQISYPAAEESVTHKIIRGKEGKFANRHRDEGWITPSARQLVQMHMNDLRSICKILPISHVTLERVAFDFQKLENENIKAWEYDKGKLYGYDSPEEYIHDVQNGKCLVCGKPHIDYLHHIIPRSKGGSDNVSNIAGLCYDCHYGPMGVHNCQDTQDRLPELKNEANKQYKVSLLNSVMPVLIEEMDKFCEANSIIFSICEGHDTAKVRDMYDLQKDHCLDGFAISLVGRNVKSVDVMPDRIYQKQRYKKKSKNIIQKRNCREYYDDKKLVAVNRHKGTDQKADSLEEYMNTYAETHTADECKKHFDSLTVKPARRTYTFHKKGCICPFHIGDKVRYEKKNKIKGNTKVETFICESIHFYKDENKAKVEHNKTKSKRMKFCRVLEAGCTPYIDYRKLALM

SEQ ID NO: 12625 - protein, 557 aa, unidentified; identical to SEQ ID NO: 3108

SEQ ID NO: 12626 - protein, 426 aa, Nostoc sp.; identical to SEQ ID NO: 10840

SEQ ID NO: 12627 - protein, 413 aa, unidentified; identical to SEQ ID NO: 3023

SEQ ID NO: 12628 - protein, 406 aa, unidentified
MQYVYVLNKHGEPLMPCSPRKARLLLKQKKACVVKRTPFTIKLLHGSAGYKQPITLGVDAGSKHVGLSASTEKRELYSEEFTPRNDVVELLSTRRQNRRSRRYRKTRYRAPRFNNRVHSKHNGWLAPSVEVKIQEHITVIKRICRILPVTFVRVETAEFDTQRLKAMLEGKPLPVGTDYQLGEMYDEYNVRQYVLKRDNYTCQCCGAHPTKTKAVKLHVHHIETRRTGGNAPNNLITLCTACHKALHAGKVTLDGKKRGRSLKDAAFMGVMRKTLMERLLKELKIPVQGTYGYITKYLREKHSIPKSHTNDARCISKNPLAIPCDTCYYTKAIRHHNRQLHKATILKGGIRKANQAPYTVKGYRLWDKVSYNDSECFITGRRTSGYFALKKLDGTVVSNSASYKKM

SEQ ID NO: 12629 - protein, 424 aa, unidentified
MRVFVFNMRGRPLMPCSQRKARLLLKENKAMIYKYHPFTIQLTYTTGETKQDCHIGIDTGSKYIGAAVRSEDKVFWKGEIELRQDIRSNLDTKRIYRRSRRNRKTRYRKPRFLNRKRRDEWLPPSLQSRINHTFHWIDTLSSLVPNPILHIEVGKFDVAKMINPEIHGVDYQHGQTYGFFDERYFVFARDNYTCQCCGKSKNKILNTHHIIYRSNDGTNRVDNLITVCTDCHTSQNHRKGGIFYQWQEQHKKVKQYKEPPFMNTLRKRIFVAYPDAEITYGSETTPKRKAMKLDKTHYNDAIVISGINEIKENPEEWLLIKQFRKKKRSLHEATARKGRKKPNRNQTRNSKNTPYYKGFYLNDKVSVFGKSGYITGFTSNAAYIKDENNDYITLPNKTYKQVSINKMKLECHNNNWQYIIKNAV

SEQ ID NO: 12630 - protein, 458 aa, unidentified; identical to SEQ ID NO: 4474

SEQ ID NO: 12631 - protein, 512 aa, unidentified
MSTVYVLNKDGKPLMPTTRCGHVRHLLKEQKARVVTSKPFTIQLLYEADDVVQSLYLGIDPGRTNIGVAAVKADGTAVFTAHLETRNKEIPKLMKKRKESRRARRTNGRRCRRQRRAKANGTISKKCVKNDTAQNGSVSKRAKEIGVIKRHLPGCEKDVLCIGIKNKEAKFSNRTRPEGWLTPTANQLLQTHINLVKKIQKFLPISDVVLEINKFAFMRLDNPNVQKWQYQQGPLYQKANLEETVSEMQEHHCLFCKKKIDHYHHVVPQHKNGSNTIDNIIGLCTQHHDLVHKDATWQKRLAKKKTGLNKKYGALSVLNQIIPALTKELSSLFPKHFFVTNGKSTYDYRAAHGVSKDHWLDAYCIACSVLPNDTCDKTINSRVPYELKQFRRHDRRALNNENMSRVYTFNGKMVATNRHKATEQTTDSLEEFRQRQPNDVCNLKVKEHHPTYRNMNRNYPGSVFLVGNQVHVMQGIAGSKDGEATTYKDTNANSIAAGKCKFVAKNSGILFV

SEQ ID NO: 12632 - protein, 512 aa, unidentified
MPTVYVLNKDGKPLMPTTRCMHVRHLLKNGKARVVKSKPFTIQLLYETDDVVQPLYLGIDPGRTNIGVAVVKADGAAVFTAHLETRNKEVPKLMKKRKESRCARRTNGRRCRRQRRAKTNGTISKKCVKQTTAQNGSVSKRAKEIGVIKRHLPGCEKDVLCIGIKNKEAKFTNRARPEGWLTPTANQLLQTHINLVKKIQKFLPISDVVLEVNKFAFMQLDNPNIQKWQYQQGPLYQKGSLENAVSEMQEHHCLFCEKPIEHYHHVVPKSENGSNTIANIVGLCTEHHNLVHKDATWQKKLVKEKVGLVKKYSALSVLNQIIPALTKEMNSLFPKHFFVTNGKSTYDYRTAHGVSKDHWLDAYCIACSVLPNDVCDSNINSHVPYELKQFRRHDRRVLHKANMSRVYTLNGKTVATNRHKAIKQTTDSLEEFRQSHPGDVCKLKMKEHHPAYRNLNRNYPGSVFLVDGQVHVMQGVSGSHNGKADGYYNTNGNAYPYYKCKFVVKNEGIVFA

SEQ ID NO: 12633 - protein, 374 aa, unidentified
LSKVKTMRVFVFNMRGRPLMPCSQRKARLLLRENKAMIYKYHPFTIQLTYTTGETKQDCHIGIDTGSKYIGAAVRSEDKVFWKGEIELRQDIRSNLDTKRIYRRSRRNRKTRYRKPRFLNRKRRDEWLPPSLQSRINHTFHWIDTLSSLVPNPILHIEVGKFDVAKMINPEIHGVDYQHGQTYGFFDERYFVFARDNYTCQCCGKSKNKILNTHHIIYRSNGGTNRVDNLITVCTDCHTSQNHRKGGIFYQWQEQHKKVKQYKEPPFMNTLRKRIFVAYPDAEITYGSETTPKRKAMKLDKTHYNDAIVISGINEIKENPEEWLLIKQFRKKKRSLHEATARKGRKKPNRNQTRNSKNTPYYKGFYLNDKVSVF

SEQ ID NO: 12634 - protein, 493 aa, unidentified; identical to SEQ ID NO: 3154

SEQ ID NO: 12635 - protein, 415 aa, unidentified; identical to SEQ ID NO: 3370

SEQ ID NO: 12636 - protein, 427 aa, Fischerella sp.; identical to SEQ ID NO: 3477

SEQ ID NO: 12637 - protein, 446 aa, Pseudomonas sp.
VAVYVLDKTGTPLMPCSEKRARLLLERGRARIHRQVPFVIRLVDRRQADSALQSLTLKFDPGSKFTGIALVRQKGQRVSVLSLMELAHRGAAIRQAMQQRAAFRRRRRGQNLRHRTPRFDNRTRPEGWLPPSLRHRLDTTLGWVGRMRNWAPISDLAVERVKFDMQAIQNPEISGVKYQQGELAGYEVREYLLEKWGRCCAYCNAENTPLEIEHIVPRSAGGSDRVPNLTLACRPCNQRKGNQPVEVFLKARSELLARIKAKAKVPLRDAAAVNATRNALFRALLDTGLSVTTGTGAQTKFNRRCLGLPKTHALDAASVGEIRAIEHWQRPTLAIKATGRGEYQRTRLTAHGFPRGYLTRQKRHFGFQTGDQVRAEVPTGKKAGTHQGRVAVRKTGSFNIQTPDGVVQGIHHRHCTLIQRADGYAYSDTPTDSAQPQKEAARAGAR

SEQ ID NO: 12638 - protein, 446 aa, unidentified
VRVFVKNQRGEPLMPCSPRKSRMLLKEKKARIIQYRPFTIQLTIATGETVQENNLGVDVGSKHVGVAVTSGEKVLTKGEIELRQDIKSLLETRKTYRKSRRNRKTRYRRCKFKYKTKRIYDLKKKKWMKKKLTFESPRLKGWLPPSIQSRITNTFFWIDRYQSLLPNCRLHIEVGKFDVQKMMNPDIKGKDYQEGEAFGYYDARYFVLARDQYTCQVCKKKNKIFNTHHVIYRSHGGSNRADNLITVCTDCHTPENHQKGEIFWEWMIKKKKTKTYKEPPFMNSLRIRISKRYPDAHITYGSVTTPHRKVLGLDKTHYNDAIAMTGIETIKLNPNERFLIKQFRKKKRSLHEATARKGRKAKNITQKRNEKNTKESNGFHLNDEVRTACGKRGFISGFTGKTACYVKSIDGEYIVIKGKTHKQQPIKSLTFIRHNGNWQYQIKENT

SEQ ID NO: 12639 - protein, 472 aa, unidentified
FRQIPFTIQLTYENKPVLQPITIAEDPGRSNIGMAVVSLSGELLSAAVVQTRNKEIVKLMDKRKQHRRASRNGERKARQRLAKKCHTMIKAGFLMRKLPMYGKDKRVKCLVIKNTESRFCNRKREDGWLTPSAEHLVQTHINLIHKMQKFLPITDVAIEINRFAFLSLEDPSISGVDFQKGPLKGYDDLNAAVEDLQDGHCLMCNSPIEHRHHIVPRSMQGSNTIGNIAGLCCKCHEKVHKDSAFEDSLKKKKAGLNKRYAAVSVLNQAIPFICKRLEQEFGKEHVHYCSGRDSSMVRRSLGYHKTKEEQLHEVDAWCIAVLSLQHVPEKAPEFDHVHEILQFRRQDRSRIKAQTSRAYYHEGKKIAKNRKKAEGQREDSLQEWRKRQVERYGEEQTRKMISQLKVKKSIRRYNRLDRLMPGAVFYYQGVRYVMRGQHCEGTYLQAVGMGSKDFPAKKCKIVAQNEGLVFVS

SEQ ID NO: 12640 - protein, 512 aa, unidentified; identical to SEQ ID NO: 10560

SEQ ID NO: 12641 - protein, 442 aa, unidentified; identical to SEQ ID NO: 4533

SEQ ID NO: 12642 - protein, 426 aa, Parasutterella sp.; identical to SEQ ID NO: 3045

SEQ ID NO: 12643 - protein, 419 aa, Anoxybacillus sp.; identical to SEQ ID NO: 5328

SEQ ID NO: 12644 - protein, 465 aa, unidentified; identical to SEQ ID NO: 12189

SEQ ID NO: 12645 - protein, 431 aa, Escherichia sp.; identical to SEQ ID NO: 3801

SEQ ID NO: 12646 - protein, 410 aa, unidentified
YSFVLDANGKPLAPTKEQKAWFFIRKKRATLVSKYPMVIQLKKEIPEKEICQDEIRCGIDDGGLHVGIALVQKCKTKNKVVFKGTIEQRNDVKHLMEVRRGYRRYHRYHKRYRQARFDNRKSSKREGRIAPSILQKRQATIRVIHWLNKWINITNYWLEDVSVDIRALTDGYQSYRWQYQKSNRLDENIRKAAILRDDGKCMECGKSNCRLEVHHIKPRRRNGSNTLDNLITLCESCHQKTEGQEELYMDRYFSLLKSSDNKNLNDAQHVMIGKMWLRKQLSGLGVLYLTSGGDTANKRIDWNIEKSHTNDAVCITDLQPDTCDIKEWAIKPMRRQSKAKTDHVLGIHHRDLVEYTFKNGETHRGYVTALYPEQKAINFQSPTKHCKKVNARKCKLLWKYSKIYWFENAS

SEQ ID NO: 12647 - protein, 413 aa, unidentified; identical to SEQ ID NO: 3290

SEQ ID NO: 12648 - protein, 428 aa, unidentified
LKVFVLNMRGRPLMPCSPARARHLLKAGKAVVRRRTPFTIQLRIATGETKQSVTLGVDAGAKHVGLSAATEKEEVFASEVELRQDITGLLAARLSLRRDRRHRKTRYRAPRFLNRVRSKHKGWLAPSVENRIQAHMSRIDAVCRLLPVTKILIETASFDIQKIKDPSVEGTDYQQGDQLGFWNVREYVLFRDGHVCQHCHGHAKDKILNVHHLESRQTGGDAPNNLITLCERCHKACHAGKIKLKVKRGQSFREEAFIGIMRWTLLDRVRKAHPGLPVENTCGYLTKNTRITLGLPKAHCVDAYCIAGNLKAVRRGVHLYQRQVRKHNRQIHKCTVLSKTLKDGTKIGYRKLNQTPHLVKNFRLFDKVRCLGQTGFIFGRRSSGYFDVRRLDGVKLSSGISYRKLTLLEKRSTYLTELRKEDGASSPV

SEQ ID NO: 12649 - protein, 424 aa, Planktothrix sp.
MSNLVFVLDTNKKPLTPCKPSMAHKLLTAGKAAVFRRYPFTIILKKVVIATPQLIILKLDPGSQTTGIALVQDEQVIFGAELTHRGQTIKASLESRRLLRRSRRNRHTRYRQARFLNRTRQEGWLAPCLQHRVETTLTWVNKLLRLAPIGSIVQELVRFDLQQLDNPEISGIEYQQGELKGYEIREYLLNKWQRKCAYCGIENVRLQIEHIHPKSQGGSNRISNLCLACEKCNTQKGTQSIELFLTHKPDILKKILSQAKHPLKDATAVNSTRWALFNRLKETGLPISTGSGGLTKFNRTRLNLPKTHWLDAACVGEVNSLQVLTSQPLLIKATGHGSRQMCRTDKFGFPSRYVPRLKFVKGFQTGDIVKAIVSSGHKVGTYIGRVAVRTTGSFNISLKKTLVQGISHKYCSLIHRKDGYLYAT

SEQ ID NO: 12650 - protein, 515 aa, unidentified; identical to SEQ ID NO: 5111

SEQ ID NO: 12651 - protein, 422 aa, unidentified; identical to SEQ ID NO: 5457

SEQ ID NO: 12652 - protein, 365 aa, unidentified
LGVDAGSKHVGLSASTEKRELYSEEFTPRNDVVELLSTRRQNRRSRRNRKTRYRAPRFNNRVHSKHKGWLAPSVEVKIQEHITVIKRICRILPITLVRVETAEFDTQRLKAMLAGKPLPVGTDYQLGEMYDEYNVRQYVLKRDNYTCQCCGAHTTAKKTVKLHVHHLESRKVGGNAPSNLITLCTTCHNNLHKGKITLDGKKRGKTLRDAAFMGIMRNTLLTRLRNELNIPVQNTYGYITKLLREQNDIKKSHVNDARCISKHPLAKPCSVCYRTKAIRHHNRQIHKAKILKGGIRKANQAPYIVKGFRLWDKVLYNEQECFISGRRSSGYFALRKFDGTTITNSISFKKLRLLEPATNYLIERK

SEQ ID NO: 12653 - protein, 442 aa, unidentified; identical to SEQ ID NO: 4418

SEQ ID NO: 12654 - protein, 465 aa, unidentified
MSTCVCVLSNSGERLMPTIRLGKVRRLLKDGKAKIVKHHPFTIQLLYDSKTNTQPIEICEDVGYNYIGISVKSQSHEYVSAQYDTLQDEKACHDSCRKLRRTRRNRLRYRKPRFDNRKRGEGWLAPSLRHKKELNVNVVKMYCAVMPITHATVEVGSFDTMLVKAIQEGKAIPEGADYQKGPRYNLATLREAVFYRDNYTCQVCGRKVADGAILHMHHMFYWKGRHGDSLNELLTVCEKCHTPANHQKGGKLYGFGENVKFADLSGAAFMNTVRWQIVNELYAAFGKDFVTVTYGAMTKEKRIALRLEKSHNNDAYAMGEFHPNCRCTFEHYEKVRRNNRILEKFYDSRYIDIRTGEIATGKELFNGRINRNHKKDSENLHRYRGKRTYAGHRALLRKKVNLNPGDLVSLNGEVLVVHSTHTNKKGAVNVEFKTPGKSGQKSASLKKLKIVKAADSMHSAWEKIS

SEQ ID NO: 12655 - protein, 443 aa, unidentified
LTKDENRPSGRTTGLLAEQAEPAGIRKGDTLKVFVLNMRGKPLMPCSPAKARHMLKAGKAVVVRRTPFTIKLTIATGETKQDVTLGVDAGARHVGISATTEKEEVFASEVALRQDITGLLADRLAFRRARRNRKTRYRSPRFNNRVRSKHKGWLASSVENRIQAHMSRIDAVCRLLPVTKIVIEAASFDVQKIKNPTIEGTDYQQGDQLGFWNVREYVLFRDGHICQHCRGRSKDPILNVHHLESRKTGGDAPNNLITLCETCHKAYHAGKIKLKVKRGQSFRAEAFMGIMRWTLLDRVRKTHPELPVENTYGYLTKHKRIALGLPKTHCADAFCIAGNLKALRRGDFLFQQQTRKHNRQIHRCSILKGGVRKLNQAPFLVKGFRLFDKVRIGGQIGFVFGRRVRGIFNIRRLDKTVIGTDINCKKLSLLETRKTFLTELRKE

SEQ ID NO: 12656 - protein, 457 aa, unidentified
MDAVAVISASGKPLMPTNPVRARKLIKKGKAVIYKYRPLFTIRLTERTDGDIQTIEYCCDTGYQHIGLSIKSRKHEYVNEQRDLLPNETERHNGSRKYRKARRRRKLRHRACRRDNRHDNQICKDGYAPSIRNKRDQHISLYRSYTEILPVGRAVFEMGQFDTQVLKAIEKGEPLPQGKDYQHGERYGYATLREAVFARDSYTCICCGKNAFKDKRILCIHHLGFRIGDRTNRLANLATVCTKCHTPKNHQPKGKLYNLKPELKDFKGATFMTMVRWDMLDKLKAVSKGIRVDVTYGAVTKEARRDLKIKKSHANDAYCMGSFHPSHRTDLKRYEKCRRNNRVLSKFYDATYIDIRDGKKKKANALGCNRTKRRESRRSEKNERIYRGEKVSKGRIVLRTKRTVIRPGDIVYTGKKKYIVASSKNLGKQLKLADGSLLTTSKVTKIIHCGGWKTVTL

SEQ ID NO: 12657 - protein, 419 aa, Anaerostipes sp.
  VARIANT 419: note = X can be any naturally occurring amino acid
MVYVISQDGKPLMPCSDPIARLLLKQGKAKVKKREPFTIKLTYETTNYTQGLTLGVDTGSGTIGTAVSKDNGDIVYMSEVVVRNDITDKMTQRAKYRRNRRNRKTRYRKARWLNRASSIKKDRFSPTMQSKLHSHVREIEYIQSILPVTEMVFETGQFDMQLMKNPSLANPKVRPWGYQKGANYGFENTKAMVLNRDNYTCQCCKGKHKDSKLEVHHIVFRSQGGSDEESNLLTLCHTCHKDLHSGKINPKLSGKLKGNLKYATQMNSIRKQLFRFYPNAIETFGYVTKANRLHLGVDKEHYYDACTIATQGNAFNVKSNLYKKKCVSDGDFQKTKGIRSEQPIVTDKICGFRKFDKVRYFGNDYFIKGRMSTGYAILMDIDGNKIDFSTMPRGYKTPKLSNCKRITARSTVMTQVKVX

SEQ ID NO: 12658 - protein, 420 aa, Pseudoalteromonas sp.
MLAYILNKHGKPLMPCKAAKARKLLKAGEAKVVKRTPFTIKLLHGSSGHTQHVVAGMDTGSKHVGCAAIANGKVIYQSEVALRTDVSKKMQQRAMYRRTRRNRKLRYRPARWLNRASMRKEGRLAPSLKSKLDSHLREKKQVEAILPISHWKVETASFDIHKITNPIVTGVGYQQGALLGYYNVKAYVLQRDNYKCQSGRKTKHNAKLHVHHKVFRSQGGTDAPSNLIALCETCHNDLHAGKFELKVKRSKTKHATEIGILKAQLKQCWDFEETFGYVTKFKREQVLGLPKTHYYDAVSICCEDGELVQQGKHVLRKRHVASGDYQQTKGIRSEKRIPVGKLFGLKKHDFVQTPQGTGFVKGKRSSGYFALETILGDKVHASANIKKNTVRISARTTTLTQLMEAAIPLGTKVPSILAVN

SEQ ID NO: 12659 - protein, 429 aa, unidentified; identical to SEQ ID NO: 6772

SEQ ID NO: 12660 - protein, 340 aa, Anoxybacillus sp.; identical to SEQ ID NO: 7336

SEQ ID NO: 12661 - protein, 415 aa, unidentified; identical to SEQ ID NO: 6534

SEQ ID NO: 12662 - protein, 452 aa, Lactobacillus sp.; identical to SEQ ID NO: 3322

SEQ ID NO: 12663 - protein, 419 aa, unidentified
MIYIRSKDGKALMPSERGGRIGYFLRHGKAHVVSRVPFTVQLDYESTTYTQEVSLGVDAGSKHIGVSAGSEKKELLAAQVELRNDVVNLLSIRREQRRTRRNRKTRYRKIRFDNRKKKDDWLAPSVEQKVESHLKVIRLAHKLLPITKTTIEVAQFDVQKIKSPDIKGEEYQKGEQMGFWNVREYVFARDGHRCVHCKGKSKDPILNVHHLESRKTGGNSPSNLVTLCETCHKAYHRGEFTLKIKRGSSLRDAAVMNIMRWAVYERARLEFGKVHLTYGYVTKLTRIENGITKTHAADAFCIAKNVHAKRLRTFFQCRCVPRHTRALHVANPKRGGIRRSTIASHKIGKSHFQRFDMVRWKNKECFIFGSTNGRPVLRDIEGIKMHENVSVNIMTIKFLKRLRNNILVEEKDFRKLSII

SEQ ID NO: 12664 - protein, 213 aa, unidentified
MVYVLANDGQPLMPTERHGKVCRMLKSGMAKVVKKCPFTIQLQYESERNVQPVSLGVDAGSKHIGISATTKTKVLYESDVELRDDIVKLLATRRQLRRSRRSRKTRYRPVRFDNRKRKEGWLAPSIRQKIGSHLTVVANACKILPINQIIVETASFDIQKIKDPEIQGIEYQQGEQMDFWNIREYVLFRDGHTCQCCKGKSKDKVLNVHHIES

SEQ ID NO: 12665 - protein, 380 aa, Arthrospira sp.; identical to SEQ ID NO: 3196

SEQ ID NO: 12666 - protein, 424 aa, unidentified; identical to SEQ ID NO: 3351

SEQ ID NO: 12667 - protein, 420 aa, unidentified
MQYVYVLSKHGEPMMPCSPGKARLLLKQQKACVVRRTPFTIKLLYGSAGYKQPITLGVDAGSKHVGLSASTEKRELYREEFTPRNDVVELLSTRRQNRRSRRNRKTRYRAPRFDNRVHSKHKGWLAPSVEVKIQEHITIIKRICKILPISLVRVETAEFDTQRLKAMLAGKPLPVGTDYQLGEMYDEYNVRQYVLKRDNYTCQCCGAHTTAKKLVKLHVHHLESRKTGGNAPSNLVTLCTTCHKNLHKGKVTLDGKERGKPLRDAAFMGIMRKTLMARLKKELPIPVQGTYGYITKMRREQNDIKKSHTNDARCISKHPLAEPCSVCYRTKAIRHHNRQTHKANFSKKGIRKRSQMPYLVEGYRLWDKVLYKEQKCFVSGRRSSGSFTLKKLDGTSVSKGVTFKKLRLLEPATNYLIERM

SEQ ID NO: 12668 - protein, 423 aa, unidentified; identical to SEQ ID NO: 12336

SEQ ID NO: 12669 - protein, 456 aa, unidentified; identical to SEQ ID NO: 6026

SEQ ID NO: 12670 - protein, 442 aa, unidentified; identical to SEQ ID NO: 8269

SEQ ID NO: 12671 - protein, 461 aa, Parasutterella sp.; identical to SEQ ID NO: 3646

SEQ ID NO: 12672 - protein, 534 aa, Acrocarpospora sp.; identical to SEQ ID NO: 12397

SEQ ID NO: 12673 - protein, 442 aa, unidentified
MSTSVFVLDKKHRPLMPCRPARARRLLRAGRARVVKRFPFVIRLVDRTVEQSEVQPVLIKLDPGSRETGAAVVRDDEKKRHHALAFFVIKHRGGAIRDALKARSAFRRRRRSQNLRCRSPRFLNRVKPKGWLPPSLRHRVETTLSFVRRMCRYLPVSGIATELVKFDSQKLQNPEVSGVKYQQGTLFEYEVREYLLEKFGRKCVYCGAEGVPLNIDHVVPRAKGGSNRVSNLVLACVSCNQKKGARSLEDFLKGKPEVLARVRRELKTPLRDAAAVNATRWVLFNELKATGLPVETGSGALTKLNRHAFGVEKEHWLDALCVGRLNGAVTRKGLNVLEIRCMGRGSRQRTRLTKYGFPRGYLMRQKCVHGFATGDMVEANVPKGKKAGLWRGRVAVRVSGSFNIQTPKGVIQGVGWKHCRLISHNDGYGYAWLGHAPHSSPA

SEQ ID NO: 12674 - protein, 450 aa, unidentified
MVYVLNLEGEPLMPTNNAKARKLLKNQKAKVVKVKPFVIQLLYRTTEYKQPIILGIDSGYLNIGFSAITNKKELLVGEVKMLKGMKDRLLERSQYRKIRRQRLRYRKPRFNNRKRNDGWLAPSIQHKLDTHIKIINEINRMLPISNIIVEVANFDIQKIKNPNIRSEEYQQGEQMGFWNLREYILYRDGHKCQNPNCKNKSKNQILEIHHIKYKSEGGTDVPSNLITLCNKCHTSPNHKKGKFLYDWMMKKKKVKGFKDATFMSMVRWKIINELKTKYQSVNFTYGYMTKNHRIRHAIEKTHYNDAFAIAKGTNQIRCKDIWTVEQSRLNNRSLEKFYDAKYMDVRANKKVSAGELNNGRRTRNKNLNSENLKIYRGKKISKGRRSIRVGKSKYQPNDLIKYKGVVYTVKGSQNKGSNIALKEIKKVPNVKYIIPYIYKKGFNWKNELYK

SEQ ID NO: 12675 - protein, 455 aa, unidentified
VSFTVRYVLAYRFKHIKKERKVPCMVYVLDINGQPLMPTTRHGKVRRLLNSHLAKVVKRCPFTIQLLYQSTKEIQPVSLGVDAGSKHIGMAATTEKKVVYQEELSPRNDVVKLLSARRTLRRTRRNRKTRYRKPRFNNRVHSKHKGWLAPSVEVKIQEHITAIKRICQILPISEIHVEISEFDLQRLKAMEEGRTLPVGTDYQLGEQYDFYNTRQYVLHRDGYTCQCCGTHDNNIKLHVHHIESRQTGGNAPSNLITLCEHCHKALHKGKFELPKGKKRGKTYRDATFMGIMRKTLLERLKKEIDVPVAGTYGYITKYWRERAGLEKSHINDAICISKYPYAKPLDTYYLTKVVRNHNRQIHKSNFSKGGIRKRNQAPYLIKGFRLFDKVLYQGKEYFIFGRRATGYFDIRTLDGTKVNKDSISYKKLRIQDTAKAYLKEARAIPHMNKFTCVLA

SEQ ID NO: 12676 - protein, 459 aa, unidentified
  REGION 1..459: note = Ga0315284_10107383
MSKKTLQVKLKNTLRDAPLVPDPVSSALNKEETPSVQDTVRTCNNPEVDLLQHAGGQGSRVTDNVRVFVFNMRKEPLMPVSSRKARLLLKTGRAVVVRRSPFTIQLTYASGEDKQEISCGVDSGYAHIGFSCVTKKQELIRGEVDVDNWTSKHLAERKMYRKQKRSKLRYRELRFLNRKRSDGWLPPSVNRRYQTHIHLIALLKQLLPISDIIVETASFDIQKLNNPEISGKEYHQGNLYEQSNLRSFILAREKNTCQLCKEGYSKTDHWHKHHIIPRSQGGTDKPDNIALLHEKCHDKLHAKGLYKQLEKNKQYKEATFMNIVKGKFKEDLNCKTVFGYETFIKRNELQLSKSHSNDAFVIAGGSIQNRCFEYLVKQKRRNNRCLQLNRKGFKPSIRRQRYKLRPDDLVRIENNKIYEVKSTHSYGKRVKLKGRKDIAIKKISWFFHSKSLIFKRILK

SEQ ID NO: 12677 - protein, 408 aa, unidentified; identical to SEQ ID NO: 6795

SEQ ID NO: 12678 - protein, 442 aa, unidentified
MSTSVFVLDKKHRPLMPCRPARARRLLRAGRARVVKRFPFVIRLVDRTVEQSEVQPVLIKLDPGSRETGAAVVRDDEKKRHHALAFFVIKHRGGAIRDALKARSAFRRRRRSQNFRCRSPRFLNRVKPKGWLPPSLRHRVETTLSFVRRMCRYLPVSGIATELVKFDSQKLQTPEVSGIEYQQGTLFEYEVREYLLEKFGRKCVYCGAEGVPLNIDHVVPRAKGGSNRVSNLVLACVSCNQKKGARSLEDFLKGKPEVLARVRRELKTPLRDAAAVNATRWVLFNELKATGLPVETGSGALTKFNRHAFGVEKEHWLDALCVGRLNGAVTRKGLNVLEIRCMGRGSRQRTRLTKYGFPRGYLMRQKCVHGFATGDMVEANVPKGKKAGLWRGRVAVRVSGSFNIQTPKGVIQGVGWKHCRLISHNDGYGYAWLGHAPHSSPA

SEQ ID NO: 12679 - protein, 465 aa, unidentified; identical to SEQ ID NO: 3909

SEQ ID NO: 12680 - protein, 526 aa, unidentified
LLRQERLIVKEVANMSTVYVLNKDGKPLMPTTRGGHVRHLLKEQKARVVRAKPFTIQLLYETNDVVQPLYLGIDPGRTNIGVAVVKANGTAVFTAHLETRNKEIPKLMQDRKKARRARRTNGRRCRRQRRAKANGTISKKCVKQTTAQNGSVSKRAKDIGVIKRRLPGCEKDVLCIGIKNKETKFTNRTRPEGWLTPTANQLLQTHINLVKKIQKFLPISDVVLEVNKFAFMRLNNPNIQKWQYQQGPLYKKESLESAVSEIQEHHCLFCKKPIDHYHHVVPQHKNGSNTIGNIVGLCAKHHDLVHKDSAWEKKLAKKSTGLYKKYGALGVLNQIIPTLTNELSSLFPKHSFVTNGKSTYDYRAAHGVSKDHWLDAYCIACSVLPSNVCDSNINNHMPYVLKQFRRHDRRVLNNENMNRVYTLNNKAVAINRHKAKDQKTVSLEEFRKEHPDDVCKLKVKEHHPTYRNMNRNFPGSVFLVGKQIHVMQGIASSKDGKATKYNDTSATAIAAGKCKFVAKNTGILFV

SEQ ID NO: 12681 - protein, 419 aa, Moorena sp.; identical to SEQ ID NO: 8685

SEQ ID NO: 12682 - protein, 451 aa, Geobacillus sp.; identical to SEQ ID NO: 4536

SEQ ID NO: 12683 - protein, 426 aa, unidentified
MVYVQNHLGQPLMPTQDHRKVRLLLKAGAAVVVRRTPFTIRLTTRTKTYVQPVILGVDAGSKTVGMSAATHEEEVFAAELTPRNDVVKNLADRREFRLSRRGRTTRYRQPRFNNRVHSKHKGWLAPSVEVKIQEHITSIKRACELLPIGKVVVETAEFDLQLLKSIADGMPVPQGENYQKGEMYGFYNVRQYVFFRDGYTCQCCGAHGKGIKFHTHHMESRKTGGNAPDDLVTVCDKCHKAFHAGLITDAKLKKRRRKSTRDAAFMGIMRKTLLQRLRAELPIPVVETRGYITKATRERLLKLPKSHTNDALAIAMGRHGFGIEEVTYMPQSDRIYQIKPVRHHNRQLHKAIPKKGGRRQRSQGPKYVQGFRRFDKVLYRGQECFIWGLRTRGYFQLKLLNGTKVHESAKASELILLEHSSGYLIA

SEQ ID NO: 12684 - protein, 474 aa, Halomonas sp.; identical to SEQ ID NO: 11386

SEQ ID NO: 12685 - protein, 419 aa, unidentified; identical to SEQ ID NO: 6355

SEQ ID NO: 12686 - protein, 455 aa, unidentified
VWLSKPLATLGKDFDSSFEESGFFLAANLLGKEHDIMHVYVINKHGEPLMPCSSRKARTLLDNKKAFVVKRTPFTIKLQHGSAGYKQPITLGVDAGSRHVGLSASTETHELYREEFTPRNDVVDLLSTRREFRRARRNRKTRYRAPRFDNRVHSKHKGWLAPSVEVKIQEHITVIKHVCQIMPISLVRVETAEFDTQRLKAMLEGKPLPVGTDYQLGEMYDEYNVRQYVLKRDNYTCQCCGAHATKTKQVKLHVHHLESRKTGGNAPNNLITLCPTCHKAIHEGKKTLDTKKRGKPLRDAAFMGIMRKTLLMRLRKKLSIPVQQTYGYITKMLREKNNLPKSHMNDALCIAKHPKAAPCENCYRSKAVRHHNRQIHKATILKGGIRKNNQAPYIAKGFRLWDKVLYNKQECFISGRRATGYFALRKLDGTIIVNSASYKKLRLFETAKNYLRERM

SEQ ID NO: 12687 - protein, 460 aa, unidentified; identical to SEQ ID NO: 7594

SEQ ID NO: 12688 - protein, 414 aa, unidentified
MPCSPAKARLLLKEKKAIVKRRTPFTIQLTIATGESKQPVTLGVDAGYKHVGLSASTEKAELYASEVELRQDVSDLLSARRALRQSRRNRKTRYRAPRFNNRLRTKRKGWLAPSVENRINAHLSRIEAVLRLLPVTKITVETASFDMQLLKNPDIAGKEYQEGEQLGFWNVREYVLFRDRHVCQHCYGRSKDPVLNVHHLESRRTGGDSPDNLITLCETCHKALHRGDITLKAKRGKSFRAEAFMGIMRWEVHNRLRALHPGIEVSNTYGYRTKHARIANGIAKSHCADAFCIAGNLGAERLCEFFFQKQTRRNNRQIHKLSILKGGIRKRNQAPFEVKGFRLFDKVACQGEEGFIFGRRSSGFFDVRKLDGTRISAGISCKKLHLLEKRRTYLTEIRKEEALPPLPEGRGLRA

SEQ ID NO: 12689 - protein, 413 aa, unidentified; identical to SEQ ID NO: 3295

SEQ ID NO: 12690 - protein, 462 aa, unidentified
MSVLVIGQNGRALMPTTTRKARILLKENKASVVCRHPFTIHLRYKTGCATQEGSIGIDTGSQHIGIGVTCGNKVILKDEHELRSSMEKRSLMETRATMWRGRRYRKVRYRKPKWRHHTKRMYFEKANRKGQHWRKVKTTTQSPRPESWLPPSLQSKCDHHFRIIDRYLKCLPDSITKNLVIEVGRFDMARMNDPTIHGEMYQRGPMYDTENLRAYIFARDGYKCACCKAKAGSIRKKDGTSVKLIAHHIQFRSRGATDNPKYMISVCDHCHTTKAHQPGGILYSWMEKNKKVTRGLRDATFMNILRRRLFDRFPQAAFTYGNITAVDRKRLLLPKSHANDAVAISLFGKDVSVINATCQTLRYKQVRKSKRSLHEATPRKGRKEPNTKAIRNKKNTTHVNGFKLWDSVLVNGQKLFICGFTGSSAYLVDQDGHYVSPPGKTYKQWTLSKLSRSHPNGNWLMA

SEQ ID NO: 12691 - protein, 553 aa, Streptomyces sp.; identical to SEQ ID NO: 4116

SEQ ID NO: 12692 - protein, 374 aa, unidentified
VSEMTSYAFVLDANGKQLAPAKEQKAWFLIRKKRAALVSKYPMVIQLKKEIPENEICKDEIRCGIDDGGLHVGIALVQKCKTKNKVVFKGTIEQRNDVKHLMEVRRSYRHYHRYHKRYRPARFDNRKSSKRKKRIAPSILQKRQAIIRVIHWLNKWINITNYWLEDVSIDIRALTDGYKPYRWQYQKSNRLDENIRKAAILRDGGKCMECGKLNCRLEVHHIKPRRRNGSDTLDNLITLCKSCHQKTEGQEELYMDRYFSLLKSSDHKNLNYAQHVMIGKEWLRKQLSSLGVLYLTNGGDTANKRIDWNIEKSHANDAVCITNLQPDTYDMKEWTVKPMRRQSKAKTDNVVGIKHRAINEQIQNIAQKKDTLCR

SEQ ID NO: 12693 - protein, 414 aa, unidentified
MPCSPAKARLLLKEKKAIVKRRTPFTIQLTIATGETKQPVSLGVDAGYKHVGLSASTEKAELYASEVELRQGITDLLSARRALRQSRRNRKTRYRAPRFDNRISTKRKGWLAPSVENRIDAHLSRIEAVLRLLPVTKITVETASFDMQLLKNPDIAEKEYQEGEQLGFWNVREYVLFRDGHVCQHCHGRSKDPVLNVHHLESRRTGGDSPGNLITLCETCHKALHHGEITLKTKRGQSFRAEAFMGIMRWEVLNRLKVSHPELEVNNTYGYLTKHARIKSGITKSHCSDAFCIAGNLGAKRLGEFLFQKQTRRNNRQIHKLSILKGGIRKRNQAPFEINGFRLFDKVACKGEEGFIFGRRSSGSFDVRKLDGTRISAGISCKKLHLLEKRRTYLTEIRKEEALLALPEGRDLRA

SEQ ID NO: 12694 - protein, 472 aa, unidentified; identical to SEQ ID NO: 3077

SEQ ID NO: 12695 - protein, 423 aa, Arthrospira sp.; identical to SEQ ID NO: 3202

SEQ ID NO: 12696 - protein, 442 aa, unidentified; identical to SEQ ID NO: 3161

SEQ ID NO: 12697 - protein, 447 aa, unidentified
MNYLDFVLIVDKNKVPCIPIKESTAAYLLRHNKAKIINHDPTVIQRFDEYSADYEIRNIFELKIDSGYLNIGFSVSDSEHEYLAGQVNLLQGMSERLTVRASNRRFKRARLRYRKNKNVDYKIVHNPTYKNGNQDGWIAPSIQHKIDSHIRLIKKIAQWVPIDRIIIEVAKFDIQKMIADLDGRIISGKDYQNGEMKGYENVTAYVRDRDKYTCQMCLSSGKVKNKNNDTIEVHHIIPRAAGGTNRPSNLICLCHHHHRLVHSNNNNNKYFKELQNKKMPDTYKDSTFMNIVRYKIYNALCADFKDVELAYGYETKINRRLIGLPKFHYTDAVCLKEWKNISLTKFIYIVDQKRCNDRKMESFFDAKYIDIRDGKTKSGTELCYTRLDNASSWRTTCKNEVDNLRQYREKKITKGRKQRECHFYCLKPGDLIFINLGNHKGNLAEVK

SEQ ID NO: 12698 - protein, 420 aa, unidentified
MQYAYVLNKRGEPLMPCSPGKARILLKQQKACVVKRTPFTIKLLHGSAGYKQPITLGVDAGSKRVGLSASTEKRELYSEEFTPRNDVVELLSTRRQNRRSRRNRKTRYRAPRFNNRVHSKHKGWLAPSVEVKIQEHITVIKRICRILPITLVRVETAEFDTQRLKAMLAGKPLPVGTDYQLGEMYDEYNVRQYVLKRDNYTCQCCGAHTTAKKTVKLHVHHLESRKVGGNAPSNLITLCTTCHNNLHKGKITLDGKKRGKTLRDAAFMGIMRNTLLTRLRNELNIPVQNTYGYITKLLREQNDIKKSHVNDARCISKHPLAKPCSVCYRTKAIRHHNRQIHKAKILKGGIRKANQAPYIVKGFRLWDKVLYNEQECFISGRRSSGYFALRKFDGTTITNSISFKKLRLLEPATNYLIERK

SEQ ID NO: 12699 - protein, 512 aa, unidentified; identical to SEQ ID NO: 5824

SEQ ID NO: 12700 - protein, 443 aa, Anoxybacillus sp.; identical to SEQ ID NO: 10875

SEQ ID NO: 12701 - protein, 476 aa, unidentified
VVSKNPFTIRLAYDTPDVTQSLILGIDPGRTNIGLTVIRETGESVYTAHLETRNKKIPKLMKARKQFRTERRTLKRRRKRQCRAIASNTVSPKCVKTSNSQSSNESKKGMKQGVLERLLPGCDTPILCIGIKNKEARFNNRIRKTGWLTPTANHLLQTHLNAMNKICKILPVTKTVLEINKFAFMQLDNPCVKKWQYQRGQLFGYGSVEEVVYEQQNSHCLFCDKAIDHYHHVVPRSKRGSETLANRVGLCAEHHTLVHNDEKWNTKLIAKKQGMNKQYHALSVLNQIIPALSNALVKLFPDRFYATSGKSTYTFREAYGINKDHHIDAYCIAASILPDVNVKLSQTVYEIKQFRRHDRQVCHKANLNRRYALNGKVVATNRHKAMNQKTDSLEEYTTNGGKTENLTVIEHKAQYKRLDRIMPGAIFELDNKRKVMFKTDGFHNNQSDYVCFIDGSKIGYSKCNKPVTLNSGLVYC

SEQ ID NO: 12702 - protein, 440 aa, Clostridium sp.; identical to SEQ ID NO: 10253

SEQ ID NO: 12703 - protein, 454 aa, unidentified
MRINSVSPARQTLKTLPRQTSHESRRDATMSNYVFVIDTNHRQLNPCTPGVARSLLNATKAAVYRRYPFTIILKKEVTGPVEPCQLKIDPGSRATGLAILQGNRVLWGAELTHRGQSIKNSLDSRRSLRRGRRGRKTRYRQPRFLNRTRPKGWLAPSLMHRVLTTMTWVNRLIKLCPIQSITQELVRFDTQVIQNPEISGTQYQQGTLYQYETREYLLEKWGRQCAYCGQEDTPLEVEHIVSRSKGGSNRVSNLTIACVSCNQKKSNRSIEDFLSGKPDLLKRIKAQAKAPLKDAAAVNATRWKLFKALKEMGLPVSVGTGGQTKFNRKQQGLPKAHWIDAAATGKDIPELEFCTCQPLLIQCSGHGTRQMCGTDKYGFPIRHRSKKKIHYGFQTGDIVKAFVTQGKKIGSYMGRVLCRKSGNFDISTKDGRVAGINHKHCTHIHKKDGYNYAF

SEQ ID NO: 12704 - protein, 319 aa, unidentified
APRFDNRIRTKRKGWLAPSVENRINAHLSRIGAILRLLPVTKITVETASFDTQLLKNPDISGKEYQEGEQLGFWNVREYVLFRDGHACQHCHGRSKDPVLNVHHLESRRTGGDSPGNLLTLCETCHKALHRREIKLKTKRGQSFRAEAFMGIMRWEVLNRLKASHPELEVHNTYGYRTKHTRIVNGIDKSHCADAFCIGGNLGAKRLGEFFFQKQTRRNNRQIHKLSILKHGLRKRNQAPFEVKGFRLFDKVVCQGEEGFIFGRRSSGSFDVRKLDGTRISAGISYKKLRLLEKRRTYLKEIRKEEALPPLPEGRSLRA

SEQ ID NO: 12705 - protein, 419 aa, unidentified
MPCSEKRARLLLARGRARVHRVVPFVIRLTDRLARNSRFQPLRLKLDPGSKTTGMALVLEKADAGVGVLNLFELVHRGRQISEALMQRSRFRRRRRGANLRYRAPRFNNRTRRTGWLAPSLQHRIETTMSWFRRIQRWVPFSALSMELVRFDMQAMQNPEIAGVEYQQGVLFGYEVREYLLEKWGRRCAYCDAQGVPLQIEHVLAKARGGSNRVSNLTLGCEPCNLDKGAQDVREFVKEKARLARILAKAKAPLRDAAAVNTTRWVLLNALKTTDLTVEAGSGGRTKWNRTRLGLPKTHALDAACVGTVQAIFGWQRPTLELKCSGRGSYQRTRLTAHGFPRGFLVRQKRIHGFQTGDRVRATVPTGKKAGTHVGRVAVRATGNFNIQTPQGVVQGIAHRHCTMVQPADGYGYATRAIK

SEQ ID NO: 12706 - protein, 427 aa, unidentified
MRVFVLDKNRKPLDPCHPAKARKLLKLGRAKVLRRYPFTIIIKDLEEENCVTHDHQLKIDPGAKTTGLAIIQDNRVIWGAELTHRGFQIREALTSRRQLRRSRRNRKTRYRQPRFLNRKRPKGWLAPSLMSRVYNILTWVNKLIKFCPVTGISQELVRFDTQKMLNPEISGIEYQQGTLYGYELREYLLAKWNRTCAYCGAIGTRLEIEHIKPKSKGGSNRVSNLAIACHNCNQAKGNQEIEQFLSKKPSILKRILSQAKKPLADAAAVNATRWKLHDELKLIGLPVEVGSGGLTKYNRCRQNLPKTHWLDAANVGNVDTLYIEDYQPLLITAKGHGTRQICRTDKFGFPRLHCSQKKIHKGFQTGDIVKAVVTKGKKIGTYVGRIATRKTGFFDITTAKGKVSGISYKYCQAIHRKDGYSYQFHGG

SEQ ID NO: 12707 - protein, 459 aa, unidentified
  REGION 1..459: note = Ga0315273_10181434
MYFVIDGRNNIQHPTRRSSMIHHWIKTGKARFIGKNLVQVFKQFNKAKTISYKFVVGLDPGYKNIGYSIFKIYKNKLQNLLNGEVTTRTSEVTKLLQEKKMYRQNRRSKHRKNILRKFGRAKFEAPRWRNRGKKSWAPTHIHLIQSHLNVLEFIFKRINLSESEIASEYFKFDSQKALDSTIYSWKYQKGPQFGFENIKAFVRARDKYTCQICSEKLCKLRVHHIQERTNGGSDRPENLITLCESCHGLVHSNQASCPRISTVTPMRDSGVLNSCMKHLTQIISPTYTITGADTSALRNYYSIEKSHINDAKMVALAKLDLESFECHNLAEDINMKQYRRHTRNWVKRYEDRKYYIDNICVAWNRKARSTQNKDKPSLLEFKQEYPDERVIVKAGRVIYFRANNLAKFRPGDIFKHQDSAYILKSWESTHGYVNSETELKFRTKNCIKIKKISGLTITR

SEQ ID NO: 12708 - protein, 414 aa, unidentified
MVYVLNKDGHPLMPTERHGKVRRMLRDGLAHVVRLVPFTIQLDFSSCKVVQEVSLGIDAGSKHIGVSATTEKRELFAMQVEERDDVVKLIADRREARRTRRNRKTRYRAARFDNRRRKEGWFAPSSENRISAHLRVIKFVCSILPVGKTTIEVAQFDSQKIKDDKITGVEYQQGEQLGFWNVREYVLARDGHTCQYCKGKSKDKILNVHHLESRKTGGNAPNNLITLCETCHKAYHRGDIQLKARRGTSLRDAAAMSIMRWEVYNRTKQEFANVHLTYGYMTKHSRIHNDIAKTHCADALCISGNVKAERLSWFFGVRLQRRHNRSLHLYKPAKGGTRRSTIASHWIGKSRLQQYDYVEWNGQKAFISGSQNGRPYLKNFEDNYIMTPKASVNAKTVKFIRRKRGSMIIEQLPK

SEQ ID NO: 12709 - protein, 384 aa, Halomonas sp.; identical to SEQ ID NO: 5940

SEQ ID NO: 12710 - protein, 446 aa, unidentified; identical to SEQ ID NO: 11087
  REGION 1..446: note = Ga0373630_0000437

SEQ ID NO: 12711 - protein, 420 aa, unidentified; identical to SEQ ID NO: 12089

SEQ ID NO: 12712 - protein, 442 aa, unidentified; identical to SEQ ID NO: 7529

SEQ ID NO: 12713 - protein, 447 aa, unidentified
VPAYRIKHITKKEAPYMVYVLDIDGQPLMPTSRHRKVRKLLNSHLAKVVKRCPFTIQLLYQSTKETQPVSLGVDAGSRHIGLAATTEQKIVYQEELVPRNDVVKLLSARRALRSSRRSRKTRYRKPRFNNRVHSKHKGWLAPSVEVKIQEHITAIKRICQILPISDIHVETAEFDLQRLKAMEEGRPLPVGTDYQLGEQYDFYNTRQYVLHRDEYTCQCCGTHDNNVKLHVHHIESRQTGGDAPNNLITLCEHCHKLLHAGKTILPKGKKRGKSYRDATFMGIMRKTLLERLKKEIDVPVEGTYGYITKYWRERAGLEKSHINDAICISKHPYARPLETYYLTKAVRHHNRQIHKTKLSKGGIRKRNQAPYLVKGFRLFDKVLYQGESYFIFGRRITGYFDIRTLDGTKVNKGSTSYKKLRIQDTAEAYLTEVRAIPHMNEFTCVLA

SEQ ID NO: 12714 - protein, 411 aa, unidentified; identical to SEQ ID NO: 6901

SEQ ID NO: 12715 - protein, 419 aa, unidentified; identical to SEQ ID NO: 12705

SEQ ID NO: 12716 - protein, 440 aa, Lactobacillus sp.; identical to SEQ ID NO: 5150

SEQ ID NO: 12717 - protein, 433 aa, unidentified
  source 1..433: note = Euryarchaeote sp.
MFKMVFVLDKRKKPLMPCTEKRARLLLSRGRAVIHRMAPFTIRLKDRVAEESELQPLRLKLKPGAKESGLAVLREISLEESEAIFLCEMRHKPGIKQSLDSRRNLRRGRRNRKTRYRAPRFDNRRRPEGWLPPSLGARVSQLMNVVNKLTELLPITSISYENAKFDTQLLQNPEISGIEYQQGELFGYEVRDYLLEKWGRRCAYCGKTGVSLEIEHIVPVSRGGTNRVSNLTLACRDCNQEKGVLTAEEFGYPEVQTKAKRPMKDEAMLNATRWKLYNQLKNTGLSLECGTAARTKKQRIEHDLPKSKYHEACVIGKSTPGKLVIKQKYVQVWTAVGRGTRRICNTDKHGFPISHRARQKVHFSFQTGDLVVAEIPKGKYAGRWVGRVAVRSSGYFDIKDSAGRRVCQGVSRRHFRLLQRADGWQYEKEKLAG

SEQ ID NO: 12718 - protein, 440 aa, Lactobacillus sp.; identical to SEQ ID NO: 5150

SEQ ID NO: 12719 - protein, 509 aa, unidentified; identical to SEQ ID NO: 9060

SEQ ID NO: 12720 - protein, 442 aa, unidentified; identical to SEQ ID NO: 3161

SEQ ID NO: 12721 - protein, 415 aa, unidentified
MPCVPARARQLLKKGKASVYRRFPFTIILNERVGGSTQPTELKYDPGSKTTGISLVVHGKTASRVVWAGELTHRSWNIIEALNTRRNVRKFRRYRKTRYRQPRFLNRTRKDKWLPPSIQSRVDNIVTTTRKLKVFAPLSLLACEVVKFDTQKLRNPEIDGAEYQRGTLFGFELWEYLLVKWNHSCAYCNAKNTPLEKEHVVAKSKGGSNSVTNLVVSCRPCNEKKGNKSIEEFLKKKPSVLKKIKLQLKAPLKDAASMNATRYAIARELEIFNLPVNYGTGGQTKYNRTNQGYRKEHWIDASCATSTGENIQILDTMTPLIIKAVGRGSRKMCQTDGYGFPSSKPKAVKRIKGFQTNDIVKAIVTKGKKKGVYVGKVSIRSTGRFNIKTKQGTIQGINHRYCNLLQRIDGYEYHT

SEQ ID NO: 12722 - protein, 414 aa, unidentified; identical to SEQ ID NO: 2588

SEQ ID NO: 12723 - protein, 463 aa, unidentified
MAVFVLDRSGSSLMPCTEKRARLLLERGRARVHKMLPFTIRVVDLETEDCEFQALRVKLDPGSKTTGMALVRETAENGVAVINLFELMHRGKQISEALTARRGHRKVRRSHLRYRAPRFLNRGNQKPGWLAPSLLHRVNTTLAWVSRIRRYAPVSAISTELVRFDMQALENPEIEGAQYQQGTLAGYEVREYLLEKWGRTCAYCGAKGLPLQIEHIHPKSKSGSDRISNLTLACQCCNAKKAALPVEVFLAKQPERLKRIQAQAKRPLKDAAAVNATRWALVNVLKATGLTVETASGGRTKFNRMALGIPKTHALDAACVGDVNSMTGWHKPTLCLKAMGRGSYQRTRLDKYGCVRGYLTRSKSIQGFQTGDMVKAEVTQGKKTGSYTGRVAVRASGSFNIQTRDGLVQGVSHRYCTVVQRGDGYGYQLVAKTDATGTPPKQGDASHPALYLPGLKAGVSRAN

SEQ ID NO: 12724 - protein, 421 aa, unidentified; identical to SEQ ID NO: 4235

SEQ ID NO: 12725 - protein, 376 aa, unidentified; identical to SEQ ID NO: 8049
  source 1..376: note = Filamentous sp.

SEQ ID NO: 12726 - protein, 493 aa, unidentified; identical to SEQ ID NO: 3154

SEQ ID NO: 12727 - protein, 515 aa, unidentified
MIPNERRHLMPYIYVIGMDGKPQMPTKRRRHVQKLLDTGKARITERVPFTIQLLYDNDPVLQPVILAEDPGRTNIGVATLDLKGNLLLSAAVETRNKEIAKLMEKRRQCRRASRNGERKARQRLAKKYGTMIQAGMRMRKLPQYAADAFITCKVIRNTQARFCNRRRPDGWLTPSARHLVQTHINLVHKVQKYLPVTDVAIEVNRFAFMQLEDPAICGVDFQTGPLKGYDDRDAAVYDLQDGKCLMCKHEITQYHHIVPRSRNGSNTIGNIAGLCDQCHDRVHKDADFAEQMKEKKEGMDKKYGALSVLNQAIPFICKQLETEFGRGHVHYCTGRETSLVRQSTGYQKTRKNQLHEVDAWCIGALALAELPENVPDFKEIHLIRQFRRQDRSLVNAQTERVYKLGGKMVAKNRKKRTGQETDALEDWYNRQVETYGKQEADCMRSRLKVTKSRRRYNNPNRMMPGAVFLYEGVRYVMRGQHSKGAYLQAVGMENRDFPVRKCKILTRNTGLVFVS

SEQ ID NO: 12728 - protein, 425 aa, Planktothrix sp.
MSNYVFVIDTNKQPQNPVHPAQARLLLNQGQAAVYRRYPFTIILKESKPELEIEQITLKIDPGSKTTGITLVQGNKVIWGAELTHRGQTIKMSLESRCLLRRSRRNRKTRYRQPRFLNRKRLEGWLAPSLQHRVETTLTWVSKLIRFAPIRSIIQELVRFDLQQLENPEISGIEYQQGELQGYEVRQYLLEKWSRKCAYCGVKNTPLEVEHIHPKSQGGTDRISNLTVACHDCNQKKGNQDIQDFLSGKPDLLPRILKQAKQPLKDATAVNSTRWLLFNRLKETGLPVSTSSGGLTKFNRTRLNLPKTHWLDAACVGKVETLKVLTNKPLLILATGRGTRQMCGTDKYGFPTRHRSRIQIHKGFQTGDIVKAVVTKGKKIGFYLGRVLCRASGSFDLVTPHGRVAGISHKYCQSIHKKDGYSYGF

SEQ ID NO: 12729 - protein, 507 aa, unidentified
MSEYIYVIGMDGDPQMPIKRKRHVEKMLQTGRARVFRQVPYTIQLTYKNQPVLQPVTIAEDPGRSNIGMAVVSLSGELLSAAVVQTRNKEIVKLMEKRKLHRRASRNGERKARQRLAKRCHTMLKAGFLMRKLPMYRKDKRVKCLVIRNTEARFCNRKREDGWLTPSAEHLVRTHINLIHKMQKFLPITDVAIEINRFAFLSLEDPSISGVDFQNGPLKGYDDLNAAVEDLQDGHCLMCNSLIEHRHHIVPRSMQGSNTIGNIAGLCCKCHERVHKDARFEDRLKKKKAGLDKRYAAVSALNQAIPFICKRLEQEFGKEHVHYCSGRDTAMVRRSFGYHKTKEEQLHVVDAWCIAVLSLRQIPEKAPEFDHVHEILQFRRQDRSRIKAQTSRAYYHEGKKIVRNRKKAEGQGEDSLQEWRKRQVDRYGEEQTRKMISQLKVKKSIRRYNRLDRLMPGAVFYYQGVRYVMRGQHCEGTYLQAVGMGSKDFPAKKCKIVANNEGLVFVS

SEQ ID NO: 12730 - protein, 416 aa, unidentified
MVYVLDKNGQPLMPTDRHRKVRLMLQSGQAKVIKRCPFTIQLNYDSGHQTQEISLGIDAGSKHIGVSTTTKIKVLYEVDVELRNDIVDLLSSRRELRRGRRNRKTRYRQAKFNNRRRGNGWLAPSIRQKIGTHLIVVENICKMLPISRIMVETASFDIQKIKNPDIQGAEYQQGDQLEFWNVREYVLFRDGHTCQCCKGKSKDKILNVHHIESRKTGGNAPNNLITLCEPCHTGYHKGTVQLPKAIKRGMRFKDAAFMGIMRWAFYEALKQQYEPVGTPVHNTYGYITKHTRIAYNLPKEHYVDARCISGNPEASSNGEYYYQKKVRCHNRQIHKLTVLKGGIRKQNQATYLVKGYRLFDKVSYQGKGYFVFGRRQSGFFDIRTLSGEKVNKGSLNCKKLKFIATRTYYLTERRAV

SEQ ID NO: 12731 - protein, 442 aa, unidentified; identical to SEQ ID NO: 7396

SEQ ID NO: 12732 - protein, 441 aa, unidentified; identical to SEQ ID NO: 6900

SEQ ID NO: 12733 - protein, 430 aa, unidentified; identical to SEQ ID NO: 4817

SEQ ID NO: 12734 - protein, 457 aa, unidentified; identical to SEQ ID NO: 5177

SEQ ID NO: 12735 - protein, 413 aa, Clostridium sp.; identical to SEQ ID NO: 4134

SEQ ID NO: 12736 - protein, 451 aa, unidentified; identical to SEQ ID NO: 3061

SEQ ID NO: 12737 - protein, 450 aa, unidentified; identical to SEQ ID NO: 4205

SEQ ID NO: 12738 - protein, 349 aa, unidentified
IKNKEAKFSNRTRPEGWLTPTANQLLQTHINLVKKIQKFLPISDVVLEVNKFAFMRLDNPNIQKWQYQQGPLYKKESLESAVSEIQEHHCLFCKKPIDHYHHVVPQHKNGSNTIGNIVGLCAKHHDLVHKDSAWEKKLAKKSTGLYKKYGALGVLNQIIPTLTNELSSLFPKHSFVTNGKSTYDYRAAHGVSKDHWLDAYCIACSVLPSNVCDSNINNHMPYVLKQFRRHDRRVLNNENMNRVYTLNNKAVAINRHKAKDQKTVSLEEFRKEHPDDVCKLKVKEHHPTYRNMNRNFPGSVFLVGKQIHVMQGIASSKDGKATKYNDTSATAIAAGKCKFVAKNTGILFV

SEQ ID NO: 12739 - protein, 442 aa, Lactobacillus sp.; identical to SEQ ID NO: 5193

SEQ ID NO: 12740 - protein, 428 aa, unidentified; identical to SEQ ID NO: 5143

SEQ ID NO: 12741 - protein, 538 aa, unidentified
AKASSSQGKHNLLLRQERLIVKEVAYMSTIYVLNKDGKPLMPTTRGGHVRHLLKEQKAQVVTSKPFTIQLLYETDDVVQPLYLGIDPGRTNIGVAVVKIDGTAVFTAHLETRNKEIPKLMQGRKKARRARRTNGRRCRRQRRAKANGTISKKCVKQTTAQNGSVSKRAKKIGVIKRHLPGCEKEVLCIGIKNKEAKFSNRARPEGWLTPTANQLLQTHINLVKKIQKFLPISDVVLEINKFAFMRLDNPNVQKWQYQQGPLYQKASLEEAVSEMQEHHCLFCKNTIDHYHHVVPQHKNGSNTIGNIVGLCAKHHDLVHKDTSWQEKLAKKKTGLNKRYGALSVLNQIIPALTKELSSLFPKHFFATNGKSTYDYRAAHGVSKDHWLDAYCIAGSVLPNDACDNNINSHVPYELKQFRRHDRRALHKENMSRVYTLNGKSVATNRHKAIKQTTDSLEEFRQSHPGDVCKLKVKEHHPAYRNLNRNHPGSVFFVGEQAHVMQSIVASKDGKATRYKDTNVNKIAAGQCRFVAKNEGIVFT

SEQ ID NO: 12742 - protein, 412 aa, unidentified; identical to SEQ ID NO: 6913

SEQ ID NO: 12743 - protein, 442 aa, unidentified
MVTVQQSTHHLPFGRVFIRRNLFMVYVISQDGKPLMPCSDPIARLLLKQGKAKVKKREPFTIKLTYETTNYTQGLTLGVDTGSGTIGTAVSKDNGDIVYMSEVVVRNDITDKMTQRAKYRRNRRNRKTRYRKARWLNRASSIKKDRFSPTMQSKLHSHVREIEYIQSILPVTEMVFETGQFDMQLMKNPSLANSKVRPWGYQKGANYGFENTKAMVLNRDNYTCQCCKGKHKDSKLEVHHIVFRSQGGSDEESNLLTLCHTCHKDLHSGKINPKLSGKVKGNLKYATQMNSIRKQLFIFYPNAIETFGYVTKANRLHLGVDKEHYYDACTIATQGNAFNVKSNLYKKKCVSDGDFQKTKGIRSEQPIVTDKICGFRKFDKVRYFGNDYFIKGRMSTGYAILMDIDGNKIDFSTMPRGYKTPKLSNCKRITARSTVMTQVKVV

SEQ ID NO: 12744 - protein, 489 aa, unidentified
MAMVYVQNKDGKPLMPTTRYCYVRLLLKEKKARVVCTTPFTIQLNYDTPDITQDLILGIDPGRTNIGVAVVKEDGQCVFSAHLETRNKDIPLLMKKRAGFRRQHRTLDRRRKRQRRARATGTTIAEGSVERLLPGYEKPVVCHYIRNKAARFNNRSRPAGWLTPTANHLLQTHINLIAKVAKFLPITKVVVELNRFAFMAMDNPNIHRWEYQQGPLYGLGSVEDAVYAQQDGHCLFCKKPIDHYHHVIPRHKGGSETLANRCGLCAKHHDLVHKDKAWADKLVTRKEGMNKKYHALSVLNQIIPFLMEYLGSETLYDVYAIDGRSIKGFRIAKNVPKEHYTDAYCIACSILDTDNKVSAPVEPFELKQFRRHDRQACIRQMVDRKYLLHGKVVAANRHKAFEQKSDSLQEFREAYSDVAVSQLTVKPHPPQYKDMSRIMPGAVMDFDGIVGVMQSSIVGQFYKSTKGHKATPKRCVLLSQNAGMVFIPT

SEQ ID NO: 12745 - protein, 415 aa, unidentified
MVYVLANDGQPLMPTERHGKVCRMLKSGIAKVVKKCPFTIQLQYESERNVQPVALGIDAGSKHVGVSATTKAKVLYESDVELRDDIVKLLATRRQLRRRRRSRKTRYRPARFDNRRRKEGWLAPSIRQKIESHLTVVANVCKILPVSQIIVETASFDIQKIKNPDIQGIEYQQGEQMDFWNIREYVLFREGHTCQCCKGKSKDKVLNVHHIESRKTGGNAPNNLITLCETCHKGYHNGTVTLPKNIKRGMKFKDAAFMGIMRWTFYNTLKEQYEPDIPVHYTYGYITKNTRINHNLPKGHCIDARCISGNPDAVSDGTYYYQKKVRCHNRQIHKQTILKGGIRKSNQAEYLVRGFRLFDKVRYQGREYFIFGRRKSGFFDIRTLSGEKVNKGSINVKRLTFVDTRKNYLTERRTV

SEQ ID NO: 12746 - protein, 466 aa, unidentified; identical to SEQ ID NO: 2809

SEQ ID NO: 12747 - protein, 424 aa, Enterococcus sp.
MRVFVRNMQGKPLMPCSNRKARLLLKEGKAKIYQYNPFTIQLCYASREYVQECHIGIDTGTKHIGMAVTSEDKVLFKGEIELRQDVKSNLDTRRSYRGDRRNRKTRYRKARFLNRKKKESWLPPSIENRINHTFKWINKLVALLPNPKLHIEVGKFDVAKMINPNVQGVDYQHGQTYGFYNVRYFVFARDNYTCQCCKKSKNKILQTHHIVYRSNGGSNRADNLITVCTDCHTYENHQKGGILYQWQENRKKTKQYKEPPFMNVLRKRIFTQYPNAIITYGSETTPKRKELGLEKTHYNDAIVISGITKIKENPNEWLLIKQFRKKKRSLHEATARKGRKEPNRLQKRNAKNTPYYKGFYLNDKVRVFNQVGHITGFTSSGAYIKNSENEYITLPNKSYKQIGISNIRLLHHNNNWQYIHKHIA

SEQ ID NO: 12748 - protein, 413 aa, unidentified; identical to SEQ ID NO: 2636

SEQ ID NO: 12749 - protein, 431 aa, unidentified
MRIFVKNMRGKPLMPCTPRKARLLLKQKKAKIVGYKPFTIQLQYATGETIQEIIVGVDEGARYIGVALVSQGKVLAKGEVELRRDVHSLLLSRAQYRRGRRFRKTRYRKTRFLNRKRPDGWLSPSIQAKLDANFAWIDKFCSLVPSPKLRIEVGKFDVAKMINPDIQGVDYQHGQTYRYYDVRYFVFARDEYTCQVCKKENKILHTHHIIYRSKGGTDRADNLITVCSDCHTDENHKQGGILYQWMCEHKKTRQYKEPPFMNILRRRTFQKYPNAEFTYGSETSPRRKELSLDKTHYNDAIAITGVEAIKDNEQGCFRIKQFRKKKRSLHEATPRKGRKMKNVNAKRNKKNTKQLRGWYLNDEVVCFGQRGWISGFTGTSSAYVIDCDSEYIQNPSKNYKQVNLSDLKLICHNNNWQYEVALKYRHSSYHL

SEQ ID NO: 12750 - protein, 408 aa, unidentified; identical to SEQ ID NO: 11975

SEQ ID NO: 12751 - protein, 414 aa, unidentified; identical to SEQ ID NO: 6986

SEQ ID NO: 12752 - protein, 431 aa, unidentified
MPNNVYVINKHGRPLMPCSPAKARHLLDAGKAKVKKRTPFTIQLVYGSSGYTQEVILGVDAGSKTIGVSALTKKEELFAANVIPRNDVVDLLSTRREFRRARRNCKTRYRKPRFDNRVRSKHKGWLAPSVEVKIQEHITTIRRVYGILPVSKVVVETAEFDLQLLKAIADGKPVPQGEDYQKGEMYGHYNVRQYVLWRDDYTCQCCGAHATKKKEVRLHVHHLESRKVGGDAPDNQVTLCESCHEKLHKGLIAEKDFKKRKRRSTRDATFMGIMRKTLMQRLYSELPIPVIETRGYITKATREKLLVLPKSHTNDALAIAQGKRGFNVGYLPEIAQIDKIYTIRPVRHHNRQLHKAAILKGGIRKSNQAGKYVFGYRLFDKVQFNGQDCFIWGRRTTGIFTIKTINGKMIKDGISFKKLKPVEKSTSYLIA

SEQ ID NO: 12753 - protein, 415 aa, unidentified; identical to SEQ ID NO: 3018

SEQ ID NO: 12754 - protein, 456 aa, unidentified; identical to SEQ ID NO: 3342
  REGION 1..456: note = Ga0373629_0068408

SEQ ID NO: 12755 - protein, 408 aa, unidentified; identical to SEQ ID NO: 5302

SEQ ID NO: 12756 - protein, 461 aa, unidentified
VLDVKSPDNIGEERRSEDRVTSPLRDSERRTTMVFVLDKHKKPLMPCSEKRARQLMERKRAVIHRMEPFTIRLKDRTAQESKLQPLRLKLDPGSKTTGMAVMEDNGSGRVIFLGEIKHKPGIKQSLESRRSLRRSRRNRKTRYRKPRFENRRRAQGWLPPSLEARVNQTMNATAKLQRLLPITAMSTEHVKFDTQLMANPEINGTEYQQGELQGYEVREYLLEKWGRKCAYCGAENVPLEVEHIIPKARGGSNRISNLAIACTPCNQEKNTMTAEEFGFPEVQTQARKPLRDAALMNATRWRLFEQLKDTGLPVECGTGARTKKQRIEHGLPKTHYFDACCVGASTPDELIIKPHYINVWSAMGRGKRQMCRTDKYGFPRAHRQRRKLHFGFQTGDIVTANVPKGKYAGQWRGRVTCRARGSFDIRNGERQIICNTNHKNCKVIQRADGWQYEWIVKEDSA

SEQ ID NO: 12757 - protein, 427 aa, Oscillochloris sp.; identical to SEQ ID NO: 5291

SEQ ID NO: 12758 - protein, 477 aa, Massilia sp.
VSVTRRVSAIGGINVAVFVLDRKQAPLMPCSEKRARKLLAAGRARVHRLLPFSIRLVDLAAVDCVFQPVKIKLDPGSKTTGIALVRESETRDAATAEVKRSANVLTLFELVHRGRQISEALNARRLMRRRRRGSLRHREPRFQNRGNQGHGWLAPSLRHRMDTTLAWLVRLRKLAPVTAIAQELVRFDMQKMENPEIAGIAYQQGTLAGYEVREYLLEKWDRKCAYCDAKDVPLNLDHAHAKARGGSNRVSNLVLSCVPCNRKKAARDVREFLAHDPARLARIQSQLKRPLKDAAAVNATRWALSHALKATGLPLTTGSGGLTKFNRTRLGIPKTHALDAVCVGMVDAVVNWLKPTLALKATGRGCYQRTRLDAYGFPRGYLTRKKRIHGFQTGDMVKALVTKGKKIGAYTGRVAVRATGSFNIQTQHGVVQGISHKHCKIVQRADGYGYSLVAKTDATGTPPKQGTLRVPCPATPA

SEQ ID NO: 12759 - protein, 423 aa, unidentified
MVYVLNIDGQPLMPTDRHGKVRHLLKDGRAEVVKCCPFTIRLLYDSTHYTQDIVLGVDAGSKHIGLSGTTETKELYASDVELRNDIVDLISTRRQNRRFRRNRKTRYRKARFLNRLSDKKDWLAPSIRQKVDTHMTVVSRVCMILPVTKIIVETASFDIQKIKDPDISGTGYQQGEQLDFWNVREYVLSRDGHTCQCCKGKSKDPVLNVHHIESRKTGGDAPNNLITLCETCHKGYHSGAVQLPKAIHRGMRFKDAAFMGIMRWAFYNKLKEVYEPQDIEIRMTFGYLTKNTRIRHHLPKEHYIDARCISGHPEAIPNNEVFYQKKVRCHNRQIHKNTILKGGIRKRNQTGYLVKGFRLFDKVAYKGREYFIFGRRQSGFFDLRNLSGCKVNKGSLSYRKIGFLEPRQYYLCERRVMDTQGCA

SEQ ID NO: 12760 - protein, 408 aa, Bacillus sp.; identical to SEQ ID NO: 8258

SEQ ID NO: 12761 - protein, 418 aa, unidentified; identical to SEQ ID NO: 12569

SEQ ID NO: 12762 - protein, 420 aa, unidentified; identical to SEQ ID NO: 4855

SEQ ID NO: 12763 - protein, 494 aa, unidentified
MTMVYVQNKDGKPLMPTTRYCYVRLLLKEKKARVVCTTPFTIQLNYDTPDVTQDLILGIDPGRTNIGVAVVKEDGQCVFSAHLETRNKEVPLLMKKRAAFRRNHRTLDRRRKRQRRAIAAGTTVESNTIERLLPGYEKPVVCHYIRNKEARFNNRSRPAGWLTPTANHLLQTHINLIAKIAKFLPITKVVVELNRFAFMAMDNPNIRRWEYQQGSLYGLGSVEDAVYAQQDGHCLFCKEPIDHYHHVVPRHKGGSETLANRCGLCERHHALVHKDKAWAEKLVTRKGGMNKKYHALSVLNQIIPHLMEYLGRETPYDVYATDGKSTKGFRVAKNVPKEHYTDAYCIACSILDANTKVSTPAEPFKLKQFRRHDRQSCIRQMVDRKYLLDGKVVATNRYKAIEQKSDSLEEFREAYGDPAVSQLTVRPHLPQYKDMTRIMPGAVMDFDGAVGVFQGSSGRNNGTPNYYNSTKGARVLTKRCALLAKNIGMVFIPA

SEQ ID NO: 12764 - protein, 479 aa, Acidithiobacillus sp.; identical to SEQ ID NO: 8867

SEQ ID NO: 12765 - protein, 427 aa, unidentified; identical to SEQ ID NO: 5062

SEQ ID NO: 12766 - protein, 470 aa, unidentified; identical to SEQ ID NO: 2825

SEQ ID NO: 12767 - protein, 465 aa, unidentified; identical to SEQ ID NO: 6009

SEQ ID NO: 12768 - protein, 483 aa, unidentified
LTFVSIYVQRVYGRTRRFFQSAALHSGRQARGNIYPAGQTAGVLQKEVRTMAAVYVISASGKPLMPTTRCGHIRGLLNAGKARVVEREPFTIQLKYETPDVTQPLYLGIDPGRTNVGSAVVREDGECVFTAQLTTRNKDVPKLMKARKQFRMAHRRLKRRCKRQRRAKAAETLSQKGEFQRLLPGYEEPILCKGIRNKEARFNNRQRPAGWLTPTANHLLLTHLNMVKKLQKLLPITDVVLEVNRFAFMAMENPSIRRWQYQQGPLYGKGSVEDAVYAQQDGHCLFCGKPIAHYHHVVPQHKNGSETLENRVGLCNEHHDLVHKDRAWDAKMKETKAGLNKKYHALSVLNQIIPALTEQLTAMFPQHAFVTTGKDTADFREDYGIAKEHHLDAYCIACSVLAEPTKVAAPTGKPHRLMQFRRHDRQVCHKENIKRVYLSEGKAVATNRHKAIEQKDDSLEEFRKTHTQQEVSALTVKDHQPVY

SEQ ID NO: 12769 - protein, 427 aa, Nodularia sp.; identical to SEQ ID NO: 11076

SEQ ID NO: 12770 - protein, 390 aa, unidentified; identical to SEQ ID NO: 4490

SEQ ID NO: 12771 - protein, 431 aa, unidentified
MPNKVYVINKHGRPLMPCSPAKARHLLDAGKAKVKKRTPFTIQLVYGSSGYTQEVILGVDAGSKTIGLSASAETEELLSAEVKPRNDVVDLLSTHREFRRARRNRKTRYRKPRFDNRVRSKHKGWLAPSVEVKIQEHITSIKRVCRILPVSKVVIETAEFDLQLLKAIADGKPVPQGEDYQKGEMYGHYNVRQYVLWRDNYTCQCCGTHPSKKKEVRLHVHHLESRKVGGDAPDNQVTLCESCHEKLRKGLIAEKDFKKRKRRSTRDATFMGIMRKTLMQRLCSELPIPVVKTRGYITKATREKLLVLPKSHINDALAIAQGKHGFNVGYLPGILQIDKIYTIRPVRHHNRQLHKATILKGGIRKSNQTEKYVFGYRLFDKVQFNGQDCFIWGRRTSGYFVVKTIDGKVIHNSASFKKLNLVERASNYLIA

SEQ ID NO: 12772 - protein, 278 aa, unidentified
LKVFVLNMRGQPLMPCSPAKARHLLKAGKAAVRRRTPFTIQLRIATGETKQSVTLGVDAGAKHVGLSAATEKEEVFASEVELRQDITGLLAARLSLRRERRQRKTRYRAPRFLNRVRSKHNGWLPPSVENRIQAHLSRIDAICGLLPVTKIVIETASFDIQKIKHPDVEGTDYQQGDQLGFWNVREYVLFRDGHVCQHCHGHAKDKILNVHHLESRQTGGDAPNNLITLCERCHKACHAGKIKLKVKRGQSFREEAFMGIMRWTLLDRVRKAHPGLPV

SEQ ID NO: 12773 - protein, 424 aa, unidentified
MLVYVLKQNGQPFMPTERFGKVRRLLKEGKAKVVRREPFTIRLLYEPETDVVQECYCGVDTGSKHIGVAVIGNDRVLYQSQTELRDDIKRKMDIRRMYRRNRRFRKIRYRKPRFLNRRNSIRKDRLPPSVKHKVQAHIDEIEFCKKILPVSDLILEVSQFDTALMKNPSLINEKVKHCGYQQGFDYGYSSRRSAILHRDNYTCQCCGKKNCRLEVHHIKFRRDGGTDDEENLITLCEDCHKGVHAGAVVLNKSPKKSKGLKHATHMSIIRSQLLKEYPNAIETFGFVTSENRNHLKLEKDHFIDACVVASGGLEFKELEVIFYKRRVSKGDYQLTKGIRGEQKLPTGKIYGFRKFDKVEYLGEKYFIKGRMSSGFAILMNIFGEKVDFSSMPKGLKTPKLSNCNRISTRRSRLCIREKITLNIV

SEQ ID NO: 12774 - protein, 414 aa, unidentified; identical to SEQ ID NO: 2588

SEQ ID NO: 12775 - protein, 557 aa, unidentified; identical to SEQ ID NO: 7395

SEQ ID NO: 12776 - protein, 449 aa, Anoxybacillus sp.; identical to SEQ ID NO: 3571

SEQ ID NO: 12777 - protein, 421 aa, unidentified
  REGION 1..421: note = Ga0255812_10793133
MLVYVISQDGKPLMPTTPARARKMLRDGKAKCIKRTPFTIKLLYQTTTYTQTITLGVDTGSSHIGSAAVDNKGNVVYLSEVEIRNDVSDKMKQRTKYRRNRRNRKTRYRPARWLNRKNSIKTGRFSPTMVSKIHSHEKEILFAKSLLPISDVILETATFNPHALKNPAVLKNKWLYQRGTNYGFANTKAFVLDRDSYTCRHCKGKSKDSRLEVHHIIFRSNGGSDEKENLITLCKTCHDKVHSGEIKLHGGKVKGQLKHATQMNSIRKQLLLQNPEVHETFGFITKEHRQFMGLPKEHYYDAVAIANLNNLEKYGMLSVDVKTPLLRKKCVSDGDYQQTKGVRSEQPIQTSKIMGFRKFDKVEYAGQEFFIKGRMSTGYAILMGINGMKIPLKPIPKFDRMKRLSARKAWIIQQEIIQNIA

SEQ ID NO: 12778 - protein, 442 aa, unidentified; identical to SEQ ID NO: 5957

SEQ ID NO: 12779 - protein, 453 aa, Lactobacillus sp.
MMSEVQKVNYIYVVDSNGTPLMPTSRLGMMRRWLKTGQARWFGNSRKIIQFVRPVTTNTQELTLGVDAGFHLGLAVVGNQREYYASESLRKSEKDRITSRRELRRTRRNRLRHRQARFDNRRRKDGWLAPSMQHRLDFTIKEIKCLYTFLPITKLVVEVTPFNNQKLVDSNIKPWEYTQGKMHGFKTIKDYLLARDNYRDALDGKQYPASQLRVHHLVQRRDGGSNQPDNLVLLSDINHSQANHHNGSLAKLRENRQKELDYRGAYFMSILATRLSDYFARYTTTQGYLTANLRQKYQLEKSHLNDAFIIAGGTNTTLRTNNVYSRQKLRNNNRVLQKFYDAKYIDSRDGKQKTGKELSSGRTRRTRELNYANLRQFRQEKVKKGRVSIRRNHYQLRPHDVVLNTKTNKVETVTGVQNNGTVIKFQTGKTCSLKNVVSLYHVNGMLEKKIEDI

SEQ ID NO: 12780 - protein, 496 aa, unidentified
MMAVVYVISKSGKPLMPTTRCGHVRILLKEGKARVVERKPFTIQLTYESAEETQPLVLGIDPGRTNIGMSVVTESGESVFNAQIETRNKDVPKLMKDRKQYRMAHRRLKRRCKRRRRAKAAGTAFEEGEKQRLLPGCFKPITCKSIRNKEARFNNRKRPVGWLTPTANHLLVTHLNVVKKVQKILPVAKVVLELNRFSFMAMNNPKVQRWQYQRGPLYGKGSVEEAVSMQQDGHCLFCKHGIDHYHHVVPRRKNGSETLENRVGLCEEHHRLVHTDKEWEANLASKKSGMNKKYHALSVLNQIIPYLADQLADMFPGNFCVTSGQDTYLFREEHGIPKDHYLDAYCIACSALTDAKKVSSPKGRPYMVHQFRRHDRQACHKANLNRSYYMGGKLVATNRHKAMDQKTDSLEEYRAAHSAADVSKLTVKHPSAQYKDMSRIMPGSILVSGEGKLFTLSRSEGRNKGQVNYFVSTEGIKYWARKCQYLRNSGGLQIYV

SEQ ID NO: 12781 - protein, 442 aa, unidentified; identical to SEQ ID NO: 9877

SEQ ID NO: 12782 - protein, 470 aa, Anaerostipes sp.; identical to SEQ ID NO: 2825

SEQ ID NO: 12783 - protein, 452 aa, unidentified
MVFVLSSTNKKLMPTNEYRARKLLKSGKAAVYKHRPFTIILTKRKDGYTQPIEYCCDTGYQHIGISIKSQKREYVNEERILLKDETERHNDCRKYRRTRRNKLRYRKARWNNRHNNLICKDGFAPSIRNKRDVHINLFKMYHEVCPITSATFEMGQFDTQLLKAVENGDNVPQGTDYQHGERYGYSTLREAVFARDNYKCVCCRKSAIKSGLILKMHHLGYRIGDRSNRMSNLATVCSNCHTSKNHQKGGKLYDLKPKLKTFKGATFMTMVRYDMFSKLKESAPDIKFNMTYGALTKLKRKDYSIKKSHSNDAYCMGVFHPKHRTDFKCYQKLRRNNRILSKFYDAKYIDLRDGTVKSGKQLSCNRTNRRELRNSNKNERIYRGPKISKGKTVVRKQHYQYRPYDFVWYKNVKYAVKGVQDKGKRIALQNHLPVSISKIKRSVHVNGWKLVI

SEQ ID NO: 12784 - protein, 526 aa, Streptomyces sp.; identical to SEQ ID NO: 9559

SEQ ID NO: 12785 - protein, 450 aa, unidentified; identical to SEQ ID NO: 2935

SEQ ID NO: 12786 - protein, 406 aa, unidentified; identical to SEQ ID NO: 4082

SEQ ID NO: 12787 - protein, 431 aa, unidentified
VEQNLRVFVLNKRGKPLMPCSPAKARLLLKEKKAVVVRRTPFTLQLTIATGEAKQAVSLGVDAGYKHVGLSASTKKAELYASEVELRQDITDLLSARRALRRARRNRKTRYRAPRFDNRIRTKRKSWLAPSVENRINAHLSRIEAVLRLLPVTKITVETASFDTQLLKNPDIAGKEYQEGEQLGFWNVREYVLFRDGHVCQHCHGRSKDPVLNVHHLESRRTGGDSPGNLITLCETCHKALHRSEITLKAKRGQSFRAESFMGIMRWEVLNRLKTSHSELEVHNTYGYRTKHARIANGIDKSHCADAFCIAGNLGAQRLGEFFFQKQTRRNNRQIHKLSILKHGLRKRNQAPFEIKGFRLFDKVACKGEEGFIFGRRSSGFFDVRKLDGTRISAGISYKKLHLLEKRRTYLTEIRKEEALPPLPEGRGLRA

SEQ ID NO: 12788 - protein, 465 aa, Variovorax sp.; identical to SEQ ID NO: 10648

SEQ ID NO: 12789 - protein, 536 aa, Anaerostipes sp.; identical to SEQ ID NO: 4526

SEQ ID NO: 12790 - protein, 416 aa, Parasutterella sp.; identical to SEQ ID NO: 10114

SEQ ID NO: 12791 - protein, 427 aa, Enterococcus sp.; identical to SEQ ID NO: 2410

SEQ ID NO: 12792 - protein, 426 aa, Parasutterella sp.; identical to SEQ ID NO: 3045

SEQ ID NO: 12793 - protein, 419 aa, unidentified
MVYVINKQGTTLMPTERFGKVRRMLKNSLAHVVCRIPFTIQLDYDTTEITQPITLGIDAGSKFIGVCATTDKKELYAANVELRNDIVDKLSTRREQRRTRRNRLRYRKARFNNRVSSKNKGWLAPSVENKIQTHLTVVRNAYRILPISKIVVETASFDIQKIKNPNIDGEDYQNGEQMGFWNIREYVLWRDGHTCQHCHGKSNDSILNVHHLESRKTGGNSPSNLITLCETCHKAYHRGKFELKIKRGKPLRDAAFMGIMRWAFYKRLKKEYPNVSMTFGYITKSTRITNNLPKEHYVDARCISGHPQAKPIGYYFYQKKVRCQNRQIHKANFLKGGRKRLNQAQFLVRGFRLFDLVSYEGSAYYVFGRRTSGYFDIRKLDGTKVNKGSINCKKLKLINTQKTILIERRNSSSIPPTSL

SEQ ID NO: 12794 - protein, 423 aa, unidentified; identical to SEQ ID NO: 4062

SEQ ID NO: 12795 - protein, 414 aa, unidentified
MVYVINKQGQALMPTERFGKVRRLLKNSLAHVVCRIPFTIQLDYDTTDYTQPVSLGVDAGSKHIGISATTSEKELYAADVELRNDIVDKLSTRRELRRTRRSRLRYRKARFNNRVSSKRKGWLAPSVENKIQTHLTVVEKIHKFLPITNIVVEIASFDIQKINNPIISGSEYQQGEQLDFFNVREYVLFRDNHICQHCKGKSKDKVLNVHHIESRKAGGDSPNNLITLCETCHKAYHRGEFELNVKRGKSFRDAAFMGIMRWSFYDRLKNIYPNVSMTFGYITKNTRITNNLPKEHYVDARCISGNPVAKPLGYYFYQKKVRCQNRQIHKANFLKGGRKKLNQAPFLVKGFRLFDLVEYQKDLYYIFGRRDSGFFDIRKLDGTKVNKGSINCKYLRLVDKRKSILIEKRMQVNL

SEQ ID NO: 12796 - protein, 413 aa, unidentified; identical to SEQ ID NO: 2636

SEQ ID NO: 12797 - protein, 415 aa, Bacillus sp.; identical to SEQ ID NO: 2431

SEQ ID NO: 12798 - protein, 427 aa, Nostoc sp.
MSKVFVLDTEKRPLDPIHSAQARQLLRNKKAAVYRRFPFTIILKESRADASVSDLRIKLDPGAKITGIALVNDSTGEVVFAADLKHRGFAIIDALISRRQLRRSRRNRKTRYRKPRFLNRTRPEGWLAPSLMSQVHNVETWVNRLRKFAPITAISTELVKFDMQLMRNPEIEGKEYQQGTLAGYETREFLLEKWNRQCAYCGIKDIPLQIEHIHPRSKGGSNSITNLTLSCEKCNVKKGTKDIKDFLKKDPTRLQKILAQAKKPLADAAAVNATRYKLLEVLKSTDLPVECGSGGLTKFNRTNQQLQKTHWLDAACVGQSTPILIIKGIKPLLITANGHGTRQMCRTDKFGFPNRYVPKLKFIKGFQTGDIVKAVVTNGKKIGEYIGRVAVRSTGSFNISAQRGLIQGINYKFCKSIHKKDGYSYSS

SEQ ID NO: 12799 - protein, 419 aa, unidentified; identical to SEQ ID NO: 6954

SEQ ID NO: 12800 - protein, 452 aa, Pseudoalteromonas sp.; identical to SEQ ID NO: 5364

SEQ ID NO: 12801 - protein, 552 aa, Streptomyces sp.
MTTFPVGEQTHQAVLPQRPALESVGADTPGSRDETAHGLPATARDTGGEHGRGETGGRGTGARRRHAKSAATAAEAAENRSGDAPEHHRSYTGGVGASRVFVLARDGRPLMPCHPARARELLGRGRAVVARQVPFTIRLKDRALAGSEVGGVQLRIDPGSKGTGLVITDEKKEERRKGSTVIVRRGLIAVELQHRGDQIHLCMRQRAGYRRRRRSANCRYRAPRSHNRPRPAGWLPPSLRHRVETVLSLATRLCRYAPVSEVHVERAAFDTHSMSAGRPLSEADYGQGPLAGATARTHLRAKWNNACAYCDVSGVPLNIEHLRPRSRGGSDRVSNLVLACVPCNEAKGSTPVEAFLADRPDRLARILGQTKAPLHDAAAMNATRWQLTEALGTLGRPVHAWSGRRTKGNRSAMGLAKTHTLDALSVGRLNHERGDAIVRYPERVLVARATGRGSYARTTPDRFGFPRLRRARTKQHFGYVTGDLVRATMPSGKWAGTWTGRISVRARGQHSLATPRGRVNVSHRNLRLLQRGDGYGYGDRPEPAPSTSRKSG

SEQ ID NO: 12802 - protein, 413 aa, unidentified; identical to SEQ ID NO: 2636

SEQ ID NO: 12803 - protein, 512 aa, unidentified; identical to SEQ ID NO: 5238

SEQ ID NO: 12804 - protein, 430 aa, Nostoc sp.
MSNFVFLIDANKQPLDPIPPGQARRLLNQGHAAVYRRYPFMLILKKIIYDPKVKPHQLKIDPGSKVSGLAILQEDKVIWGAELTHRGQQIKNDLESRRAIRCNRRNRKTRYRQPRFLNRTRQKGWLPPSLESRIKNTLTWVNRIIRYVPITGISQELVKFDLQATENPEISGKEYQQGTLAGYETREYLLEKWNRKCAYCGVENVPFEIEHIHPKSKGGTDRVSNLTLACHECNQAKGNLDIKEFLAKKPAILSRILSQAKQPLKDAAAVNSTRWALFDRLKKTELPIEIGTGGRTKYNRVRLGLPKKHWIDAAAVGMVESLQLLASQPLLITAKGWGSRQMCTPNKYGFPMRHKTRCKTFFGFQTGDMVRAILPSGKFAGTHIGRLTVRKSGVFEMRTPKEKVSPVRYKYCKSVHRNDGYMYFFSTNVQ

SEQ ID NO: 12805 - protein, 413 aa, unidentified; identical to SEQ ID NO: 3023

SEQ ID NO: 12806 - protein, 323 aa, unidentified
LRVFVWNKRRKPLMPCSPAKARHLLKEKKAAVVRRTPFTIQLTIATGETKQPVSLGVDAGYKHVGLSASTENAELYASEVELRQDVSDLLSARRALRQSRRNRKTRYRAPRFDNRIRTKRKSWLAPSVENRINAHLSRIEAVLRLLPVTKITVETASFDMQLLKNPDISGKEYQEGEQLGFWNVREYVLFRDGHVCQHCHGRSKDPVLNVHHLESRRTGGDSPGNLITLCETCHKALHRSEITLKTKRGQSFRAEAYMGLMRWEVLNRLKTSHPGLEVHNTYGYRTKYTRIVNGIDKSHCADAFCIASNLGAERLGEFFFQKQ

SEQ ID NO: 12807 - protein, 431 aa, unidentified
MPDKVYVISRLGHPLMPCSPAKARHLLDDKKAKVVKRMPFTIRLLYGSTKYIQPIILGVDAGSKTIGLSASTAKEEVFAAEVMPRNDVVENLSTRREFRRARRNRTTRYRKPRSDNRVRSNHERRLAPSVKVKIQEHITSIKRVCTILPISKVVIETAEFDLQLLKAIQEGKPIPEGEDYQKGEMYGSYNVCQYVLWRDNYTCICCGVRGTPKNPVRLHVHHFESRKYGGNAPDNHGTLCDDCHKKFHLGIITDVKLKTRRRQSTRDAAFMGIMRKTLMWRLRTELFIPVAETKGYITKATREKLLALPKSHTRDALAIAQGRHGFCIKEYAYVEPANHIYTVRPVRHHNRQLHKASILKGGIRKRNQASKYVFGFRLYDKVLYQGKACFVWGRRTSGTFLLRTIDGIKVKDGVSYRNLTLLERSSNYLIA

SEQ ID NO: 12808 - protein, 424 aa, unidentified; identical to SEQ ID NO: 3351

SEQ ID NO: 12809 - protein, 453 aa, Solobacterium sp.
  source 1..453: note = isolate UBA2814
MSVAVLSSTGRKLMPTSNYRARKLLKSHRAAIECYRPIFTIRLTDRKGGNTQPIEYACDTGYQHVGVSIKSEKHEFVHAQYDMLSDETERHNDCRKYRRTRRNRLRYRKPRFDNRSKKNKEMPPSLRHRKENQISLFESFCKVMPITSATFEMGKFDTQLLQAIANGKPLPEGKDYQQGSKYLYQTEREAVFGRDHYTCQVCGKSVKDGVILNTHHIGYWKGYRSNRISNLLTVCEHCHTAKNHRPGGKLWGLEPKSTNLAPAAYMSTVRWAMYRDLVLMHPEIDIHIQYGAKTSVTRKSLHLAKTHANDAYCIGSLRPKHRAAELVYQKKRRNNRILSRFYDAKYIDIRDGKKKSGSALSCGRTNRRESRRSDKNQRIYRGKKCSSGRTSIRKRRYAYQPGDAILFRSQRFAVNGAHCNGTRVILNTGKSVKTADLTCIKKEGGWRFLPAQA

SEQ ID NO: 12810 - protein, 442 aa, unidentified; identical to SEQ ID NO: 2903

SEQ ID NO: 12811 - protein, 470 aa, unidentified; identical to SEQ ID NO: 2825

SEQ ID NO: 12812 - protein, 406 aa, unidentified; identical to SEQ ID NO: 4271

SEQ ID NO: 12813 - protein, 451 aa, unidentified; identical to SEQ ID NO: 5203

SEQ ID NO: 12814 - protein, 416 aa, unidentified; identical to SEQ ID NO: 9947

SEQ ID NO: 12815 - protein, 388 aa, Scytonema sp.; identical to SEQ ID NO: 2683

SEQ ID NO: 12816 - protein, 526 aa, Streptomyces sp.; identical to SEQ ID NO: 8021

SEQ ID NO: 12817 - protein, 430 aa, unidentified; identical to SEQ ID NO: 4504

SEQ ID NO: 12818 - protein, 420 aa, unidentified
MVYVISKSGKPLMPCENVVARLLLKDGKAKVKKRCPFTIQLTYDSTEYTQDVVLGQDTGSKYIGTACVGNNKVLYQSNVKLRDDIKSKMDSRRQARRNRRNRKTRYRESRFLNRNNSTKLNRLPPSVKHKVQAHIDEIEFCKKILPISKIVLEVSQFDTHLMKNPSLILEKVKHWGYQKGFNYEWASRREAILNRDGYTCQICGKKHTRLEVHHIVFKSQSGTDDESNLITLCEDCHTGVHSGKIALNKKPKKMNLKYATHMSIIRSRLLKVYPDAIETFGFVTKTNRESLHLPKDHFIDACVISSGGKEFTLNDTIYQKRRVSKGNYQLTRGVRGEQKIPVGKIQGFRKFDKVKYFGKEYFIKGKMSSGFAILMDIFNNQIDFSYMPRGYKTPKLSNCNRISARRSCLYISQNIINSQD

SEQ ID NO: 12819 - protein, 425 aa, unidentified; identical to SEQ ID NO: 9937

SEQ ID NO: 12820 - protein, 424 aa, Moorena sp.; identical to SEQ ID NO: 8180

SEQ ID NO: 12821 - protein, 416 aa, unidentified
MVYVLSQNGQPLMPTENHAKVRVFLKQGKAKVVQRCPFTIQLLYESTTHTQKINLGIDAGSKTIGISATTDSKVLYEAEVVLRNDIVELLSGRRALRRSRRNRKTRHRKPRFDNRKKPDGWLAPSIRQKIETHVTVVENITKILPMTKIIVETASFDIQKIKNPEIEGAEYQHGEQLDFWNVREYVLFRDGHTCQCCKGKSKDNILNVHHIESRKTGGNAPNNLITLCETCHKAYHKGVITLPKEIHRGMRFRDAAFMGVMRWAFYDRLKELYNLLGVEVINTYGYITKNTRITYDLPKEHYVDARCISGNPAAKPMDYYYLQKKVRCHNRQIHKCKINKGGTRKRNQAAYEVKGFRLYDQVLWKGQKCFIFARRSTGRMDLRLLDGTHVNASVGYKNLKLLSMRKNYLIEQRKAG

SEQ ID NO: 12822 - protein, 414 aa, unidentified
MPCSPAKARLLLKEKKAIVKRRTPFTIQLTIATGETKQPVGLGVDAGYKHVGLSASTDKAELYASQVELRQDITDLLSARRALRRARRNRKTRYRAPRFNNRIRTKRKGWLAPSVENRINAHLSRIEAVLRLLPVTKITVETASFDMLLLKNPDIAGKEYQEGEQLGFWNVREYVLFRDGHVCQHCYGRSKDPVLNVHHLESRRTGGDSPDNLITLCETCHEALHRGEIALKTKRGHSFRAEAFMGMMRWEVLNRLKASHSELEVNNTYGYRTKHARIVNGIDKSHCADAICIAGNLGAERLCEFFFQKQTRRNNRQIHKLSILKGGIRKRNQAPFEIKGFRLFDKVACKGEESFIFGRRSSGYFDVRKLDGTRISAGISYKKLRLLEKRRTYLTEIRKEEALPPLPEGRGLRA

SEQ ID NO: 12823 - protein, 413 aa, unidentified
MTSYSFVLDANGKQLAPTKEPKAWFLIRKKRAALVSKYPMVIQLMKEIPENEICQDEIRCGIDDGGLHVGIALVQKCKTKNKVVFKGTMEQRNDVKHLMEVRRGYRRYHRYHKRYRQARFDNRKSSKREGRIAPSILQKRQATIRVIHWINKWINITNYWLEDVSVDIRALTDGYQSYRWQYQKSNRLDENIRKAAILRDGGKCMECGKSNCRLEVHHIKPKRRNGSDTLDNLITLCESCHQKTEGQEELYMDRYFSLLKSSDNKNLNYAQHVMIGKMWLRKQLSGLGVLYLTSGGDTANKRIDWNIEKSHANDAVCITNLQPDTYDMKEWTVKPMRRQSKAKTDNVLGIKHRDLVEYTFKNGETHRGYVTALYPEQKAINFQSPTKHCKKVNARKCKLLWKYSKIYWFENAS

SEQ ID NO: 12824 - protein, 442 aa, unidentified; identical to SEQ ID NO: 2903

SEQ ID NO: 12825 - protein, 415 aa, unidentified
MIYVRSKEGKALMPSERGGRIGYLLRHGKAHVVSRVPFIVQLDYESTIYTQEVSLGIDAGSKHIGVSASSEKRELLAAQVELRSDVVNLLSTRRELRRARRNRKTRYRKVRFDDRKKKDSWLAPSIEQKVESHLKVIRLVHKLLPITKTTIEVAQFDAQKIKNPDIKGEEYQQGEQMGFWNVREYVLARDGHKCIHCKGKSKDPILNVHHLESRKTGGNSPSNLVTLCETCHKAYHCGEFELKIKRGTTLRDAAVMNIMRWAVYEQAKEEFRNVHLTYGYVTKHTRIENGITKTHAADAFCIAKNVHAIRLGTFFMCRCVPRHTRALHVANPKKGGIRRSCIASHKIGKSRFQRFDMVRWKGKECFIFGSTHGRPILRDVEGKQIAGQPSVNIKTIKFLNRLRNNILVEERTSES

SEQ ID NO: 12826 - protein, 427 aa, unidentified; identical to SEQ ID NO: 12706

SEQ ID NO: 12827 - protein, 408 aa, unidentified; identical to SEQ ID NO: 6232

SEQ ID NO: 12828 - protein, 434 aa, Escherichia sp.; identical to SEQ ID NO: 5780

SEQ ID NO: 12829 - protein, 396 aa, unidentified; identical to SEQ ID NO: 4508

SEQ ID NO: 12830 - protein, 420 aa, unidentified; identical to SEQ ID NO: 5988

SEQ ID NO: 12831 - protein, 415 aa, unidentified; identical to SEQ ID NO: 6534

SEQ ID NO: 12832 - protein, 367 aa, Microcoleus sp.
MSKTPNQVFVLDSDKKPLTPCLPVIARKLLNAGKAKVFRLYPFAIILKKSVNDSPVPIEIRIDPGSKTTGIALVQGTQVIWCAELTHRGQAIKSRLETRRAVRRGRRNRKTRYRKARFLNRTRLKGWLPPSLQHRVLTTMTWVSRLRKLAPIQSIAFELVNFDTQKMQNPEISGVEYQQGELQGYEVREYLLEKWKRKCAYCGSENLPLQVEHINPRAKGGTNRVSNLCLACEKCNLKKGTQDLRDFLKKKPEILKKIMSQAKTSLKDAAAVNATKSALFQALKDTAIEPIYVGRGSLTKFNRTNLKFPKAHWIDAACCRDVSQGLTLAINQPLLIKAMGLGSRQVVQTDKYGFPRRGYKPKKKVAG

SEQ ID NO: 12833 - protein, 425 aa, unidentified; identical to SEQ ID NO: 6631

SEQ ID NO: 12834 - protein, 451 aa, unidentified; identical to SEQ ID NO: 3199

SEQ ID NO: 12835 - protein, 470 aa, unidentified; identical to SEQ ID NO: 2825

SEQ ID NO: 12836 - protein, 413 aa, unidentified; identical to SEQ ID NO: 10591

SEQ ID NO: 12837 - protein, 431 aa, unidentified
MPNKVYVINKHGRPLMPCSPAKARHLLDEGKAKVKKRTPFTIQLVYGSSGYTQEVILGVDAGSKTIGMSASTTKEELLSAEVKPRNDVVDLLSTRREFRRAQRNRKTRYRKPRFDNRVRSKHKGWLAPSVEVKIQEHITAIRRVCGILPVSKVVIETAEFDLQMLKAIADGKPVPQGEDYQQGEMYGHYNVRQYVLWRDGYTCQCCGAHTTKKKEVRLHVHHLESRKVGGDAPDNQVTLCESCHEKLHKGLIAEKDFKKRKRRSTRDATFMGIMRKTLMQRLCSELPIPVVKTRGYITKATREKLLVLPKSHTNDALAIAQGKQGFNVGYLPGIVQINKIYTIRPVRHHNRQLHKATILKGGIRKSNQTEKYVFGYRLFDKVQFNGQDCFIWGRRTTGIFTIKTINGKMIKDGISFKKLKLVEKSTSYLIA

SEQ ID NO: 12838 - protein, 465 aa, unidentified
MSTCVCVLSNSGERLMPTFRLGKVRHLLKDGKTKIVKHHPFTIQLLYDSKTNTQPIEICEDVGYNYIGISVKSQSHEYVSAQYDTLQDEKACHDSCRKYRRTRRNRLRYRKPRFDNRKRSEGWLAPSLRHKKELNVNVVKMYCAVMPITHATVEVGSFDTMLVKAIQEGKAIPEGADYQKGPRYNLATLREAVFYRDNYVCKVCGRKATEGAILHVHHMFYWKGRHGNSLSELITVCEKCHTPANHQKGGKLYGFGENVKFADLSGAAFMNTVRWQIVNELYAAFGKDFVTVTYGAMTKEKRIALRLEKSHNNDAYAMGEFHPNCRCTFEHYEKVRRNNRILEKFYDSRYIDIRTGEIATGKELFNGRINRNHKKDSENLHRYRGKRTYAGHRALLRKKVNLNPGDLVSLNGEVLVVHSTHTNKKGAVNVEFKTPGKSGQKSASLKKLKIVKAADSMHSAWEKIS

SEQ ID NO: 12839 - protein, 348 aa, unidentified
MVYVQDIDGSPLMPTTRHGKVRRLLKANKATVISLCPFTIKLLYKTTDYKQEIVLGVDAGAKHVGLSATTKSKELYASEVILRSDIVDLISTRRDLRRARRSRLRYRKPRFMNRVKTKKRGWVAPSVRQRIDSHIRVIKFVYSILPISKLTIEVAQFDTQKIKNPEISGKEYQKGDQLGFWNVREYVLARDGHKCQHCRGKSKDPILNIHHIESRKTGGDSPSNLITLCETCHKEYHKGNIDLKVKRGKSLRDAAVMGIMKWELYDELKLLYPNIKMTFGYITKYNRINHGIGKSHVSDAFVISRNFNSCRLGYYYKQKLVRRHNRQIHKMKILKGGIKKPNQAPFKV

SEQ ID NO: 12840 - protein, 420 aa, unidentified; identical to SEQ ID NO: 8301

SEQ ID NO: 12841 - protein, 431 aa, unidentified
MPNKVYIINKHGRPLMPCSPAKARHLLDEGKAKVKKRTPFTIQLVYGSSGYTQEVILGVDAGSKTIGMSASTTKEELLSAEVKPRNDVVDLLSTRREFRRAQRNRKTRYRKPRFDNRVRSKHKGWLAPSVEVKIQEHITAIRRVCGILPVSKVVIETAEFDLQLLKAIADGKPVPQGEDYQQGEMYGHYNVRQYVLWRDGYTCQCCGAHATKKKEVRLHVHHLESRKVGGDAPDNQVTLCESCHEKLHKWLIAEKDFKKRKRKSTRDATFMGIMRKTLMQRLCSELPIPVIETRGYITKATREKLLVLPKSHTNDALAIAQGKQGFNVGYLPEIAQIDKIYTIRPVRHHNRQLYKATILKGGIRKSNQTKKYVFGYRLFDKVQFNEQDCFIWGRRTTGIFTIKTINGKMIKDGISFKKLKPVEKSTGYLIA

SEQ ID NO: 12842 - protein, 457 aa, unidentified; identical to SEQ ID NO: 4299

SEQ ID NO: 12843 - protein, 512 aa, unidentified; identical to SEQ ID NO: 4031

SEQ ID NO: 12844 - protein, 418 aa, unidentified
MVYVLNIDGQPLMPTTRHGKVKHLLKDGKAKVVKRCPFTIKLLYETPNCTQDLTLGVDTGSGAIGTAVSTDDGEIVYMSEVVVRNDITDKMTQRAKYRRNRRSRKTRYRKARWLNRKNSIKKDRFSPTMVSKLHSHVKEIEYIKSILPITTMVFETGTFDTYLMKNLSLVNENVRHWGYQKGTNYGFENTKAMVLNRDNYTCQYCKGKHKDSKLEVHHIVFRSKHGSDEESNLITLCHTCHKALHSGKISLKLEGKVKGNLKYATQMNSIRKQLSRIYPEAIETFGYITKANRLKLGVDKEHFYDACVIATHGNKFSVRCNLYKKKCVSDGDFQQTKGVRSEQRIPTCKIQGFRKFDKVRYFGKEYFIKGRLSTGYAILMDIDGNKSDFSYMPKGFKTPKIINLKRLEARSSWIVIFK

SEQ ID NO: 12845 - protein, 383 aa, Sutterella sp.; identical to SEQ ID NO: 6831

SEQ ID NO: 12846 - protein, 335 aa, Enterococcus sp.
MDQRRMYRRNRRNRKTRYRKARFNNRKNSKRKNRFSPTMTSKLHSHQKEIEFIKSILPIAKLILETGTFDPHLMKNPSLANLKVKPWGYQQGPNYGFENMKARILARDNHTCQICKKKPKNERLEVHHIIFRSQGGSDEENNLVTVCHSCHVELHKGLIHPNFEGSLKNALKYATQMNSIRVQLLKLYPDAIETFGYVTKANRLNLGLPKEHYVDAAVIATAGNQVNFACNLMIKRCIPKGDFQRTKGIRSEKIIPKGKIDGFKKYDKVRYFGNEYFVKGRMTTGYIQLMNIYGEKISFNHMPKGFKTPKTKNCQRISARKTWITTTEPLIKNIA

SEQ ID NO: 12847 - protein, 360 aa, unidentified
VIKQGLYLGSGVACTKHVGLSATTKSKELYASEVILRSDVVDLLSTRRELRKIRRYRLRYRKPRFMNRIKSKKRGWIAPSIRQKIDSHIRIIGFVYSILPVSKLIIEVAQFDTQKIKNPEISGKEYQEGEQLGFWNVREYVLARDEHKCQHCKGKSKDPVLNVHHIESRKTGGDSPSNLITLCKTCHKEFHKGNIKLKVNRGESLRDAAVMSIMKWELYDELKSLYPNVKMTFGYITKYNRINHGIEKSHVSDAFVISRNFDSERLGYYYKRKLVRRHNRQIHKMKAPKGGNKRMNQSPFKVFGFRLFDKVMFQGKERFIYARRLRGIFNIRDINGENKKDISYKKLEYVSHGLISIVAG

SEQ ID NO: 12848 - protein, 465 aa, unidentified; identical to SEQ ID NO: 3856

SEQ ID NO: 12849 - protein, 445 aa, unidentified
MHTGLQQCEGVTMRYVYVLDMDGKPLMPTCRFGKVRRMLRSGQAKAVDTLPFTIQLTYKPKTRILQPVTIGQDPGRTNIGMAAVRSDGTELYRARIETRNKEIVSLMNERRSFRQASRRGERLARKRLAKRLHTTAKHLNGRILPGCKEPLAVKDIINTESRFNNRLRPEGWLTPTATQLLRTHLEAIRKLSGILPVTEVVLEVNRFAFLQLDNPEMRKKDIDFCHGPLYGTGGVKAAVSLQQDGYCLLCRKQDIGHYHHIVPRSRRGSNTIQNIAGLCPKCHELVHKDADAAQKLATIKTGLTKKYGGTSVLNQIIPFLTRELAALYPRHTHVTNGWNTREFREKHGLGKDHDIDAYCIAASILEDMQPVMQTETYKIKQFRRHDRALINHQTERTYRYDGKIIAKNRKKRMDQKTDSLEDWFTDMAKQHGHATASRMLSRVTL

SEQ ID NO: 12850 - protein, 504 aa, unidentified
MSIIYVQDRHGKPLAPTTRGGHVRRLLDSKQARVVCGNPFTIRLMYGVDPCTQGFILGIDPGRTNIGVTVAAADGTCVFSAKAETNNKDVPKRMKERKDHRQASRQGERKRRQRRARKNGTCFGERKRILPGCKEPITNHYITNTEARFMNRARTKGWLTPTANQLLQSTISLVRKVCKFLPVTDVVLELNEFAFMAMDDPGIQRWEYQKGPLYGYGSVEAAVYTQQDGHCIFCEQAIAHCHHVIPASKGGSDTLENRAGLCGGHHDLVHKEQSWTDKLAELKAGMNKRYAALSVVNQIIPRLADELGKMFPGHAFATNGWSTKQFRDAHGIPKDHNTDADCIACSILENPTIKLPEKVYELRKFRRHDRAQISRMEDRNYYLPGADPKTGKPKKVLAAKNRHKRTEQKTDSLEEFRAAHPNDVGRLMVARGGPKHKDPNRVLPGAIFQVETSSGNVEQLVLQGSHGRDKNGQPLYMEFVGQGNFRPNTVSYTHLRAHETSLHL

SEQ ID NO: 12851 - protein, 413 aa, unidentified; identical to SEQ ID NO: 2636

SEQ ID NO: 12852 - protein, 450 aa, unidentified
VGDFGRGAAPQTTACSCLHYLLSQIKNTIERIAYQMVYVLNVNGVPLMPTDRHGKVRRLLKSKQARVVKRTPFTIQLLYDTPTCVQPLTLGVDAGSKHIGLSVSSENKEVYAGQIEPRQDVSKKLDERRQYRRSRRNRLRYRKPRFNNRTASKPKGWIAPSIACKIESHVAVIGQLHQILPITEIVVEVADFDTQKILNPDIQGKEYQTGPLSNSNLRQYTFARDGYTCQWCKGKSKNKILHVHHWNYWRGDHTDKPSSVITLCDVCNDSKNHKKDGFLYGWEPKITNNLKDAAFMNISRWALYNRLKEIYPNFRLTYGYITKVVRSDHGLEKSHVNDALCIANHPNATRLLYCYLIKKNRVHNRQLHKANKLKGGRLKLNQAPHLVKGYRLNDIVKCNGQNYVITARRRTGYFQLKNFITGEKLPSVSYKKLELLEKAKNYTTERIARN

SEQ ID NO: 12853 - protein, 447 aa, unidentified
VPAYRFKHITKKEVPYMVYVLDIDGQPLMPTSRHGKARRLLNSHLAKVVKRCPFTIQLLYQSTKETQPVSLGVDAGSRHIGLSATTEREVVYQEELVPRNDIVKLLSARRALRRSRRNRKTRYRRVRFNNRVHSKHKGWLAPSVEVKIQEHITATKRICQILPIFDIHVETAEFDLQRLKAMEEGRLLPAGTDYQLGEQYDFYNTRQYVLHRDEYTCQCCGTHDNNVKLHVHHVESRQTGGEAPNNLITLCEHCHKSIHAGKMMLPKGKKRGKSYRDAAFMGIMRNTLLERLRKEVNVPVTMTYGYITKYWREKAGLEKSHINDAICISKHPYARPLETYYLTKAVRHHNRQIHKTKFSKGGIRKRNQAPYLVKGFRLFDKVLYQGESYFIFGRRITGYFDIRTLDGTKVNKGSTSYKKLRIQDTAEAYLTEVRAIPHMNEFTCVLA

SEQ ID NO: 12854 - protein, 427 aa, Parasutterella sp.; identical to SEQ ID NO: 3787

SEQ ID NO: 12855 - protein, 422 aa, unidentified; identical to SEQ ID NO: 11357

SEQ ID NO: 12856 - protein, 325 aa, unidentified
RKTRYRAPRFDNRIRTKRKGWLAPSVENRINAHLSRIEAVLRLLPVTKITVETASFDLQLLKNPDISGKEYQEGEQLGFWNIREYVLCRDGHVCQHCYGRSKDPVLNVHHLESRRTGGDSPGNLITLCETCHKALHRGEITLKAKRGQSFRAEAFMGIMRSEVLNRLKASHPELEVNNTYGYRTKHARIANDIAKSHCADAFCIAGNLGAERLGEFFFQKQTRRNNRQIHKLSILKGGIRKRNQAPFEVNGFRLFDKVACKGEEGFIFGRRSSGFFDVRKLDGTRISAGISCKKLHLLEKRRTYLTEIRKEEALPALPEGRGLRA

SEQ ID NO: 12857 - protein, 438 aa, unidentified; identical to SEQ ID NO: 4848

SEQ ID NO: 12858 - protein, 422 aa, unidentified; identical to SEQ ID NO: 5333

SEQ ID NO: 12859 - protein, 327 aa, unidentified
MPTVYVLNRHGRPLMPCTPAKARHLLDAGKAKVRHRTPFTIQLLYGSTGYTQEVILGVDAGSKTIGLSAATETEELFSAEVKPRNDVVELMSARRQFRRARRNRTTRHRKLRFDNRVRSKHKGWLAPSVEVKIQEHMTAIRRVCVILPVSKVVVETAEFDLQLLKAVAEGKPVPQGEDYQKGEMYGHYNVRQYVLWRDGYTCQCCGAHGSVRKGVPLHVHHLESRRVGGDAPDNLVTLCTACHDKLHKGIIMAADIKKRKRRSTRDATFMGIMRMTLLRRLREQLPVPVVETRGYITKATRENLLVLPKRHANDALAIAHGPQGFRA

SEQ ID NO: 12860 - protein, 456 aa, Halomonas sp.
MAVFVLDKHKQPLMPCSEKRARLLLERGRAVVHKRYPFTIRLKDRMGGDTQPLRLGIDPGSKTTGLALMRETNDGQRHVLCLFDLVHRGYSIRKAMEQRAAFRRRRRSKNLRYRAPRFDNRTKPKGWLAPSLQHQVDTVMAWVNRFSRLTPITAISQELVRFDTQKLENPEISGVEYQQGTLLGYEVREYLLEKWGRECAYCGTKDTPLEIEHVVPRTRQGSNRVSNLTLSCHDCNQAKDALPLADFFATDRGLRKRLKANGHTAETQLERVERQLKQPLRDASAVNAIRWSLFSALKTTGLPMAVGTGGRTKYNRQRLTIPKTHALDAACVGAFDTLHDWAVPTLTIKATGRGSYKRTRLTKHGFPRGFLMRQKQVQGFQTGDMVKAIVPTGKKAGTHTGRVAVRKTGSFNIQTEHGAVQGISHKYCAVTQRSDGYGYHLTSTNRQKGGAGQTVA

SEQ ID NO: 12861 - protein, 343 aa, unidentified
LRVFILNKRGKPLMPCSPAKARLLLKEKKAIVKRRTPFTIQLTIATGEAKQPVSLGIDAGYKHVGLSASTEKAELYASEVELRQDITDLLSARRALRQSRRNRKTRYRAPRFDNRIRTKRKGWLAPSVENRINAHLSRIEAVLRLLPVTKITVETASFDLQLLKNPDISGKEYQEGEQLGFWNIREYVLCRDGHVCQHCYGRSKDPVLNVHHLESRRTGGDSPGNLITLCETCHKALHRGEITLKAKRGQSFRAEAFMGIMRWEVHNRLRALHPGIEVSNTYGYRTKHARIANGIAKSHCADAFCIAGNLGAKRLGEFLFQKQTRRNNRQIHKLSILKGGIRK

SEQ ID NO: 12862 - protein, 515 aa, unidentified; identical to SEQ ID NO: 5111

SEQ ID NO: 12863 - protein, 430 aa, Desulfobacter sp.
LNVFVLDTNKKPQNPVHPAKARLLLTEGKAAVFRQFPFTIILKETVLDVASNPLRIKIDPGSRETGIAVINDDSGEIVFAMELRHRGQQIKNNLESRRAIRRSRRNRKTRYRKPRFDNRTRAEGWLPPSLKSRVHNIETWVNRLCRFCNIQAISMELVRFDMQKIQNPEISGVAYQQGELMGYEVREYLLEKWDRTCAYCGKTDIPLEIEHIVPRSKGGSNRVSNLTLACTACNRKKGNKSLEQFLSRKPRLLKRIQKQSKVPLKDAGAVNTTRWDLFRTLKKTGLPVETGSGGLTKFNRTTRGLHKTHWLDAACVGKSTPEKMFQIDKAVLIVKADGHGSRQMCRVNKFGFPRTTAKSTEKKVKGFQTGDIVKAVVTSGKKVGTYTGRVAVRKSGSFNIKTVDKTVQGISWKYCRLLHASDGYSYNTTC

SEQ ID NO: 12864 - protein, 426 aa, Scytonema sp.; identical to SEQ ID NO: 2729

SEQ ID NO: 12865 - protein, 457 aa, unidentified; identical to SEQ ID NO: 4365

SEQ ID NO: 12866 - protein, 442 aa, unidentified
MVTVQQSTHHLPFGRVFIRRNLFMVYVISQDSKPLMPCSNPIARLLLKQGKAKVKRREPFTIKLIYETTDYTQDLTLGVDTGSGTIGAAVSKDNGDIVYMSEVVVRNDITDKMTQRAKYRRNRRNRKTRYRKARWLNRSNSIKKDRFSPTMQSKLHSHVKEIEYIQSILPITEMVFETGQFDMHLMKDPSLANPKVRPWGYQKGTNYGFENTKAMVLNRDNYTCQCCKGKHKDSKLEVHHIVFRSQGGSDEESNLITLCHTCHKNLHSGKINLKLSGKVKGNLKYATQMNSIRKQLFRLYPNAIETFGYVTKANRLHLGVDKEHYYDACTIATQGNTFNVKSNLYKKKCVSDGDFQKTKGICSEQPIVTDKICSFRKFDKVRYFGKDYFIKGRMSTGYAILMDIDGNKIDFSTMPRGYKTPKLSNCKRITARSTVMTQVKVV

SEQ ID NO: 12867 - protein, 450 aa, unidentified; identical to SEQ ID NO: 6279

SEQ ID NO: 12868 - protein, 440 aa, unidentified
VFPPQGEIIFSERKLFMVFVLDKSKKPLNMISHAKARILLKNRLAVVHKVYPFTIRLKDNSAVLKDRSYTVKLDPGSRTTGVAITDNNDSVVMLAEIEHRGHVIKRNLDKRRAVRNSRRQRKTRYRPARFLNRTRPQGWLAPSVKSRADNVINFIKKYKKLINIDKVMIENVNFDTAQMTSDIKLWGTSYQQGPLYQTKLRSYLFKKYNGQCVYCGNKAEEIEHINPKSKGGTNSPHNLVIACKKCNKLKGKLSLKEFGELMNKDYSHLEPKKLPKDAAIVQSARNYMVKEITKLVPNTTTHDAWMTQYNRDELGLPKEHYYDALSVGNVKNYKFLTDKVLQISAKGRGLRQMCRMDKYGFPKTKPKGSKSVKGFQTGDMVKAIVPKGLKQREYLGRVMVHSRGYFDIKTKNGLAQSIGYKYCHLIQRGDGYSYNYKERF

SEQ ID NO: 12869 - protein, 433 aa, unidentified
VVYITNQNGQPLMPTTRHGFVRRALKEGKAKVIRRCPFTIQLLYDTGDVVQPVSLGVDAGSKHIGLSATTETKELYAADIEVRNDIVKLQSARREFRRSRRNRKTRYRKPRFNNRTKAKHKGWLAPSVEAKIGSHIQAVKNACKILPVKRIVVEAASFDLQKLKADEAGLAAPKGAEYQQGEMLGFWNAREYVLFRDGHTCQCCKGKSGDKRLNVHHIQSRQIGGDAPNNLITLCETCHTKYHAGLVNLPKSIKRDKPQKDAVFMGVMRWIFYNRLQALYPGMVSMTYGYITKNTRITNGIEKTHTADARCISGNPKAEPADCVYFQRKVRCHNRQLHKATILKGGVRKRNQAAYAVYGYRLFDKVLYQNQECFITGRRTSGSFKLVKFDGTVLSEGVSYKKIILLERAKHIITERLAASSPCLKAGASAAVF

SEQ ID NO: 12870 - protein, 471 aa, Microcoleus sp.
MRSQFLALSFAIKQTYRVEVSVVNPKSFRNIAKANITRKETQALSKVFVLDTNKQPLNPIHSGRARMLLSQGKAAVFRRYPFTVILNKEVVNPKVESLRVKIDPGAKTTGLALVNDSTGEVVWAAQLQHRGFQIRDALTSRRQLRRSRRNRKTRYRKPRFLNRTRPEGWLPPSLNSRVANILTWVNRLSSISQITAISQELVRFDTQQMEDAEISGIGYQQGTLFGYEIREFLLEKWNRTCAYCGAKDKPLEIEHINARSKGGSNRISNLCLACTSCNQKKGNQDIKDFLKGKPDLLKCILSQAKRPLADTAAVNATRWNLYYNLKKTGLPVEVGTGGRTKYNRTIRGLDKTHYWDAACVGASTPEQLITSEVKPLLIAAKGHGTRQQCRTDKFGFPSRYCKRTKFHKGFQTGDIVKAVVTSGKKIGTYVGRLATRATGSFNISTTDGLVQGISHKYCLPLHKKDGYSYIQ

SEQ ID NO: 12871 - protein, 470 aa, unidentified; identical to SEQ ID NO: 2825

SEQ ID NO: 12872 - protein, 456 aa, unidentified
MSTCVCVLSNSGERLMPTFRLGKVRRLLKDGKAKIVKHHPFTIQLLYDSKTNTQPIEICEDVGYNYIGISVKSESHEYVSAQYDTLQDEKACHDSCRKLRRARRNRLRYRKPRFDNRKRSEGWLAPSLEHKKQLNISLIERYVSVIPITRATVEVGSFDTILLQAIQKGKSKPEGVDYQKGPRYNLATLREAVFYRDNYTCQVCGRKIADGAILHMHHMFYWKGRHGYQLDELVTACEKCHTPANHQKGGKLFGFGEDKEFANLSGAAFMNAVRWQIVDALHATYGKEFVTITYGAMTKEKRIILGIEKTHNNDAYAMGDYHPVHRCVFRHYQKRRRNNRVLEKFYDATYIDTRTGNKAKGKELFNGRISRNHKKNSEDLHKYRSKKVSKGRRSIRRQRYAIQPYDTVRLESKTYITSGCHNKGTRLLIPANGKSKSVAISKVQVVCHAGAWIQII

SEQ ID NO: 12873 - protein, 512 aa, unidentified; identical to SEQ ID NO: 5174

SEQ ID NO: 12874 - protein, 406 aa, unidentified
MVYVQDIDGRPLMPTTRHGKVRRLLKSKKATVVNLCPFTIRLLYDTTGYKQEITLGVDTGTKHVGLSATTKSKELYASEVILRSDVVDLLSTRRELRKIRRYRLRYRKPRFMNRIKSKKRGWIAPSIRQKIDSHIRIIGFVYSILPVSKLIIEVAQFDTQKIKNPEISGKEYQEGEQLGFWNVREYVLAGDGHKCQHCKGKSKDPVLNVHHIESRKTGGDSPSNLITLCKTCHKEFHKGNIKLKVNRGESLRDAAVMGIMKWELYDELKSLYPNVKMTFGYITKYNRINHGIEKSHVSDAFVISRNFDSERLGYYYKRKLVRRHNRQIHKMKAPKGGNKRMNQSPFKVFGFRLFDKVMFQGKERFIYARRLRGIFNIRDINGENKKDISYKKLEYVSHGLISIVAG

SEQ ID NO: 12875 - protein, 426 aa, Scytonema sp.; identical to SEQ ID NO: 2766

SEQ ID NO: 12876 - protein, 445 aa, unidentified
MPCRPARARQLLRDGKAAVFRRYPFTIVLKERQGGETQPVALNVDPGSKTTGIALVALFQRDQVAVYGQHIVHRGQQIRDALESRRTIRRSRRHRKTRYRKPRFLNRTRPAGWLPPSLMSRVYNVETWTKRLSRFVPITSANVETVRFDTQLIENPDIAGKEYQQGSLFGWELREYLLYRHQHICAYCHGLTKDLVLEKEHVTPKALGGSNRLANHVISCRECNVDKGSLHPNAWMSLCKQRGDKLNLTRARNMQRIMDGYRPSLRDAAAVNATRYAVGNSIKYIIPNTQFWSGGLTKKNRSEQGHTKDHWIDAACIGQNGSAVVLECHHILVASAKGHGSRQMCRVDKYGFPRTSAKTSSVVYGFRTGDLVTANVPTGKKQGLHIGRVAVRKNGYFNIQSESGAVQGISHKHCRIIQRSDGYNFNYGAAIPPGTKVPGFLVLTR

SEQ ID NO: 12877 - protein, 413 aa, unidentified
MTNYAFVLDANNKQLTPTKEQKAWFLIRKKRATLVSKYPMVIQLKKKIPDKEICKDEVRCGIDDGGLHVGVALVQKCQTRNKVVFKGVIEQRNDVKHLIDVRCGYRRYHRYHKRYRSARFNNRNSSKREERIAPSILQKRQATIRVINQLNKWINITNYWLEDVAIDIRALTDGYKPYRWQYQKSNRLDENIRKAVILRDGCKCMECGKSNCRLEVHHIKPRRLKGSSTLDKLITLCTKCHQKTESVEELYMDRYFALLNSSDNKNLNYAQHVMIGKKWLREQLSNLGMLYLTNGGDTANKRIDWDIAKSHSNDAICITDLRPDTCEIKEWAIKPMRRQSKAKTDNVLGIKHRDLVEYTFRNGETHRGYVTALYPEQNAINFQSPTKHCKKVNAKKCKVLWKYSKIYWLDNVG

SEQ ID NO: 12878 - protein, 456 aa, unidentified
MSTCVCVLSNSGERLMPTIRLGKVRRLLKDGKAKIVKHHPFTIQLLYDSKTNTQPIEICEDVGYNYIGISVKSESHEYVSAQYDTLQDEKACHDSCRKLRRTRRNRLRYRKPRFDNRKRGEGWLAPSLEHKKQLNIRLIERYVSVIPITHATVEVGSFDTMLLQAIQKGKSKPEGVDYQKGPRYNLATLREAVFYRDNYTCQVCGRKIADGAILHMHHMFYWKGRHGYQLDELVTACEKCHTPANHQKGGKLFGFGEDKEFANLSGAAFMNAVRWQIVDALHATYGKEFVTITYGAMTKEKRIILGIEKTHNNDAYAMGDYHPVHRCVFRHYQKRRRNNRVLEKFYDATYIDTRTGNKAKGKELFNGRISRNHKKNSEDLHKYRSKKVSKGRRSIRRQRYAIQPYDTVRLESKTYITSGCHNKGTRLLIPANGKSKSVAISKVQVVCHAGAWIQII

SEQ ID NO: 12879 - protein, 532 aa, Nocardiopsis sp.; identical to SEQ ID NO: 4278

SEQ ID NO: 12880 - protein, 455 aa, unidentified
VPRTDKTPSNIGEGFQPVARPRSQILRVFVLNKRGQPLMPCSPAKARLLLKEKKAIVKRRTPFTIQLTIATGEAKQPVALGVDSGYKHIGLSATTEKAELYASEVELRQDITDLLSARLALRRSRRSRKTRYRAPRFDNRVASKRKGWLAPSVENRIAAHMSRVEAVMRVLPVTAITVETAAFDTQLLKNPDIAEAAYQQGEQLGFWNVREYVLFRDGHVCQHCRGKSKDPILNVHHIESRRTGGDAPNNLITLCETCHKAFHRGEIKLKVKRGKSFKAETFMGIMRWTLFERLKKAHPELRVRNTYGYLTKHKRISHGIAKSHCADAYCIADNLGAKRLEGFFFQKQTRKHNRQIHKLSILKGGLRKKNQAPYEVKGFRLFDKVICKGEEAFIFGRRTSGSFDVRRLDGTRISAGINYKKLRLLEPRTTYLTEFKKEAALPPLHECRGFCAEFL

SEQ ID NO: 12881 - protein, 406 aa, unidentified; identical to SEQ ID NO: 2752

SEQ ID NO: 12882 - protein, 425 aa, unidentified; identical to SEQ ID NO: 6912
  source 1..425: note = Microcoleaceae bacterium UBA10368

SEQ ID NO: 12883 - protein, 465 aa, unidentified; identical to SEQ ID NO: 3856

SEQ ID NO: 12884 - protein, 413 aa, unidentified; identical to SEQ ID NO: 7099

SEQ ID NO: 12885 - protein, 442 aa, Lactobacillus sp.; identical to SEQ ID NO: 5571

SEQ ID NO: 12886 - protein, 493 aa, unidentified; identical to SEQ ID NO: 2644

SEQ ID NO: 12887 - protein, 430 aa, unidentified; identical to SEQ ID NO: 4504

SEQ ID NO: 12888 - protein, 427 aa, unidentified; identical to SEQ ID NO: 7268

SEQ ID NO: 12889 - protein, 421 aa, unidentified; identical to SEQ ID NO: 2846

SEQ ID NO: 12890 - protein, 411 aa, unidentified; identical to SEQ ID NO: 3762

SEQ ID NO: 12891 - protein, 442 aa, unidentified; identical to SEQ ID NO: 2834

SEQ ID NO: 12892 - protein, 465 aa, unidentified
MSTCVCVLSNNGERLMPTIRLGKVRHLLKDGKAKIIKHHPFIIQLLYDSETNIQPIEICEDVGYNYIGISVKSQSHEYVSAQYDTLQDEKSCHDACRRMRRTRRNRLRYRQKRFDNRKRDKGWLAPSLKHKKELNVNVIKMYCEVVPITHATVEVGSFDTMLVKAIEEGKATPEGADYQKGPRYNLATLREAVFYRDNYTCQVCGREASEGAILHVHHMFYWKGRHDNSLSELITVCEKCHTPANHQKGGKLYGFGEDIKFANLSGAAFMNTVRWQIVNELYAAFGKPFVTFTYGAMTKEKRIALHLEKSHNNDAYAMGEFHPNCRCTFEHYEKVRRNNRLLEKFYDSRYIDIRTGEIATGKELFNGRINRSHKKDSENLHKYRGKRIRKGYRALRRKKVALNPGDLVSLNGEILTVHGTHTKKNGSVNVEFKTPSKSGKKSTSLKKLKIIKTISPMRSAWDKVS

SEQ ID NO: 12893 - protein, 442 aa, unidentified; identical to SEQ ID NO: 7655

SEQ ID NO: 12894 - protein, 451 aa, unidentified
MSVAVISKTGERLMPTSEYRARKLLKSGKAIKYSYHPFTIQLTERKTGNIQPIELCMDTGYIHIGISVKSEKHEYLAEQIDTLTDERIRHDACRMYRRQRRGRKRYRKPRFNNRKRDKGWIAPSLKHKKDIHVQAISRINKVMPLTDITMEMGNFDTQVLKAKEEGKPLPQGACYQHGERYGTATLREAVFSRDGYKCQCCGRTIRDGAMLHVHHVKYRSQGGTNSMANLATVCDKCHTPKNHKPGGKLYNWKPKLPDFKGATFMTTIRWQLYNEVKSLFPDINVHITYGAATKEQRRELNIDKSHVNDAFAMGKFHPKHRANAVLYKKKRRNNRCLEKFYDAKYIDSRDGSKKTGQELFNGRINRNHKKDSENLHQYRLQKIKAGKRTIRKQHYSIQPHDIIMYKNRKRETSGCHCNGTRVVLLPDKKTAAIQKVKIYKYAGGYFKSAFN

SEQ ID NO: 12895 - protein, 429 aa, Petrotoga sp.; identical to SEQ ID NO: 5336

SEQ ID NO: 12896 - protein, 501 aa, unidentified; identical to SEQ ID NO: 9337

SEQ ID NO: 12897 - protein, 466 aa, unidentified
LSIKPLINIGEGVIYSSICTGLLLQTYQKRKKVPCMVYVLDINGQPLMPTTRHGKVRRLLNSHLAKVVKRCPFTIQLLYQSTKEIQPVSLGVDAGSKHIGMAATTEKKVVYQEELSPRNDVVKLLSLRRASRSSRRSRKTRYRKPKFNNRVHSKHKGWLAPSVEVKIQEHITAIKRICQILPISEIQVETAEFDFQRLKAMKEWKPLPVGTDYQLGEQYDFYNTRQYVLHRDGYTCQCCGTHDNNIKLHVHHIESRQTGGDAPSNLITLCEHCHKALHKGKLELPKGKKRGKTYRDATFMGIMRKTLLERLRKEVDVPVSGTYGYITKYLREKTDLEKSHINDAICISKYPYAKPLDTYYLTKVVRNHNRQIHKSNFSKGGIRKRNQAPYLIKGFRLFDKVLYQGKEYFIFGRRATGYFDIRTLDGTKVNKGSISYKKLRIQDTAKAYLKEARAIPHMNKFTCVLA

SEQ ID NO: 12898 - protein, 438 aa, unidentified
MPTSEYRARKLLKSGKAIKYSYHPFTIQLTERKTGNIQPIELCMDTGYIHIGISVKSEKHEYLTEQIDTLTDERSRHNARRMYRSQRRNRKRYRQPRFNNRKKDKGWIAPSLEHKKNIHVQAISRINNVMPLTDITMEMGNFDTQVLKAKEEGRPLPQGVDYQHGERYSIATLREAVFARDGYKCQCCGRTIKDGAILHVHHIKYRSQGGTNSISNLATVCDKCHTPKNHKPGGKLYGWKPKLPSFKGATFMTTIRWQLYNEAKALFPDIDIHITYGAATKERRRELNIDKSHINDAFVMGQFHPRHRIKAVLYKKKRRNNRCLEKFYDAKYIDSRDGKKRSGQELFNGRINRNHKKDSENLHQYRLQKVTAGKRTVRKQHYSVQPHDIIIYESRKRETTGCHCNGARVMLLPDKKSVSIKKIKIYRYASGYFKSTFN

SEQ ID NO: 12899 - protein, 442 aa, unidentified; identical to SEQ ID NO: 3234

SEQ ID NO: 12900 - protein, 416 aa, unidentified; identical to SEQ ID NO: 7823
  source 1..416: note = Lachnospiraceae bacterium

SEQ ID NO: 12901 - protein, 413 aa, unidentified; identical to SEQ ID NO: 11236

SEQ ID NO: 12902 - protein, 425 aa, Ktedonobacter sp.; identical to SEQ ID NO: 6721

SEQ ID NO: 12903 - protein, 411 aa, unidentified; identical to SEQ ID NO: 2867

SEQ ID NO: 12904 - protein, 472 aa, unidentified; identical to SEQ ID NO: 4432

SEQ ID NO: 12905 - protein, 465 aa, unidentified
MSTCVCVLSNSGERLMPTIRLGKVRHLLKDGKAKIVKHHPFTIQLLYDSKTNTQPIEICEDVGYNYIGISVKSQSHEYVSAQYDTLQDEKACHDSCRKLRRTRRNRLRYRKPRFDNRKRGEGWLAPSLEHKKQLNIRLIERYVSVIPITHATVEVGSFDTMLVKAIEEGKATPESADYQKGPRYNLATLREAVFYRDNYICKVCGRKATEGAILHMHHMFYWKGRHGNSLSELITVCEKCHTPANHQKSGKLYGFGENVKFADLSGAAFMNTVRWQIVNELYAAFGKDFVTVTYGAMTKEKRIALHLEKSHNNDAYAMGSFHPVNRCAFEHYEKVKRNNRILEKFYDSQYIDTRTGELTNGKSLFNGRISRSHKKDSENLHKYRGKRICKGHRALRRKKLALNPGDLVSLNGEILVVHGTHTKKNGSVNVEFKTPSRGGKKSASLKKLKIVKTSNLMHSAWTKVS

SEQ ID NO: 12906 - protein, 450 aa, Clostridium sp.; identical to SEQ ID NO: 10358

SEQ ID NO: 12907 - protein, 414 aa, unidentified
MPCSPAKARLLLKEKKAIVKRRTPFTIQLTIATGETKQPVSLGVDTGYKHVGLSASTEKAELYASEVELRQDITDLLSARRALRQSRRNRKTRYRAPRFDNRIRTKRKGWLAPSVENRIDAHLSRIEAVLRLLPVTKITVETASFDLQLLKNPDISGKEYQEGEQLGFWNIREYVLCRDGHVCQHCYGRSKDPVLNVHHLKSRRMGGDSPGNLITLCETCHKALHRGEITLKVKRGQSFRAEAFMRIMRWEVLNRLKASHPELEVNNTYGYRTKHARIANDIAKSHCADAFCIAGNLGAERLGEFFFQKQTRRNNRQIHKLSILKGGIRKRNQAPFEVNGFRLFDKVACQGEEGFIFGRRSTGYFDVRKLDGTCISAGISYKKLHLLEKRRTYLTEIRKEEALPPLPEGRGLRA

SEQ ID NO: 12908 - protein, 404 aa, unidentified
RRCRRQRRAKANGTISKKCVKQTTAQNGSASKRAKEIGVIKRHLPGCEKDVLCIGIKNKEAKFSNRTRPEGWLTPTTNQLLKTHINLVKKIRKFLPISDVVLEINKFAFMRLDNPNIQKWQYQQGPLYQKASLEEAVSEMQEHHCLFCKQSIVHYHHVVPQSENGSDTIGNIVGLCTKHHDLVHKDTAWQKKLAKKKTGLNKKYGALSVLNQIIPALTKELSSLFPKHFFATNGKSTYDYRAAHGVSKDHWLDAYCIACSVLADDVCDNNINSHVPYELKQFRRHDRRALHKENMSRVYTLDGKKVATNRHKAIKQTTDSLEEFRQRQPNDVCKLKVKEHHPEYRNPERNFPGCVFLVGKHTHVMQGTSGSHNGKADGYYDTNGNSYPSGKCKFVAKNKGIVFA

SEQ ID NO: 12909 - protein, 420 aa, unidentified; identical to SEQ ID NO: 10196

SEQ ID NO: 12910 - protein, 465 aa, unidentified
MSTCACVLSKNGERLMPTIRLGKVRHLLKDGKAKIIKHHPFTIQLLYDSETNIQPIEICEDVGYNYIGISVKSQSHEYVSAQYDTLQDEKACHDSCRKLRRSRRNRLRYRKPRFDNRKRGEGWLAPSLRHKKELNVNVVKMYCAVMPITHATVEVGSFDTMLVKAIEEGKATPESADYQKGPRYNLATLREAVFYRDNYVCKVCGRKATEGAILHVHHMFYWKGRHDNSLSELITVCEKCHTPANHQKGGKLYGFGEDIKFANLSGAAFMNTVRWQIVNELYAAFGKPFVTFTYGAMTKEKRIALHLEKSHNNDAYAMGSFHPVNRCAFEHYEKVKRNNRILEKFYDSQYIDTRTGELTNGKSLFNGRISRSHKKDSENLHKYRGKRIRKGYRALRRKKVALNPGDLVSLNGEILTVHGTHTKKNGSVNVEFKTPSRGGKKSASLKKLKIVKTSNLMHSAWTKVS

SEQ ID NO: 12911 - protein, 417 aa, unidentified
MPCSPAKARLLLKERKAIVKRRTPFTIQLTIATGEAKQPVTLGVDSGYKHIGLSATTEKAELYASEVELRQDITDLLSARLALRRSRRSRKTRYRAPRFDNRVASKREGWLAPSVENRIAAHMSRVEAVMRVLPVTAITVETAAFDTQLLKNPDITGAAYQQGEQLGFWNVREYVLFRDGHVCQHCRGKSKDPILNVHHIESRRTGGDAPNNLITLCETCHKAFHRGEIKLKVRRGKSFKAETFMGIMRRTLFERLKKAHPELNVRNTYGYLTKHKRISHGIAKSHCADAYCIADNLGAKRLEGFFFQKQTRKHNRQIHKLSILKGGLRKKNQAPYELKGFRLFDKVICKGEEAFIFGRRTSGSFDVRRLDGTRISAGINYKQLRLLEPRTTYLTEFRKEAALPPLHECRGFRAEFL

SEQ ID NO: 12912 - protein, 442 aa, Lactobacillus sp.
MKHENANRVFLLNKDGKPLMPCRPRKARLLLTSGKAFVVKKYPFTIQLKYGSYGYKQKVSLGVDTGQRHIGFAIVSQNKVLHQSEVELRQDVHKNLYTRKIYRRSKRNRKTRYRQARFLNRVHGKRDGLWLPPSIKGKVSHNIAWIKRYLAVLPNPDLHIEVGKFDMAKMVNPEISGKQYQEGSLKDWKNYEYYVLARDEYTCQLCHKHGEGVKLVVHHIVYRSQGGTDRVDNLITLCTNCHTTKNHQPGGKLYKWMKAKKKVIKQLKGATFMNILRKRIMTAFPEASFQYGSQTYVDRKNLLLPKGHFMDAIAISGIKSVGQLSDTVTMISQFRKKKRSLHEATARKGRKQPNTSSKRNEKNTKHARGLWLNDYVRVIGNHAKGYVKGFKSNGYYVYLTDGLGNYVLNNGKNYINGQQCRLIMHNVNWQKAEQKLSLYKFK

SEQ ID NO: 12913 - protein, 414 aa, unidentified; identical to SEQ ID NO: 7107

SEQ ID NO: 12914 - protein, 494 aa, unidentified; identical to SEQ ID NO: 5675

SEQ ID NO: 12915 - protein, 413 aa, unidentified
  source 1..413: note = Lachnospiraceae bacterium
MTNYAFVLDANGKQLAPTKEQKAWFLIRKKRAALVSKYPMVIQLKKEISDGQICKDEICCGIDDGGLYVGLALVQQCKTKNKVVFKGTIEQRNDVKHLIEVRKGYRNYHRFHKRYRQARFNNRKSSKQKERIAPSILQKRQATIRVIKQLNKWINIANYLLEDVAIDIRALTDGYKPYRWQYQQSNRLDENIRKAVILRDGCKCMECGKSNCRLEVHHIKPRRLNGSNTLGNLISLCEKCHQRTEGQEELYMDRYFSILSSTDNKNLDYAQHVMIGKKWLREQLSELGTLILTTGGDTANKRIDWNIEKSHANDAICITDLQPDACNVKEWTIKPMRRQSKAKTDNVLGIKHRDLVEYTFKNGETHRGYVTALYPKQNAINFQSPTKHCKKVNAKKCKLIWKYSKIYWLDNVL

SEQ ID NO: 12916 - protein, 317 aa, Lamprocystis sp.
MAVFVLDRRGKPLMPCSEKRARLLLTRGRARVHRVVPLQNPQISGVAYQQGTLAGYEVREYLLEQWGRRCAYCTGDGVPLEIDHITPRSRGGSDRVTNLTLACHPCNQAKGNRSAAEFGHPEIEAKAKQSLGDAAAVNSTRWSLLNALTATGLAVETGTGGRTKWNRTRLGVPKTHALDAACVGVVEGVTGWVAPVLLIRCTGRGAYQRTRVTQDGFPRGYLMRHKQVRGFQTGDLVRATVPSGKKAGIHMGRVAVRATGRFNIQTPQGVVQGIGYRHCCVIQRGDGYGYAQLGATALPSPAIRSRPEGRGFSRRNG

SEQ ID NO: 12917 - protein, 459 aa, Petrotoga sp.
MSKVFVLDTKKRPLLPCHPAKARILLKQGRAAIYKRYPFTIILKQEIANPEVQPLRLKIDPGSKVTGLAVVNDATGEVIFAGELHHRGEQIKAKLATRRTLRRARRNRKKRHRAPRFLNRKKKDGWLPPSLQSRIANVLTWVNRIRRYCPIQSITVELVKFDLQRIENPGIQGIEYQQGTLYGYKIREYLLEKYDHQCAYCRGKSGDSVLEVEHVVPKKPRHGPAGTNRVNNLVIACETCNKSKGNLRPEEWLNYLQASTNSLDQERAKNLLQVLQQLEQPLKDATVVNTIRWILFKRLKELELPLEASSGGRTKYNRVQMGLPKAHWIDAACTGASTPEHINIDKVVVLEIKATGHGRRQRCRTDKYGFPIQHAPRAKTYLGYQTGDIVKAIIPKGKYAGIHIGRIAIRHKPSFKLIRFDVHPKYLRLLQKADGYEYMLREGSNASSPGVNSGAPGVA

SEQ ID NO: 12918 - protein, 418 aa, unidentified; identical to SEQ ID NO: 11905
  source 1..418: note = Clostridia sp.

SEQ ID NO: 12919 - protein, 557 aa, unidentified; identical to SEQ ID NO: 5771

SEQ ID NO: 12920 - protein, 496 aa, unidentified; identical to SEQ ID NO: 2063

SEQ ID NO: 12921 - protein, 512 aa, unidentified; identical to SEQ ID NO: 4350

SEQ ID NO: 12922 - protein, 418 aa, Moorena sp.; identical to SEQ ID NO: 10459

SEQ ID NO: 12923 - protein, 427 aa, unidentified; identical to SEQ ID NO: 9943

SEQ ID NO: 12924 - protein, 431 aa, unidentified
MPNKVYVINKHGRPLMPCSPAKARHLLDDGKAKVKKRTPFTIQLVYGSSGYTQEVILGVDAGSKTIGVSALTKKEELFAANVIPRNDVVDLLSTRREFRRARRNCKTRYRKPRFDNRVRSKHKGWLAPSVEVKIQEHITTIRRVYGILPVSKVVVETAEFDLQLLKAIADGKPVPQGEDYQKGEMYGHYNVRQYVLWRDDYTCQCCGAHATKKKEVRLHVHHLESRKVGGDAPDNQVTLCESCHEKLHKGLIAEKDFKKRKRRSTRDATFMGIMRKTLMQRLYSELPIPVIETRGYITKATREKLLVLPKSHTNDALAIAQGKRGFNVGYLPEIAQIDKIYTIRPVRHHNRQLHKAAILKGGIRKSNQAGKYVFGYRLFDKVQFNGQDCFIWGRRTTGIFTIKTINGKMIKDGISFKKLKPVEKSTSYLIA

SEQ ID NO: 12925 - protein, 515 aa, unidentified
MEYLDFTLVVDKNDKPCVPISNGRAGYLLRNNKAKIINHDPLVIKRIDDYQSDFENRDIFELKIDSGYLNIGFSVSDNYHEYLAGQVELLKGMSDRLTNRNGYRRTRRSRIRYRKNKNIDYKTIHNPTYKNGNEEGWFAPSIQHKIDSHIRLIDKIASWIPVDKVIVEVAKFDIQMIKALADGKEISGKDYQNGEMKGYENAAAYVRDRDKHTCRLCGANKNVVIEVHHIQPRSKGGTDKPSNLISLCHSCHRKVHSNNNDNKYFEKVKSMKLSDTYKDSTYMNMVRWELFERLSGKYDVKVGYGYQTKINRRNTGLRKFHYTDAVCINDYKDVTLTENIYIVDQKRCNDRSMETFSDAKYIDVRDGKEKSGNTLYKERLPNAPSKRVTQKEYINNMRQFRGKKIKPGKRTFVCNSYCLKCGDLIYINSGKHKGNIAEVESMQKLPNGNFKIRFTYKAQTVKYPSINIKQEEYELLKSNLLDKVKIVRTRRGMIWRKYNRLEYEATHTDQEGMAV

SEQ ID NO: 12926 - protein, 442 aa, unidentified; identical to SEQ ID NO: 4533

SEQ ID NO: 12927 - protein, 420 aa, unidentified
MQYVYVLNKHGNPLMPCSPRKARLLLKQKKACVIRRTPFTVKLLYGSTGYKQPVTLGVDAGSKHIGISATTEKHELYREEATPRNDVVDLLSARRAFRRSRRNRKTRYRAPRFDNRVHSKHKGWFAPSVEVKIQEHITLIEHVCRILPVTLVRVETAEFDTQRLKAMLEGKPLPVGTDYQLGEMYDEYNVRQYVLKRDNYTCQCCGAHSTKTKGVKLHVHHIETRRTGGNAPNNLITLCTACHKALHAGKVTLDGKKRGKPLKDAAFMGIMRKTLMERLRKELKIPVQGTYGYITKCLREKNGIPKSHTNDARCISKNPLAIPCDTCYYTKAVRHHNRQLHKATILKGGIRKANQAPYIVKGYRLWDKVSCNGTECFITGRRTSGYFALKKLDGTVVSNSISYKKLRLLEAATNYITERK

SEQ ID NO: 12928 - protein, 502 aa, Eubacterium hallii; identical to SEQ ID NO: 6776

SEQ ID NO: 12929 - protein, 417 aa, unidentified
MPCSPAKARLLLKEKKAIVKRRTPFTIQLTIATGEAKQPVTLGVDSGYKHIGLSATTEKVELYASQVELRQDITDLLSARLALRRSRRSRKTRYRAPRFDNRVASKRKGRLAPSVENRIAAHMSRVEAVMRVLPVTAITVETAVFDTQLLKTPDIAGAAYQQGEQLGFWNVREYVLFRDGHVCQHCRGKSKDPILNVHHIESRRTGGDAPNNLITLCETCHKAFHRGEIKLKVRRGKSFKAETFMGIMRWTLLERLKKAHPELRVRNTYGYLTKHKRISHGIAKSHCADAYCIADNLGAKRLEGFFFQKQTRKHNRQIHKLSILKGGLRKKNQAPYEVKGFRLFDKVICKGEEAFIFGRRTSGSFDVRRLDGTRISAGINYKKLRLLEPRTTYLTEFKKEAALPPLHKCRGLRAEFL

SEQ ID NO: 12930 - protein, 442 aa, Lactobacillus sp.; identical to SEQ ID NO: 5571

SEQ ID NO: 12931 - protein, 414 aa, unidentified
MVYVINKQGQALMPTERFGKVRRLLKNSLAHVVCRIPFTIQLDYDTTDYTQPVSLGVDAGSKHIGISATTSEKELYAADVELRNDIVDKLSTRRELRRTRRSRLRYRKARFNNRVSSKRKGWLAPSIENKIQTHLTVVEKIHKFLPITNIVVETASFDIQKINNPSISGSEYQQGEQLDFFNVREYVLFRDNHTCQHCKGKNKDKVLNVHHIESRKAGGDSPNNLITLCETCHKAYHRGEFELNVKRGKSFRDSAFMGIMRWSFYDRLKNIYPNVSMTFGYITKNTRTTNNLPKEHYVDARCISGNPVAKPLGYYFYQKKVRCQNRQIHKANFLKGGRKKLNQAPFLVKGFRLFDLVEYQKELYYIFGRRSSGSFDIRKLGGTKVNKGSINCKYLRLIATRKSILTEKRMQVNL

SEQ ID NO: 12932 - protein, 418 aa, unidentified
MVYVTNRQGKALMPTDRHGKVRRLLKGGLAHVVRRIPFTIQLDYDTTEITQPITLGIDAGSKFIGVCATTDKKELYAANVELRNDIVDKLSTRREKRRTRRSRLRYRKARFNNRVSSKHKGWMAPSVENKIQTHIIVVRNAYRILPISRIVVETASFDIQKIKNPNVEGEDYQNGEQMGFWNIREYVLWRDGHTCHHCHGKSGDKILNVHHLESRKTGGNSPSNLITLCETCHKAYHRGEFELKVKHGASFRDAAFMGIMRWAFFERLKQMYPNVSMTYGYITKNTRIDNGLPKEHYVDARCISGNPQAKPLGYYFYQKKVRCQNRQIHKANILKGGKKKLNQAPFMVKGFRLFDLVEYQKELFYVFARRKSGYFDIRRLDGSKANKGSVNCKKLRLVEIRRTLLTERRNSSSIPPRG

SEQ ID NO: 12933 - protein, 413 aa, unidentified; identical to SEQ ID NO: 10403

SEQ ID NO: 12934 - protein, 310 aa, unidentified
TKRKGWLAPSVENRINAHLSRIEAVLRLLPITKITVETASFDMQRLKNPDISGKEYQEGEQLGFWNVREYVLFRDGHVCRHCHGRSKDPVLNVHHLESRRTGSDSPDNLITLCETCHKALHRGEITLKAKRGQSFRAQAFMGIMRREVLNRLKASYPELKVHETYGYLTKHARIANGIVKSHGADAFCIAGNLGAERLGEFFFQKQTRRNNRQIHKLSILKGGIRKRNQAPFEAKGFRLFDKVACQGEEGFIFVRRSSGSFDVRKLDGTRISAGISCKKLRLLEKRRTYLTEIRKEEALPPLPEGRGLRA

SEQ ID NO: 12935 - protein, 451 aa, unidentified
VTTILKTCFAAFNLAKVVVLMDAWDIIVVLNKRGKPLMPCSPAKARLLLKEKKAIVVRRTPFTIQLTIATGETKQPVSLGVDAGYKHVGLSASTEKAELYASEVELRQDITDLLSARRALRQSRRNRKTRYRAPRFDNRIRTKRKGWLALSLENRINAHLSRIEAVLRLLPVTKITVETASFDLQLLKNPDISGKEYQEGEQLGFWNIREYVLCRDGHVCQHCYGRSKDPVLNVHHLESRRTGGDSPGNLITLCETCHKALHRGEITLKAKRGQSFRAEAFMGIMRSEVLNRLKASHPELEVNNTYGYRTKHARIANDIAKSHCADAFCIAGNLGAERLGEFFFQKQTRRNNRQIHKLSILKGGIRKRNQAPFEVKGFRLFDKVACQGEEGFIFGRRSSGFFDVRKLDGTRISAGISCKKLHLLEKRRTYLTEIRKEEALPPLPEGRGLRA

SEQ ID NO: 12936 - protein, 427 aa, Parasutterella sp.; identical to SEQ ID NO: 4733

SEQ ID NO: 12937 - protein, 462 aa, unidentified; identical to SEQ ID NO: 4520

SEQ ID NO: 12938 - protein, 496 aa, unidentified
  source 1..496: note = Bacterium sp.
MIRVYVINKNGNPLMPCKPAKARHLLRDGKAKVVKRKPFTIQLLWDCEKNVQEIRCGIDKGCKVTGIACVGNGEILYSASIKHRNPVAVQQKNGCKTFVQVRAERRRSRRNRHRWYRKPRFDNRASSKRSGKLPPTIKMNVMEVVRGVRKIDLPISHITVEDVAVDIRRLSNPDVQGSEYQQSNRLDENLRLACLIRDDFTCQKCSRSLSRLHRGSPTTSSYGKKQRPESRDSRGKREAKLQAHHVVWTSKGGKDSIYNLITLCENCHDKVHKTGESGKVQLKRNKVVTGMSGFSDKITQRTMQGKTLMYQELKKIAPLSCVFGYQTSAFRKALDLPKEHWIDAVCLTCLQTGEVVVSLDNSNHYDIWFRAKQTRRIFNTQPSKGGEIKQWQKYLGLASNGKDCILIDKRDKTFVLPLGYTLYKKGDVISIVGEVANTFPTEIASINGKGKGFYYWKYQSDDSRKYASVSHTKVKLIEYAKTINYVHVSNAAFIPS

SEQ ID NO: 12939 - protein, 420 aa, unidentified
MQYVYVLNKHGEPLMPCSPRKARLLLKQKKACVVKRTPFTIKLLYGSTGYKQPITLGVDAGSKHIGISAATEKYELYCEEATPRNDVVDLLSARRAFRRSRRNRKTRYRAPRFNNRVHSKHEGWLAPSVEVKIREHITLIKRVCRILPVTLVRVETAEFDTQRLKAMLEGKPLPVGTDYQLGEMYDEYNVRQYVLKRDNYTCQCCGAHPTKAKAVKLHVHHIETRRTGGNAPNNLITLCTACHKALHAGKVTLDGKKRGRSLKDAAFMGVMRKTLMERLLKELKIPVQGTYGYITKYLREKHSIPKSHTNDARCISKNPLAIPCDTCYYTKAIRHHNRQLHKATILKGGIRKANQAPYTVKGYRLWDKVSYNGSECFITGRRTSGYFALKKLDGTVVSNSASYKKMRLLEVATNYITERR

SEQ ID NO: 12940 - protein, 477 aa, Blautia sp.; identical to SEQ ID NO: 2707

SEQ ID NO: 12941 - protein, 443 aa, unidentified; identical to SEQ ID NO: 5962

SEQ ID NO: 12942 - protein, 515 aa, unidentified
MIPNERRHLMPYIYVIGMDGKPQMPTKRRRHVQKLLDTGKARITERVPFTIQLLYDNDPVLQPVILAEDPGRTNIGLAALDLKGNLLLSAAVETRNKEIAKLMEKRRQCRRASRNGERKARQRLAKKYGTMIRGGMRMRKLPQYAADAFIICKVIRNTQARFCNRRRLDGWLTPSARHLVQTHINLVHKVQKYLPVTDVAIEVNRFAFMQLEDPAICGVDFQTGPLKGYDDRDAAVYDLQDGKCLMCKHEITQYHHIVPRSRNGSNTIGNIAGLCDQCHDRVHKDADFAEQMKEKKEGMDKKYGALSVLNQAIPFICKQLETEFGRGHVHYCTGRETSLVRQSTGYQKTRKNQLHEVDAWCIGALALAEIPENVPDFKEIHLIRQFRRQDRSLVNAQTERVYKLGGKMVAKNRKKRTGQEIYALEDWYNRQVETYGKQEADCMRSRLKITKSRRRYNNPNRMMPGAVFLYEGVRYVMRGQHSKGAYLQAVGMENRDFPVRKCKILTRNTGLVFVS

SEQ ID NO: 12943 - protein, 510 aa, Streptomyces sp.
VLPQRQALEPTAADNPGSRGETGCGRTAFSGSAAGMEHGRGETVRMSPPSVRRHPDIAADAAVEGVQAARKGGIGGADQAATGAQMVAVLDRHGHPLMPCHPARARALLAKGRAVVVKSTPFAIRLKDRVLEDSEVVGVAVRIDPGPKGTGIAVTTDNTHADPVSGEVTTDRHGLYAMELRHRGEQIRNSMRRRANHRRRRRTENLRYRAPRFDNRSRPAVFPVTELHVERVSFGTHALSLGREDLESWEYQQGTFVGYEVREYLLEKWGRTCAYCGIKNVPLHVEHIHPRARGGSSRISNLTLACKACNQVKAARPVKEFLADRPARLAHLLSHAKAPLADAAAMNATRWQLWQRLKSLGIPIHAWSGGRTKYNRIMQGIAKSHTLDALAVGEIADAGRIVRYPEDMLVTLACGRGSHARTRTDKHGFPRLYLPRQKKHHGFATGDLVQARIPRGKYQGKYTGRVTVRATGIHRVPVPGGYADTSHSNLRLLQRGDGYAYTTRKEEARP

SEQ ID NO: 12944 - protein, 460 aa, unidentified; identical to SEQ ID NO: 7594

SEQ ID NO: 12945 - protein, 346 aa, unidentified
LYSQSKIAQSAQEYGVCRGGIENRRSRRNRKTRYRPPRFDNRVHSKHKGWLAPSVEVKIQEHITVIKRICRILPITLVRVETAEFDTQRLKAMLEGKPLPVGTDYQLGEMYDEYNVRQYVLKRDNYTCQCCGAHTTAKKAVKLHVHHLESRKMGGNAPGNLITLCITCHDALHKGKVSLDNKKRGKPMRDAAFMGIMRRTLMSRLREELPITVQGTYGYITKMQREQNDIKKSHVNDARCISKHPLAEPCSVCYRTKAIRHHNRQTHKANFSKGGIRKRSQMPYVVEGYRLWDKVLYKGQECFVSGRRTSGSFTLKKLDGTRISKGVTFKKMRLLEPATNYLIERM

SEQ ID NO: 12946 - protein, 429 aa, unidentified
MQKVFVLDVKKMPLMPCHPARARELLNKGRAAVYKRYPFTIILKDRVGGDVQPVELKFDPGSKTTGIALVGHFERGLEIVFGANLNHRGQKIKQDLESRRANRRGRRNRKTRYRPSRFNNRCRSEGWLPPSLMSRVFNVETWAERLQSLIPITSIAVETVRFDTQKMLNSKVSGVEYQQGELAGYEVREYLLEKWGRKCAYCGAENIPLEIEHIQPKSKGGSNRISNLTIACVRCNQKKGNKSIENFLKRKPIILKRIKAQTKKSLKDTAAVNATRYAIGNALKTFDLPVTFWSGGRTKFNRTQQKYTKDHWIDAACVGETGAKVYIPNTLKPLTITAVGHGSRQMCRVDQYGFPRTTAKKQKVVKGFQTGDIVKAVVTKGKKIGTYIGRVAIRASGSFNISTKNGTTQGISWKYCQRIQAVDGYNYFT

SEQ ID NO: 12947 - protein, 309 aa, unidentified; identical to SEQ ID NO: 11513

SEQ ID NO: 12948 - protein, 515 aa, unidentified
VAYMSTVYVLNKNGKPLMPTTRCGRVRHLLKEQKARVVTSNPFTIQLLYETDDVVQPLYLGIDPGRTNIGVAVVKTDGTAVFTAHLETRNKEIPKLMQGRKKARRARRTNGRRCRRQRRAKANDTISKKCVKQDTAQSGSASKRAKKIGVIKRHLPGCEKGVLCIGIKNKEAKFSNRTRPEGWLTPTANQLLQTHINLVKKIRKFLPISDVVLEINKFAFMQLDNPNIQKWQYQQGPLYQKASLEEAVSEMQEHHCLFCKKPIAHYHHVVSQSENGSDTIGNIIGLCTKHHDLVHKDTAWQKKLAKKKTGLNKKYGALSVLNQIIPALTKGLGSRFQGYFYVTTGKSTYDYREVHGVSKDHWLDAYCIACSVLPNDVYDSDINNRVPYELKQFRRHDRRALHKANINRVYTLNGKSVATNRHKAIKQTTDSLEEFRQCQPDDVCKLKVKEHHPEYRNHERNFPGCVFLVGKHTHVMQGTSGSHNGQADGYYDTNGNSYSSGKCKFVAKNKGIVFA

SEQ ID NO: 12949 - protein, 431 aa, unidentified; identical to SEQ ID NO: 3801

SEQ ID NO: 12950 - protein, 437 aa, Clostridium sp.; identical to SEQ ID NO: 9645

SEQ ID NO: 12951 - protein, 408 aa, unidentified; identical to SEQ ID NO: 3192

SEQ ID NO: 12952 - protein, 415 aa, Bacillus sp.; identical to SEQ ID NO: 6255

SEQ ID NO: 12953 - protein, 396 aa, unidentified; identical to SEQ ID NO: 4508

SEQ ID NO: 12954 - protein, 448 aa, Clostridium sp.; identical to SEQ ID NO: 8899

SEQ ID NO: 12955 - protein, 414 aa, unidentified
MPCSPAKARLLLKEKKAIVKRRTPFTIQLTIATGETKQPVSLGVDAGYKHVGLSASTEKAELYASEVELRQDITDLLSARRALRQSRRNRKTRYRAPRFNNRLCTKRKGWLAPSVENRINAHLSRIEAVLRLLPVTKITVETASFDLQLLKNPDISGKEYQEGEQLGFWNIREYVLCRDGHVCQHCYGRSKDPVLNVHHLKSRRMGGDSPGNLITLCETCHKALHRGEITLKAKRGQSFRAEAFMGIMRSEVLNRLKASHPELEVNNTYGYRTKHARIANDIAKSHCADAFCIAGNLGAERLGEFFFQKQTRRNNRQIHKLSILKGGIRKRNQAPFEVNGFRLFDKVACQGEEGFIFGRRSSGFFDVRKLDGTRISAGISYKKLHLLEKRRTYLTEIRKEEALPPLPEGRGLRA

SEQ ID NO: 12956 - protein, 420 aa, unidentified; identical to SEQ ID NO: 6067

SEQ ID NO: 12957 - protein, 413 aa, unidentified; identical to SEQ ID NO: 2636

SEQ ID NO: 12958 - protein, 413 aa, unidentified; identical to SEQ ID NO: 5705

SEQ ID NO: 12959 - protein, 442 aa, unidentified; identical to SEQ ID NO: 3218

SEQ ID NO: 12960 - protein, 442 aa, unidentified; identical to SEQ ID NO: 3161

SEQ ID NO: 12961 - protein, 423 aa, Moorena sp.; identical to SEQ ID NO: 11977

SEQ ID NO: 12962 - protein, 482 aa, unidentified
LVGNVQAPWDVYPSPTLCGLCLKVLRGRNGDADKKPIPTLTKDENRPSGRTTGLRAEQAEPAGIRKGDTLKVFVLNMRSKPLMPCSPAKARHMLKAGKAVVVRRTPFTIKLTIATGETKQDVTLGVDAGARHVGISATTEKEEVFASEVALRQDITGLLADRLAFRRARRNRKTRYRAPRFNNRVRSKHKGWLAPSVENRIQAHISRIEAVCRLLPVTKIVIETASFDIQKIRNPEVEGTGYQQGDQLGFWNVREYVLFRDGHICQHCRGRSKDPILNVHHLESRKTGGDAPNNLITLCETCHKAYHAGKIKLKVKRGQSFRAEAFMGIMRWTLLDRVRKTHPKLPVENTYGYLTKHKRIALGLPKTHCADAFCIAGNLKALRRGDFLFQQQTRKHNRQIHKCSILKGGVRKLNQAPFLVKGFRLFDKVRIGGQIGFVFGRRVRGTFNIRRLDKTVIGTDINCKKLSLLETRKTFLTELRKE

SEQ ID NO: 12963 - protein, 279 aa, unidentified
VVVETAEFDLQLLKAIADGKPVPQGEDYQKGEMYGHYNVRQYVLWRDDYTCQCCGAHATKKKEVRLHVHHLESRKVGGDAPDNQVTLCESCHEKLHKGLIAEKDFKKRKRRSTRDATFMGIMRKTLMQRLCSELPIPVVKTRGYITKATREKLLVLPKSHTNDALAIAQGKQGFNVGYLPGIVQIDKICTIRPVRHHNRQLHKATILKGGIRKSNQTEKYVFGYRLFDKVQFNGQDCFIWGRRTTGIFTIKTINGKMIKDGISFKKLKLVEKSTSYLIA

SEQ ID NO: 12964 - protein, 493 aa, unidentified; identical to SEQ ID NO: 9964

SEQ ID NO: 12965 - protein, 415 aa, unidentified
MENKIEYCFVIDKNNKPLTPTKVNKGWYLIRKGRAKLKSKYPMVIQLEKEVKSDEYDESHMVCGIDDGSTHVGLAIVQKCLTKNKVVFKGTIEQRQDVKRLMDVRRGYRRYHRYHKRYRQARFNNRSSSKRTCRLAPSIKQKKDSILRVLYQLNKWVNIQEYYLEDVCIDIRAMTDDYKPYRWQYQKSNRLDENLRKATILRDGCRCQECGKSNCILEVHHIRARRYGGANTIGNLITLCKKCHDKTESREKDFEERYFNMIKSKPKRFDYAMHVMQGKTYLREKISELGILHLTNGGETANKRIEWNIVKSHSNDAICIADGIPDTCDIKEWIIKPMRRKSKAKTDNVLGIKHRDLVSYTYKSGETHTGYVTALYPEQLALNFQSKTKHCKKVNARKCRLLWKFNKIYWLEQCV

SEQ ID NO: 12966 - protein, 423 aa, unidentified
VWNKRRKPLMPCSPAKARHLLKEKKAAVVRRTPFTIQLTIATGESKQPVTLGVDAGYKHVGLSASTEKAELYASEVELRQDVSDLLSARRALRQSRRNRKTRYRAPRFDNRIRTKRKSWLAPSVENRINAHLSRIEAVLRLLPVTKITVETASFDMQLLKNPDISGKEYQEGEQLGFWNVREYVLFRDGHVCQHCHGRSKDPVLNVHHLESRRTGGDSPGNLITLCETCHKALHRSEITLKTKRGQSFRAEAYMGLMRWEVLNRLKTSHPGLEVHNTYGYRTKYTRIVNGIDKSHCADAFCIAGNLGAERLGEFFFQKQTRRNNRQIHKLSILKGDIRKRNQAPFEVNGFRLFDKVACKGEEGFIFGRQSSGFFEVRKLDGTCISAGISYKKLHLLEKRRTYLTEIRKEEALPPLPEGSGLRA

SEQ ID NO: 12967 - protein, 458 aa, Scytonema sp.
MMMTNSVFVLSKNGKILKPTTPVRARILQAQRKAKKLKLFPFTLILESMVDENVEPYLELRIDPGSRYTGMSLVDLKKNEVVWAMELEHRGLAIKMELINRSGVRRSRRSRRLRYRKKRFDRKKPLGWLAPSLRHRLLTTQTWIKRLLKVAPIKSIAIESVKFDLQKLETPEIEGIEYQQGTLWGYTLREALLEHWGRECVYCGKTDVPLQMEHINPRSKGGSDRFSNLTLSCEKCNQKKGNKPVEQFLKNKGEILQKIKANQKKSLSDAAAVNSTRKAIFEMAQQFGLPVISGDGASTKMIRIKSGLPKQHWIDSACVGTLEIVKLRVCQPLRVTCTGHGTRQIQRVNAKGFPAIASVKKNPLTGKKEVKLVSKNQKYTHATAGDYVICNLVKDRKLVRSGIYRARVKTPTPKGVEVLISTRRIAVARHYVKLIHRADGYEYSFTTIDQDLLRFRAI

SEQ ID NO: 12968 - protein, 446 aa, Pseudomonas sp.
VAVYVLDKTGTPLMPCSEKRARLLLERGRARIHRQVPFVIRLVDRRQADSALQSLTLKFDPGSKFTGIALVRQKGQRVSVLSLMELAHRGAAIRQAMQQRAAFRRRRRGQNLRHRAPRFDNRTRPEGWLPPSLRHRLDTTLGWVGRMRNWAPISDLAVERVKFDMQAIQNPEISGVQYQQGELAGYEVREYLLEKWGRCCAYCDAENTPLEIEHIVPRSAGGSDRVPNLTLACRPCNQRKGNQPVEVFLKARPELLARIKAKAKAPLRDAAAVNATRNALFRGLLDTGLSVTTGTGAQTKYNRRRLDLPKTHALDAACVGEIRAIEHWHRPTLAIKATGRGDYQRTRLTTHGFPRGYLTRQKRHFGFQTGDQVRAEVPTGKKAGTHLGRVAVRKTGSFNIQTSDGVVQGVHHRHFTLIQRADGYAYSHIQTDSPQSQKEAARAEVR

SEQ ID NO: 12969 - protein, 477 aa, unidentified
MIIALDKYKRPLGFLTERRCRILMERKRAVLYRVFPTVVILMDVDARTIPGLPSFRIKIDPGSKYTGIAIIRNDTDEFVYAMQIEHRGDAVRAALNKRKNARRNRRSRETGYRRAKWGNRCLSEKDKRSYDSSREDGWPPPSIRSAADNVISWVRRLGRWINLTECSFEAVRFDTQLMEDPDIEGEEYQHGTLFGLEIKEYLMEKFGHTCQYCGGKSGDPVLEWEHMRPKSRGGSDRVKNALLSCSSCNKDKGNRTPEEWLELIKARLPREKGKRKELDEERVELIQKVIDGKPQGGALRYAAWVSSSRRYLEKALFGIFGNVECSSGGRTKYNRTELGYPKEHHYDALCVGTVPEKGYHDRTNGYYLYAKAAGRGTRLRGHLNKCGMIVTKWTDRKNGFFGFQTGDIVVAEVPHKTPKPYKYEGRFVGRVMVRATGSFDIKTTDGKLVTVKEQYCRLLQANSGYQYTMKRAIPLGH

SEQ ID NO: 12970 - protein, 415 aa, Bacillus sp.; identical to SEQ ID NO: 2431

SEQ ID NO: 12971 - protein, 421 aa, unidentified
MQYVYVLNKHGEPLMPCSPGKARLLLKQQKACVVKRTPFTIKLLYGSAGYKQPVALGIDAGSKHVGLSASTEKRELYREEFTPRNDVVELLSTRRQNRRSRRNRKTRYRAPRFDNRVHSKHKGWLAPSVEVKIQEHITVIKRICRILPITLVRVETAEFDTQRLKAMLKGKPLPVGTDYQLGEMYDEYNVRQYVLKRDNYTCQCCGAHPTEKKPIRLHVHHIESRHVGGNAPNNLITLCVACHKALHEGKITLDKGKKRGKPLRDAAFMGIMRNTLLARLKDELNIPVKQTYGYITKLLREKNKIPKSHVNDARCIAKAPNAKPCDTMLYTRALRHHNRQIHKAKILKGGIRKKNQAPYLVKGFRLWDKVRYNGEECFITGRRSSGYFALKKYDGTVISNSASYKKLMLLEAATNYITERS

SEQ ID NO: 12972 - protein, 512 aa, unidentified; identical to SEQ ID NO: 5549

SEQ ID NO: 12973 - protein, 512 aa, unidentified
MSTVYVLNKDGKPLMPTTRGGHVRYLLKEKKARVVTSKPFTIQLLYETDDVVQPLYLGIDPGRTNIGVAVVKTDGTAVFTAHLETRNKEIPKLMQGRKKARRARRTNGRRCRRQRRAKANGTISKKCVKQTTAQNGSVSKRAKKICVIKRHLPGCEKKVLCIGIKNKEAKFSNRTRPEGWLTPTANQLLQTHINLVKKIQKFLPISDVVLEINKFAFMQLDNPNIQKWQYQQGPLYQKASLEEAVSEMQEHHCLFCKKPIAHYHHVVPQSENGSNTIGNIVGLCTKHHDLVHKDATWQKKLAKKKTGLNKKYGALSILNQIIPALTKELSSLFPKHFFATNGKSTYDYRAAHGVSKDHWLDAYCIACSVLANDVCDSNINSHVPYELKQFRRHDRRALHKENMSRVYTLDGKKVATNRHKAIKQTTDSLEEFRQRQPNDVYKLKVKEHHPEYRNPKRNFPGCVFLVGKHTHVMQGTSGSHNGKADGYYDTNGNSYSSGKCKFVAKNKGIVFA

SEQ ID NO: 12974 - protein, 413 aa, unidentified; identical to SEQ ID NO: 2636

SEQ ID NO: 12975 - protein, 470 aa, Blautia sp.; identical to SEQ ID NO: 2925

SEQ ID NO: 12976 - protein, 295 aa, unidentified
HMTAIRRACAILPVSKVVVETAEFDLQLLKAVAEGKPVPQGEDYQKGEMYGHYNVRQYVLWRDSYTCRICGMHGSVRKGVPLHVHHLESRRVGGDAPDNLVTLCTACHDKLHKGIIMVADIKKRKRRSTRDTTFMGIMRMTLLRRLWEQLPVPVVETRGYITKATRENLLVLPKSHTNDALAIAHGPQGFRAEYLPNIRQADRLYTIRPVRHHNRQLHKATILKGGVRKANQAEKYICGFRLYDKVLYNGIECFVWGRRTSGSFLLRQLNGEKVKDGVSYKHLKLLERSQSYLVA

SEQ ID NO: 12977 - protein, 427 aa, Enterococcus sp.; identical to SEQ ID NO: 5630

SEQ ID NO: 12978 - protein, 509 aa, unidentified; identical to SEQ ID NO: 4834

SEQ ID NO: 12979 - protein, 427 aa, Parasutterella sp.; identical to SEQ ID NO: 4733

SEQ ID NO: 12980 - protein, 417 aa, unidentified
MVYVLSIDKQPLMPIRRHGKVRRLLKEGKARVVRREPFTIQLLFETDNNVSHLVLKIDTGSKYIGAGVTNDNACVYYASEVEIRNDIHTKMVRRGMYRRARRSRKLRYRKVRFLNRRNSIKKDRFSPTMVSKYDSHQREIEFVKSILPIADLVFETGTFDTNLLNHAGEAFNRHWGYQKGPNYGYKNAQEACFNRDNYTCQCCKTKRGTLNAHHIIYRSKGGADTLDNLITLCVDCHKKLHRGELKEFELTISGKRRGNLKHATQMNSIRVQLLKHYPNAIETFGFVTKANREWLGLEKSHWMDAVSMGLNKKPTFLIDRIYKKKHVSKGQYQLYRGKNSNKKQPRGKVCGFLNRDIVKYRGQLYLIKGLISPCYCVFSDINGVEQKFKKPKTVKLSSIKRVSARSTTRCISQKIIY

SEQ ID NO: 12981 - protein, 427 aa, Parasutterella sp.
LRVLVWNKRGKPLMPCSPAKARLLLKEKKAIVVRRTPFTIQLTIATGEAKQPVSLGVDAGYKHVGLSASTEKAELYASEIELRQDITDLLSARRELRRARRNRKTRYRAPRFDNRIHTKRKGWLAPSVENRINAHLSRIEAVLRLLPVTKITVETASFDMQLLKNPDISGKEYQEGEQLGFWNVREYVLFRDGHVCQHCHGRSKDPVLNVHHLESRRTGGDSPGNLITLCETCHKALHRGEITLKAKRGQSFRAEAFMGIMRWEVLNRLKASHPELEVNNTYGYRTKHARISNGIAKSHCADAFCIAGYLGAKRLGKFFFQKQTRRNNRQIHKLSILKHGLRKRNQAPFEIKGFRLFDKVASKGEEGFIFGRRSSGYFDVRKLDGTRISAGISYKKLHLLEKRQTYITEIRKEKALPPLPEGRGLRA

SEQ ID NO: 12982 - protein, 430 aa, unidentified; identical to SEQ ID NO: 4504

SEQ ID NO: 12983 - protein, 408 aa, unidentified; identical to SEQ ID NO: 9683

SEQ ID NO: 12984 - protein, 426 aa, unidentified
MLVYVLKQDGQPFMPTERFGKVRRLLKEGKAKVVCREPFTIRLLYEPETDVVQECYCGVDTGSKYIGVAVIGNDKVLYQSQTELRDIKKKMDRRRAFRQNRRSRKTRYRKPRFLNRRNSIKKDRLPPSVRHKVQAHIDEIESCKKILPVSDLILEVSQFDTALMKNPSLINEKIRHWGYQKGFNYGYSSRQKAVLHRDNYICQCCGKKNCRLEVHHIKFRRDGGTDDEENLITLCEDCHKGVHAGTVELNKKPKKSKNLKYATHMSIIRSKLLKKYPDAIETFGFVTSENRNHLKLEKDHYIDACVVASGGLEFKELDVVYRKRRVPVQDRILIKCTRCKMMKSAGKINGLNRYDKVQYLGEVCFIKGRRAKGSVVLMDIDNNMLDFRGMGGCANPSYKTIKRLQARKSVLCISKAIRRDDDLTLC

SEQ ID NO: 12985 - protein, 426 aa, unidentified
MVYVQDIDGKPMMPTTRYGKVRRLLKNKKAVVVNLCPFTIRLTYVTSDYKQEIVLGVDAGTKHVGLSATTKSKELYSSEVILRNDIVDLLSTRRELRRARRNRLRYRKPRFNNRIKSKRPGWIAPSVKYKIDAHIRVVENVCSILPISRIVIEVAQFDTQKIKNPNISGKEYQEGDQLGFWNTREYVLARDGHKCQYCKGKSKDKILNVHHIESRKTGGDSPSNLITLCETCHKEYHKGNIDLKIKRGKSLRDAAVMGIMKWRLYEEIKSKYDRVSMTFGYVTKYNRINHGFEKSHVSDAFVISKNFNAIRLGYYYKVRLVRRHNRQIHKQKIQKGGIKRLNQSPFEVFGFRLFDRVMFENSYYFIFGRRKTGSFDIRYIDGKNQKNVTYKKLKLSRCKRFMIQMELNKKTRTCFENERNSDRDAA

SEQ ID NO: 12986 - protein, 419 aa, unidentified
MVYVISKDGKPLMPCSNVIARLLLKQGKAKVKRREPFTIKLLGETTEYKQNLTLGVDTGSGTFAAAVSMDNGDIVYMSEVTVRNDITKKMLLRAAYRRNRRNRKTRYRKARFLNRRNSIRKGRFSPTMQSKLQSHVKEIEYIKSILPITKTVIETGKFDTHRLKNPDITRWGYQKGPNYGFENTKAMVLNRDGYICQHCKGKRKDSRLEVHHIVYRSQGGSDEAENLITLCHTCHTELHHRKINLKQNGKVKGILKYATQMNSIIKQLLEKYPAAIETFGYVTKANRIMLEVSKEHYNDACTIASQGNAFQIKSNLYKKKCIPKGDFQQTKGACSQQPIITDKILGFRKFDKVRYLGESYFVKGRMSTGYAVLMDIDGKKADFSAMAKGFKTPKMKNLKRLAARSAWMVTTEEATQNIA

SEQ ID NO: 12987 - protein, 431 aa, unidentified; identical to SEQ ID NO: 8901

SEQ ID NO: 12988 - protein, 449 aa, Thiorhodospira sp.
MAVFVLDKKQQPLMPCSEKRARLLLQRNRAVVVRLHPFTIRLKDRIGGTAQPLRLQLDPGSKTTGLALVREVENIDPDTGEVRSEAVVLWLGELTHRGAAIRDALTARRAIRRNRRNRKTRYRAPRFLNRAKPKGWLPPSLRHRLETTLSWVKRLQRLAPLTCIRQELVRFDTQAMQTPEISGVEYQQGELAGYELREYLLEKWHRTCAYCGAKDVPLEIEHIIPRSKGGSDRVSNLTLACTHCNQQKGNQDIDVYLKDRPSVLRRIQTHVKTPLQDAAAVNATRWALFNHLKATGLPVTTGSGGRTKYNRRRLEIPKTHALDAACVGEIDALHGWNRPALAIKATGRGSYQRTLLSRFGFPRGYLTRQKRIKGFQTGDRVIAQVATGKKAGTHSGRVAVRASGSFNIQTAHGVVQGISHRHCRVVQRADGYGYTFQPQPKTEEARRAA

SEQ ID NO: 12989 - protein, 451 aa, unidentified
MSVAVISKTGERLMPTSEYRARKLLKSGKAIKHSYHPFTIQLTEREAGDIQPIELCMDTGYIHIGISVKSEKHEYLAEQIDTLTDERSKHDACRMYRRQRRNRKRYRQPRFNNRKKDKGWIAPSLEHKKKIHIQAISRISRVMPVTDITMEMGNFDTQILKSKEEGRPLPHGADYQHGERYGIATLREAVFSRDSYKCQCCGRTIKDGAILHIHHIKYRSQGGTNSMSNLATVCDKCHTPKNHKPGGKLYNWKPKLSSFKGATFMTAIRWQLYNEVKALFPDIDIHITYGAATKERRRELDIDKSHVNDAFVMGQFHPKHRIKAVLYKKKRRNNRCLEKFYDAKYIDSRDGKKRSGQELFNGRINRNHKKDSENLHQYRLQKVTAGKRAVRKQHYKIQPHDIVIYESRKRETAGCHCNGTRVMLLPDKKSISVKKVKIYKYAGGYFKSAFN

SEQ ID NO: 12990 - protein, 427 aa, unidentified
MVYVVSQSGKALMPTSRYGKVRHLLREGKARVVRREPFTIQLLYDSKEYTQPVTLGVDAGTGHVGLSATTEKAELFAAEVTLRRDIQELMSTRRAARRTRRFRKTRYRAPRFDNRRRPDGWLAPSVEQAVQSHLSLIRKVHSFLPIAKTVIEVAQFDTQLLKNPDIQGEQYQQGEQLEFWNVREYVIFRDGHTCQHCHGKSKDKVLNVHHIESRQTGGNAPNNLITLCETCHKAYHRGEIKLKIKRGVSLRDAALMSIMRWTVYNWAKEEFGNVRLTYGYITKNIRIRHGLDKSHAVDARCISGHPLAKPSETLWQMRQIRRHNRQLYKANTLKGGIRKKNQAPRLVKGFRLFDKIRYNGIDCFVFGRRSSGSFDIRKFDGSKVNAGISYKKLTFKSISKSFLINQFKRLAAIPPTNKFVGSLADLP

SEQ ID NO: 12991 - protein, 506 aa, unidentified
MVAVLSNVGKPMMPTTEYKARKLIEKGRAIPYQYKPMFTIMILDRSGGYTQPIELKEDTGYEHIGISVCSQKHEYERKEIITLLDEPEKHHDARMHRRTRRNRLGYRPPRFDNRKRENGWIPPSLQHKIDIHLYWFNQYAEVLPITDAVFEIGTFDTQRLNAIEKGEKLPYGEDYQKGEQANFYTLRDAVFARDDYTCVVCGKGIQDGAVLRTHHVGYRHGDRSNRMSNLVTVCDHCHTTKNHQEGGALYNLKSPTKKKANAAFMNVARQRIIDCAKKSHPEINISCAFGSETKMSRKNLQIEKSHTNDAYAMGEFHPKHRCNEKIFQKVRRNNRILSRFYDAKYIDRRDGLTKTGKQLSSGRTNRNHKLDSENFRVYRGKKIQKGRTATRQQVYEFKTKDIVLYQGKRYVVKGTNNKGQNVQLYLNMTADLKDLTIKTKNKRKTADPNRIEVGDKVFTEFNGKKKVFTVKNIDPTTNQVSLQADLSTKPSELKLVKYSNGYKQIK

SEQ ID NO: 12992 - protein, 413 aa, unidentified; identical to SEQ ID NO: 5215

SEQ ID NO: 12993 - protein, 427 aa, Enterococcus sp.; identical to SEQ ID NO: 5630

SEQ ID NO: 12994 - protein, 424 aa, unidentified; identical to SEQ ID NO: 3351

SEQ ID NO: 12995 - protein, 431 aa, Lyngbya sp.; identical to SEQ ID NO: 10800

SEQ ID NO: 12996 - protein, 413 aa, unidentified; identical to SEQ ID NO: 3621

SEQ ID NO: 12997 - protein, 431 aa, unidentified; identical to SEQ ID NO: 2746

SEQ ID NO: 12998 - protein, 473 aa, unidentified; identical to SEQ ID NO: 3562
  source 1..473: note = uncultured beta proteobacterium

SEQ ID NO: 12999 - protein, 512 aa, unidentified; identical to SEQ ID NO: 4350

SEQ ID NO: 13000 - protein, 448 aa, unidentified
MSTGLRAVQAEPAGIRKGDALKVFVLNMRGRPLMPCSPAKARHLLKAGKAAVRRRTPFTIQLRIATGETKQSVTLGVDAGAKHVGLSAATEKEEVFASEVELRQDITGLLAARLSLRRERRQRKTRYRAPRFLNRVRSKHKGWLAPSVENRIQAHMSRIDAICGLLPVTKIVIETASFDIQKIKHPDVEGTNYQQGDQLGFWNVREYVLFRDGHVCQHCHGHAKDKILNVHHLESRQTGGDAPNNLITLCETCHKAYHAGKIKLKVKRGQSFRAEAFMGIMRWTLLDRVRKAHPGLPVENTYGYLTKNTRITLGLPKAHCVDAYCIAGNLKAVRRGVCLHQRQVRKHNRQIHKCTVLSKTLKDGTKIGYRKLNQTPHLVKNFRLFDKVRCLGQTGFIFGRRSSGYFDVRRLDGVKISSCISYRKLTLLEKRSTCLTELRKEDGAFSPV

SEQ ID NO: 13001 - protein, 335 aa, unidentified
  source 1..335: note = Bacterium sp.
MNVYVLNKNGKPLMPCKPAKSRKLLRSGKAQVVNRCPFTIKLSWNYEENVQEITVGLDKGSHLTGFSCVAKGQILMSGEIHHRTDIKDKMDARRANRRNRRSRKWYRKKRFNNRASSRRSGRLPPSIKANIEEVIRVVCRIPLPISQIIVEDVQVDIARLNNPNLIGKAYQESDRLDENLRIATLMRDGYQCTQCEKKKSGSRSNRAKPQLDAHHIIWKEDGGKDTIENLITLCKECHRKAHKGKLKLSVSGVSGFKDRIAQRTMQGKSYLYQVLSKMSALSKIFGYQTSFLRKSLSLPKAHDIDALCVAILYTGEVIPHHRENFYRKPKASVYS

SEQ ID NO: 13002 - protein, 512 aa, Halomonas sp.
MLAQGKTPKVLIAADSSIVGRSRLSTFPRGDWAQAPRYQTRKGSILGGNRMAVFVLDKQKQPLMPCSEKRARLLLERGRAVVHKRYPFTLRLKDRVGGDTQPLRLSIDPGSKTTGLALMREADGAEPDDQQRHVLCLFDLVHRGFQIRKALEQRRGFRRRRRSKNLRYRAPRFDNRTRKAGWLPPSLQHRVDTVMAWMERLSRLAPITAISQELVRFDTQRMENPEISGVEYQQGTLLGYEVREYLLEKWGRECAYCGATETHLEIEHVVPSSSGGSDRVSNLTIACHDCNQAKDSLPLATFFASDKGLKKRLKANGLSADARLERVQRELKRPLRDASAVNATRWALFNALNATGLPVAVGTGGRTKFNRERLDIPKTHALDAACVGAFDMLHDWRVPTLTIKCTGRGSYQRTRLTKHGFSRGYLMRQKQVHGFQTGDMVKAIVPTGKKAGTHTGRVAVRKTGSFNIQTDHGAVQGILHKHCTVIQRGDGYGYHLTPTIHQLKGGAGQAVA

SEQ ID NO: 13003 - protein, 490 aa, unidentified
MYVVYVLDRQGKPLMPTKRFGHVRRMLKTGKAKAISTKPFVIQLQYASTDFVQPLYGGTDPGRTNIGEAVLNNKGEVVYAAHLVTRNKEIPKLMADRAAHRRASRRGERLRRKRRAKANGTMTCFPEGRKLPGYKDGVLKLKGIINTESRFNNRKRPAGWLTPTARQCIQTHLNMVRNICKILPVTDWTLEYNRFAFMQLEDGSVRGWDFQNGRLKGYASKEDYIYALQGGVCACCGTPIEHYHHIKPRHKGGSNTPENLVGLCSVCHAEIHTGKRSLDRIGKHKEYAGASIVNIAIPFIWDGIARMFGDKAHICEGQETAELRRANNIPKEHFADAVCIASIGSGITPQYDNNQPFELRQFRCHDRSRINAQVERTYMDGKTIVAKNRKPRFEQKWDALFDLQSKMTKEHGELAARRAVSKLVAKKSYRRYNASERIKPSAVFIFNNKKYLLRGQLTNGMYYRAFGEGTKNFPSRNCEVVSSRCSLTYM

SEQ ID NO: 13004 - protein, 414 aa, unidentified
MPCSPAKARLLLKEKKAIVVRRTPFTIQLTIATGEAKQPVSLGVDAGYKHVGLSASTEKAELYASEVELRQDITDLLSARRALRQSRRNRKTRYRAPRFDNRIRTKRKGWLAPSVENRINAHLSRIEAVLRLLPVTKITVETASFDMQLLKNPDISGKEYQEGDQLGFWNVREYVLFRDGHVCQHCHGISKDPVLNVHHLESRRTGGNSPGNLITLCETCHEALHRGEIALKTKRGHSFRAEAFMGMMRWEVLNRLKASHPELEVNNTYGYRTKHARIANDIAKSHCADAFCIAGNLGAERLCEFFFQKQTRRNNRQIHKLSILKGGIRKRNQAPFEIKGFRLFDKVACKGEEGFIFGRRSSGYFDVRKLDGTRISAGISCKKLHLLEKRRTYLTEIRKEEALLALPEGRSLRT

SEQ ID NO: 13005 - protein, 442 aa, Sutterella wadsworthensis; identical to SEQ ID NO: 2834

SEQ ID NO: 13006 - protein, 427 aa, unidentified
MSNKPNYAFVLDTNRKPLAPCKPSVARKLLNAGKAKVFRLYPFTIILNKEVSDTPKPLTLKIDPGSKTSGLAILSGCNLLWVAELTHRGQTIKASLDSRRSLRRSRRNRHTRYRQPRFMNRTRPKGWLAPSLQHRVETTLTWVNKLSKFAPISTIYQELVRFDLQQIENPEITGVEYQQGVLLGYEVREYLLNKWGRKCAYCGVENTLLQVEHIHPKAKGGTNRISNLCLACEPCNIKKGTQDIQVFLKKKPEVLKRVLAQAKRPLKDAVAVNLTRWALFSRLKETGLEVNTGSGGLTKFNRTRLCLPKTHFFDAACVGNTPELLVLASQPLSIKATGHGSRQMCRTDKFGFPSRYVPQFKFVKGFQTGDIVKAIVTSGKKNGTYVGRVAVRSTGSFNISAKQGLIQGISHKYCQQIHQKDGYGYGF

SEQ ID NO: 13007 - protein, 413 aa, Blautia sp.; identical to SEQ ID NO: 3476

SEQ ID NO: 13008 - protein, 415 aa, unidentified
MIYVRSKEGKALMPSERGGRIGYLLRHGKAHVVSRVPFVVQLDYESTAYTQEVSLGIDAGSKHIGVSASSEKRELLAAQVELRSDVVNLLSTRKELRRARRNRKTRYRKVRFDNRKKEDGWLAPSIEQKVESHLKVIRLVHKLLPITETTIEVAQFDAQKIKNPDIKGDEYQQGEQMGFWNVREYVLARDGHKCVHCKGKSKDPILNVHHLESRKTGGNSPSNLVTLCETCHKAYHRGEFDLKIKRGNSLRDAAVMNIMRWAVYERAKAEFGNVHLTYGYITKHTRIENGIAKTHAADAFCIAKNVHAMRLSSFFMCRCVPRHTRALHVVNPKKGGIRRSTIASHKIGKSRFQRFDMVRWKGEECFIFGSTKGRPVLRDIEGIKMHDKQAVNIKTIKFLKRLRNDILVEEKTSES

SEQ ID NO: 13009 - protein, 424 aa, unidentified
MVYVISKDGNPLMSCCNVIARLLLKQGKAQVKKREPFTIKLNYETTNYLQNLTLGVDTGSRTIGTAVSNDNGDILYMSEVVVRNDITEKMTQRAKYRRNRRNRKTRYRKARWLNRANSIKNDRFSPTMRSKLYSHVKEIECIKSILPITQMVFETGQFDTHLMKNPSLANPRIRRWGYQKGPNYGYENTKAMVLNRDNYTCQCCKGKHKDSKLEIHHIVFRSKGGSDEASNLITLCHTCHKDLHSGKINPKLKGRIKGNLKFATQMNTIRKQLFRLYPNAIETFGYITKANRLQLGVNKEHYYDACTIATQGNRFTIKSNLYKKKCISDGDFQQTKGICSKQPIVTNKIHGFRKFDKVRYLGKNYFIKGRMSTGYAVLMDINGKKADFSNMPKGFKTPKMANFKRIEARTTWMTTTVVLTSNIA

SEQ ID NO: 13010 - protein, 431 aa, unidentified; identical to SEQ ID NO: 3235

SEQ ID NO: 13011 - protein, 414 aa, unidentified; identical to SEQ ID NO: 2588

SEQ ID NO: 13012 - protein, 442 aa, unidentified; identical to SEQ ID NO: 2903

SEQ ID NO: 13013 - protein, 464 aa, unidentified; identical to SEQ ID NO: 10255

SEQ ID NO: 13014 - protein, 409 aa, unidentified
  REGION 1..409: note = Ga0315284_10028622
MLVYILNKDGMPLMPCSPKVARNLLRDDKAKAVQRTPFTIQLLYGSSGYKQYIILGVDTGSKVIGLSATTNRKEVFSAEVQLRTDIVRNIANKKQFRRVRRSRKTRYRQARFLNRRKPIGWLAPSIRQKIDTHLTIIDRVHGLLPITNIIVEVAAFDIQKIKDPNISGTEYQEGEQLDFSNTREYILYRDNHTCQHCNGKSKDKILNVHHIESRKTGGDSPGNLVTLCKTCHDAYHTGNVDLNIRRGSSYRDATFMGIMRRILYNKLLVLYPNVSMTYGYITKNTRIVNNLPKEHRSDALCITGNPDIIRDNMWYFYRKVRCQNRKIHMMTINKGGTRKLCQSPYIIHGFRLFDKVRYDSTDYFIFARRLSGSFNISLLDGVTLSRDIIYKKLTLLERRNTILIERNYR

SEQ ID NO: 13015 - protein, 470 aa, unidentified; identical to SEQ ID NO: 2949

SEQ ID NO: 13016 - protein, 465 aa, unidentified; identical to SEQ ID NO: 6446

SEQ ID NO: 13017 - protein, 431 aa, unidentified; identical to SEQ ID NO: 7057

SEQ ID NO: 13018 - protein, 375 aa, unidentified
LRPMVKSSERQERCCRLETPSNIGEGSQPGERPRRQNLRVVVLNKRGKPLMPCSPAKARLLLKERNAIVVRRTPFTVQLTIATGETKQLVSLGVDAGYKHVGLSASTEKAELYASEIELRQDITDLLSARRELRRARRNRKTRYRGPRFDNRIRTKRKEWFAPSVENRINAHLSRIEKVLRLLPVTTITVETASFDTQLLKNPDISGKEYQEGEQLGFWNIREYVLCRDGHVCQHCYGRSKDPVLNVHHLESRRTGGDSPGNLITLCETCHKALHRGEITLKAKRGQSFRAEAFMGIMRWEVLDRLKASHPELEVQNTYGYRTKHVRIANGIAKSHCADAFCIGGNLGAERLGEFFFQKQTRRNNRQIHKLSILK

SEQ ID NO: 13019 - protein, 406 aa, unidentified; identical to SEQ ID NO: 2752

SEQ ID NO: 13020 - protein, 463 aa, unidentified
MAVFVLDRSGSSLMPCTEKRARLLLERGRARVHKMLPFTIRVVDLETEECEFQALRVKLDPGSKTTGMALVRETAENGVAVINLFELMHRGKQISEALTARRGHRKVRRSHLRYRAPRFLNRGNQKPGWLAPSLLHRVNTTLAWVSRIRRYAPVSAISTELVRFDMQALENPEIEGAQYQQGTLAGYEVREYLLEKWHRTCAYCGAKNVPLQIEHIHPKSKSGSDRISNLTLACQCCNAKKAALPVEVFLAKQPERLKRIQAQAKRPLKDAAAVNATRWALVNVLKATGLTVETASGGRTKFNRMALGIPKTHALDAACVGDVNSMTGWHKPTLCLKAMGRGSYQRTRLDKYGCVRGYLTRSKSIQGFQTGDMVKAEVTQGKKTGSYTGRVAVSASGSFNIQTRDGLVQGVSHRYCTVVQRSDGYGYQLVAKTDATGTPPKQGDASHPALYLPGLKAGVSRAN

SEQ ID NO: 13021 - protein, 425 aa, unidentified
MVYVISQDGQPLMPTDRHGKIRRLLKSDKAKVVKHCPFTIQLLYGSTDYTQEISLGIDAGSKYIGISATTQNRVLYESDVELRNDIVSLLSARRQNRRTRRNRKTRYRKPRFNNRISCKKKGWLAPSVRQRVNTHLTVVAKVHQILPVTRIIVETASFDIQKIKNPTISGTDYQQGDQLGFWNVREYVLFRDGHVCQCCKGKSKDKILNVHHIESRKTGGDSPDNLITLCKTCHTGYHRGTIKLPKTIHRGMSFRDASFMGIMRWSFYDELKTLYPDVNLTFGYITKNTRIKNNLPKEHYIDARCISGHPLAVSDETYYYQKKVRCHNRQIHKNTILKGGVRKRNQAPYFVKGFRLFDKVMYQGQECFIFGRRSTGRMDLRLLDRTHINASVSYKKLKLIESRKNYITERRTAVPPTGKSVDFPA

SEQ ID NO: 13022 - protein, 408 aa, unidentified; identical to SEQ ID NO: 6795

SEQ ID NO: 13023 - protein, 465 aa, unidentified
MSTCVCVLSNSGERLMPTIRLGKVRRLLKDGKAKIIKHHPFTIQLLYDSKTNTQPIEICEDVGYNYIGISVKSQSHEYVSAQYDTLQDEKACHDSCRKLRRTRRNRLRYRKPRFDNRKRGEGWLAPSLEHKKQLNIRLIERYVSVIPITHATVEVGSFDTMLVKAIEEGKATPESADYQKGPRYNLATLREAVFYRDNYICKVCGRKATEGAILHMHHMFYWKGRHGNSLSELITVCEKCHTPANHQKSGKLYGFGENVKFADLSGAAFMNTVRWQIVNELYAAFGKDFVTVTYGAMTKEKRIALRLEKSHNNDAYAMGEFHPNCRCTFEHYEKVRRNNRILEKFYDSRYIDIRTGEIATGKELFNGRINRNHKKDSENLHRYRGKRTYAGHRALLRKKVNLNPGDLVSLNGEVLVVHSTHTNKKGAVNVEFKTPGKSGQKSASLKKLKIVKAADSMHSAWEKIS

SEQ ID NO: 13024 - protein, 471 aa, Acidithiobacillus sp.
MAVFVLDKRHKPLMPCSEKRARILLERGRARVHRMVPFTIRLVDRLQKDSVLQDLRLSITPGSKTSGLALVREKEIVDQSTGEVIKARVVLMLLELQHRGHAIRDKLTSRRAFRRRRRNQLRYRAPRFLNRTKPQGWLAPSLQHRVDTTMAWVTRLQRWAPIASLSTMLHRFDTQALQKPEISGAEYQQGELLGYEVREYLLEKWGRKCAYCDAEHTALTIDHIHPKSKGGSDRVSNLTLACFPCNQRKNNQDVQDFLVKDPKRLARIEAVRKAPLRDAAAVNSTRWALWERLKETGLDVEVGTGGRTKWNRKRLGIPKAHCLDAACTGRVDAVQHWQQPVLTIKATGRGRYQRTHLTKYGFPRSYLTRSKSAFGFQTGDMVKAVVTKGKKVGTYWGRIVIRTSGSFNVGAGKEAVQGIHHRFCTLIQRADGYGYAWTKIASDKGDAGTGAACAAVLSLPGMNAGDSRATG

SEQ ID NO: 13025 - protein, 452 aa, Lactobacillus sp.; identical to SEQ ID NO: 5473

SEQ ID NO: 13026 - protein, 515 aa, unidentified
MQYLDFTLVVDKNNKSCVPILNGRAGYLLRNNKAKIINHDPLVIKRIDDYKSDFENRDIFELKIDSGYLNIGFSVSDNYHEYLAGQVELLKGMSDRLTNRNGYRRTRRSRIRYRKNKNVDYKTVHNPTYKNGNEEGWFAPSIQHKIDSHIRLIDKIASWVPVDKVIVEVAKFDIQMIKALADGKEISGKDYQNGEMKGYENAAAYVRDRDKHTCRLCGANKNVVIEVHHIQPRSKGGTDKPSNLISLCHSCHRKVHSNNNDNKYFEKVKSMKLSDTYKDSTYMNMVRWELFERLSGKYDVKVGYGYQTKINRRNAGLRKFHYTDAVCINDYKDVTLTENIYIVDQKRCNDRSMETFSDAKYIDVRDGKEKSGNTLYKERIPNAPSKRVTQKEYINNMRQFRGKKIKPGKRTFVCNSYCLKCGDLIYINSGKHRGNIAEVESMQKLPNGNFKIRFTYKAQTVKYPSISIKPEEYELLKNNLLDKVKIVRTRRGMIWRKYNRLEYEATHADQEGMAV

SEQ ID NO: 13027 - protein, 400 aa, unidentified; identical to SEQ ID NO: 3930

SEQ ID NO: 13028 - protein, 415 aa, unidentified; identical to SEQ ID NO: 2764

SEQ ID NO: 13029 - protein, 518 aa, Anaerostipes sp.; identical to SEQ ID NO: 2751

SEQ ID NO: 13030 - protein, 533 aa, unidentified; identical to SEQ ID NO: 8207

SEQ ID NO: 13031 - protein, 447 aa, unidentified; identical to SEQ ID NO: 12853

SEQ ID NO: 13032 - protein, 419 aa, unidentified
MVYVISQDGKPLMPCSDPIARLLLKQGKAKVKKREPFTIKLTYETTNHTQGLTLGVDTGSGTIGTAVSKDNGDIVYMSEVVVRNDITDKMTQRAKYRRNRRNRKTRYRKARWLNRASSIKKDRFSPTMQSKLHSHVREIEYIQSILPVTEMVFETGQFDMQLMKNPSLANPKVRPWGYQKGANYGFENTKAMVLNRDNYTCQCCKGKHKDSKLEVHHIVFCSQGGSDEESNLLTLCHTCHKDLHSGKINPKLSGKVKGNLKYATQMNSIRKQLFRFYPNAIETFGYVTKANRLHLGVDKEHYYDACTIATQGNAFNVKSNLYKKKCVSDGDFQKTKGIRSEQPIVTDKICGFRKFDKVRYFGNDYFIKGRMSTGYAILMDIDGNKIDFSTMPRGYKTPKLSNCKRITARSTVMTQVKVV

SEQ ID NO: 13033 - protein, 415 aa, Ruminococcus sp.; identical to SEQ ID NO: 2438

SEQ ID NO: 13034 - protein, 490 aa, unidentified
MNYVYVLDPDGKPMMPTTRFGKVRRMLRSGEAKAVTTRPFTIRLTYWPKTHETQPVVAGFDPGRANIGLCTVRDDGRPLYLAHCETRNKEIKNLMSARKGHRQASRRGERLARKRIARRLGTTVKGLLRRILPGCREPLCLKDIINTEARFNNRLRPKGWLTPTARHLLLTHVNLLKQMQKILPVSDVVVEINRFAFMQLDNPGVKKKDIDFQHGQLFGFSGVREAVRLQQNGLCLCCKKREIEHYHHIIPRSKRGSDTLPNIAGLCKACHEKVHTSEEAAKKLASKKAGLTKKYGGTSVLNQIIPKLFDTLKEMFPGHTYATTGQTTKAFREEHGLLKDHTVDAYSIACSILEKPVVSIPDTYYEIHQFRRHDRAIIHHQTERTYYLNGKAVCKNRHKRFEQKGDSLEEFAVAHPDLVSKLTVKKSRRYYNDPDRILPGAIFIYEGKQYVLTGRSSGGKQYRAFGYGTRNFPAGKSTIVWQNTGLVYVG

SEQ ID NO: 13035 - protein, 432 aa, Calothrix sp.; identical to SEQ ID NO: 5934

SEQ ID NO: 13036 - protein, 486 aa, unidentified
MQQLEERNTYTPTDIPHVSGNCDLSLNREETLSVIGLKTSSNNSDAALIATEHAKQNTSVSAVYVLNMRGQPLMPTTPGKAKKLLKEGKAKVVKRTPFTIQLKYATGEAKQPVILGIDSGFLHIGVSATTEKKEVYSAEANLRSDIVKLNSERRQYRRSRRNRKTWYRAPRFLNRKKPEGWLAPSIQHKLDSHIKLINKVKELLPITKTVIEVAAFDIQKIKNPEISGTEYQNGVQKDSWNAREYVLHRDNHTCKACKGKSKDPILQTHHIVSRQIGGDAPDNLLTLCQTCHEKVTKGKLKLDIKVPTGFKPETFMLIVRWKLVNMLRDAGNIVNHTYGYITKFDRITLCLDKSHNTDAFVIAGGTIQERSTSYFIIQQVRKCNRKLFKGDRSHIKNTAARIIHGFQRFDKVLWNKIECFVFGRRKTGYFELRKLDGTKIHASAKAKELTLLETADTLLIANLRRGTLLHTLKSVVSDTPAPHGVL

SEQ ID NO: 13037 - protein, 442 aa, unidentified; identical to SEQ ID NO: 4522

SEQ ID NO: 13038 - protein, 476 aa, unidentified
LEAAGTEGVSHPGLPGKYKHKGGQLMSVAVISKTGERLMPTSEYRARKLLKSGKAIKHSYHPFTIQLTERKTGDIQPIELCMDTGYMHIGVSVKSEKHEYLAEQIDTLTDERSRHDACRMYRRQRRNRKRYRQPRFNNRKKDKGWIAPSLEHKKNIHIQAISRINNVMPLTDITMEMGNFDTQVLKAKEEGNPLPQGADYQHGERYGIATLREAVFTRDDYKCQCCGRTIKDGAILHVHHIKYRSQGGTNSMSNLATVCDKCHTPKNHKPEGKLYNWKPKLPSFKGATFMTTIRWQLYNEVKTLFPDIDIHITYGAATKERRRELDIDKSHVNDAFVMGQFHPKHRIKAVLYKKKRRNNRCLEKFYDAKYIDSRDGKKRSGQELFNGRINRNHKKDSENLHQYRLQKVTAGKRTVRKQHYGIQPHDIIVYENRKRETTGCHCSGTRVMLLPDKKSVSIKKIKIYKYAGGYFKSAFN

SEQ ID NO: 13039 - protein, 431 aa, unidentified
MPNKVYIINKHGRPLMPCSPAKARHLLDEGKAKVKKRTPFTIQLVYGSSGYTQEVILGVDAGSKTIGMSVSTTKEELLSAEVKPRNDVVDLLSTRREFRRARRNRKTRYRKPRFDNRVRSKHKGWLAPSVEVKIQEHITSIKRVCRILPVSKVVVETAEFDLQLLKAIADGKPVPQGEDYQQGEMYGHYNVRQYVLWRDGYTCKCCGAHTTKKKEVRLHVHHLESRKVGGDAPDNQVTLCESCHEKLHKGLIAEKDFKKRKRRSTRDATFMGIMRKTLMQRLCSELPIPVIETRGYITKATREKLLVLPKSHTNDALAIAQGKQGFNVGYLPGIVQINKIYTIRPVRHHNRQLHKATILKGGIRKSNQTEKYVFGYRLFDKVQFNGQDCFIWGRRTTGIFTIKTINGKMIKDGISFKKLKPVEKSTSYLIA

SEQ ID NO: 13040 - protein, 452 aa, unidentified; identical to SEQ ID NO: 5473

SEQ ID NO: 13041 - protein, 449 aa, Thiorhodospira sp.; identical to SEQ ID NO: 12988

SEQ ID NO: 13042 - protein, 421 aa, unidentified; identical to SEQ ID NO: 4238

SEQ ID NO: 13043 - protein, 435 aa, Sutterella wadsworthensis
MSTSVFVLDKKHRPLMPCRPARARRLLRAGRARVVKRFPFVIRLVDRTVEQSEVQPVLIKLDPGSRETGAAVVRDDEKKRHHALAFFVIEHRGGAIRDALKARSAFRRRRRSQNLRCRSPRFLNRVKPKGWLPPSLRHRVETTLSFVRRMCRYLPVSGIATELVKFDSQKLQTPEVSGIEYQQGTLFEYEVREYLLEKFGRKCVYCGAEGVPLNIDHVVPRAKGGSNRVSNLVLACVSCNQKKGARSLEDFLKGKPEVLARVRRELKTPLRDAAAVNATRWVLFNELKATGLPVETGSGALTKLNRHAFGVEKEHWLDALCVGRLNGVVTRKGLNVLEIRCMGRGSRQRTRLTKYGFPRGYLMRQKCVHGFATGDMVEANVPKGKKAGLWRGRVAVRVSGSFNIQTPKGVIQGVGWKHCRLISHNDGYGYAWLGH

SEQ ID NO: 13044 - protein, 592 aa, unidentified
  source 1..592: note = Candidatus Poribacteria bacterium
MSKRSFEPVFVIDAEKTPLEPCHPAVARRLLKSGQAAVFKTYPFTIILKRRIEDPQTDERLLCVDPGSKITGMALVNRRTNQIERAFEVEHRHLSIKDGLTIRKGYRRSRRHRHCRYREARWQHRKRAVAMPHLEGNRICWTYQRISVKNAKRGYGDGKGWIAPSLMSRVFNITTWANRLRAVCPIRGFVLENVKFDTQLMRNPDIKGVAYQRGTLWHTELREYVLHRDKHRCRYCGTKEGPFNTDHVIPESKGGPTRHDNLVTACIPCNRKKDNKLPDELKGKMGEVVRKIVNDGIPILKDAAAVNTIRWKIFEALQTTGLPVHCVTGGQTKFNRTRAGLPKTHYYDAACTCGTPAPVKGLRVMRIKALGYGTRDLFSFRSPFPKNQNMDADARKAWRAELDAKRSKTRERMEKKLKTAKTPEKRREILAAQEKNPNANWTLFNYGKRKRIERMGFKKFDHVVGMKSYQGKTTRVTGTINCFNNTPTQTVRVKFGLESKARKPFKTSELRRIQHRDGYAYFYETAAPQKHFARPAPETAQQADVTQISSGAALSPTLTPLSETTLGGKPIVLPQTKRRRQKAVDVSQLRLW

SEQ ID NO: 13045 - protein, 420 aa, unidentified; identical to SEQ ID NO: 3504

SEQ ID NO: 13046 - protein, 415 aa, unidentified; identical to SEQ ID NO: 10041

SEQ ID NO: 13047 - protein, 512 aa, unidentified
MSTVYVLNKDGKPLMPTTRGGHVRHLLKEQKARVVRTKPFTIQLLYETDDVVQPLYLGIDPGRTNIGVAVVKADSTAVFTAHLETRNEEIPKLMQGRKKARRARRTNGRRCRRQRRAKANGTISKKCVKQTTAQNGSASKRAKEIGVIKRHLPGCEKDVLCIGIKNKEAKFSNRTRPEGWLTPTTNQLLKTHINLVKKIRKFLPISDVVLEINKFAFMQLDNPNIQKWQYQQGPLYQKASLEEAVSEMQEHHCLFCKKSIAHYHHVVPQSENGSDTIGNIVGLCTKHHDLVHKDTAWQKKLAKKKTGLNKKYGALSILNQIIPALTKELSSLFPKHFFATNGKSTHDYRAAHDVSKDHWLDAYCIACSILPNDTCDKNINGRVPYKLKQFRRHDRRALHKENMSRVYTLDGKKVATNRHKAIKQTTDSLEEFRQRQPNDVCKLKVKEHHPEYRNPERNFPGCVFLVGKHTHVMQGTSGSHNGKADGYYDTNGNSYSSGECKFVAKNEGIVFA

SEQ ID NO: 13048 - protein, 399 aa, unidentified; identical to SEQ ID NO: 6633

SEQ ID NO: 13049 - protein, 406 aa, unidentified; identical to SEQ ID NO: 3980

SEQ ID NO: 13050 - protein, 440 aa, unidentified
LSNVFVLDTNKQALHPVHPGRARRLLSLGQAAVFKRYPFTIILKSAASSPHVWPLRVKLDPGSKTTGLAIVNDASGEVVFAASLIHRGDAIRERLEKRRAARRSRRQRKSRYRQSRFDNRGTKKKGWIAPSVQSRVCNVITWVKRLVRLCPITAISQELVKFDLQQMDHPEISGVNYQQGTLSGYEVREYLLDKWGRQCAYCGAKDVPLEVEHINPRSKSGDDRVCNLTLACEPCNTKKGTQDIRVFLAHQPELLAKLLAQAKSPLKDAAAVNITRWVLHAQLKAFGLPLECGSGGRTKFNRITRGLEKTHWCDAACVGASTPEVLHIGQVRPLSIAAYGHGRRQMCLMNKSGFPRTNPKQKKFKHGFRTGDLVKAVVPPHLKHAGTHVGRMSAKASGAFTIATAGGTVTDIGKKYCRMLQRADGYGYTQKGELAFPPVP

SEQ ID NO: 13051 - protein, 425 aa, unidentified
LRVFVLNKRGKPLMPCSPAKARLLLKEKKAIVKRRTPFAIQLTIATGETKQPVSLGVDAGYKHVGLSASTEKAELYASEVELRQDITDLLSARRALRQSRRNRKTRYRAPRFDNRIRTKRKGWLAPSVENRINAHLSRIEAVLRLLPVTKITVETASFDLQLLKNPDISGKEYQEGEQLGFWNVREYVLFRDGHVCQHCHGRLKDPVLNVHHLKSRRTGGDSPGNLITLCETCHKALHRGEITLKAKRGQSFRAETFMGIMRREVLDRLKASHPKLEVQNTYGYRTKHARISNGIAKSHCADAFCIAGNLGAKRLGEFLFQKQTRRNNRQIHKLSILKGSLRKRNQAPFEVKGFRLFDKVAYQGEEGFIFGRRSSGFFDLRRLDGTRISAGINYKKLRLLEKRRTYLTEIRKEEARRPLPEGRGL

SEQ ID NO: 13052 - protein, 449 aa, unidentified
MTTFVISAEGEKLMPTTNIKKIRKLLRSGRAKIVKHAPFTVQLLYESGNAVQPIEFTEDTGYQYIGVSLKSEKHEYVSAEYTLLKNEKQHHDDQRREVRRPRRNRKRYRKARFDNRRKSEGWLAPSLRNKADRHVDIFKMYCEVCPITSVTLEIGQFDPAVLDAVEQGKPLPEGVDYQYGPRYGYDTLREAVFARDGYRCLCCGKSVIEDGTALRLHHVGFRTGDRSNRLGNLASVCEKCHSPKNHKPGGKLWDMAPPKGTASAAYMNIVRWHIYEGVKAFGVDTHITYGAVTKRTRRDLNIGKSHANDAYCIGSMRPKRRTKTQYFEKRRRNNRILEKFYDAKYLDIRDGKTKKAAELGCNRTSRSIPRSNPQNERVFRGEKVSNGRRSIRAQRYLYQPDDIIIFGGKKRMVKGTHNKGSSVQLIGGGDISPRKIKLHHHAGGWRQVV

SEQ ID NO: 13053 - protein, 392 aa, unidentified
LRVFVLNKRGKPLMPCSPAKARLLLKEKKAIVVRRTPFTIQLTIATGESKQPVSLGVDAGYKHVGLSASTEKAELYASEVELRKDITDLLSARRALRQSRRNRKTRYRAPRFDNRIRTKRKGWLAPSVENRINAHLSRIEAVLRLLPITKITVETASFDMQRLKNPDISGKEYQEGEQLGFWNVREYVLFRDGHVCRHCHGRSKDPVLNVHHLESRRTGSDSPDNLITLCVTCHKALHRGEITLKAKRGQSFRAQAFMGIMRREVLNRLKASYPELKVHETYGYLTKHARIANGIVKSHGADAFCIAGNLGAERLGEFFFQKQTRRNNRQIHKLSILKGGIRKRNQAPFEAKGFRLFDKVACQGEEGFIFGRRSSGFAKPEAASSVATVLPE

SEQ ID NO: 13054 - protein, 419 aa, Geobacillus sp.; identical to SEQ ID NO: 3993

SEQ ID NO: 13055 - protein, 424 aa, Planktothrix sp.; identical to SEQ ID NO: 12649

SEQ ID NO: 13056 - protein, 470 aa, unidentified; identical to SEQ ID NO: 2925

SEQ ID NO: 13057 - protein, 373 aa, unidentified
LGVDAGYKHVGLSASTEKAELYASEVELRQDVSDLLSARRALRQSRRSRNTRYRAPRFDNRIRTKRKGWLAPTVENRINVHLSRIETVLRLLPVTKITVETASFDTQLLKNPDIAGKEYQEGEQLGFWNVREYVLFRDGHVCQHCHGRSKDPVLNVHHLESRRTGGDSPGNLITLCETCHKALHRGEIKLKAKRGRSFRAETFMGIMRWGVLNRLKASHPKLEVHNTYGYRTKHARIANGIAKSHCADAFCIAGNFGAKRLGEFFFQKQTRRNNRQIHKLSILKGGIRKRNQAPFEVKGFRLFDKVAYQGEEGFIFGRRSTGYFDVRKLDGTCISAGISYKKLHLLEKRRTYLTEIRKEEALPPPPEGRGLRA

SEQ ID NO: 13058 - protein, 461 aa, unidentified
MSVLVIGRNGRALMPTNPRKARLLLKKKTASVVCRHPFTIQLLYKTGCATQEGCIGIDTGSQHIGVGITCGDRVILKDEHALRSSMEKRSLLATRTVMRRGRRYRKVRYRKPKWRHHTKRMYFEKANRRGQHWRKVKTTTQSPRLKGWLPPSLQSKCDHHFRIIDRYLKYLPDPITRNLVIEAGRFDMARMNDPTIHGEMYQRGPMYDAENLRAYIFARDNYQCACCKAKAGTTRKADGTTVKLVAHHILFRSRGATDNPKYIISVCDHCHTKAHQPGGILYSWMENNKKVARGLRDATFMNILRKRLFARYPQAAFTYGNITAADRKQLRLPKSHANDAVAISLFGKEASTVKNICQTMHYKQIRKSKRSLHEAIPRKGRKNPNTKAVRNKKNTTQANGFKLWDSVLADGKKLFICSFTGTSAYLIDKNGCYISQPGKTYKQWPLSKLKRLHPNGNWLMA

SEQ ID NO: 13059 - protein, 437 aa, unidentified
MPCSEKRARLLLARGRACVHRLVPFVIRLTDRQLDTCTLQPLRIKLDPGSKTTGLALVRDTEHLNTDTGEIQRGVAVLSLIELVHRGRQISEALTARRQMRRRRRGCLRYRAPRFLNRGNKQRGWLAPSLQHRINTTTAWVARFRRWSPVTALSAELVRFDMQRLQNPEISGVEYQQGTLAGYEVREYLLAKWSRKCAYCGVENVPLQIDHVHPKAKGGTNRVSNLTLACGPCNARKSAQPVDAFLAKDPKCLTALLAQAKRPLKDAAAVNATRWALVGALKATGLPVETASGGCTKFNRSRLAIPKTHALDAVCVGAVSVVTNWQKPSLTIKCTGRGSYQRTRLDKYGFPRGYLMREKSVKGFKTGDLVRAIVPTGKKAGRHTGRVAIRKSGSFNIQTLAGVVQGIGYRHCRLLQRADGYGYFFNKAACDTAQKRE

SEQ ID NO: 13060 - protein, 442 aa, unidentified; identical to SEQ ID NO: 2903

SEQ ID NO: 13061 - protein, 420 aa, unidentified; identical to SEQ ID NO: 6507

SEQ ID NO: 13062 - protein, 417 aa, unidentified
MPCSPAKARLLLKEKKAIVKRRTPFTIQLTIATGEAKQPVTLGVDSGYKHIGLSATTEKVELYASQVELRQDITDLLSARLALRRSRRSRKTRYRAPRFDNRVASKRKGRLAPSVENRIAAHMSRVEAVMRVLPVTAITVETAVFDTQLLKTPDIAGAAYQQGEQLGFWNVREYVLFRDGHVCQHCRGKSKDPILNVHHIESRRTGGDAPNNLITLCETCHKAFHRGEIELKIKRGKSFKAETFMGIMRWTLFERLKKAHPELNVHNTYGYLTKHKRISYGIAKSHCADAYCIADNLSAKRLKGFFFQKQTRKHNRQIHKLSILKGGLRKKNQAPYEVKGFRLFDKVICKGEEAFIFGRRTSGSFDVRRLDGTRISAGINYKKLRLLEPRTTYLTEFRKEAALPPLHKCRGFRAEFL

SEQ ID NO: 13063 - protein, 420 aa, unidentified; identical to SEQ ID NO: 6507

SEQ ID NO: 13064 - protein, 406 aa, unidentified; identical to SEQ ID NO: 6612

SEQ ID NO: 13065 - protein, 411 aa, unidentified; identical to SEQ ID NO: 6901

SEQ ID NO: 13066 - protein, 470 aa, unidentified; identical to SEQ ID NO: 2825

SEQ ID NO: 13067 - protein, 396 aa, unidentified
  REGION 1..396: note = Ga0373630_0005241
MKFQSQALRLSEEEYSLQVIEEGKRSVTNANVSGRCALVNFDEEHRYVYGIDDGLEAGVAIVDMIRSMVVFKGIIHLRDDVKRLMMYRREHRRARRNRLRYREVRFDNRRRSVGWIPPSVKVKRDNIIRVVGKLAKKFPPSKIVYEENSFDVKKLMFPDIEGREYQLNLWYALLSRAGNKCEVCRQEGKLEKHHVVPISEGGTNQVTNILIVHEKCHKKIHEGKVKVIAAKNIVVPYVNYGKTYFKAELSKIAPLEVVYGYQTRIWRERMGLEKNHWNDAIAMVSRGEKLVDTETICYCLAKRRRLYYRSKGLRCVMGFMRGDIVRYNCIDGSGIIGCITSLYKSGFCKIGAWDGKGSFERTGPCSLSRCDFLSRDSIIILAPNKKYVNEFKELIV

SEQ ID NO: 13068 - protein, 400 aa, unidentified
MLVYVLNKDGKPLMPCKPQKARKLLESKKAKVVKREPFTIQLLYGSSGYKQEITLGVDSGSKNIGLSATTENSELYSAEIQLRSDIVDLLSTRRQNRRTRRNRLRYRKPRFLNRVRSKNKGWLAPSIEHKIATHLRVIENAHKILPISKIIVEVASFDIQKIKNPDIQGIEYQQGEQLNFWNVREYVLFRDNHTCQCCKGKKKDKILNVHHIESRKTGGDAPNNLITLCETCHNGYHKGTVKLPKTIKRGMSFKDTTFMGIMRWSFYNRLKSQYSNVSLTYGYITKNTRIQSGLEKSHRIDARCISGNPLAKPLECWYFSKQVRNHNRQIHKANILKGGKKKLNQAPYEVKGFRLFDKVEYVGKEGFIFGRRSTGYFDIRTLDGISIHKSASYKKLKLID

SEQ ID NO: 13069 - protein, 242 aa, unidentified
MPNKVYVINKHGRPLMPCSPAKARHLLDDGKAKVKKRTPFTIQLVYGSSGYTQEVILGVDAGSKTIGMSVSTTKEELLSAEVKPRNDVVDLQSTRREFRRARRNRKTRYRKPRFNNRVRSKHKGWLAPSVEVKIQEHITSIKMVCRILPVSKVVVETAEFDLQLLKAIEEGKPVPQGEDYQKGEMYGYYNVRQYVLWRDNYTCQCCGAHATKKKEVRLHVHHLESRKVGGNAPGNLVTLWRC

SEQ ID NO: 13070 - protein, 465 aa, unidentified
MSTCVCVLTNNGKRLMPTFRLGKVRHLLKDGKAKIVKHHPFTIQLLYDSKTNTQPIEICEDVGYNYIGISVKSESHEYVSAQYDTLQDEKEHHDDCRMHRRTRRNRLRYRKPRFDNRKRGEGWLAPSLKHKKELNVNVVKMYCTVMPITHATVEVGSFDTMLVKAIQEGKAIPEGADYQKGPRYNLATLREAVFYRDNYVCKICGRKATEGAILHMHHMFYWKGRHGNSLDELLTVCEKCHTPANHQKNGKLYGFGENVKFADLSGAAFMNTVRWQIVNELYAAFGKPFVTITYGAMTKEKRIALQLEKSHNNDAYAMGEFHPNHRCTFEHYEKVRRNNRILEKFYDSRHIDIRTGEIATGKELFNGRINRNHKKDSENLHKYRGKRVYKGHRALLRKKVNLNPGDLVSLNGEVLIVHGTHTDKKGAVNVEFKTPAKNGRKSASLKKLKIVKATGSIHPACEKVS

SEQ ID NO: 13071 - protein, 456 aa, unidentified
MTNIYILDINGKPLMPCHNGAFVRCRLKNKEAKVVKRKPFTVQLMYEVKNNYKQDIYLGVDAGYKYVGFSASASNQELFSGELEQDCGMVERNKERRMYRRQRRSRLRYRKARFNNRKAGKPQGWTAPSLQRKRDTHLRFIMMLSSIMPITDINVEIGLFDPALMKATAEGRTIKGTDYQHGEAEGFENMKSYIRYRDSYTCQNPDCKCHKMKKEDREKLKLHIHHIGYYKHDRSNRPGNLITLCELSHTPETHQPGNLLYGWKPKMKSLRETAFMNTVRKEIVDTLKVIYPDKTVRYTYGYKTNLTRREWHVPKNHHNDAFCIAGQYSLKRAETVYFNQQRRNNRSLEIFHDAKYIDSRDGKRKTGKELYCGRNTRNKNFNKENLHQYRSKKVSRGKRNIRKQRHKYQPNDIVVFEGQKYKIRGSHCKGSRVILDTKKSVSVKKIHILKHCSGIC

SEQ ID NO: 13072 - protein, 434 aa, Anoxybacillus sp.; identical to SEQ ID NO: 3808

SEQ ID NO: 13073 - protein, 423 aa, Moorena sp.
MRVFVLNSNLQPLDPCKPARARILLSAGKAKVYRRYPFTIVLTEEIKNPVTHEHQFKIDPGAKTSGLAIVQGFRVVWGAELTHRGFQIREALSSRRQLRRSRRNRKTRYRKPRFLNRTRPKGWLAPSLTSRVQNILTWVKKLIRFCPITGISQELVRFDTQKLQNPEISGIEYQQGTLFGYELREYLLEKWNRKCAYCGVTGTQLEIEHIKPLSKGGSNRVSNLTIACHACNQAKSNQDIELFLSKNPSILKRILSQAKRPLADAASVNTTRWKLYHDLKSIGLPVEVGSGGLTKFNRCRQSLPKTHWLDAANVGKVETLIVEVALPLVITAKGHGTRQLCRTNKYGFPIRHCSRIKLHKGFQTGDIVRAVVTKGKKIGTYVGRVATRKSGSFNISTLGGLVQGISHKYCRFIHRKDGYAYTI

SEQ ID NO: 13074 - protein, 415 aa, unidentified
MIYVRNKEGKALMPSDRGGRIGYLLRHGKAHVVSRVPFVVQLDYESTTYTQEVSLGIDAGSKHIGVSASSEKKELLAAQVELRSDVVNLLSTRRELRRARRNRKTRYRKVRFDNRKRKDGWLAPSIGQKVESHLKVIRLVHKLLPITKTTIEVAQFDAQKIKNSDIKGEEYQRGEQMGFWNVREYVLARDGHKCVHCKGKSKDPILNVHHLESRKVGGNSPSNLVVLCETCHKAYHRGEFDLKIKRGTTLRDAAVMNIMRWSVYERAKAEFGNVYLTYGYITKHTRIENDIEKTHAADAFCIAKNVHARRSRTFFMCRCVPRHTRALHVANPKKGGIRRSCIASHKIGKSRFQRFDMVRWKGKECFIFGSTHGNVVLRKIDGVKVHETQAVSAKTIKFLKRIRNNILMEERTSES

SEQ ID NO: 13075 - protein, 459 aa, unidentified; identical to SEQ ID NO: 3944

SEQ ID NO: 13076 - protein, 533 aa, Actinomadura sp.; identical to SEQ ID NO: 3190

SEQ ID NO: 13077 - protein, 451 aa, unidentified; identical to SEQ ID NO: 5203

SEQ ID NO: 13078 - protein, 494 aa, unidentified
MTMVYVQNKDGKPLMPTTRYCYVRLLLKEKKARVVCTTPFTIQLNYDTPDITQDLILGIDPGRTNIGVAVVKEDGQCVFSAHLETRNKDVPLLMQKRAGFRKQHRTLDRRRKRQRRAKAAGTTITDGSVERLLPGYEKPIVCHHIRNKEARFNNRCRPVGWLTPTANHLLQTHINLIAKVAKFLPITKVVVELNRFAFMAMDNPNIRRWEYQQGPLYGLGSVEDAVYAQQDGHCLFCKKPIDHYHHVVPRHKGGSETLANRCGLCAKHHDLVHTDKAWAEKLVTRKGGMNKKYHALSVLNQIIPHLMEYLGNETLYDVYATDGRSTKGFRIAKNVPKEHYTDAYCIACSILDTDIEVSTPVEPFELKQFRRHDRQSCIRQMVDRKYILDGKVVAANRHKAFEQESDSLQEFREAYGDAAVSQLTVKPHSPQYKDMARIMPGAVMDFGGAVGIFQGSEGFHNGKPDYYKSTKGERVLTRRCALLAQNAGMVFIPA

SEQ ID NO: 13079 - protein, 425 aa, unidentified
LANDLYRSIDREETNLRVYVLNKRGEPLMPCSAAKARILLKEKKAVVKRRTPFTIQLTIATGETKQPVSLGVDAGYKHIGLSASTEKAELYASEIELRQDVSELLAGRRALRHARRSRKTRYRAPRFDNRKREKGWLAPSVENRIGAHVSRVEAVLRILPVTKIVVETASFDVQRLKNPDIQGVEYQQGEQLGFWNVREYVLFRDGHECQHCHGKSKDKVLNVHHIESRRTGGDAPNNLITLCETCHKAFHRSEIELRVKRGRSFQAEAFMGVMRWTFFERLRASHPEIEVRNTFGYLTKNTRISHGIEKTHCADAFCIAGNLKAKRLGYYFFQKQTRRHNRQIHKLTIKGGVRKRHQTPYEIKGFRLYDKVLYRGKVAFIFGRRSSGYFDIRTLDGERISASVSYKKLRLLEKRRTYLIELRRN

SEQ ID NO: 13080 - protein, 465 aa, unidentified; identical to SEQ ID NO: 6728

SEQ ID NO: 13081 - protein, 416 aa, unidentified
MQYVYVVGSNGKPLMPCSPAKARKLLKSKSAAVLQRTPFTIKLLHHAGGYKQPITLGVDAGSKHVGLSACTDTEELYRNDVVKLLSARRECRRGRRHRKTRYRAPRFNNRVHSKHKGWLAPSVEVKIQEHITAIHRICRRLPITKIVVETAEFDTQRLKAMLEGKPLPVGIDYKRGEMYDEYNVRQYVLKRDNYTCQHCGARGSAEKGIKLHVHHLETRQTGGNAPNNLITLCKDCHTALHDGKITLKLDKKKRGKPLRDSAFMGIMRKTLLSRIRKEVAIPVVETQGYITKLLREENHIQKSHTNDARCIAGCPKALPCDTTYHTKAIRHHNRKIHKINILKGGVRKLNQAPYKVFGFRIWDKVKYKGQECFITGRRSSGYFALKKLGGTTISNSANYKKIHFLEPANHYIIERS

SEQ ID NO: 13082 - protein, 451 aa, unidentified
VTTILKTCFAAFNLAKVVVLMDAWDIIVVLNKRGKPLMPCSPAKARLLLKEKKAIVKRRTPFTIQLTIATGETKQPVSLGVDAGYKHVGLSASTEKAELYASEVELRQDITDLLSARRALRQSRRNRKTRYRAPRFDNRIRTKRKGWLAPSVENRINAHLSRIEAVLRLLPVTKITVETASFDLQLLKNPDISGKEYQEGEQLGFWNIREYVLCRDGHVCQHCYGRSKDPVLNVHHLESRRTGGDSPGNLITLCETCHKALHRGEITLKAKRGQSFRAEAFMGIMRWEVHNRLRALHPGIEVSNTYGYRTKHARIANGIAKSHCADAFCIAGNLGAERLCEFFFQKQTRRNNRQIHKLSILKGGIRKRNQAPFEVKGFRLFDKVACQGEEGFIFGRRSSGFFDVRKLDGTRISAGISCKKLHLLEKRRTYLTEIRKEEALPPLPEGRGLRA

SEQ ID NO: 13083 - protein, 442 aa, unidentified; identical to SEQ ID NO: 3218

SEQ ID NO: 13084 - protein, 514 aa, unidentified
VPTDNFGSVVLTLAIGDFSMLNKNSVFVLDCNKTPCDLIHPAAARKLLFAKKAAILNRYPFTIILKEEARAKKQYRIKIDPGARFSGLALLSDANIVWCAELEHRGFQISEALTKRRTLRSSRRNRKTRYRQPRFLNRKRRKGWLPPSLISRVNNIKSWVNKLIKYAPVDSISMELVKFDSQKIVNPEIQGTEYQKGELFGYEVRQYLLEKFNHTCVYCGTKDAALNLDHFHPKSRGGSDRVSNLVLSCVDCNQAKSNKLPEDFLSDKPKLLELINKQRKQPLADVAAVNATRWKLKEILESTGLPVEVGSGALTKYNRKRLGISKSHWTDAACVGKSTPDTLNIRNYQPLLIKAMGHGSRQMVKPDKYGFPRTSPKLRQKSFYGFQTGDIVKAVVTKGKKIGTYIGRVAVRQTGNFNIKTKTETVQGISYKYCQHLHKSDGYTYSFGELVKQKSVNFVQGTLYATSLEQVLETPVQLNLFDISELTTETKPKTKRAKRTKQFDSFDGEQLSLF

SEQ ID NO: 13085 - protein, 493 aa, unidentified; identical to SEQ ID NO: 3781

SEQ ID NO: 13086 - protein, 423 aa, unidentified; identical to SEQ ID NO: 3951

SEQ ID NO: 13087 - protein, 442 aa, unidentified; identical to SEQ ID NO: 8269

SEQ ID NO: 13088 - protein, 447 aa, unidentified; identical to SEQ ID NO: 4762

SEQ ID NO: 13089 - protein, 465 aa, unidentified
MNTCVCVLSNSGERLMPTFRLGKVRRLLKDGKAKIIKHHPFTIQLLYDSKTNTQPIEICEDVGYSYIGISVKSESHEYVSAQYDTLQDEKEHHDDCRMHRRTRRNRLRYRKPRFDNRKRGEGWLAPSLKHKKELNVNVVKMYCAVMSITHATVEVGSFDTMLVKAIQEGKVIPEGADYQKGPRYNLATLREAVFYRDNYVCKICGRKATEGAILHMHHMFYWKGRHGNSLDELLTVCEKCHTPANHQKNGKLYGFGEDVKFADLSGAAFMNTVRWQIVNELYAAFGKPFVTITYGAMTKEKRIALQLEKSHNNDAYAMGEFHPNHRCTFEHYEKVRRNNRILEKFYDSRYIDIRTGEITTGKALFNGRINRNHKKDSENLHKYRGKRTYAGHRALLRKKVNLNPGDFVSLNGETLVVHSTHTKKNGAVNVEFETPAKSGQKSASLKKLKIVKAANSIHPAWKKIS

SEQ ID NO: 13090 - protein, 443 aa, unidentified
MSVAVISKTGERLMPTSEYRARKLLKSGKAIKYSYHPFTIQLTERKTGNIQPIELCMDTGYIHIGISVKSEKHEYLTEQIDTLTDERSRHNARRMYRSQRRNRKRYRQPRFNNRKKDKGRIAPSLEHKKNIHVQTISRINNVMPLTDITMEMGNFDTQVLKAKEEGRPLPQGVDYQHGERYSIATLREAVFARDGYKCQCCGRTIKDGAILHVHHIKYRSQGGTNSISNLATVCDKCHTPKNHKPGGKLYGWKPTLPSFKGATFMTTIRWQLYNEAKALFPDIDIHITYGAATKERRRELNIDKSHINDAFVMGQFHPRHRIKAVLYKKKRRNNRCLEKFYDAKYIDSRDGKKRSGQELFNGRINRNHKKDSENLHQYRLQKVTAGKRTVRKQHYSVQPHDIIIYESRKRETTGCHCNGARVMLLPDKKSVSIKKIKIYRYAG

SEQ ID NO: 13091 - protein, 466 aa, unidentified
MSTCACVLSKNGERLMPTIRLGKVRHLLKDGKAKIIKHHPFTIQLLYDSKTDTQPIEICEDVGYNYIGISVKSESHEYVSVQYDTLQDEKDCHDSCRKMRRIRRNRLRYRKPRFDNRKRNKDWLAPSLEHKKELNVNVIKMYCEVVPITHVTVEVGSFDTMLVKAIQEGKAIPEGADYQKGPRYNLATLREAVFYRDNYTCKVCGRKAKNDSAILHVHHMFYWKGRHGNSLNELLTVCEKCHTPANHQKGSKLYGFGENIKFANLSGAAFMNTVRWQIVNELYATFGKLFVTFTYGAMTKEKLIALHLEKCHNNDAYAMGNFHPVDRCAFEHYKKVKRNNRILEKFYDSRYIDIRTGKVANGKSLFNGRINRNHKKDSENLHKYRGKRIRKGYRALRRKKVSLNPDDLVSLNGEILVVHGTHTRKNGPVSVEFKVPSKNGKKSASLKKLKIVKTSNSMHSAWTKVS

SEQ ID NO: 13092 - protein, 423 aa, unidentified; identical to SEQ ID NO: 3951

SEQ ID NO: 13093 - protein, 417 aa, unidentified
MIYVRSKEGSVLMPTERCGKIGYLLRHGKAHVVSRVPFVVQLDYDSTTYTQDVSLGIDAGSKHIGVSASSEKKQMLAAQVELRSDIVNLLSTRRELRQTRRNRKTRYRKARFDNRKKKDGWLAPSVEQKIESHLKVIRLVHKILPITKTTIEVAQFDAQKIKNPYIKGDEYQQGEQMGFWNVREYVLARDGHKCVHCKGKSKDPILNVHHLESRKTGGNSPSNLVTLCETCHKAYHRGEFDLKIKRGSSLRDAAVMNIMRWAVYERAKAEFGNVHLTYGYITKHTRIENGIAKTHASDAFCIAKNVHAMRLSSFFMCRCVPRHTRALHVANPKKCGIRRNTIASHKIGKSNFQRFDMVRWMGKECFIFGSTHGRPVLRDIDGLQVANQPSVNIKTIKFLKRLKNNILMEEKNFRRLN

SEQ ID NO: 13094 - protein, 424 aa, unidentified; identical to SEQ ID NO: 6692

SEQ ID NO: 13095 - protein, 435 aa, Desulfovibrio sp.
LAKETLTDHLAEVYMNKVFVLNQFGKPLMPYHPGKVRILLKEKKAFVKRKTPFTIQLTIPVKEKLYPITLGVDAGYRHIGLSATTEKEELYASEIETRADVSALLSTRRQCRRGRRNRKTRYRAPRFNNRVHSKHKGWLAPSVENIIAAHISRIEDVLKLLPVTRIVIETASFDIQLIRNPEISGAQYQQGEQLGSWNTREYVLCRDGHTCQHCHGKSKDQILQVHHLESRRTGGDAPNNLITLCKTCHEALHRGKIELKAKRGRSFRAETFMNIMRWTVLERLKVAHKELEIQHTYGYITKHTRISLGLEKTHRADAFCIAGNLHAQRLDCCLYQKQIRRHNRQIHKMKILKGGIRKLNQAPYEVYGFRLYDKVLCNGEAGFIFGRRTSGYFDVRRLDGTRISASISFRKLRLIERRKTYLTEIRKEEGVSSPA

SEQ ID NO: 13096 - protein, 413 aa, unidentified
LKVFVLNMRGKPLMPCSPAKARHMLKAGKAFVVRRTPFTIKLTIATGETKQDVTLGVDAGARHVGISATTEKEEVFASEVALRQDITGLLADRLAFRRARRNRKTRYRAPRFNNRVRSKHKGWLAPSVENRIQAHMSRIEAVCRLLPVTKIVIETASFDIQKIRNPEVEGTGYQQGDQLGFWNVREYVLFRDGHICQHCRGRSKDPILNVHHLESRKTGGDAPNNLITLCETCHKAYHAGKIKLKVKRGHSFRAEAFMGIMRWTLLNRMRKAHPSLPVENTYGYLTKHKRIALGLPKTHCADAFCIAGNLKALRRGDFLFQQQTRKHNRQIHRCSILKGGVRKLNQAPFLVKGFRLFDKVRIGGQIGFVFGRRVRGIFNIRRLDKTVIGTDINCKKLSLLETRKTFLTELRKE

SEQ ID NO: 13097 - protein, 404 aa, unidentified
RRCRRQRRAKANGTISKKCVKQATAQNGSVSKRANEIGVIKRHLPGCEKEVLCIGIKNKEAKFSNRTRPEGWLTPTANQLLQTHINLVKKIQKFLPISDVVLEINKFAFMRLDNPNVQKWQYQQGPLYQKASLEEAVSEMQEHHCLFCKNTIDHYHHVVPQHKNGSNTIGNVVGLCAKHHNLVHKDTSWQEKLAKKKTGLNKRYGALSVLNQIIPALTKELSSLFPKHFFATNGKSTYDYRAAHGVSKDHWLDAYCIAGSVLPNDACDNNINNRVPYELKQFRRHDRRALHKENMSRVYTLNGKSVATNRHKAIKQTTDSLEEFRQRQPNDVCKLKVKEHHPEYRNPKRNFPGCVFLVGKHTHVMQGTSGSHNGKADGYYDTNGNSYSSGKCKFVVKNEGIVFT

SEQ ID NO: 13098 - protein, 411 aa, unidentified
MPCSQRKARLLLKNKKAKIYSYHPFTIQLFYASGETIQMCHIGVDTGSRHIGLAITSENKVLLKGEIDLRQDVKSNLDTRRTYRRNRRNRKTRYRKARFFNRVKSKQKNWLPPSIESKIHHTFHWMNKLENLVADSNLHIEVGKFDMAKMIRPDIQGKEYSQGQCYGYFDTRYFVFARDDYTCQCCKKKNKILRTHHIRYRSNGGTDRADNLITVCTDCHTSKNHKKGGILYEWQQRHKKGKPYKEPPFMNIIRKRIYQKYPDAVISYGSQTTPKRKERNLDKTHYNDAIIISGIEDIKENPKEWLRIKQFRKKKRSLHEAAARKGRKEHNRTQKRNRKNTSYDKGWYLNDYVEVFGQKGYISGFTNCGVYIKNINGDYITMPDKKYKQVSLCNIVRICHNNNWQYEIQKI

SEQ ID NO: 13099 - protein, 421 aa, unidentified
MRGQPLMPCSPAKARHLLKAGKAVVKRRTPFTIQLRIATGETKQNVTLGVDAGAKHVGLSATTEKEEVFASEVELRQDITGLLAARLSLRRDRRHRKTRYRAPRFLNRVRSKHKGWLAPSVENRIQAHMSRIDAVCRLLPVTKIVIETASFDIQKIKDPSVEGTDYQQGDQLGFWNVREYVLFRDGHVCQHCHGRSKDKILNVHHLESRQTGGDAPNNLITLCETCHKAYHAGKIKLKVKRGQSFRAEAFMGIMRWTLLDRVRKAHPGLPVENTYGYLTKHTRITHGLPKTHCVDAYCIAGNLKAVRRGVYLHQRQMRKHNRQIHKFTVLSKRLEDGTKIGYRKLNQSPYLVHGFRLFDKVRCLVQIGFIFGRRSSGYFDVRRLDGVKLFPSISWRKLTLLEKRSTYLTELRKEDGASSPV

SEQ ID NO: 13100 - protein, 470 aa, Anaerostipes sp.; identical to SEQ ID NO: 2825

SEQ ID NO: 13101 - protein, 536 aa, unidentified
VLRPRYQYPTRWYPSREQGSGNGCLSGEENTDLKQEVSGTLSKGDHSHPGEQDFCVPAITIQGGPAMSVFVVGLNGCRLMPTSERKARLLLKHGKASVYRKVPFTIKLNYKTGSTTQSGYLGIDTGSQHIGVSVVREDGTVLHKEEIGLRDSMSKRKLMQSRASSRRGRRHRKTRYRHPKWRPKAKRVYCEIPDRKRRHWKKKEITFTSKRPKGWLPPSLQSKTDHHIRWIKKLQDLLPEGYRLSIELGRFDPARLKDPEIHGELYQKGPQYDYENVRAYVLDRDRYTCQVCGKKGGRLHVHHILYRSHGATDDPQYMATVCSDCHNTENHQQGGILYQWMQKQKKFTRGLRDATFMNILRKRLIEAFPGATFTYGNITKADRERLRLPKSHGNDATAIAIVKTGIMTVKDKEPVIYIQQVRRKKRSLHEETPRKGRKEPNRKASRYDKNTKAVTVTKRKNKKKISITGCLFDRVELNGKKGWISGFTDKSCYVKDENDQYIRTSPKYKQVSLSKLKILHHCGNWAIGARRSLGKG

SEQ ID NO: 13102 - protein, 443 aa, unidentified
LTKDENRPSGRTTGLRAEQAEPAGIRKGDTLKVFVLNMRGKPLMPCSPAKARHMLKAGKAFVVRRTPFTIKLTIATGETKQDVTLGVDAGARHVGISATTEKEEVFASEVKLRQDITGLLADRLAFRRARRNRKTRYRAPRFNNRVRSKHKGWLAPSVENRIQAHMSRIEAVCRLLPVTKIVIETASFDIQKIRNPEVEGTGYQQGDQLGFWNVREYVLFRDGHICQHCRGRSKDPILNVHHLESRKTGGDAPNNLITLCETCHKAYHAGKIKLKVKRGQSFRAEAFMGIMRWTLLDRVRKTHPKLPVENTYGYLTKHKRIALGLPKTHCADAFCIAGNLKALRRGDFLFQQQTRKHNRQIHKCSILKGGVRKLNQAPFLVKGFRLFDKVRIGGQIGFVFGRRVRGTFNIRRLDKTVIGTDINCKKLSLLETRKTFLTELRKE

SEQ ID NO: 13103 - protein, 457 aa, unidentified
VWLYQAVYNLGEGFLPSSEERTAFYWLLIYRKEHGIMQYVYVLNKHGEPLMPCLPGKARLLLKQQKACVVKRTPFTIKLLYGSAGYKQPITLGVDAGSNHVGLSASTEKRELYREEFTPRNDVVDLLSTRRQNRRSRRNRKTRYRAPRFDNRVHSKHKGWLAPSVEVKIQEHITVIKRICRILPITLVRVETAEFDTQRLKAMLKGKPLPVGTDYQLGEMYDEYNVRQYVLKRDNYTCQCCGAHPTEKKPVRLHVHHLESRHVGGNAPNNLITLCVACHKALHEGKITLDKGKKRGKPLRDAAFMGIMRNTLLARLKDELNIPVKQTYGYITKLLREKNKIPKSHVNDARCIAKAPNAKPCDTMLYTRALRHHNRQIHKAKILNGGIRKKNQAPYLVKGFRLWDKVRYNGEECFITGRRSSGYFALKKYDGTVISNSASYKKLMLLEAATNYITERS

SEQ ID NO: 13104 - protein, 427 aa, Moorena sp.; identical to SEQ ID NO: 4087

SEQ ID NO: 13105 - protein, 456 aa, unidentified
MSTCVCVIGSNGERLMPTFRLGKVRRLLKDGKAKIIKHHPFTIQLLYDSKANTQPIEICEDVGYNYIGISVKSQSHEYVSAQYDTLQDEKACHGSCRKLRRTRRNRLRYRKPRFDNRKRGEGWLAPSLRHKKELNVNVVKMYCEVMPVTHAIVEVGSFDTMLVKAIEEGKTTPEGAGYQKGPRYKLATLREAVFYRDNYTCQVCGRKANEGAILHVHHMFYWKGRHGNSLSELVTVCEKCHTPANHQKGGKLYGFGEDIKFANLSGAAFMNTVRWQIVNELYAAFGKPFVTFTYGAMTKEKRIALHLEKSHNNDAYAMGSFHPVDRCAFEHYEKMKRNNRILEKFYDSRYINIRTGEVASGKELFNGRINRNHKKDSENLHKYRGKRIRKGYRALRRKKVALNPGDLVSLNGEILTVHGTHTKKNGSVNVKFKTPSKSGKKSVSLKNLKIINFFVV

SEQ ID NO: 13106 - protein, 421 aa, unidentified
MRGRPLMPCSPAKARHLLKAGKAVVRRRTPFTIQLRIATGETKQSVTLGVDAGAKHVGLSATTEKEEVFASEVELRQDITGLLAARLSLRRERRQRKTRYRAPRFLNRVRSKHNGWLPPSVENRIQAHLSRIDAICGLLPVTKIVIETASFDIQKIKHPDVEGTDYQQGDQLGFWNVREYVLFRDGHVCQHCHGHAKDKILNVHHLESRQTGGDAPNNLITLCETCHKACHAGKIKLKVKRGQSFREEAFIGIMRWTLLDRVRKAHPGLPVENTYGYLTKNTRITQGLPKAHCVDAYCIAGNLKAVRRGVYLHQRQVRKHNRQIHKCTVLSKTLKDGTKIGYRKLNQTPHLVKNFRLFDKVRCLGQTGFIFGRRSSGYFDVRRLDGVKISSCINYRKLTLLEKRGTCLTELRKEDGASSPV

SEQ ID NO: 13107 - protein, 420 aa, unidentified; identical to SEQ ID NO: 6507

SEQ ID NO: 13108 - protein, 442 aa, unidentified; identical to SEQ ID NO: 2903

SEQ ID NO: 13109 - protein, 518 aa, unidentified
LANLKLIDELLEKTEYIYVLGTDGKPQMPTNRKVRVRSLFKSGLAKIVDTVPFTIRLLYENDAVLQPITIAEDPGRTNIGAAVLTQLGDLVFSAVVETRNKSIKKLMSDRKAYRQASRRGERKARQRLAKRHGSMIKAGMIMRKLPQYAADKFVTCKIIKNTEARFCNRKRMPDWLTPTVNHLVQTHINLIKKVEKYLPITDVAIEVNRFAFMQMENLDASGVDFQNGPLKGFDDVKAAICEQQHGKCLMCKNDIEHFHHIVPRSKGGSDTIQNQAGLCKKCHAKVHTDAEFQAKFKDKKEGLIKKYGALSALNQAIPFICKELLEIYSVEHVHFCTGKDTSLIRSSLGYEKTKDNQMHEVDAYCIGLAAIGADKAKRPDFNNVFKIKQFRRQDRQLVHYQKERTYYLDGKKIATNRNPRFEQKGDALSDWYKEQIKIYGQYEAEKMRSRLTVKKSKRSYNTTKRLMPGCVFYYDGQRHVMTGQSSYGRYLRAYNCGTKDFPASKCQVIQFNAGLVFV

SEQ ID NO: 13110 - protein, 436 aa, unidentified
MYWLTALNISYRKEVPYMVYVLDINGQPLTPTARHGKVRRLLNSHLAKVVKRCPFTIQLLYKSTNEIQPVSLGVDAGSKHIGLAATTEKKVVYQEELIPRNDVVKLLSARRTLRRSRRNRKTRYRKVRFNNRVRSKHKGWLAPSVEVKIQEHITAIKNICKILPVSEIHIETAEFDLQRLKAIEEGKPLPVGTDYQLGEQYDFYNTRQYVLHRDGYTCQCCGTHDNDVKLHVHHIESRQTGGNAPNNLITLCEHCHKALHEGKIELPKNKKRGRSYRDAAFMGIMRNTLLERLKKEIDVPVMMTYGYITKYWREKAGLEKSHINDAICISKHPYAKPLDTYYLTKAVRHHNRQIHKANFSKGGTRKRNQAPYLVKGFRLFDKVLYQGKECFIFGRRVSGRMDVRLLDGTRVNASVGYKNLKLLESRKAYLIERRTC

SEQ ID NO: 13111 - protein, 425 aa, Ktedonobacter sp.; identical to SEQ ID NO: 6721

SEQ ID NO: 13112 - protein, 479 aa, Streptomyces sp.; identical to SEQ ID NO: 11682

SEQ ID NO: 13113 - protein, 511 aa, unidentified
MATVYVLSKTGKPLMPTTRCDHVRILLKQKKARVVNLKPFTIQLLYDCKEGTQPIVLGIDPGRTNIGLSAVRKDTGEPVFTAQMETRNKEIPKLMRDRKAFCQKHRCFGRRKVRQRRASAHNTNSSKCAKQEVAQNGGVSKQAQKVGVIKRQLPGCEKPVLCIGIKNKEARFNNRLRPKGWLTPTANHLFQTHINVVNKAKKFLPITDVVLEVNKFVFMALDNPHIQKWMYQRGPLKGYGSVEEAVSVQQGGHCIFCKKEITNYHHIVPQGKRGSNTISNIIGLCSMHHDLVHKDSTWEQKLKTKKQGMNKKYGALSVLNQIIPKLCDSLSAEFSEHFYVTDGRSTKAFRDAYNIKKDHYLDAFCIACSILSVEDVKVPCESNVFLILQFRRHDRRACHQERVDRKYYLDGKRVATNRHKAIEQMNDSLEEYVTNGGCVDKLTAPKHPPLYRRKSRIMPGTVFLVGNKTKVMIASQGTHNGVPNYYRFTNGLRATPKNCKPIYQNTGIVFV

SEQ ID NO: 13114 - protein, 442 aa, unidentified
  source 1..442: note = Candidatus Anoxychlamydiales bacterium
CDLSLNREETLSVSDLKTPSNNPEVDNSSIQEAIAAYVYVISKNGKALMPCSKAKARKLLKEEKALIVCHKPFTIKLVFKCENQVQKITLGIDPGYENIGLSAISEKGELFSAEAKLRNNISNLLAKKKSYRRNRRNKLWYRKPRFLNRKKTKNLPPSLEHKLDSHLRMVKKVLSFIPISKINIEVANFDIQKIKNPQIESFQYQRGDLYGYQNLKAYLVEREMAKCQLCSKKSTKGNSFRIHHIIPRNEGGTNKTNNLSLLHEKCHDKLHSKNLLHILKKNRQFKPETFMSSIRWKLVSELKKLCSDTVLSFGYITKIKRNSFKLEKDHHTDAFVIANGSSEKRAQPSLFLQKRKNNRSLQLNRKGLKLSIRRQRYKIQPKDEVQVKNKKYAVIGIFNKGSWLRVRDKAKTFNFQISRVEKHFYNNGWQFIHSLKERVFLP

SEQ ID NO: 13115 - protein, 475 aa, Blautia sp.; identical to SEQ ID NO: 4128

SEQ ID NO: 13116 - protein, 418 aa, Anoxybacillus sp.
SRSLAPCHEAVARKLLKQGKAAIYRRFPFTIILKKSVDESEIKATYRLKIDYGSRHTGLAILRGQEVVWLGQLDHRTDIKERIDKRRAFRRARRNRKTRYRKPRFLNRKRKEGWLPSSLESRVQNIQTWVNRLKKLCPIGYISYENAKFDTQLMRNPEINGVEYQQGTLQGYEVREYLLEKFGRKCCYCGKENVPLEVEHIIPKSRGGTDRVDNLCLACHDCNQRKGSKTAEEFGYSHIQEMVKKTLKDASVVNATRWKVYEVLKQTGLDVECGTGARTKMNRIRLDLPKTHYFDACCVGESTTNHLYFKTKEVLFIKAKGRGSRSRTNLDRYGFPRGYLARQKFFFGFQTGDMVKAVVPRGKYQGVWFGEVACRKTGSFDIKGKDGKRIAQGINYRYVQVIQRFDGYAYGKGVAELA

SEQ ID NO: 13117 - protein, 427 aa, unidentified
MCKVFVLDSEKRPLDPIHSARARQLLRNKKAAIYRRFPFVIILKDSHPDSSVTTLRLKLDPGAQTTGIALVSDATGEVVFAAELKHRGFAIREALTSRRQLRRSRRTRKTRYRQPRFLNRKRSEGWLAPSLQSRVHNIKTWVKKLCKFALIAAISQELVRFDMQLMRNPDLQGKEYQQGLLAGYETREYLLEKWGRQCAYCGVKNVPFQVEHIHPRAKGGTNSVTNLTLSCEKCNTKKGTKDIKEFLKKEPRLLSQILAQAKRPLADAAAVNTTRFALLFVLKATGLPVETGSGGLTKFNRNNQNLPKTHWLDAACVGASTPILNIKGVKPLSIVANGHGSRQSCRTDRFGFPNRHVPREKIHFNFQTGDIVKAVVTTGKKVGNYVGKVAIRSSGSFNISTKNGLVQGISHKFCQRIHAKDGYSYAQ

SEQ ID NO: 13118 - protein, 442 aa, unidentified; identical to SEQ ID NO: 12525

SEQ ID NO: 13119 - protein, 278 aa, unidentified
MVYVVANDGQPLMPTERHGKVCRMLKSGMAKVVKKCPFTIQLQYESERNVQPVSLGVDAGSKHIGISATTKTKVLYESDVELRDDIVKLLATRRQLRLSRRSRKTRYRPVRFDNRKRKEGWLAPSIRQKIGSHLTVVANVCKILPINQIIVETASFDIQKIKDPEIQGIEYQQGEQMDFWNIREYVLFRDGHTCQCCKGRSKDKILNVHHIESRKTGGNAPNNLITLCETCHKGYHNGTVILPKNIKHGMQFKDAAFMGIMRWTFYNTLKEQYEPDIP

SEQ ID NO: 13120 - protein, 512 aa, unidentified; identical to SEQ ID NO: 3720

SEQ ID NO: 13121 - protein, 430 aa, unidentified
MPKVYVLNRHGRPLMPCTPAKARHLLDAGKAKVRHRTSFTIQLLYGSTGYTQEVILGVDAGSKTIGLSAATETEELFSAEVKPRNDVVELMSARRQFRRARRNRTTRYRKPRFDNRVRSKHKGWLAPSVEVKIQEHMTAIRRACAILPVSKVVVETAEFDLQLLKAVAEGKPVPQGEDYQKGEMYGHYNVRQYVLWRDSYTCCICGVHGSVRKGVPLHVHHLESRRVGGDAPDNLVTLCTACHDKLHKGIIMAADIKKRKRRSTRDATFMGIMRMTLLRRLREQLPVPVVETRGYITKATRENLLVLPKSHANDALAIAHGPQGFRAEHLPNIRQADRLYTIRPVRHHNRQLHKATILKGGVRKTNQAEKYICGFRLYDKVLYNGIECFVWGRRTSGSFLLRQLNGEKVKDGVSYKHLKLLERSQSYLVA

SEQ ID NO: 13122 - protein, 408 aa, unidentified; identical to SEQ ID NO: 8155

SEQ ID NO: 13123 - protein, 324 aa, Lactobacillus sp.
MKGVQTMQNRVFVINKHGKALMPCKPRKARILLRDGKAKVLKKEPFTIQLLYGSTGYKQDVSIGIDSGQRHIGLAVTSQDKVLFQGEVELRQDVKKLIDTRRIYRRSRRNRKTRYRKARFLNRIAKKKDNWLPPSVASKVNHNINWIKRLLSVLPKADLHIEVGKFDMQKMKNPAINGEGYQQGDLYGYQTVKQFVLARDNYTCQVCKKKGGKLKIHHIIYRSLGGTNTVDNLITVCSNCHTTKNHQTGILAKWCKDKKKVNKSYKGATFMNILRRRLYTAFPQAKFQYGAWTTLQRADLRLTKSHYNDAVAISGIRKIKAKPI

SEQ ID NO: 13124 - protein, 431 aa, unidentified
MPNKVHVINKHGCPLMPCSPAKARHLLDAGKAKVKKRTPFTIQLVYGSSGYTQEVILGVDAGSKTIGISASTKKEEVFAADVTPRNDVVDLLSTRREFRRARRNRKTRYRKPRFDNRVRSKHKGWLAPSVEVKIQEHITAIRRVCGILPVSKVVVETAEFDLQLLKAIEEGKPVPQGEDYQQGEMYGHYNVRQYVLWRDNYTCQCCGAHATKKKEVRLHVHHLESRKVGGDAPDNQVTLCDRCHEKLHKGLITEKDLKKRKRRSTRDATFMGIMRKTLMQRLCSELPIPVIETRGYITKATREKLLVLPKSHTNDALAIAQGKHGFNVGYLPGIEQIDKIYTIRPVRHHNRQLHKAAILKGGIRKSNQVEKYVFGYRLFDKVQFNGQDCFIWGRRTSGYFAVKTIDGKVIHNSASFKKLNLVERASNYLIA

SEQ ID NO: 13125 - protein, 516 aa, Streptomyces sp.; identical to SEQ ID NO: 6398

SEQ ID NO: 13126 - protein, 450 aa, unidentified
LGRTTGLRAEQAEPAGIRKGDTLKVFVLNMRGKPLMPCSPAKARHMLKAGKAVVVRRTPFTIKLTIATGETKQDVTLGVDAGARHVGISATTEKEEVFASEVELRQDITGLLADRLAFRRARRNRKTRYRSPRFNNRVRSKHKGWLAPSVENRIQAHMSRIDAVCRLLPVTKIVIETASFDIQKIRNPEVEGTGYQQGDQLGFWNVREYVLFRDGHICQHCRGRSKDPILNVHHLESRKTGGDAPNNLITLCETCHKAYHAGKIKLKVKRGQSFRAEAFMGIMRWTLLDRVRKAHPGLPVENTYGYLTKHTRITHGLPKTHCVDAYCIAGNLKAVRRGVYLHQRQMRKHNRQIHKFTVLSKRLEDGTKIGYRKLNQSPYLVHGFRLFDKVRCLGQIGFIFGRRSSGYFDVRRLDGVKLSSGISYRKLTLLEKRSTYLTELRKEDGASSPV

SEQ ID NO: 13127 - protein, 431 aa, unidentified
MPNKVYVINKHGRPLMPCSPAKARHLLDAGKAKVKKRTPFTIQLVYGSSGYTQEVILGVDAGSKTIGMSASTTKEELLSAEVKPRNDVVDLLSTRREFRRARRNRKTRYRKPRFDNRVRSKHKGWLAPSVEVKIQEHITSIKRVCRILPVSKVVIETAEFDLQLLKAIEEGKPVPQGEDYQQGEMYGHYNVRQYVLWRDGYTCQCCGAHATKKKEVRLHVHHLESRKVGGDAPDNQVTLCESCHEKLHKGLIAEKDFKKRKRKSTRDATFMGIMRKTLMQRLCSELPIPVIETRGYITKATREKLLVLPKSHTNDALAIAQGKHGFNVGYLPGIEQIDKIYTIRPVRHHNRQLHKAAILKGGIRKSNQAEKYVFGYRLFDKVQFNGQDCFIWGRRTTGIFTIKTINGKMIKDGISFKKLKLVEKSTSYLIA

SEQ ID NO: 13128 - protein, 419 aa, unidentified; identical to SEQ ID NO: 5271

SEQ ID NO: 13129 - protein, 456 aa, unidentified
MSTCVCVLSNNGERLMPTFRLGKVRHLLKDGKAKIVKHHPFTIQLLYDSKTNTQPIEICEDVGYNYIGISVKSESYEYVSAQYDTLQDEKEHHDDCRRYRRTRRNRLRYRKRRFDNRKRNKGWLAPSLEHTKQLNISLIERYVSVIPITHATVEVGSFDTMLLQSIQKGEAKPEGADYQEGPRYNLATLREAVFYRDNYTCQVCGRKIADGAILHMHHMFYWKGRHGYKLDELVTACEKCHTPANHQKGGKLFGFGEDKEFADLSGAAFMNAVRWQIVNALHTTYSKEFVTITYGAMTKEKRIALQLEKSHNNDAYAMGDFHPVHRCGFRHYQKRRRNNRVLEKFYDATYIDTRTGNKAKGKELFNGRISRNHKKDSENLHKYRSKKVSKGRCSIRRRRYAIQPYDTVRLEGKTYITSGCHNKGTRLLIPVNGKSKSVAISKVQVVCHAGPWIQII

SEQ ID NO: 13130 - protein, 424 aa, Anoxybacillus sp.
KRPLAPCHEAVARKLLKQGKAAIYRRFPFTIILKKSVDESEIVDESEIKATYRLKIDYGSRHTGLAILRGQEVVWLGQLDHRTDIKERIDKRRAFRRARRNRKTRYRKPRFLNRKRKEGWLPSSLESRVQNIQTWVNRLKKLCPIGYISYENAKFDTQLMRNPEINGVEYQQGTLQGYEVREYLLEKFGRKCCYCGKENVPLEVEHIIPKSRGGTDRVDNLCLACHDCNQRKGSKTAEEFGYPHIQKQVKESLKDTSAINSTRWKVYEVLKQTGLDVECGTGARTKMNRIRLDLPKTHYFDACCVGESTTNHLYFKTKEVLFIKAKGRGSRSRTNLDRYGFPRGYLARQKFFFGFQTGDMVKAVVPRGKYQGVWFGEVACRKTGSFDIKGKDGKRIAQGINYRYVQVIQRFDGYAYGKGVAELA

SEQ ID NO: 13131 - protein, 417 aa, unidentified
VYVLNKHGEPLMPCSPRKARLLLKQKKACVIKRTPFTVKLLYGSTGYKQPVTLGVDAGSKHIGISATTEKHELYREEATPRNDIVDLLSARRAFRRSRRNRKTRYRAPRFDNRVHSKHKGWLAPSVEVKIQEHITLVEHVCRILPVTLVRVETAEFDTQRLKAMLEGKPLPVGTDYQLGEMYDEYNVRQYVLKRDNYTCQCCGAHSTKTKGVKLHVHHIETRRTGGNAPNNLITLCTACHKALHAGKVTLDGKKRGKPLKDAAFMGIMRKTLMERLRKELKIPVQGTYGYITKCLREKNGIPKSHTNDARCISKNPLAIPCDTCYYTKAVRHHNRQLHKATILKGGIRKANQAPYIVKGYRLWDKVSCNGTECFITGRRTSGYFALKKLDGTVVSNSISYKKLRLLEAATNYITERK

SEQ ID NO: 13132 - protein, 442 aa, Ktedonobacter sp.
MNDASLGGPCIGENRKETMSRVLIVDQQRRPLMPCTPARARLLLKQKKAAVLRRCPFTLILHESRPEAVVQPLRLKIDPGSKVSGLALVNDTSGEVVWAAEVTHRGGQVHKDLQKRAGVRRGRRQRHTWYRPARYLNRRRPKGWLPPSLESRVQNVETWTQRLIFWAPVGSLSYEAVRFDTQALQNPEIEGTQYQHGTLAGLEVKEYLLLKWGQRCAYCEKMGLPLQLEHIIPKIRGGSNRVTNLTLACEQCNGKKGNQTAEEFGFPHLQAQAKAPLKDAAAVNSTRRVLHQRLMRTGLPIEASSGGRTKWNRGERDIAKTHWLDAANVGPSTPARLLFQHVRPWLIEANRRQDRQLCLVNALGFPRSKPKKKSPKHDFRTGDIVRAVVPAHLENPGIYVGRMAAKASGAFTITTKQRKVSDIGYRYCTRLQHTDGYSYLIK

SEQ ID NO: 13133 - protein, 435 aa, unidentified
MVFVLDKHKKPLMPCSEKRARQMLERKRAVIHRMEPFTIRLKDRTAEESKIQPLRLKLDPGSRVTGMAALDESIPEHGKVIFIGEIHHKKGIKQRLDSRRALRSGRRGRKTRYRKPRFLNRVKPKGWLPPSLEARVNQTMNAVAKLRKLLPITAISTEHVKFDTQLMQNPDMSGIEYQQGELMGYEVREYLLEKWKRKCAYCGKENVPLEVEHIIPRARGGSDRISNLAIACTKCNQKKGTKTAEEFGYPEVQKQAKKPLRDAAMMNATRWKLFERLKETGLPVECGTGARTKKQRIEHGLPKTHYYDACCVGASTPDKLTIEPRYVSIWMAMGRGLRQMCRTDKYGFPRAHRSNKKLRFGFQTGDIVVANVPKGKYKGKWRGRVTCRASGSFDIRNGERKMICNTNHKNFRVIQRGDGWDYAKVIAQRCCQDLS

SEQ ID NO: 13134 - protein, 448 aa, unidentified
MSTGLRAVQAEPAGIRKGDALKVFVLNMRGQPLMPCSPAKARHLLKAGKAAVRRRTPFTIQLRIATGETKQSVTLGVDAGAKHVGLSAATEKEEVFASEVELRQDITGLLAARLSLRRDRRHRKTRYRAPRFLNRVRSKHKGWLAPSVENRIQAHMSRIDAVCRLLPVTKIVIETASFDIQKIKDPSVEGTDYQQGDQLGFWNVREYVLFRDGHVCQHCHGRSKDKILNVHHLESRQTGGDAPNNLITLCETCHKAYHAGKIKLKVKRGQSFRAEAFMGIMRWTLLDRVRKAHPGLPVENTYGYLTKHTRITHGLPKTHCVDAYCIAGNLKAVRRGVYLHQRQMRKHNRQIHKFTVLSKRLEDGTKIGYRKLNQSPYLVHGFRLFDKVRCLGQIGFIFGRRSSGYFDVRRLDGVKLSPSISWRKLTLLEKRSTYLTELRKQDGASSPV

SEQ ID NO: 13135 - protein, 512 aa, unidentified
MSTVYVLNKDGKPLMPTTRGGHVRHLLKEQKARVVRAKPFTIQLLYETNDVVQPLYLGIDPGRTNIGVAVVKANGTAVFTAHLETRNKEVPKLMQDRKKARRARRTNGRRCRRQRRAKANGTISKKCVKQDTAQSKNPSKRAKEIGIIKRRLPGYKKDVLCIGIKNKEAKYTNRTRPEGWLTPTANQLLQTHINLVRKMQKFLPISDVVLEVNKFAFMRLDNPDIQKWQYQQGPLYQKGSLENAVSEMQEHHCLFCDKPIDHYHHVVPQSENGSNTIANIVGLCAEHHNLVHKDAAWQKKLAEEKVGLNKKYGALSVLNQIIPALTNKLSVLFPKHFFVTAGKSTHDYRAAHGVSKDHWLDAYCIACSVLPSNVCDSNINNHMPYELKQFRRHDRRVLNNENMNRVYTLDNKAVAINRHKATEQEAASLEEFRKEHPNDVCKLKVKEHHPTYRNMNRNYPGSIFLVGKHVHIMQGIAGSKDGKATTYKDSNANSITASKCKFVAKNSGILFV

SEQ ID NO: 13136 - protein, 279 aa, unidentified
VVIETAEFDLQLLKAIADGKPVPQGEDYQQGEMYGHYNVRQYVLWRDGYTCQCCGAHATKKKEVRLHVHHLESRKVDGDAPDNQVTLCESCHEKLHKGLIAEKDFKKRKRKSTRDATFMGIMRKTLMQRLCSELPIPVIETRGYITKATREKLLVLPKSHTNDALAIAQGKQGFNVGYLPEIAQIDKIYTIRPVRHHNRQLYKATILKGGIRKSNQTKKYVFGYRLFDKVQFNEQDCFIWGRRTTGIFTIKTINGKMIKDGISFKKLKPVEKSTGYLIA

SEQ ID NO: 13137 - protein, 465 aa, unidentified; identical to SEQ ID NO: 10727

SEQ ID NO: 13138 - protein, 414 aa, unidentified
MPCSPAKARLLLKEKKAIVVRRTPFTIQLTIATGESKQPVSLGVDAGYKHVGLSASIEKAELYASEVELRKDITDLLSARRALRQSRRNRKTRYRAPRFDNRIRTKRKGWLAPSVENRINAHLSRIEAVLRLLPITKITVETASFDMQRLKNPDISGKEYQEGEQLGFWNVREYVLFRDGHVCRHCHGRSKDPVLNVHHLESRRTGSDSPDNLITLCETCHKALHRGEITLKAKRGQSFRAQAFMGIMRREVLNRLKASYPELKVHETYGYLTKHARIANGIVKSHGADAFCIAGNLGAERLGEFFFQKQTRRNNRQIHKLSILKGGIRKRNQAPFEAKGFRLFDKVACQGEEGFIFGRRSSGSFDVRKLDGTRISAGISYKKLRLLEKRRTYLTEIRKEEALPPLPEGRGLRA

SEQ ID NO: 13139 - protein, 442 aa, unidentified; identical to SEQ ID NO: 3161

SEQ ID NO: 13140 - protein, 415 aa, unidentified; identical to SEQ ID NO: 6883

SEQ ID NO: 13141 - protein, 294 aa, Parasutterella sp.
AHLSRIEAVLRLLPVTKITVETASFDLQLLKNPDISGKEYQEGEQLGFWNIREYVLCRDGHVCQHCYGRSKDPVLNVHHLESRRTGGDSPGNLITLCETCHKALHRGEITLKVKRGQSFRAEAFMRIMRWEVLNRLKASHPELEVNNTYGYRTKHARIANDIANSHCADAFCIAGNLGAERLSEFFFQKQTRRNNRPIHKLSILKGGLRKRNQAPYEIKGFRLFDKVACQGEEGFIFGRRSSGYFDVRKLNGTHISAGISYKKLRLLEKRQTYLIEIRKEEALPPLPEGRGLRA

SEQ ID NO: 13142 - protein, 420 aa, unidentified
MQYVYVLNKHGEPLMPCSPGKARLLLKQQKACVVKRTPFTIKLLFGSAGYKQPITLGVDAGSKHVGLSASTEKRELYSEEFTPRSDVVELLSTRRQNRRSRRNRKTRYRVPRFDNRVHNKHKGWLAPSVEVKIQEHITVIKHICKILPISLVRVETAEFDTQRLKAMLAGKPLPVGTDYQLGEMYDEYNVRQYVLKRDHYTCQCCGTHNTAKKVVKLHVHHLESRKTGGNAPSNLVTLCTTCHKNLHKGRVTLDGKERGKPLRDAAFMGIMRKTLMVRLKEELPIPVQGTYGYITKMRREQNNIKKSHTNDARCISKHPLAEPCSVCYRTKAIRHHNRQTHKANFSKKGIRKRSQMPYLVEGFRLWDKVLYKGQECFVSGRRSSGSFALKKLDGTSISKGVTFKKLRLLEPATNYLIERM

SEQ ID NO: 13143 - protein, 414 aa, unidentified; identical to SEQ ID NO: 2588

SEQ ID NO: 13144 - protein, 420 aa, unidentified
MQYAYVLSKHGEPLMPCSPGKARLLLKQQKACVVKRTPFTIKLLYGSAGYKQPITLGVDAGSRHVGLSASTEKRELYREEFSPRNDVVKLLSTRKQNRCSRRYRKTRYRPPRFDNRVHSKHKGWLAPSVEVKIQEHITVIKHICKILPISLVRVETAEFDTQRLKAMLAGKPLPVGTDYQLGEMYDEYNVRQYVLKRDHYTCQCCGAHNTAKKVVKLHVHHLESRKTGGNAPGNLITLCATCHENLHKGKVTLDGKERGKPLRDAAFMGVMRKTLMARLKEELPIPVQGTYGYITKMRREKNDIKKSHTNDARCISKHPLAEPCSVCYRTKAIRHHNRQTHKVNFSKGGYRKRSQTPYLVEGYRLWDKVLYKGQECFVSGRRSSGSFALKKLDGTTISEGVTFKKLRLLEPATNYLIERM

SEQ ID NO: 13145 - protein, 476 aa, unidentified; identical to SEQ ID NO: 3164

SEQ ID NO: 13146 - protein, 413 aa, unidentified; identical to SEQ ID NO: 2636

SEQ ID NO: 13147 - protein, 419 aa, unidentified; identical to SEQ ID NO: 6355

SEQ ID NO: 13148 - protein, 461 aa, unidentified
MRKSLYIIVELKSEQLYGNSITVQQSTHHLPFGRVFIRRNLFIVYVISQDSKPLMPCSNPIARLLLKQGKAKIKSREPFTLKLIYETTDYTQDLTLGVDTGSGTIGTAVSKDNGDIVYMSEVVVRNDITDKMTQRAKYRRNRRNRKTRYRKARWLNRSNSIKKDRFSPTMQSKLHSHVREIEYIQSILPITEMVFETGQFDMHLMKNPILANPKVRSWGYQKGANYGFENTKAMVLNRDNYTCQYCKGKHKDTKLEVHHIVFRSQGGSDEESNLITLCHTCHKDLHSGKINFKLSGKVKGNLKYATQMNSIRKQLFRLYPNAIETFGYVTKMNRLHLGIDKEHYYDACTIATQGNAFNVKSNLYKKKCVSDGDFQKTKGIRSEQSIVTDKICGFRKFDKVRYFGNDYFIKGRMSTGYAILMDIDGNKIDFSTMPRGYKTPKLSNCKRITARSTLMTQVKVV

SEQ ID NO: 13149 - protein, 413 aa, unidentified
LKVFVLNMRGKPLMPCSPAKARHMLKAGKAFVVRRTPFTIKLTIATGETKQDVTLGVDAGARHVGISATTEKEEVFASEVALRQDITGLLADRLAFRRARRNRKTRYRAPRFNNRVRSKHKGWLAPSVENRIQAHMSRIEAVCRLLPVTKIVIETASFDIQKIRNPEVEGTGYQQGDQLGFWNVREYVLFRDGHICQHCRGRSKDPILNVHHLESRKTGGDAPNNLITLCETCHKAYHAGKIKLKVKRGHSFRAEAFMGIMRWTLLNRMRKAHPSLPVENTYGYLTKHKRIALGLPKTHCADAFCIAGNLKALRRGDFLFQQQTRKHNRQIHKCSILKGGVRKLNQAPFLVKGFRLFDKVRIGGQIGFVFGRRVRGTFNIRRLDKTVIGTDINCKKLSLLETRKTFLTELRKE

SEQ ID NO: 13150 - protein, 432 aa, unidentified; identical to SEQ ID NO: 6070

SEQ ID NO: 13151 - protein, 447 aa, unidentified
LKGLSRTCGSLRFKEKTLKVFVINKRGKPLMPCKPAKARHLLRDGKARVVRRTPFTIQLTIATGENVQSIHLGVDAGSKHIGLSATTEKEELFSSEVELRKDITDLLSSRREMRRARRNRKTRYRAPRFDNRVHAKNKGWLAPTLENKISAHLSRIKAIRAILPVSRITIEVASFDIQKIKNPEIEGEQYQQGEQLGFWNVREYVLFRDGHKCCHCHGKSKDPILNVHHIESRKTGGDAPNNLITLCETCHKAYHAGKIQLTSKRGKKFTDATHMGILRWELLKRAKEANLGIPVKATFGYITKARRIQFGIAKTHCADAFCIAGNLNAKRLGEYLYQKQTRKHNRQIHKMAILKGGYRKRNQAPFEVFNFRLFDKVRFGGNVGFVFGRRTSGSFAVRTLFGEKLSEGVSYKKLSLLERRTTFLTQLVKEGAIPPVSKDTGFLARFL

SEQ ID NO: 13152 - protein, 431 aa, Moorena sp.; identical to SEQ ID NO: 2831

SEQ ID NO: 13153 - protein, 427 aa, unidentified
MPCRPARARRLLRAGRARVVKRFPFVIRLVDRTVEQSEVQPVLIKLDPGSRETGAAVVRDDEKKRHHALAFFVIKHRGGAIRDALKARSAFRRRRRSQNFRCRSPRFLNRVKPKGWLPPSLRHRVETTLSFVRRMCRYLPVSGIATELVKFDSQKLQNPEVSGVKYQQGTLFEYEVREYLLEKFGRKCVYCGAEGVPLNIDHVVPRAKGGSNRVSNLVLACVSCNQKKGARSLEDFLKGKPEVLARVRRELKTPLRDAAAVNATRWVLFNELKATGLPVETGSGALTKLNRHAFGVEKEHWLDALCVGRLNGVVTRKGLNALEIRCMGRGSRQRTRLTKYGFPRGYLMRQKCVHGFATGDMVEANVPKGKKAGLWRGRVAVRVSGSFNIQTPKGVIQGVGWKHCRLISHNDGYGYAWLGHAPHSSPA

SEQ ID NO: 13154 - protein, 529 aa, unidentified
LEVAAADKPRVGTKRAATGELTLTLCCTTWSRGAAPQGARHQARKGNAPDVFRRHNKELGLAVCVLDRSGKALMPCSEKRARLLLARGRARVHRVVPFIIRLVDRRAHASRFQPLRIKVDPGSRTTGLALVRDTQLVDATSGEIQRGAAVLNLFELVHRGRQISEALSARRAMRRRRRGNLRYRAPRFLNRTRPAGWLAPSLEHWVATTMAWVNRLMDWTPVAALSSELVRFDMQALENPEIASVEYQQGTLAGYEVREYLLAKWGRRCAYCDQEHVPLQIEHILARASGGTNRISNLTLACACCNAKKAARPIEAFLARDPKRLAVILAQAKRPLKDAAAVNATRSALANALRATGLPVELASGGCTQFNRKQLGLPKTHALDAVCVGKVASVSVWYKPTLAVKCTGRGSYQRTRLDRYGFPRGYLTRSRRVHGFQTGDLVRAEVPTGKKAGRHTGRVAVRATGSFNIQVAGNVVQGIAHRHCRLIQRSDGYGHSRIALLKGDASDGTASLSALSLPAVNDGVSRAAG

SEQ ID NO: 13155 - protein, 422 aa, unidentified
MSLVYVLNEKGLPLMPTHRCGKVRHLLKDGKAKIVKRNPFTIQLLYKCKDQTQPITLGVDAGSKHIGLSASTTKEELYSSDIKIRNDIVNLLSTRREARRTRRNRLRYRKPRFNNRVSTKKEGWLAPSVEHKIESHLKVIENVYKILPISKLIVEVASFDTQLLKAQELDLPLPEGKDYQNGEMLGYNTREYVLFRDNHKCQHCHGKSKDKVLNVHHLESRKTGGNAPNNLITLCETCHNLYHQGKVELKIKRGAKYNDATFMGIMRWSLYNRLNEIYSNVQLTYGYITKHNRIRLGLSKEHYNDAYCIAGNFEAKPLDTTLHQKKVRCHNRQIHKSNFLKGGKKKLNQAPYIVKGFRLFDKVLYENQELFIFGRRQRGYFKIRNLSNTISFGDVNCKKLELLSTRKNYLQEERRRQFRSTL

SEQ ID NO: 13156 - protein, 477 aa, Blautia sp.; identical to SEQ ID NO: 2707

SEQ ID NO: 13157 - protein, 460 aa, unidentified
MVAVVDLFGKPLMPTNEYRARRLLKQKKAKIFGYRPFTIQLTERKSTEIQPIELCMDTGYIHIGISAKSERHEYLGMQIDTLTDEKLKRDDKRQYRRQRRNRKRYRAPRFDNRRRKEGWIAPSLEHKKEIHIDAIQRICKVMPITDITLEMGNFDTHVLKAVEEGKPLPQGSDYQHGERYGIATLREAVFLRDGYKCQCCEKSVKDGAILHVHHIKYRSQGGTNRMSNLITVCDKCHTPKNHKPGGKLWNWKPKLAEFKGVSYMTSIRWTLYNEVTALLPNSSVHITYGAKTKESRRKLDIKKSHVNDAYVMGLFCPKHRTKPVYFKKKRRNNRVLEKFYDAKYIDSRDGKKQSGQELFNGRISRNHRKDSENLHLYRKQKVTKGKRSIRNKHYPIQPHDILLYQKKKYENAGCHNNGSRVILLPEKKSVALKQLTIYQYAGGYYRVPYESNKKEERTGS

SEQ ID NO: 13158 - protein, 498 aa, unidentified
MAVVYVLSVGGEPLMPTTRCGHVRILLKEKKARVVERNPFTIQLAYETEGVTQHLYLGIDPGRTNIGAAVVREDGECMFTAQLTTRNKDVPKLMKARKQYRMVHRRLKRRCKRQRRAKAAGTISPQKEIQRLLPGCEEPIICKGIQNKEARFNNRTRPAGWLTPTANHLLQTHINLVKKLQKFLPITDVVLEANRFAFMAMENPRIQRWQYQRGPLFCKGSVEEAVYAAQDGHCLFCEKGIDHYHHVVPRRKNGSETLENRVGLCEEHHRLVHTEDAWTKRLAAKKAGMNKKYHALSVLNQIIPSLTEQLAELFPQHAFVTTGQDTYYFREDHDIPKDHYLDAYCIACSVLSNAQKVSPPKREPYDIRQFRRHDRQACHKANITRKYYDADGKLVAANRHKAMEQKSDSLVEYRENHSEVEVSQLSVKDHFPQYKEMSRPMPGSLLVNNGGKLFALMRSDGKHNGKADYFVDTQGIKHLAKRCILLQNNQGIIFAGIG

SEQ ID NO: 13159 - protein, 424 aa, unidentified
MRVFVFNMRGVPLMPCTQRKARILLKEGKAVIYKYNPFTIQLTHATGENTQDCHVGIDTGAKHVGVAITSEGKVLFKGEIELRQDVKSNLDTRRIYRRSRRNRKTRYRQPRFLNRRKADKWLPPSLQNRLDHTFHWIDTLRGLVPSPTLHIEVGKFDTAKMIDPEIHGVDYQHGQTYGFFDERYYVFARDNYTCQCCGKSKGKILQTHHIIYRSNGGTDRADNLITVCTDCHTSKNHQKGGILYKWQEQHKKVRQYKEPPFMNTLRRRIFAKYPDAAITYGSKTTPKRKEKGLDKTHYNDAIIISGVQTISENPDEWLFIRQFRKKKRSLHEGIPRKGRKEPNRTQKRNSKNTPYYCGYHLNDKVRVLGKTGYISGFTGGAAYVKDSDNQYITLPNKSYKQVGISNLQHVCHNNNWQYITKTTA

SEQ ID NO: 13160 - protein, 576 aa, unidentified
MDFVLIVDKNNKPCIPIKNGKAGYLLREHKAEIINHEPLVIKRTDDYNSDLENRDIFELKVDSGYLNIGFSVSDNEHEYIAGQVEMLNGMSNRLLERKSMRSFRRNRLRYRKNKNIDYKTVHNPTYKNGNEDGWFAPSIVHKMETHIRIIEQLKQWVPIDKVIVEVANFDIAAMDAYLKDGTILNGKDYQNGEMKGYENVVSYVRARDNYSCYFCNKKKKKDGTLKEKPKRIEVHHKIPRSWGGTNNPGNLICVCQGCHQKIHSNNNNNKYFKELLEQALQENTFKDSTYMNIVRWELLNRLTEKYPELDIEAEYGYNTKINRKEAGLRKFHYNDAVCIKEFKNITLSKKVFIVEQKRCNDRKMESFADAKYIDSRDGKKKKGNDLKVIRHSTKSKRSTNKEHIDNERIFRKEKVSKGKIQFECHLYCVKPGDLIYIKEGKHKGKIAEVSTIQIVGEKIPNPIIDINEINNKKIDFNRELKKRKTTSNMTDYQKRFAKYQIRFTYKESDADGPSITLTQKEYEKLKENKSDRVKIIRTRRGLVWREYDRLTYEAENMDQEEKKLEVKNKKQELKAA

SEQ ID NO: 13161 - protein, 416 aa, unidentified; identical to SEQ ID NO: 8117

SEQ ID NO: 13162 - protein, 447 aa, unidentified
VPAYRIKHITKKEAPYMVYVLDIDGQPLMPTSRHRKVRKLLNSHLAKVVKRCPFTIQLLYQSTKETQPVSLGVDAGSRHIGLAATTEQKVVYQEELVPRNDVVKLLSARRALRSSRRSRKTRYRKPRFNNRVHSKHKGWLAPSVEVKIQEHITAIKRICQILPISDIHVETAEFDLQRLKAMEEGRPLPVGTDYQLGEQYDFYNTRQYVLHRDEYTCQCCGTHDNNVKLHVHHIESRQTGGDAPNNLITLCEHCHKLLHAGKTILPKGKKRGKSYRDATFMGIMRKTLLERLKKEIDVPVEGTYGYITKYWRERAGLEKSHINDAICISKHPYARPLETYYLTKAVRHHNRQIHKAKFSKGGIRKRNQAPYLVKGFRLFDKVLYQGESYFIFGRRITGYFDIRTLDGTKVNKGSTSYKKLRIQDTAEAYLTEVRAIPHMNEFTCVLA

SEQ ID NO: 13163 - protein, 442 aa, unidentified; identical to SEQ ID NO: 4418

SEQ ID NO: 13164 - protein, 449 aa, Desulfobacter sp.; identical to SEQ ID NO: 4619

SEQ ID NO: 13165 - protein, 464 aa, unidentified
NDVVQPLYLGIDPGRTNIGVAVVKADGTAVFAAHLETRNKKIPKLMQDRKKARRARRTNGRRCRRQRRAKANGTISKKCVKQDTAQSKNPSKRAKEIGVIKRHLPGCKKDVLCVGIKNKEAKYTNRARLEGWLTPTANQLLQTHINLVKKIQKFLPISDVVLEVNKFAFMRLDNPNIQKWQYQRGPLYQKGSLENAVSEMQEHHCLFCEKPIEHYHHVVPKSENGSNTIANIVGLCAEHHNLVHKDVAWQEKLVEEKTGLNKKYGALSVLNQIIPALTKELSFLFPKHSFMTNGKSTHDYRAAHGISKDHWLDAYCIACSVLPIDVCDSTINNCVPYELKQFRRHDRRALNNENMNRVYTLNDKVVATNRHKATEQEAASLEEFRKEHPNDVCKLKVKEHHPTYRNMNRNYPGSVFLVGKQIHVMQGIASSKDGKATKYNDTRATTIAAGKCKFVAKNSGILFV

SEQ ID NO: 13166 - protein, 413 aa, unidentified; identical to SEQ ID NO: 2605

SEQ ID NO: 13167 - protein, 424 aa, Calothrix sp.
MSNYVFVIDTNKKPCNPVHPAVARKLLKEKQAAVFRRFPFTLILKIKLTEPTREIQLKIDPGSKTTGIALTQGSYVIWGAELTHRGGIIKDALQSRRSLRRSRRNRHTRYRQPKFLNRTRRDDWLAPSLQHRVETTITWVNKLIKFVPITGISQELVRFDLQQIENPEISGTEYQQGELVGYEVREYLLNKWDRKCSYCGIQNVPLQIEHIRCIAKGGTNRISNLCLACESCNLKKGTQDIEDFLVKKPLVLKQILSQAKRPLKDAAAVNSTRWALFNRLKKTGLLVTTGSGGLTKFNRTRLNLEKTHWLDAACVGKVDTLKVLTKKPLIIKSTGHGTRQQCRTDKFGFPSRYCSINKFHFGFQTGDIVKAIVKTGKKIGNYIGRIATRSTGSFNISTSNGLVQGISHKYCKAIHKKDGYNYSN

SEQ ID NO: 13168 - protein, 524 aa, unidentified
MEILRIDWKDICPTGQSGLPQKELFMRPVYVLDMNGKPLMPTCRFGKVRRMLKSGEAKVVDTLPFTIQLDRPTKTHVVQSVTLGCDPGRTNIGLAAVRSDGTDLYRSHCETRNKEVVDLMDTRRAARRASRRGERLARKRLAAKHETATTFPDGRKLPGYEKPIMLKDIINTEARFNNRVRPAGWLTPTATQLLRTHLNLIKRISRILPVSDIALEINKFTFMQLDEPDKNKWNIDFQHGPLYGTGGLKAAVRQLQNDTCLLCQENVIEHFHHLIPRSKRGDNTINNIAGLCQKCHEAVHKSADTAEKLSTLKKGQTKRYGGTSVLNQIIPKLVEELGKTYHEHLHLTYGWQTKEFRTKHKLEKTHDTDAYCIAAGTMQTVKPNIRTDVYEIKQFRRHNRANIHHQTERTYKLNGQTVARNRRKRTDQKTDSLAEWFENTVKQYGQQKAEHLRAGLKVRKSTRYYNSKDRVMPGAVFQYEGNRYVVTGQLSGGQYYRAYGKGNQNFPVKKIRIISLNRGLVYVA

SEQ ID NO: 13169 - protein, 414 aa, unidentified
MPCSPAKARLLLKEKKAIVVRRTPFTIQLTIATGETKQPVSLGVDAGYKHVGLSASTEKAELYASEVELRQDITDLLSARRALRQSRRNRKTRYRAPRFDNRIRTKRKGWLAPSVENRINAHLSRIEAVLRLLPVTKITVETASFDLQLLKNPDISGKEYQEGEQLGFWNIREYVLCRDGHVCQHCYGRSKDPVLNVHHLESRRTGGDSPGNLITLCETCHKALHRGEITLKAKRGQSFRAEAFMGIMRWEVLNRLKASHPELEVNNTYGYRTKHARIANDIAKSHCADAFCIAGNLGAERLGEFFFQKQTRRNNRQIHKLSILKGGIRKRNQAPFEVNGFRLFDKVACKGEEGFIFGRRSSGFFDVRKLDGTCISAGISYKKLHLLEKRRTYLTEIRKEEALPPLPEGRGLRA

SEQ ID NO: 13170 - protein, 358 aa, unidentified
TEKAELYASEVELRQDITDLLSARRALRQSRRNRKTRYRAPRFDNRISTKRKGWLAPSVENRINAHLSRIEAVLRLLPVTKITVETASFDLQLLKNPDISGKEYQEGEQLGFGNIREYVLCRDGHVFQHCYGGSKDPVLNVHHLESRRTGGDSPDNLLTLCETCHKALHRGEITLKTKRGQSFRAETFMGIMRWEVLNRLKASHSELKVHNTYGYLTKHARIENGIAKSHGADAFCIAGNLGAERLGEFFFQKQTRRNNRQIHKLSILKGALRKRNQAPFEVKGFRLFDKVACQGEEGFIFGRRSSGFFDVRKLDGTRISAGISYKKLHLLEKRQTYLMEIRKEEAFPPLPEGRGLRA

SEQ ID NO: 13171 - protein, 438 aa, Clostridium sp.; identical to SEQ ID NO: 4933

SEQ ID NO: 13172 - protein, 483 aa, unidentified
  source 1..483: note = Clostridia sp.
MQKLRERRLTNTPQGIPQALCNCGLSLNSPEGRDSAAGLKTSLNSPDAALTARGHAGQNLRVSVVYVLNKRGKPLMPCSPGKTKVLLKENKAKVVKRTPFTIQLTMATGEVRQSITLGVDSGYSRIGLSAVTDKQEIYSAQVNLRTNMVKLNSERRQYRRFRRHRKTWYRKPRFLNRRKPEGWLAPSIQNKFDTQIKLIGKVGEILPISQINIEVAAFDIQKIRNPDISGIEYQNGEQKGFWNVREYVLHRDNHTCQRCKGESKDLVLEVHHIVSRQIGGNRPDNLITLCSTCHEKVSKAELKLNISPSKEFKAETFMSTVRWMLVNELKGLGNVVFPTYGYITKQKRRELKFPKSHINDAFLIAGGTIQNRVGVEYLIQQVRKCNRKLFKGARSHIKNTAERFIYGFQRFDKVLWKGIECFIIGRRKTGYFDLRKLDGTKIHASAKAKELSLLERAKTLLIERKATFLPSLTEGVSAPRFLR

SEQ ID NO: 13173 - protein, 447 aa, unidentified
VPAYRIKHITKKEVPYMVYVLDIDGQPLMPTSRHRKVRKLLNNHLAKVAKRCPFTIQLLYQSTKETQPVSLGVDAGSRHIGLTATTEQKVVYQEELVPRNDVVKLLSARRALRSSRRSRKTRYRKPRFNNRVHSKHKGWLAPSVEVKIQEHITAIKRICQILPISDIHVETAEFDLQRLKAMEEGRPLPVGTDYQLGEQYDFYNTRQYVLHRDEYTCQCCGTHDNNVKLHVHHIESRQTGGDAPNNLITLCEHCHKLLHAGKTIIPKGKKRGKSYRDATFMGIMRKTLLERLKKEIDVPVEGTYGYITKYWRERAGLEKSHIHDAVCISKYPYAKTLDIYYLTKTVRHHNRQIHKSNFSKGGIRKRNQAPYLVKGFRLFDKVLYQGKSYFIFGRRATGFFDIRTLNGAKVNKGSISYKKLRIQDTANAYLKEIKAIPHMNKFTCVLA

SEQ ID NO: 13174 - protein, 461 aa, Eubacterium sp.; identical to SEQ ID NO: 13148

SEQ ID NO: 13175 - protein, 479 aa, Acidithiobacillus sp.; identical to SEQ ID NO: 8867

SEQ ID NO: 13176 - protein, 413 aa, unidentified
MTSYAFVLDANGKQLAPAKEQKAWFLIRKKRAALVSKYPMVIQLKKEIPENEICKDEIRCGIDDGGLHVGIALVQKCKTKNKVVFKGTIEQRNDVKHLMEVRRNYRRYHRYHKRYRQARFDNRKSSKREGRIAPSILQKRQATIRVIHWLNKWINITNYWLEDVSVDIRALTDGYQSYRWQYQKSNRLDENIRKAAILRDDGKCMECGKSNCRLEVHHIKPRRRNGSNTLDNLITLCESCHQKTEGQEELYMDRYFSLLKSSDNKNLNYAQHVMIGKMWLRKQLSGLGVLYLTSGGDTANKRIDWNIEKSHANDAVCITDLQPDTCDMKEWTMKPMRRQSKAKTDHVLGIHHRDLVEYTFKNGETHRGYVTALYPEQKAINFQSPTKHCKKVNARKCKLLWKYSKIYWFENAS

SEQ ID NO: 13177 - protein, 442 aa, unidentified; identical to SEQ ID NO: 2903

SEQ ID NO: 13178 - protein, 494 aa, unidentified
MTMVYVQNKDGKPLMPTTRYCYVRLLLKENKARVVSTTPFTIQLNYDTPDITQDLILGIDPGRTNIGVAVVKEDGQCVFSAHLETRNKEVPLLMKKRAAFRRQHRTQDRRRKRQRRAIAAGTTVESNTIERLLPGYEKPIVCHHIRNKEARFNNRCRPAGWLTPTANHLLQTHINLIAKVAKFLPITKVVVELNRFAFMAMDNPNIRRWEYQQGPLYGLGSVEDAVYAQQDGRCLFCKKPIDHYHHVVPRHKGGSETLANRCGLCREHHALVHTDKVWADKLVTRKEGVNKKYHALSVLNQIIPHLMEYLGSETRYDVYATDGRSTKGFRVAKNVPKEHYTDAYCIACSILDTDIEVSTPVEPFELKQFRRHDRQACHQQRVDRKYYLDGKQVATNRHKAIEQKSDSLQEFRESYGDTAVSQLTVKPHPPQYKDMTRIMPGAVMNFCGAVGILLGSDGFHNGKPDYYKSTKEEKVRMRRCALLAQNAGMVFIPA

SEQ ID NO: 13179 - protein, 494 aa, unidentified; identical to SEQ ID NO: 7601

SEQ ID NO: 13180 - protein, 443 aa, Anoxybacillus sp.
MVEENMTCFMQRKGENPMVFVLDTNKRPLAPCHEAVARKLLKQGKAAIYKRFPFTIILKKSVDESEIKATYRLKIDYGSRHTGLAILRGQEVLWLAQLDHRTDIKERLDKRRAFRRARRKRKTRYRKPRFLNRRRKDGWLPPSLESRVQNIQTWVERLRKICPIEHISYENAKFDTQLMRNPEINGVEYQQGTLQGYEVREYLLEKFGRKCCYCGKENVPLEVEHIIPKSRGGTDRVDNLCLACHDCNQRKGSKTAEEFGYPHIQKQVKESLKDTSAINSTRWKAYEVLKQTGLDVECGTGARTKMNRIRLDLPKTHYFDACCVGESTTNHLYFKTKEVLFIKAKGRGSRSRTNLDRYGFPRGYLARQKFFFGFQTGDMVKAVVPRGKYQGVWFGEVACRKTGSFDIKGKDGKRIAQGINYRYVQVIQRFDGYAYGKGVAELA

SEQ ID NO: 13181 - protein, 405 aa, unidentified; identical to SEQ ID NO: 5151

SEQ ID NO: 13182 - protein, 515 aa, unidentified
MTALEEKLSKTEYIYVLGFDGKPQMPTRRKRHVLKLLKTGRARIAEDIPFTIRLTYRNAPVLQPVTLAEDPGRTNIGAAVLSPLGDLLFAAVIETRNKEIKKLMTDRRKSRQASRRGERKARQRLAKRYGSMVKSGMVMRKLPMYAADRFVTCKFIRNTQARFCNRKRCPDWITPTVQHLMQTHLNIIRKISRYLPVTDIAFEVNRFAFMHMENPEAMGVDFQNGPLKGYGDVKEAIRTQQHGKCLMCKKPISHFHHIVPRSRGGSDTIQNLAGLCPECHTKVHTDTAFRKDFDEKKSGQLKKYGALSALNQAVPFICKKLLEEYGEEHVHFCRGLDTSLIRTALGFEKTKKNQMHEVDAYCIGLAALEVNEVETPAFDHTFQIRQFRRQDRSIIHHQTGRSYYQGKEKVAQNRKPGFEQKTTALSQWYKEQVRIHGEKEAEKLRSQLWVEKSCRHYNDMDRFLPGAVFLYEGKRYVLSGRITNGKYLRACGQGMKNFPAAECTFIRHNAGLVFI

SEQ ID NO: 13183 - protein, 475 aa, unidentified
MVAVVTSTGKPLMPTSAYRARKLLKKGRAVIFKYRPYFTIQLVDRADGEVQEVEYKSDTGSVHVGISVCTEKKELLSEQRDLLENEPEHHNDRKKNRRTRRNRKRYRKPRFDNRKKKPQEGHEKWLPPTLLHKMEVQVRLFREFCRVVPVTSACFEMGKFDTQALKAVSKGEPVPEGEGYQKGERYGTDTLRAAIFLRDGHTCRFCGRSVKDGAILHVHHVGYWKGDRTNRPANLASACEQCHTPANHGKNGLLYGKEPEFKTLKDASYMTSVRWIMLDEIKKAAPGVQVSVTYGVTTKRKRQELHLPKSHVNDAFSMASFHPKKRSDTEYWKKIPRHDRVLQKFYDAIYLDTRDGSEKKGSELSNGRISRNHKKDSENLHQYRGHKVSKGHNSIRRGASSLKPGSIVMYKGEKMTVHGTHTRYVKGKDGKTAKKVNVQFTCPASDGKKSASLEKCTPVSRVYNTGWKRYWPDKK

SEQ ID NO: 13184 - protein, 504 aa, unidentified
MAWEAIQTRRIKPHDIGEGTLRRHAAGTVSFPVLCKNRKETLMSVLVIGRNGRALMPTNPRKARLLLKKKTASVVCRHPFTIQLLYKTGCATQEGCIGIDTGSQHIGVGITCGDRVILKDEHALRSSMEKRSLLATRTVMRRGRRYRKVRYRKPKWRHHTKRMYFEKANRRGQHWRKVKTTTQSPRLKGWLPPSLQSKCDHHFRIIDRYLKYLPDPITRNLVIEAGRFDIARMNDPTIHGEMYQRGPMYDAENLRAYIFARDNYQCACCKAKAGTTRKADGTTVKLVAHHILFRSRGATDNPKYIISVCDHCHTTKAHQPGGILYSWMENNKKVARGLRDATFMNILRKRLFARYPQAAFTYGNITAADRKQLRLPKSHANDAVAISLFGKEASTVKNICQTMHYKQIRKSKRSLHEAIPRKGRKNPNTKAVRNKKNTTQANGFKLWDSVLADGKKLFICSFTGTSAYLIDKNGCYISQPGKTYKQWPLSKLKRLHPNGNWLMA

SEQ ID NO: 13185 - protein, 518 aa, Kandleria sp.; identical to SEQ ID NO: 7410
  source 1..518: note = isolate UBA3741

SEQ ID NO: 13186 - protein, 389 aa, Tolypothrix sp.
IILKVTFKTDVEIEPLRLKIDPGAVISGIALVNDSTGEVVFAAEIKHRGFAIRDSLISRRQLRRSRRNRKTRYRQPRFNNRIRPKGWLAPSLQSRVDNIKTWVERLRKVAPIEAISQELVRFDMQLIRNPDIEGKEYQQGTLFGYETREYLLEKWNRQCAYCGVKDVPFQIEHIHCRAKGGSNSITNLTLSCEKCNKKKGTKDIRDFLKKDSARLEKILKQAKQPLTDAAAVNSTRFALLKTLQSTGLPVETGSGGLTKFNRTQQGLEKTHYFDAACVGQSTPEKLIVKGVKPLLITANGHGTRQMCRTDKFGFPNRHCSRTKFHFGFQTGDIVKAVVLSGKKVGEYVGRIATRSTGSFNISTKNGLVQGISHTYCQQIHKKDGYSYAF

SEQ ID NO: 13187 - protein, 406 aa, unidentified
MVYVQDIDGKPLMPTTRHGKVRRLLKDKKAVVVNLCPFTIKLTYVTSDYKQEIVLGVDAGTKHVGLSATTKSKELYSSEVILRNDIVDLLSTRRELRKTRRNRLRYRKPRFDNRVKSKRPGWIAPSVKYKVDAHIRVVENVCSILPISRIVIEVAQFDTQKIKNPEISGKEYQEGDQLEFWNTREYVLARDGHKCQYCKGKSKDSILNVHHIESRKTGGDSPSNLITLCETCHKEYHKGNIDLKIRRGKSLRDAAVMGIMKWRLYEELKSRYDRVFMTFGYITKHNRIKYGIEKSHTSDAFVISKNINAKRIERQYLKRLIRRHNRQIHKMKILKGGKKKNNQAPFEVFGFRLFDKVLYNNKIFFVYGRRKSGSFNIRDFNGENSKDVSRKKFKLIRGKRHPIILK

SEQ ID NO: 13188 - protein, 447 aa, Petrotoga sp.; identical to SEQ ID NO: 4357

SEQ ID NO: 13189 - protein, 466 aa, unidentified
LSIKPLINIGEGVIYSSICTGLSLQTYQKRKEVPYMVYVLDIDGQPLMPTTRHGKVRRLLNNHLAKVVKRCPFTIQLLYQSTKETQPVSLGVDAGSKHIGMAATTEKKVVYQEELSPRNDVVKLLSARRTLRRTRRNRKTRYRKPRFNNRVHSKHKGWLAPSVEVKIQEHITAIKRICQILPISEIHVETAEFDLQRLKAMDEGRTLPVGTDYQLGEQYDFYNTRQYVLHRDGYTFQCCGTHDNNIKLHVHHIESRQTGGDAPSNLITLCEHCHKALHKGKLELPKGKKRGKTYRDATFMGIMRKTLLERLRKEVDVPASGTYGYITKYWRERAGLEKSHINDAICISKYPYAKPLDTYYLTKAVRNHNRQIHKSNFSKGGIRKRNQAPYLVKGFRLFDKVLYQGKEYFIFGRRATGYFDIRTLDGTKVNKGSISYKKLRIQDTAKAYLKEARAIPHMNKFTCVLA

SEQ ID NO: 13190 - protein, 423 aa, unidentified; identical to SEQ ID NO: 3951

SEQ ID NO: 13191 - protein, 427 aa, unidentified
LRVFVLNKRGKPLMPCSPAKARLLLKEKKAIVVRRTPFTIQLTIATGESKQPVSLGVDAGYKHVGLSASTEKAELYASEVELRKDITDLLSARRALRQSRRNRKTRYRAPRFDNRIRTKRKGWLAPSVENRINAHLSRIEAVLRLLPITKITVETASFDMQRLKNPDISGKEYQEGEQLGFWNVREYVLFRDGHVCRHCHGRSKDPVLNVHHLESRRPGSDSPDNLITLCETCHKALHRGEITLKAKRGQSFRAQAFMGIMRREVLNRLKASYPELKVHETYGYLTKHARIANGIVKSHGADAFCIAGNLGAKRLGEFFFQKQTRRNNRQIHKLSILKGGIRKRNQAPFEAKGFRLFDKVACQGEEGFIFGRRSSGSFDVRKLDGTRISAGISCKKLRLLEKRRTYLTEIRKEEALPPLPEGRGLRA

SEQ ID NO: 13192 - protein, 408 aa, unidentified; identical to SEQ ID NO: 4614

SEQ ID NO: 13193 - protein, 476 aa, unidentified
LEVVGTEGVSHPGLPGKYKHKGGQLMSVAVISKTGERLMPTSEYRARKLLKSGKAIKHSYHPFTIQLTERETGDIQPIELCMDTGYIHIGISVKSEKHEYLAEQIDTLTDERGRHDACRMYRRQRRSRKRYRQARFNNRKRDQGWIAPSLEHKKKIHIQAISRINNVMPITDITLEMGNFDTQVLKAKEEGKPLPHGADYQHGGRYGIATLREAVFSRDGYKCQCCGRTIKDGVILHIHHIKYRSQGGTNSMSNLATVCDKCHTPKNHKPGGKLYNWKPKLSSFKGATFMTAIRWQLYNEVKALFPDIDIHITYGAATKERRRKLDIDKSHVNDAFVMGQFHPKHRIKAILCKKKRRNNRCLEKFYDAKYIDSRDGKKRSGQELFNGRINRNHKKDSENLHQYRLQKVTAGKRTVRKQHYSVQPHDIIIYESRKRETTGCHCNGARVMLLPDKKSVSIKKIKIYRYASGYFKSTFN

SEQ ID NO: 13194 - protein, 470 aa, Blautia sp.; identical to SEQ ID NO: 2925

SEQ ID NO: 13195 - protein, 423 aa, Moorena sp.; identical to SEQ ID NO: 2887

SEQ ID NO: 13196 - protein, 408 aa, unidentified
MKVYVINKNGNPLMPCKPAKARKLLRDGKAKPVKRVPFTIQLTWDCEENVQPITIGMDKGSKITGFCAIANGEILISGYINHRTDVKKNMETRAANRRQRRSRLWYRPPRFNNRASSSRRGRLPSSIKANADEVIRVVNKLPLPITSVIIEDVLIDIARLNDPNLKGSAYQKSNRLHENLRLATLLRDDFRCQQCRVKNTRLEAHHIKLTSEGGKDTINNLITLCSECHSKVHSGKIHLRKQGVSGFKDKIAQRTMQGKHYLYTSLSQKYGFSRVFGYQTAEFRKELGLPKDHDSDALAIATLGTGELINLHRDNFYNINFRPVQTRRRYHLLPTSKRGRVKYQINESSGSFRKGDLVLVKDRYVKQVNSIYSTGALAFKRVKGEPGSSMPKNCRLLERQSSIVFSSI

SEQ ID NO: 13197 - protein, 504 aa, unidentified; identical to SEQ ID NO: 3854

SEQ ID NO: 13198 - protein, 442 aa, unidentified
  REGION 1..442: note = Ga0315298_1039911
MVYVISQEGIPLMPTEKHGMVRHFLKEGLAKVVRRKPFTIQLQYKSKTYVQPTTFGIDSGYTYIGYSVVANKKELICGELTLLKDMSERLKKRRDYRKLRRARLRYRKPRFNNRKKSDGWLAPSIQHKFDSHIRFINLLRTFLPLTTINIEVGSFDTQKIKDSTIQGKDYQNGEQKGFFNLREYILYRDNYKCKLCGNSDVPLVVHHIGYWKGDRTNRPDNLITLCTQCHSPANHAQRGKLYGMESDTRTLKEATFMSTVKKKLAEELNKTFIVNTTYGYETKSKRIALGLDKTHYNDAFVIAGGTEEHKRVEPINFVQTRRNNRSLETFVDAKYIDTRTGKVASGKELFNGRTTRNKELNTENLRKYRGTKKSAGQRRIRKQHYFYQAGDLVWFNNKVYKVSSNEGGNSKYNYISLVGSKKLAKPNQVKIYKFRRGICVDE

SEQ ID NO: 13199 - protein, 509 aa, unidentified; identical to SEQ ID NO: 7892

SEQ ID NO: 13200 - protein, 438 aa, unidentified
LTKDENRPSGRTTGLRAEQAEPAGIRKGDTLKVFVLNMRGKPLMPCSPAKARHMLKAGKAFVVRRTPFTIKLTIATGETKQDVTLGVDAGARHVGISATTEKEEVFASEVALRQDITGLLADRLAFRRARRNRKTRYRAPRFNNRVRSKHKGWLAPSVENRIQAHISRIEAVCRLLPVTKIVIETASFDIQKIRNPEVEGTGYQQGDQLGFWNVREYVLFRDGHICQHCRGRSKDPILNVHHLESRKTGGDAPNNLITLCETCHKAYHAGKIKLKVKRGQSFRAEAFMGIMRWTLLNRMRKAHPSLPVENTYGYLTKHKRIALGLPKTHCADAFCIAGNLKALRRGDFLFLQQTRKHNRQIHKCSILKGGVRKLNQAPFLVKGFRLFDKVRIGGQIGFVFGRRVRGTFNIRRLDKTVIGTDINCKKTESSRNTQNFFD

SEQ ID NO: 13201 - protein, 512 aa, unidentified; identical to SEQ ID NO: 7699

SEQ ID NO: 13202 - protein, 465 aa, unidentified; identical to SEQ ID NO: 3603

SEQ ID NO: 13203 - protein, 460 aa, Lactobacillus sp.; identical to SEQ ID NO: 5005

SEQ ID NO: 13204 - protein, 431 aa, Moorena sp.
IRVFVLNKNRQPLDPCKPARARILLSTGKAKVYRSYPFTIILTEERKEPVTHEHQLKIDPGAKTSGLAIVQGKRVIWGAELTHRGFQIRDALISRKQLRHSRRNRKTRYRKPRFLNRTRPKGWLAPSLMSRVQNILTWVKKLTRLCPVAGISQELVRFDTQKLQNPEISGIEYQQGTLYGYELREYLLEKWNRKCAYCGATGIQLEIEHIKPLSKGGSDWPLATLRDRASNLTIACHPCNQAKSNQDIELFLSKKPSILKRILSQAKRSLVDAASVNSTRWKLYHDLKSIGLPVEVGSGGLTKFNRCRQNLPKTHWLDAANVGKVETLIVEITHPLIITAKGHGTRQLCRTNKYGFPIRHCSRIKFHKGFQTGDIVRAVVTKGKKVGTYVGRVATRKSGYFNISTKLGLVQGISHKYCQFIHRKDGYAFTN

SEQ ID NO: 13205 - protein, 442 aa, unidentified; identical to SEQ ID NO: 3218

SEQ ID NO: 13206 - protein, 408 aa, unidentified; identical to SEQ ID NO: 5560

SEQ ID NO: 13207 - protein, 431 aa, Petrotoga sp.; identical to SEQ ID NO: 11592

SEQ ID NO: 13208 - protein, 421 aa, unidentified; identical to SEQ ID NO: 4235

SEQ ID NO: 13209 - protein, 456 aa, unidentified
MSTCVCVLTNNGERLMPTFRLGKVRHLLKDGKAKIVKHHPFTIQLLYDSKTNTQPIETCEDVGYNYIGISVKSESHEYVSAQYDTLQDEKEHHDDCRKYRRTRRNRLRYRKSRFDNRKRDKGWLAPSLEHKKQLNISLVERYVSVIPITHVTVEVGSFDTMLLQSIQKGEAKPEGADYQKGPRYNLATLREAVFYRDNYTCQVCKRKIADGAILHMHHMFYWKGRHGYQLDELVTVCEKCHTPANHQKGGKLYGFGKDKKFANLSGAAFMNAVRWQIVNALYATYGKEFVTITYGAMTKEKRIALQLEKTHNNDAYAMGDYHPAHRCKFRHYQKRRRNNRVLEKFYDATYVDTRTGNKAKGKELFNGRISRNHKKDSENLHKYRSKKVSKGRRSIRRQRYAIQPYDTVRLEGKTYITSGCHNKGTRLLIPVNGKSKSVAISKIQVVCHAGAWIQII

SEQ ID NO: 13210 - protein, 443 aa, Anoxybacillus sp.
MVEENMTCFMQRKGENPMVFVLDTNKRPLAPCHEAVARKLLKQGKAAIYKRYPFTIILKEIVDNFRPKTPYRLKIDYGSKHTGLAIVRGEEVLWLAQLDHRTDIKERLDKRRAFRRARRKRKTRYRKPRFLNRRRKDGWLPPSLESRVQNIQTWVERLRKICPIEHISYENAKFDTQLMRNPEINGVEYQQGTLQGYEVREYLLEKFGRKCCYCGKEGVPLEIEHIIPKSRGGTDRVDNLCLACHDCNQRKGSKTAEEFGYPHIQEMVKKTLKDASVVNATRWKVYEVLKQSGCEVECGTGARTKMNRIRLGLPKIHYFDACCVGESTPLQLHFKTKEALFIKAKGRGSRSRTNLDKYGFPRGFLARQKFFFGFQTGDMVKAVIPRGKYQGGWFGEVACRKTGSFDIKGKDGKRIAQGINYRYVQVIQRFDGYTYRREGMNIA

SEQ ID NO: 13211 - protein, 434 aa, Marinobacter sp.
MPCTERRARLLLDRGRAVVVRAYPFTIRLKDRTGGITQPVRIKIDPGSKTTGIAVVRENGQKQHVLALMELAHRGRQISKSLEQRRAFRRRRRNQLRYRAPRFLNRTKPKGWLAPSLQHRVDTTKSLVNRLWALAPVTAVSQELVRFDTQKMENPEVSGVEYQQGTLLSYEIREYLLEKWGRECAYCTEKDTPLQIEHIDPKANGGSNRISNLTLACRPCNREKNRKSLVSFFATSKRLKNHQARLDRILKQCKKPLRDASAVNSTRWALHQALKQTGLPVEVSTGGRTKFNRCQLRIPKTHALDAACVGEVEIVEGWDIPTLAIKATGRGSYQRTRLTRYGFPRGYLMRQKKVQGFQTGDMVRAVVPTGMKAGTWLGRVAVRKTGSFNIQTPGGAIQGISYRHCTLTQRADGYGYHIQPNQRKEEGDRKNESR

SEQ ID NO: 13212 - protein, 442 aa, unidentified; identical to SEQ ID NO: 2903

SEQ ID NO: 13213 - protein, 406 aa, unidentified; identical to SEQ ID NO: 6445

SEQ ID NO: 13214 - protein, 502 aa, unidentified; identical to SEQ ID NO: 6049

SEQ ID NO: 13215 - protein, 367 aa, unidentified
KINLGIDAGSKTIGVSATTESKVLYESEVVLRNDIVELLSGRRALRRSRRNRKTRYRKPRFDNRRRPDGWLTPSIRQKIKTHVTVVENVMKILPVTKIIVETASFDIQKIKNPKIEGAEYQYGEQLDFWNVREYVLFRDGHTCQCCKGKSKDNILNVHHIESRKTGGNAPNNLITLCETCHQAYHKGVITLPKEIHRGMRFRDAAFMGIMRWAFYDRLKELYTPFGVEVINTYGYITKNTRIEHGLPKEHYVDARCISGNPAAKPLGHYYFQKKVRCHNRQIHKNTILKGGIRKRNQAAYLVKGYRLFDKVKYQNQEYFIFGRRSSGFFDIRTLDGTKVNKGSISCKKLQLVEKSKHYLTEQRKVAA

SEQ ID NO: 13216 - protein, 417 aa, unidentified
MPCSPAKARLLLKERKAIVKRRTPFTIQLTIATGEAKQPVALGVDSGYKHIGLSATTEKAELYASEVELRQDITDLLSARLALRRSRRSRKTRYRAPRFDNRVASKRKGRLAPSVENRIAAHMSRVEAVMRVLPVTAITVETAAFDTQLLKNPDIAGAAYQQGEQLGFWNVREYVLFRDGHVCQHCSGKSKDPILNVHHIESRRTGGDAPNNLITLCETCHKAFHRGEIELKIKRGKSFKAETFMGIMRWTLFERLKKAHPELSVRHTHGYLTKHKRISHGIAKSHCADAYCIAGNLGAMRLNSYLFQKQTRKHNRQIHKLSILKGGLRKKNQAPYEVKGFRLFDKVICKDEEAFIFGRRTSGSFDVRRLDGTRISAGISYKKLRLLEPRTTYLTEFRKEAALPPLHKCRGFRAEFL

SEQ ID NO: 13217 - protein, 431 aa, unidentified; identical to SEQ ID NO: 2952

SEQ ID NO: 13218 - protein, 415 aa, unidentified; identical to SEQ ID NO: 5047

SEQ ID NO: 13219 - protein, 412 aa, unidentified; identical to SEQ ID NO: 4932

SEQ ID NO: 13220 - protein, 436 aa, unidentified
MSVFVLDKKHEPLMPCHPARARKLLKAGRARVVKTYPFTIRLVDRLLENSAVQPVAVKVDPGSKQSGMAVVRDDGKAHHHALFFINLVHRGQVIQERMTARSAFRRRRRGANLRYRAPRFNNRKRPEGWLPPSLQHRVDTTMSWVKKLRKLVPVTALWVENVKFDTQKLQNPEVSGVEYQQGTLFGFEVREYSLEKFERRCVYCGAENTPLNIDHVVPRAKGGSDRVSNLVLACTECNQKKGAQPLEVFLKGKPEQFERIRRQLKAPLRDAAAVNATRWALFNALKQTGLPVATGTGAQTKFNRKAFGIPKEHWLDALCVGRINGADYPEGMGVMQVRCTGRGSYQRTRLNKYGFPRGYLMRQKRVHGFATGDIVKAVKKGVTFQGRVAVRARGSFVLQTPDGKVDGIHWRHCHLISRNDGYGYAWLRPAPHSSPV

SEQ ID NO: 13221 - protein, 472 aa, unidentified; identical to SEQ ID NO: 8020

SEQ ID NO: 13222 - protein, 417 aa, unidentified
MPCSPAKARLLLKERKAIVKRRTPFTIQLTIATGEAKQPVALGVDSGYKHIGLSATTEKAELYASEVELRQDITDLLSARLALRRSRRSRKTRYRAPRFDNRVASKREGWLAPSVENRIAAHMSRVEAVMRVLPVTAITVETAAFDTQLLKNPDIAGAAYQQGEQLGFWNVREYVLFRDGHVCQHCSGKSKDPILNVHHIESRRTGGDAPNNLITLCETCHKAFHRGEIELKIKRGKSFKAETFMGIMRRTLFERLKKAHPELNVRNTYGYLTKHKRISYGIAKSHCADAYCIADNLGAKRLDGFFFQKQTRKHNRQIHKLLILKGGLKKKNQAPYEVKGFRLFDKVICKGEEAFIFGRRTSGSFDVRRLDGTRISAGINYKKLRLLEPRTTYLTEFRKEAALPPLHKCRGVCAEFL

SEQ ID NO: 13223 - protein, 424 aa, unidentified; identical to SEQ ID NO: 7441

SEQ ID NO: 13224 - protein, 420 aa, unidentified; identical to SEQ ID NO: 3247

SEQ ID NO: 13225 - protein, 512 aa, unidentified; identical to SEQ ID NO: 9719

SEQ ID NO: 13226 - protein, 406 aa, unidentified; identical to SEQ ID NO: 2703

SEQ ID NO: 13227 - protein, 430 aa, unidentified; identical to SEQ ID NO: 9911

SEQ ID NO: 13228 - protein, 423 aa, unidentified; identical to SEQ ID NO: 3951

SEQ ID NO: 13229 - protein, 425 aa, unidentified; identical to SEQ ID NO: 9663

SEQ ID NO: 13230 - protein, 464 aa, unidentified; identical to SEQ ID NO: 3745

SEQ ID NO: 13231 - protein, 427 aa, Parasutterella sp.; identical to SEQ ID NO: 3787

SEQ ID NO: 13232 - protein, 299 aa, unidentified
VEVKIQEHITVIKRVCRILPVSRVVVETAEFDLQLLKAIADGRPVPQGEDYQKGEQAGFYNVRQYVLWRDGYRCQCCKKHGKGIKLHTHHKESRKTGGDAPENLVTLCEVCHRKLHQGLIAEQGLKKRSRMSTRDAAFMGIMRRTLTERLYRELKVPVAGTKGYITKYTRVELLHLPKSHAGDALAIAQGRHGFGIRQATFIKPAERIYQIKPVRHHNRQLHKATILKGGNRKPNQAPKYVKGFQLFDKVLYQGQECFIWGRRTTGSFLLKLLDGTKVKDGVSCKHLKLLERSSQYLAA

SEQ ID NO: 13233 - protein, 417 aa, unidentified
MPCSPAKARLLLKEKKAIVKRRTPFTIQLTIATGEAKQPVTLGVDSGYKHIGLSATTEKAELYASQVELRQDITDLLSARLALRRSRRSRKTRYRAPRFNNRVASKRKGWLAPSVENRIAAHMSRVEAVMRVLPVTAITVETAAFDTQLLKDPDIAGGAYQQGEQLGFWNVREYVLFRDGHVCQHCRGKSKDPILNVHHIESRRTGGDAPNNLITLCETCHKAFHREEIELKVKRGKSFKAETFMGIMRWTLFERLKKAHPELSVRNTYGYLTKHKRISHGIAKSHCADAYCIADNLGAKRLEGFFFQKQTRKHNRQIHKLSILKGGLRKKNQAPYEVKGFRLFDKVICKGEEAFIFGRRTSGSFDVRRLDGTRISAGINYKKLRLLEPRTTYLTEFRKEAALPPLHKCRGFRAEFL

SEQ ID NO: 13234 - protein, 414 aa, unidentified; identical to SEQ ID NO: 2588

SEQ ID NO: 13235 - protein, 426 aa, Parasutterella sp.; identical to SEQ ID NO: 3045

SEQ ID NO: 13236 - protein, 418 aa, unidentified; identical to SEQ ID NO: 4934

SEQ ID NO: 13237 - protein, 438 aa, unidentified
LVSGQLIMAWEAIQTRRIKPHDIGEGTLRRHAAGTVSFPVLCKNRKETLMSVLVIGRNGRALMPTNPRKARLLLKKKTASVVCRHPFTIQLLYKTGCATQEGCIGIDTGSQHIGVGITCGDRVILKDEHALRSSMEKRSLLATRTVMRRGRRYRKVRYRKPKWRHHTKRMYFEKANRRGQHWRKVKTTTQSPRLKGWLPPSLQSKCDHHFRIIDRYLKYLPDPITRNLVIEAGRFDMARMNDPTIHGEMYQRGPMYDAENLRAYIFARDNYQCACCKAKAGTTRKADGTTVKLVAHHILFRSRGATDNPKYIISVCDHCHTTKAHQPGGILYSWMENNKKVARGLRDATFMNILRKRLFARYPQAAFTYGNITAADRKQLRLPKSHANDAVAISLFGKEASTVKNICQTMHYKQIRKSKRSLHEAIPRKGRKNPNTKA

SEQ ID NO: 13238 - protein, 419 aa, unidentified; identical to SEQ ID NO: 6119

SEQ ID NO: 13239 - protein, 413 aa, unidentified; identical to SEQ ID NO: 2636

SEQ ID NO: 13240 - protein, 493 aa, unidentified; identical to SEQ ID NO: 2644

SEQ ID NO: 13241 - protein, 431 aa, unidentified; identical to SEQ ID NO: 3235

SEQ ID NO: 13242 - protein, 412 aa, unidentified
MENKIEYCFVVDKDNQPLAPTKVNKGWYLVRKGRARLKSKYPMVIQLEKRVKLDENDKSYMTCGIDDGSAHVGLAIVQKCPIKNKIVFKGTIEQRQDVKHLIDVRRGYRRYHRYHKRYRPMRFNNRSSSKRIGRLAPSIKQKKDAILRILFQLNKWINIKEYYLEDVCIDIRAMTDDYKPYKWQYQKSNRLDENLRKAAIIRDNYKCQECGKSNCKLEVHHIQARKYSGADTIGNLITLCSKCHQKTEGKEQDFEDKYFKIIGSKPKRFDYAMHVMQGKNYLRSKISELGLLHLTNGGETANKRIEWNIEKSHSNDAICITDSIPDSCNIKEWTIKPMRRKSKAKINNVLGIKHRDLVSYTYKNGETHTGYVTALYSKQLALNFQSRTKHCKKVNARKCRLLWQFNKIYWLE

SEQ ID NO: 13243 - protein, 411 aa, unidentified
MVYVQDIDGKPMMPTTRHGKVRRLLKDNKAVVVNTCPFTIKLTYKTSDYKQEIVLGVDSGTKHVGLSATTKSKELYASEVILRSDVVDLLSTRRGLRRTRRSRLRYRKQRFNNRVKSKKDGWIAPSVRHKIDSHIRIISFVYSILPVSKLIVEVAQFDTQKIKNPEISGKEYQEGEQLGFWNVREYVLARDGHKCQHCKGKSKDPILNIHHIESRKIGGDSPSNLITLCETCHKEFHKGNIKLKVSRGKSLRDAAVMGIMKWKLYEELKSRYDNVSMTFGYITKYNRINHGIEKSHVSDAFVISRNFNSCRLGYYYKRKLVRRHNRQIHKMKILKGGIRKRNQAPFKVFGFKLFDKVMLQGEEHFIYARRLSGQFNIRDINGENKKDVSCKKLKYVSHGLVSVKTNLFLSQ

SEQ ID NO: 13244 - protein, 357 aa, unidentified
LRVFVLNKRGKPLMPCSPAKARLLLKEKKAIVVRRTPFTIQLTIATGETKQPVSLGVDAGYKHVGLSASTEKAELYASEVELRQDITDLLSARRALRQSRRNRKTRYRAPRFDNRIRTKRKGWLAPSVENRINAHLSRIEAVLRLLPITKITVETASFDMQRLKNPDISGKEYQEGEQLGFWNVREYVLFRDGHVCRHCHGRSKDPVLNVHHLESRRTGSDSPDNLITLCETCHKALHRGEITLKAKRGQSFRAQAFMGIMRREVLNRLKASYPELKVHETYGYLTKHARIANGIVKSHGADAFCIAGNLGAERLGEFFFQKQTHRNNRQIHKLSILKGGIRKRNQAPFEIKGFRLF

SEQ ID NO: 13245 - protein, 409 aa, Microcoleus sp.; identical to SEQ ID NO: 6160

SEQ ID NO: 13246 - protein, 419 aa, Moorella sp.; identical to SEQ ID NO: 11908

SEQ ID NO: 13247 - protein, 357 aa, unidentified
EKAELYASEVELRQDITDLLSARRALRQSRRNPKTRYRAPRFDNRIRTKRKGWLAPSVENRINAHLSRIETVIRLLPVTKISVETTSFDMQLLKNSDIAEKEYQESEQLGFWNVREYVLFRDGHVCQHCHGRSKDPVLNVHHLESRRTGGDSPGNLIALCETCHKELHRGEITLKAKRGQSFRAETFMGIMRWEVLDRLKASHPKLEVQNTYGYRTKHARIVNGIAKSHCADAFCIAGNLGAERLGEFLFQKQTRRNNRQIHKLSILKGGIRKRNQVPFEVKGFRLFDKVACKGEEGFIFGRRSSGYFDVRKLDGTRISAGISYKKLRLLEKRQTYLTEIRKEEALPPLPEGRGLRA

SEQ ID NO: 13248 - protein, 492 aa, unidentified
MCRYTTLPRGASLLLKRVESSVTRPVRAFFKSDIMAVFVIDKHQKPLMPCSEKRARLLLNRRRARVHSMYPFTIRLVDRTLEKSVLQPTRCKIDPGSQTTGIAIVREKGTRQVVLSLIELTHRGSFIREALQARAAKRRRRRYHLRYRSKRYSNRKKPNGWLAPSLLHRIESTMTWIVRLRKRTPITALTCERVRFDTQKLLNPEIEGIEYQQGTLLGYEIREYLLEKWGRQCAYCDVKNVPLQIDHIHPKSRGGSNSINNLTLACSTCNLKKNNQSLEDFCPKLTKAIRSKPHLQHAAAVNSTRNALWDALSALPLSCEPGTGGQTKYNREQFRIPKTHALDAACTGIVSQLHNWQIPTLQIRSSGRGSYQRTRSDRFGFPRGFLIRQKRVHGFQTGDQIKATVPAGKKKGHYAGRVAIRASGYFNIQTTHSLVQGISSKYCCLNQRADGYHYLNRSSTGETMDSNIQNPLLEEQRFLPALKDWVSALSTG

SEQ ID NO: 13249 - protein, 424 aa, Oscillatoria sp.
MSNFVFVIDTNKQMLNPVHPGEARCLLSQGKAAVFRRYPFTIILQEEAESEIKPLQLKIDPGSKTTGLAILNGSKVIWAAELTHRGQAIKNALLSRRQLRRGRRNRKTRYRAPRFLNRTRAEGWLAPSLMHRVKTTLTWVNRLCRYAPVAGISQELVRFDTQVIQNPEISGTEYQQGTLAGYEVREYLLEKWGRKCAYCKAENTPLQIEHIQPRSKGGSDRVSNLTLACEPCNTAKSNLPVQEFLSGKSDRLKRILAQAKAPLKDAAAVNSTRWALFNALKETGLPVSTGSGGQTKYNRTRLNLPKTHWLDAACVGRVNQLEILTTQPLLIKATGHGTRQMCGTDKYGFPSRHRSRVQIHKGFQTGDIIVANVTAGKKIGSYLGRVLCRASGSFDIATKNGKVAGISHKYCQSIHKRDGYAYAF

SEQ ID NO: 13250 - protein, 429 aa, Moorena sp.
MCNYVFVLDASHKPLNPCRPVTARKLLTAGKAAVYRRYPFTIILKKQVDGSAKPMSLKIDPGSKITGLAVVYSNQVVWSAEIEHRGSKIKSALDYRRGVRRSRRNRKCRYRKPRFNNRKRPEGWLAPSLQHRVATTMTWVLRLMKLTAIGSISQELVRFDTQKLQNPEISGIEYQQGELMGYEVREYLYQKWGRQCVYCGAKSVKLEVEHIIPKSKGGTNRVNNLTLACHRCNQAKGNLDARDFLSGKPDVLKRILGRAKQPLLDAAAVNSTRWQLYQSLKETGLSVAVGTGGRTKYNRIKLGLPKGHWVDAACVGEVATLKIVTRQPLLIKAMGHGCRQVIQMDKYGFPRKGYKPKHPVKGWKTGDIVNVVAGKNAGLKGVRIKTVRAKGNFDLIGADQDSSNKVNSASRNYIQCVHRQDGYYYSFAK

SEQ ID NO: 13251 - protein, 286 aa, unidentified
LNKEKEKVVIETAEFDLQLLKAIQEGKPIPEGEDYQKGEMYGSYNVRQYVLWRDNYTCICCGVRGTPKNPVRLHVHHFESRKHGGNAPDNHGTLCDDCHKKFHLGIITDVKLKTRRRQSTRDAAFMGIMRKTLMWRLRTELFIPVAETKGYITKATREKLLVLPKSHTRDALAIAQGRHGFGIKEYAYVEPANHIYTVRPVRHHNRQLHKASILKGGIRKRNQASKYVSGFRLYDKVLYQGKECFMWGRRTSGSFLLRTINGIKVKDGVSYRNLTLLERSSNYLIA

SEQ ID NO: 13252 - protein, 430 aa, unidentified
MPKVYVLNRHGRPLMPCTPAKARHLLDAGKAKVRHRTPFTIQLVYGSSGYTQEVILGVDAGSKTIGVSASTKKEELFAANVIPRNDVVDLLSTRREFRRARRNRKTRYRKPRFDNRVRSKHKGWLAPSVEVKIQEHITAIKTVCRILPVSKVVVETAEFDLQLLKAIANGKPVPQGEDYQHGEMYGHYNVRQYVLWRDGYTCQYCGAHSTKKKEIRLHVHHLESRKTGGDAPGNQINLCESCHKKFHKGLILDGTLKKRKRKPNRDAAFMGIMRKTLIVRLRAELPIPIIETRGYITKATREKLLVLPKSQTNDALAIAQGKHGFNVGYLPGIVQTDRIYTIRPVRHHNRQLHKATILKGGVRKANQAEKYICGFRLYDKVLYNGIECFVWGRRTSGSFLLRQLNGEKVKDGVSYKHLKLLERSQSYLVA

SEQ ID NO: 13253 - protein, 420 aa, unidentified
MFVYVLAKNGQPLMPTSRFGKVRRMLRDKKAKVIKRCPFTIRLLYEPETKIVQDIVLGVDTGSKYVGVACVGNDKVLYQSQTELRDDIKKKMDSRRMYRRNRRARKTRYRKSRFLNRRNSIRKDRYCPTIVSKYYGHEREITFCKKILPIKDIVLETGKFDTQLMEKPWLQEHKWAYQRGVNYGYANAREHALVRDKYTCQCCGKKNCRVEVHHIKFRSDGGSDTLENLITLCEDCHKAIHLGKIELKLKGKHRSNLRYATQMSIIRNMLLKKYPEAIETFGFVTKANRENLGLKKDHYIDACVIASCGLEFEPSDVLYRKRCVPKQSRQLCKGVRGEKKIPTGKIHGFKRYDKIKYLGEICFVKGRRSKGAFELMDINNNTLDFRDMDGNKTPSYKSLKRVNARKSILCISTKIERGIL

SEQ ID NO: 13254 - protein, 446 aa, unidentified; identical to SEQ ID NO: 11087
  REGION 1..446: note = Ga0373625_0001890

SEQ ID NO: 13255 - protein, 427 aa, Oscillatoria sp.; identical to SEQ ID NO: 5140

SEQ ID NO: 13256 - protein, 612 aa, Streptomyces sp.
VTFHSTARLIRRQAFRVFAGLERVRHVRRQSLPGRSGWWLHFRRGALRADQLQSSVKGGALMTTFGVSEPTHPVVLPQRRALESAPADNPGSRDETGRGLRRRSTDGTGIGHERGETPGGSTQRRERHPEALGAQEEPSAEGAVAAREGGTTVRTPTAGAACVPVLDRRGRPLIPTHPARARKLLDQGRAVVANHTPFAIRLKDRLLEQSEVAGVAVRIDPGSKGTGIAITVDQDAVVPSTAPFRVRRGLFAAELVHRGSYISKRMQQRAAYRRRRRSSNLRYRAPRFDNRAREPGWLPPSIQHRVDSTVSIVRRLVRLFPVSEAHMESAAFDTHALSAGRPLEGAEYQQGTLYGYEIREYLLAKWGRACAYCGAVGVPLQIEHIRPRARGGSDRVSNLTLACGPCNQAKGVMPLAEFLADQPDRLARVEAQAKASLRDAAAMNATRQQLCLALSELNMPVRAWSGGRTKYNRTRMRLAKTHTLDALCVGELPEAAIVVRHPEAVLVVTATGRGLYARTTPDKFGFPRLLRPRDKQHYGYSTGDLVSASLPSGRYQGKHTGRVAVRATGRFNIRTAAGLVQGIHHRHLRLLQRADGYGYGQRPEGASVGRRT

SEQ ID NO: 13257 - protein, 375 aa, unidentified; identical to SEQ ID NO: 6686

SEQ ID NO: 13258 - protein, 428 aa, Enterococcus sp.; identical to SEQ ID NO: 4335

SEQ ID NO: 13259 - protein, 325 aa, unidentified
RKTRYRAPRFDNRIRTKRKGRLALSLENRINAHLSRIEAVLRLLPVTKITVETASFDLQLLKNPDISGKEYQEGEQLGFWNIREYVLCRDGHVCQHCYGRSKDPVLNVHHLESRRTGGDSPGNLITLCETCHKALHRGEITLKAKRGQSFRAEAFMGIMRWEVHNRLRALHPGIEVSNTYGYRTKHARIANGIAKSHCADAFCIAGNLGAERLCEFFFQKQTRRNNRQIHKLSILKGGIRKRNQAPFEVKGFRLFDKVACQGEEGFIFGRRSSGFFDVRKLDGTRISAGISYKKLHLLEKRQTYLTEIRKEEALPPLPEGRGLRA

SEQ ID NO: 13260 - protein, 431 aa, unidentified; identical to SEQ ID NO: 10470

SEQ ID NO: 13261 - protein, 452 aa, unidentified
  REGION 1..452: note = Ga0373625_0208338
MSKQTLQREFKNVPTGAPLACSSTSTPLNRDERTSVASKVLSCNNPEVGLRKQTSGPKAIVFVLSITGSPLMPCSFTKARHLLESGKAKVVNLNPFTVKLTFECENKVQEISLGIDSGYSHIGFSAITSDKEVASGEVSLDNKTSKRLTKRRMYRGHRRNRLRYRKPKFSNRKTPKGWLPPSIQRKFDTHINVLYKLKELMPIKKVTVEIGAFDIQKLMNPEILGKEYQQGDMYGYNNLKAFLFSREHGKCQLCGKKIVKGERVHLHHIKPRSQSGTNRPLNMALLHEGCHDKLHKEGLYNKLKAPKQYKAETFMSIVADRFKKVLDCNVTYGYETATKRNILRIEKSHVNDAFIIAGGINQERCLFYKIEQKRINNRVLQVKRKRFIPSIRRQRHEIQNRDLVWIDGRKYLCGGLAGRGSEVYYFDGLEKIRVPIKKMSRFYSTGSLVWIN

SEQ ID NO: 13262 - protein, 431 aa, unidentified; identical to SEQ ID NO: 4463

SEQ ID NO: 13263 - protein, 431 aa, unidentified; identical to SEQ ID NO: 5232

SEQ ID NO: 13264 - protein, 462 aa, unidentified; identical to SEQ ID NO: 7109

SEQ ID NO: 13265 - protein, 442 aa, unidentified
MSTSVFVLDKKHRPLMPCRPARARRLLRAGRARVVKRFPFVIRLVDRTVEQSEVQPVLIKLDPGSRETGAAVVRDDEKKRHHALAFFVIKHRGGAIRDALKARSAFHRRRRSQNLRCRSPRFLNRVKPKGWLPPSLRHRVETTLSFVRRMCRYLPVSGIATELVKFDSQKLQNPEVSGVKYQQGTLFEYEVREYLLEKFGRKCVYCGAEGVPLNIDHVVPRAKGGSNRVSNLVLACVSCNQKKSARSLEDFLKGKPEVLARVRRELKTPLRDAAAVNATRWVLFNELKATGLPVETGSGALTKFNRHAFGVEKEHWLDALCVGRLNGVVTRKGLNVLEIRCMGRGSRQRTRLTKYGFPRGYLMRQKCVHGFATGDMVEANVPKGKKAGLWRGRVAVRVSGSFNIQTPKGVIQGVGWKHCRLISHNDGYGYAWLGHAPHSSPA

SEQ ID NO: 13266 - protein, 473 aa, unidentified
  REGION 1..473: note = Ga0315284_10151894
MSKKTLQVKLKNTLRDAPLVPDSVRPALNKEETPSVQDKVRTCNTPEVDLLQHVGGQGSRVTDDMRVFVLNMRKEPLMPVSSRKARLLLKTGRAVVVRRSPFTIQLKYASGEDKQEISCGVDSGYSHIGFSCVSGRQELIRGEVEVDNFTVKHLIEKSMYRRQRRSKLRYREPRFLNRKINNGWLPPSVDRRYQTHIHLITLLKKLLPISDMIVETASFDIQKLNNPEITNIGYQQGSLYEKSNLRSFILAREKNTCQLCKEGYSKTDHWHKHHIIPRSQGGTDKPDNIALLHEKCHDRLHKEGLYEQLEKNKQYKEATFMNIVKGKFKEDLSCKTVFGYETFVKRNELQLTKSHSNDAFVIAGGSIQNRCFEYLVKQKRRNNRSLQLNRKGSKPSVRRQRYHLQPHDLVQVENKDIVEVIGTHCLGTRVMVLNKKNKKVSILIKNISWFFNNKSLIFKKGDVVSSSTGAKAP

SEQ ID NO: 13267 - protein, 281 aa, Moorena sp.
MYPFTIILKTAIRQSRRCANNNPTISPCQIKIDPGSKITGFALVQDGQVIWGMELYHRGGLIKKRLESRRAVRRGRRNRHTRYRKPRFLYRKRPEGWLPPSLEHRILTTQTWVKRLIKFCPVNEVWIERVKFDTQKMRNPEISGVEYQQGELAGYEVREYLLEKWGRECTYCGKQNAPLQIEHIHPKSKGGSNRVSNLCLACEKCNQRKGDKPVEDFLKKKPNLLQKIKTKAKQPLKDAAAVNATRNKLVKVLRSVKPLVTGTGAQTKYNRTKLGLPKQHA

SEQ ID NO: 13268 - protein, 480 aa, Dorea sp.; identical to SEQ ID NO: 2726

SEQ ID NO: 13269 - protein, 442 aa, unidentified; identical to SEQ ID NO: 3218

SEQ ID NO: 13270 - protein, 545 aa, unidentified
VQFAWWLCHPKPSDNIEDVNHETALMLLQIKAGTETFGTAPCGSGPKAEGVSPERKAMNTVAVVTNTNKPLMPTSPYRARKLLSSGKAKIVKHRPFTILLVNRSDGNVQEIEYKSDTGYLHVGISVCSEKREFVREQRDLLPDEKEKHNDRRKYRRTRRNRKRYRKARFDNRIGKIRKAEKNKHVWLPPSLDHKVDAQVQLFLRLYQVMPVKRAVFEMGQFDPALMKALEKGEAAPQGIDYQMGERYQIATRRAAVFTRDRYACVFCGRSIKDHAILHVHHIGFWKQDRSNRLDNLATCCEQCHTSENHRPGGILYGVEPKLESLASATYMNVVRFELLRRLKEAAPDVEFHISYGAKTSVIRKQRSISKSHTNDAYCLGQYFPKLRAEEIGFQKIRRNDRILQKFYDAEYLDSRDGTTKKGKELTNGRISRNHMKDHKNLHQYRGKKLSKGRVTIRRGRSSLKPGGLVRFDGEVLTVHGTHRSRKKNKAGHIKVSVNVEFERPSKTGRKSAALSKCQIISRSYNTGWKQIQLRKEEQGRIAAVV

SEQ ID NO: 13271 - protein, 430 aa, Pseudoalteromonas sp.; identical to SEQ ID NO: 8414

SEQ ID NO: 13272 - protein, 414 aa, Parasutterella sp.; identical to SEQ ID NO: 3876

SEQ ID NO: 13273 - protein, 424 aa, unidentified; identical to SEQ ID NO: 3434

SEQ ID NO: 13274 - protein, 461 aa, unidentified
VQPLYLGIDPGRSNIGVAVVKTDGMAVFTAHLETRNKEIPKLMKKRKDSRRARRTNGRRCRRQRRAKANGTISKKCVKQTTAQNGSVSKRAKEIGVIKRHLPGCEKDVLCIGIKNKEAKFNNRTRPTGWLTPTANQLLQTHINLVKKIQKFLPISDVVLEVNKFAFMQLDNPNIQKWQYQKGPLYQKESLKSAVSEMQEHHCLFCKKKIDHYHHVVPQHKNGSNTIDNIVGLCTQHHDLVHKDATWQKRLAKKKTGLNKKYGALSVLNQIIPALTKELSSLFPKHFFVTNGKSTYDYRAAHGVRKDHWLDAYCIACSVLPNDTCDKTINSRVPYELKQFRRHDRRALNNENMSRVYTFNGKMVATNRHKATEQTTDSLEEFRQRQPNDVCNLKVKEHHPTYRNMSRNYPGSIFLVEKQVHIMQGIAGSKDGKATTYKDTNANSIAAGKCKFVAKNSGILFV

SEQ ID NO: 13275 - protein, 533 aa, Actinomadura sp.; identical to SEQ ID NO: 3190

SEQ ID NO: 13276 - protein, 451 aa, unidentified; identical to SEQ ID NO: 11088

SEQ ID NO: 13277 - protein, 493 aa, unidentified
MAAVYVISASGKPLMPTTRCGHIRGLLNAGKARVVEREPFTIQLKYETPDVTQPLYLGIDPGRTNVGSAVVREDGECVFTAQLTTRNKDVPKLMKARKQFRVAHRRLKRRCKRQRRAKAAETLSQKGEFQRLLPGYEEPILCKGIRNKEARFNNRQRPAGWLTPTANHLLLTHLNMVKKLQKLLPITDVVLEVNRFAFMAMENPSIRRWQYQQGPLYGKGSVEDAVYAQQDGHCLFCGKPIAHYHHVVPQHKNGSETLENRVGLCNEHHDLVHKDRAWDAKMKETKAGLNKKYHALSVLNQIIPALTEQLTAMFPQHAFVTTGKDTADFREDYGIAKEHHLDAYCIACSVLAEPTKVAAPTGKPHRLMQFRRHDRQVCHKENIKRVYLSEGKAVATNRHKAIEQKDDSLEEFRKTHTQQEVSALTVKDHQPVYKDMRRFMPGGVFLFNGKVHTLQRSHGRYKGMPFYYIDTDGSKNHAKGCIFLQQNCGLRWV

SEQ ID NO: 13278 - protein, 427 aa, Thiocystis sp.
MEIASEMNANFVFVLETDKRPLSPCPPARARELLRDGKAAVFRRYPFTIILKRTVPDADPEPCQIKLDPGSKTTGMALVQGEKVIWGGEIAHRGGLIKKQLDRRRASRRLRRSRLRYRAPRFLNRTRAKGWLPPSLQHRVKTTLTWVRRLIRFAPVGELTQELVKFDMQAMQNPEISGVEYQQGELLGFTVKEYLLDKWGRTCAYCGVEHIPLEVEHLHPKSKGGSDRVSNLTLACVKCNRKKGNRPVEDFLAKKPDLLKRLQAKAKAPLKDAAAVNATRWELYRSLEATGLPVTVGTGAQTKFNRKQLGWKKAHWLDAAAVGAVGALTLATEQPLRVTCKGQGGRQKAVLDRNGYPKQHRSLKPIRGWRSGDIASCEGQVGRISPRTTGSFELRPCDGGKPFSRPERTFRSVHRNDGYAYVKMNER

SEQ ID NO: 13279 - protein, 545 aa, Actinoplanes sp.; identical to SEQ ID NO: 2907

SEQ ID NO: 13280 - protein, 415 aa, Bacillus sp.; identical to SEQ ID NO: 2671

SEQ ID NO: 13281 - protein, 538 aa, unidentified
MSTVYVLNKDGKPLMPTARCGHVRHLLKEQKARVVTSKPFTIQLLYETDDVVQPLYLGIDPGRTNIGVAVVKADGTAVFTAHLETRNKEIPKLMKKRKDSRRARRTNGRRCRRQRRAKANGTISKKCVKQTTAQNGSVSKRAKEIGVIKRHLPGCEKDVLCIGIKNKEAKFSNRTKSEGWLTPTANQLLQTHINLVKKIRKFLPISDVVLEINKFAFMQLDNPNVQKWQYQQGPLYQKANLEEAVSEMQEHHCLFCKKPIAHYHHVVPQSENGSNTIGNIVGLCTKHHDLVHKDTAWQKKLAKKKTGLNKKYGALSVLNQIIPALTKELGSLFPKHFFATNGKSTYDYRAAHGVRKDHWLDAYCIACSVLPNDVCDKNINSRVLYELKQFRRHDRRALNNENMSRVYTLNENVVATNRHKATKQTTDSLEEFRQNHPDDACKLKVKEHHPTYRNMSRNYPGSVFLVGNQVHVMQGVAGSKDGKATTYKDTNANSIAAGKCKFVAKNSGILFVYYKLKVVKPRKIFNNLCLAKSLNFWR

SEQ ID NO: 13282 - protein, 427 aa, unidentified; identical to SEQ ID NO: 5713

SEQ ID NO: 13283 - protein, 462 aa, unidentified; identical to SEQ ID NO: 2823

SEQ ID NO: 13284 - protein, 494 aa, unidentified
MTMVYVQNKDGKPLMPTTRYCYVRLLLKEKKARVVCTTPFTIRLNYDTPNIIQDLILGIDPGRTNIGVAVVKEDGSCVFSAHLETRNKEVPLLMKKRAAFRRQHRTQDRRRKRQRRAIAAGTTVESNTIERLLPGYEKPIVCHHIRNKEARFNNRSRPAGWLTPTANHLLQAHINLIAKAAKFLPITKVVVELNRFAFMAMDNPNIRRWEYQQGPLYGLGSVKDAVYAQQDGHCLFCKKPIDHYHHVVPRHKGGSETLANRCGLCEKHHALVHKDKAWAEKLVTRKGGMNKKYHALSVLNQIIPHLMEYLGSETPYDVYATDGKSTKGFRIAKNVPKEHYTDAYCIACSILDADTKVSAPAEPFKLKQFRRHDRQSCIRQMVDRKYLLDGKVVATNRHKSIEQKSDSLEEFREAYGDAAVSQLTVRPHSPQYKDMARIMPGTVMDFDGIVGVFKGSSGRNNGTPNYYNSTKGARVLTKRCALLAKNAGMVFIPA

SEQ ID NO: 13285 - protein, 351 aa, Ferroplasma sp.
  VARIANT 26..69: note = X can be any naturally occurring amino acid
MVKNMKEKQKLDRRNTYTPTDAPQVXXXXXXXXXXXXXXXXXXXXXXXXXXXXXXXXXXXXXXXXXXXXQTHIRLIEKLKKILPISDIIIEVASFDQQKMKNPEISGIEYQQGELQGYEIREYLLEKFHRKCVYCGKTNIPLEIEHLTLRSRGGPDTVDNLAISCHDCNQKKNNLTAEEFGYPKVRKRTLIPLKNSAFMNIVRWKLAQLTEAAYTFGYITRKNRISLGLDKSHANDAFVIAGGNMQVRSTVFNATQRRRNNRSLQINKKGFMPSIRRRRYPLQPGDVVEFGESRYGAVGVHSYGNYVIIRNGEKKMDVNVKKVKLVRYCKSIQFGAPIPPTLTHGVSLGGS

SEQ ID NO: 13286 - protein, 451 aa, unidentified; identical to SEQ ID NO: 3061

SEQ ID NO: 13287 - protein, 431 aa, unidentified; identical to SEQ ID NO: 6230

SEQ ID NO: 13288 - protein, 424 aa, Enterococcus sp.; identical to SEQ ID NO: 8879

SEQ ID NO: 13289 - protein, 524 aa, unidentified
MDCVALTSEPKTDRRVLPQPAALEPAVADKPKGLVRNGRRDAAADNVGRAKARPRGQQARGETMAAVAAMASPAKAERGVSHTFKRQNRVFVLGHSGEPLMPCHPARARKFLAAGRARVHRLHPFTIRLTDRAGGSVQPILVKLDPGSKHTGIAIVRQDGDDQLVLHLSELDHRGATIRKHMTQRAMFRRRRRTANLRYRAPRFNNRTRRDGWLPPSLMSRVDNIQSWIGRFRRMVPIAGLAQELVRFDMQIMQNPEISGVEYQQGDLAGYECREYLLEKWGRKCAYCGAENTPLQVEHIHPKARGGSNRVSNLTLACRDCNERKGSQPIEAFLARKPEVLRRILATAKRPLSDAAAVNATRWELWRRLTATGLPVRTGSGGRTKWNRSRLSVPKSHCLDAACVGKVDAVLDWDRQPLSIKATGRGSYQRTRLDSFGFPRGFLMRRKMVHGFQTGDLVQAVVPTGKKAGNHTGRAAVRETGSFNIQAQSGTVQGIAHRHCRLLMRADGYSYFHQPRKGGVSSRP

SEQ ID NO: 13290 - protein, 502 aa, unidentified
LFLQIPQAFGCLLRLSIFPVDSSARVALSRTIPLTANTQPRETQPPVSAGETYSKRRVAYMPTVYVLNKDGKPLMPTTRCMHVRHLLKNGKARVVKSKPFTIQLLYETDDVVQPLYLGIDPGRTNIGVAVVKADGAAVFTAHLETRNKEVPKLMKKRKESRCARRTNGRRCRRQRRAKTNGTISKKCVKQTTAQNGSVSKRAKEIGVIKRHLPGCEKDVLCIGIKNKEAKFTNRARPEGWLTPTANQLLQTHINLVKKIQKFLPISDVVLEVNKFAFMQLDNPNIQKWQYQQGPLYQKGSLENAVSEMQEHHCLFCEKPIEHYHHVVPKSENGSNTIANIVGLCTEHHNLVHKDATWQKKLVKEKVGLVKKYSALSVLNQIIPALTKEMNSLFPKHFFVTNGKSTYDYRTAHGVSKDHWLDAYCIACSVLPNDVCDSNINSHVPYELKQFRRHDRRVLHKANMSRVYTLNGKTVATNRHKAIKQTTDSLEEFRQSHPGDVCK

SEQ ID NO: 13291 - protein, 413 aa, unidentified
MTSYSFVLDANGKQLAPTKEPKAWFLIRKKRAALVSKYPMVIQLKKKIQENEICKDEIRCGIDDGGLHVGIALVQKCKSKNKVVFKGTIEQRNDVKHLMEVRRNYRRYHRYHKRYRQARFDNRKSSKRKGRIAPSILQKRQATIRVINRLNKWINITNYWLEDVAIDIRALTDGYKPYRWQYQKSNRLDENIRKATILRDGGKCMECGKSNCRLEVHHIKPRRRNGSNTLDNLIILCESCHQKTEGQEELYMDRYFSLLKSSDNKNLNYAQHVMIGKMWLRKQLSGLGVLYLTSGGDTANKRIDWNIEKSHTNDAVCITDLQPDTCDIKEWAIKPMRRQSKAKTDHVLGIHHRDLVEYTFKNGETHRGYVTALYPDQKAINFQSQTKHCKKVNARKCKLLWNYSKIYWFENAS

SEQ ID NO: 13292 - protein, 263 aa, unidentified
MVYVQDINGKPMMPTTRHGRVRRLLKDKKAVVVNLCPFTIKLMYVTSDYKQEIVLGVDAGTKHVGLSATTKSKELYSSEVILRNDIVDLLSTRRELRRTRRNRLRYRKPRFNNRIKSKRPGWIAPSVKYKVDAHIRVIDNVCSILPISRIVIEVAQFDTQKINNPNISGKEYQEGDQLGFWNVREYVLARDGHKCQYCKGKSKSKILNVHHLESRKTGGDSPSNLITLCETCHKEYHKGNIDLKIKRGSSLRSRNGNYEMEVV

SEQ ID NO: 13293 - protein, 356 aa, Arthrospira sp.
  VARIANT 169: note = X can be any naturally occurring amino acid
  VARIANT 350: note = X can be any naturally occurring amino acid
  VARIANT 356: note = X can be any naturally occurring amino acid
MSNHIFVLDTNRKPLTPCKPGMARSLLKAGKASVFRRYPFTIILNKEVDANPEPLELKLDPGSKVTGIALKQGNHIIFAAELQHRGQQIKEALLSRRQLRRSRRNRKTRYRPARFLNRTRPEGWLAPSWQHRVDTLMTWVHRFRRLAPVGRITQELVRFDLQLMENPEXSGVEYQQGELQGYEIREYLLEKWGRTCAYCGAQNVLLEVEHIQPRSKGGSDRVSNLTMACHSCNQAKGNGDIRDFLSGQPDVLSRLLRQAKSPLKDAAAVNSTRWALFKALKATGLPVTTGTGGQTKFNRLRLNLPKAHWLDAACVGPVESLEVLTSKPLLILAKGHGTRQMCGTNKYGFXTRHRSX

SEQ ID NO: 13294 - protein, 423 aa, unidentified; identical to SEQ ID NO: 4062

SEQ ID NO: 13295 - protein, 440 aa, Clostridium sp.; identical to SEQ ID NO: 8484

SEQ ID NO: 13296 - protein, 512 aa, unidentified
MSTVYVLNKDGKPLMPTTRCGHVRHLLKEQKARVVTSKPFTIQLLYETDDVVQPLYLGIDPGRTNIGVAVVRTDGTAVFTAHLETRNKEIPKLMKKRKDSRRARRTNGRRCRRQRRAKANGTISKKCVKQDTAQNGSVSKRAKKIGVIKRHLPGCEKEVLCIGIKNKEAKFSNRTRPEGWLTPTANQLLQTHINLVKKIQKFLPISDVVLEINKFAFMRLDNPNIQKWQYQQGPLYQKASLEEAVSEMQEHHCLFCKKPIAHYHHVVPQSENGSDTIDNIVGLCTKHHDLLHKDTAWQKKLAKKKTGLNKKYGALSVLNQIIPALTKELSSLFPKHFFATNGKSTNDYRAAHDVSKDHWLDAYCIACSILPNDTCDKNINGRVPYKLKQFRRHDRRALHKENMSRVYTLDGKKVATNRHKAIKQTTDSLEEFRQRQPNDVCKLKVKEHHPEYRNPERNFPGCVFLVGKHTHVMQGTSGSHNGKADGYYNTNGNSYPSGKCKFVAKNKGIVFA

SEQ ID NO: 13297 - protein, 442 aa, Lactobacillus sp.; identical to SEQ ID NO: 7095

SEQ ID NO: 13298 - protein, 443 aa, unidentified
LTKDENRPSGRTTGLRAEQAEPAGIRKGDTLKVFVLNMRGKPLMPCSPAKARHMLKAGKAFVVRRTPFTIKLTIATGETKQDVTLGVDAGARHVGISATTEKEEVFASEVALRQDITGLLADRLAFRRARRNRKTRYRAPRFNNRVRSKHKGWLAPSVENRIQAHMSRIEAVCRLLPVTKIVIETASFDIQKIRNPEVEGTGYQQGDQLGFWNVREYVLFRDGHICQHCRGRSKDPILNVHHLESRKTGGDAPNNLITLCETCHKAYHAGKIKLKVKRGQSFRAEAFMGIMRWTLLDRVRKTHPKLPVENTYGYLTKHKRIALGLPKTHCADAFCIAGNLKALRRGDFLFQQQTRKHNRQIHRCSILKGGVRKLNQAPFLVKGFRLFDKVRIGGQIGFVFGRRVRGTFNIRRLDKTVIGTDINCKKLSLLETRKTFLTELRKE

SEQ ID NO: 13299 - protein, 420 aa, unidentified; identical to SEQ ID NO: 7206

SEQ ID NO: 13300 - protein, 406 aa, unidentified
MVYVQDIYGRPLMPTTRHGKVRRLLKSKKATVVNLCPFTIRLLYDTTGYKQEITLGVDTGTKHVGLSATTKSKELYASEVILRSDVVDLLSTRRELRKIRRYRLRYRKPRFMNRIKSKKRGWIAPSIRQKIDSHIRIIGFVYSILPVSKLIIEVAQFDTQKIKNPEISGKEYQEGEQLGFWNVMEYVLARDEHKCQHCKGKSKDPVLNVHHIESRKTGGDSPSNLITLCKTCHKEFHKGNIKLKVNRGESLRDAAVMSIMKWELYDELKSLYPNVKMTFGYITKYNRINHGIEKSHVSDAFVISRNFDSERLGYYYKRKLVRRHNRQIHKMKAPKVGNKRMNQSPFKVFGFRLFDKVMFQGKERFIYARRLRGIFNIRDINGENKKDISYKKLEYVSHGLISIVAG

SEQ ID NO: 13301 - protein, 512 aa, unidentified; identical to SEQ ID NO: 6489

SEQ ID NO: 13302 - protein, 414 aa, unidentified
MPCSPAKARLLLKEKKAIVVRRTPFTIQLTIATGESKQPVSLGVDAGYKHVGLSASTEKAELYASEVELRPDVSDLLSARRTLRQSRRNRKTRYRAPRFDNRIRTKRKGWLAPSVENRINAHLSRIGAILRLLPVTKITVETASFDTQLLKNPDISGKEYQEGEQLGFWNVREYVLFRDGHACQHCHGRSKDPVLNVHHLESRRTGGDSPGNLLTLCETCHKALHRREIKLKTKRGQSFRAEAFMGIMRWEVLNRLKASHPELEVHNTYGYRTKHTRIVNGIDKSHCADAFCIAGNLGAKRLGEFFFQKQTRRNNRQIHKLSILKHGLRKRNQAPFEVKGFRLFDKVVCQGEEGFIFGRRSSGSFDVRKLDGTRISAGISYKKLRLLEKRRTYLKEIRKEETLPPLPEGRSLRA

SEQ ID NO: 13303 - protein, 417 aa, unidentified
MPCHPARARQLLHSKKARVKRLYPFTIQLTHRSDGYIQPVELKFDPGSKQTGIGLVLHGKNRLSAIYAAVLTHRGQEIKSNLDSRRMIRRARRNRKTRYRQARFLNRVRSKHKGWLAPSVQSRVDNIVEWSKRFMRYTPVGFITVESVKFDMQKMENADVEGLEYQRGTLFDYEVKEYLLEKYNYSCVYCGAKNVPFEKEHVIPRSRGGSNRISNLVLSCHDCNQKKDNLPIEVFLKDNPALLKKIKAQLKSPLKDAAAVNITRKQIVKELGNLNVPVLTGTGAETKYNRVSQKYPKEHYIDALCAGTTGTKVYIPSKLKPLLIKKERRNNRQMCLVNKYGFPRGKAKGSKIVHGFKTGDIVKAVVLKGKKKGTYKGKVAVRSSGSFNVNVKQGRVEGIGWKNCVMLYRFDGYSYTY

SEQ ID NO: 13304 - protein, 431 aa, unidentified
MPNKVYVINKHGRPLMPCSPAKARHLLDAGKAKVKKRTPFTIQLVYGSSGYTQEVILGVDAGSKTIGMSASTTKEELLSAEVKPRNDVVDLLSTRREFRRAQRNRKTRYRKPRFDNRVRSKHKGWLAPSVEVKIQEHITAIRRVCGILPVSKVVIETAEFDLQLLKAIADGKPVPQGEDYQQGEMYGHYNVRQYVLWRDGYTCQCCGAHATKKKEVRLHVHHLESRKVGGDAPDNQVTLCESCHEKLHKGLIAEKDFKKRKRKSTRDATFMGIMRKTLMQRLCSELPIPVVKTRGYITKATREKLLVLPKSHTNDALAIAQGKQGFNVGYLPGIVQINKIYTIRPVRHHNRQLHKATILKGGIRKSNQTEKYVFGYRLFDKVQFNGQDCFIWGRRTTGIFTIKTINGKMIKDGISFKKLKPVEKSTGYLIA

SEQ ID NO: 13305 - protein, 418 aa, unidentified; identical to SEQ ID NO: 2425

SEQ ID NO: 13306 - protein, 420 aa, unidentified
MQYVYVLNKHGEPLMPCSPGKARLLLKEKKARVVRRTPFTIKLLYGSAGYKQPITLGVDAGSKHVGLSASTKKRELYREEFTPRNDVVKLLSKRKQYRRSRRNRKTRYRAPRFNNRVHSKHKGWLAPSVEVKIQEHITVIKRICRILPISLVRVETAEFDTQRLKAMLEGKSLPVGTDYQLGEMYDEYNVRQYVLKRDNYTCQCCGAHTTKKKTVKLHVHHLEGRQVGGNAPNNLITLCVDCHKALHAGKVKLDGKKRGKSFKDAAFMGIMRKTLMARLRDELPIPVQGTYGYITKMRREQNDIKKSHVNDARCISKHPLAEPCSVCYRTKAIRHHNRQTHKANFSKGGTRQRSQMPYVVEGYRLWDKVLYKGQECFVSGRRASGSFTLKKLDGTRISKGVTFKKLRLLEPATNYLIERM

SEQ ID NO: 13307 - protein, 507 aa, unidentified
MPEYIYVLGMDGKPQMPTRRRRHVNKLLNTGKARIAEHVPFTIQLLYENEPVLQQIMMAEDPGRTNIGAAVVGLKGQLYLPAVVETRNKEICKLMDKRRACRRASRNGERKARQRRAKRFGTMLKAGILMRKLPQYGEDGFITCHVIRNTEARFCNRKRPKDWVTPTVEHLIRTHINLVHKMQKFLPITDVAIEVNRFAFMLLDDPIVAGVDFQKGPLKGYSNVNDAVFDQQDGKCLLCGEPIEHYHHIVPRSKNGSNTLENIVGLCCHCHEAVHKDEDVQKALKDKKSGLMKKYAALSALNQAIPFIYKRLVEDFGEEHVFTCTGRETAMVRKGLGFTKTKKNQLHEVDAYCIALLALGCTDAELPTFEHVYQMTQFRRQNRANINNQRERSYYYEGESVAKNRKDRIEQKDDSLETWYQKMVQQYGEKEADRRRSILQVKKSTRHYNTPGRVMPGAVFYYKGERYIMCGQHSKGQYYRVVGDAKTNYPAKKCRIVKQNEGLVFLG

SEQ ID NO: 13308 - protein, 430 aa, unidentified
MPNKVYVINKHGRPLMPCSPAKARHLLDAGKAKVKKRTPFTIQLVYGSSGYTQEVILGVDAGSKTIGVSALTKKEELFAANVIPRNDVVDLLSTRREFRRARRNRKIRYRKPRFDNRVRSKHKGWLAPSVEVKIQEHITTIRRVYGILPVSKVVVETAEFDLQLLKAIADGKPVPQGEDYQKGEMYGHYNVRQYVLWRDDYTCQCCGAHATKKKEVRLHVHHLESRKVGGDAPDNQVTLCESCHEKLHKGLIAEKDFKKRKRKSTRDVTFMGIMRKTLMQMLCSELPIPVVETRGYITKATREKLLVLPKSHINDALAIAQGKQGFNVGYLPGIVQINKIYTIRPVRHHNRQLHKAAILTGGIRKSNQAGKYVFGYCLFDKVQFNGQDCFIWGRTTGIFTIKTINGKMIKDGISFKKLKLVEKSTSYLIA

SEQ ID NO: 13309 - protein, 544 aa, unidentified
MKQKKQKVMVYILNKKGKPLMPTTRCGHVRKLLNSKKAVVVNSNPFTIRLKYDTPNGVQDVFAGIDSGRENIGSGASNEDGDCLYLGELKTSNKSIKLKMTERAGFRKERRRHDRQNKQRKARKDHTEIQNGKDDICRATISCKSVQISYPTAEESVTHKIIRGKEGKFANRHRDGDWITPSARQLVQMHMNDLKSICKILPISHVTLERVAFDFQKLENENIKAWEYGKGKLYGYDSPEEYIHDVQNGKCLVCGKPHIDYLHHIIPRSKGGSDKVSNIAGLCYDCHYGPIGVHNCQDTQDRLPELKNEVNKQYKVSLLNSVMPVLIEEIDKFCKANSIMFSICEGHDTAKVRDMYDLQKDHCLDGFAISLVGRNVKSVDVMPDRIHQKQRYKKKSKNIIQKRNCREYYDDKKLVAVNRHKGTDQKADSLEEYMNTYAETHTTDECKKHFDSLVVKPARRTYTFHKEWRICPFHIGDKVRYEKKNKIKGNTKVDTFICEGIYFSKDENKAKVEHNKTKSKKMKFCRAIESGCIPYIDYIKLALI

SEQ ID NO: 13310 - protein, 426 aa, unidentified; identical to SEQ ID NO: 3614

SEQ ID NO: 13311 - protein, 414 aa, unidentified
MPCSPAKARLLLKEKKAIVKRRTPFTIQLTIATGETKQPVSLGVDAGYKHVGLSASTEKAELYASEVELRQDITDLLSARRALRQSRRNRKTRYRAPRFDNRIRTKRKGWLAPSVENRINAHLSRIEAVLRLLPVTKITVETASFDMQLLKNPDISGKEYQEGEQLGFWNIREYVLCRDGHVCQHCYGRSKDPVLNVHHLKSRRMGGDSPGNLITLCETCHKALHRGEITLKAKRGQSFRAEAFMGIMRSEVLNRLKASHPELEVNNTYGYRTKHARIANDIAKSHCADAFCIAGNLGAERLGEFFFQKQTRRNNRQIHKLSILKGDIRKRNQAPFEVNGFRLFDKVACQGEEGFIFGRRSSGFFDVRKLDGTRISAGISCKKLHLLEKRRTYLTEIRKEEALPPLPEGRGLRA

SEQ ID NO: 13312 - protein, 462 aa, Burkholderia sp.; identical to SEQ ID NO: 10484

SEQ ID NO: 13313 - protein, 415 aa, unidentified
MVYVVANDGQPLMPTNRYGKVYRMLRSGMAVVVKKCPFTIQLQYESERNVQPVALGIDAGSKHVGVSATTKAKVLYESDVELRGDIVKLLATRRQLRRSRRSRKTRYRPARFDNRKRKEGWLAPSIQQKIGSHLTVVANVCKILPINQIIVETASFDIQKIKNSDIQGTEYQQGEQMDFWNVWEYVFFRDGHTCLCCKGRSKDKILNVHHIESRKTGGNAPNNLITLCETCHKGYHNGTVILPKNIKHGMQFKDAAFMGIMRWTFYNTLKEQYEPDIPVSMTYGYLTKNTRIEHGLPKEHYIDARCISGNPDAVSDGTYYYQKKVRCHNRQIHKQTILKGGIRKSNQAEYLVKGYRLFDEVRYQGREYFIFGRRKSGFFDIRTLSGEKVNKGSISVKKLTFADTRKNYLIERRTV

SEQ ID NO: 13314 - protein, 515 aa, unidentified
MEYLDFTLVVDKNDKPCVPISNGRAGYLLRNNKAKIINHDPLVIKRKDDYQSDLENRDIFELKIDSGYLNIGFSVSDNYHEYLAGQVELLKGMSDRLTNRNGYRRTRRSRIRYRKNKNVDYKTVHNPTYKNGNEEGWFAPSIQHKIDSHIRLIDKIASWVPVDKVIVEVAKFDIQMIKALADGKEISGKDYQNGEMKGYENAAAYVRDRDKHTCRLCGANKNVVIEVHHIQPRSKGGTDKPSNLISLCHSCHRKVHSNNNDNKYFEKVKNMKSSDTYKDSTYMNMVRWELFERLSGKYDVKVGYGYQTKINRRNAGLRKFHYTDAVCINDYKDVTLTENIYIVDQKRCNDRSMETFSDAKYIDVRDGKEKSGNTLYKERLPNAPSKRVTQKEYINNMRQFRGKKIKPGKRTFVCNSYCLKCGDLIYISSGTHKGNIAEVESMQKLPNGNFKIRFTYKAQTVKYPSINIKPEEYELLRSNLLDKVKIVRTRRGMIWRKYNRLEYEATHTDQEGMAV

SEQ ID NO: 13315 - protein, 413 aa, unidentified; identical to SEQ ID NO: 2636

SEQ ID NO: 13316 - protein, 456 aa, Halomonas sp.; identical to SEQ ID NO: 2736

SEQ ID NO: 13317 - protein, 475 aa, unidentified
MVAVVTSTGKPLMPTSAYRARKLLKKGRAVIFKYRPYFTIQLVDRADGEVQEVEYKSDTGSVHVGISVCTEKKELLSEQRDLLENEPEHHNDRKKNRRTRRNRKRYRKPRFDNRKKKPQEGHEKWLPPTLLHKMEVQVRLFREFCRVVPVTSACFEMGKFDTQALKAVSKGEPVPEGEGYQNGERYGTDTLRAAVFLRDGHTCRFCGRSVKDGAILHVHHVGYWKGDRTNRPANLASACEQCHTPANHGKNGILYGKEPEFKTLKDASYMTSVRWIMLDEIKKAAPGVQVSVTYGVTTKRKRQELHLPKSHVNDAFSMASFHPKKRSDTEYWKKIPRHDRVLQKFYDAIYLDTRDGSEKKGSELSNGRISRNHKKDSENLHQYRGHKVSKGHNSIRRGASSLKPGSIVMYKGEKMTVHGTHTRYVTDKDGKTVKKVNVQFTRPASDGKKSASLEKCTPVSRVYNTGWKRYWPDKK

SEQ ID NO: 13318 - protein, 418 aa, unidentified; identical to SEQ ID NO: 4950

SEQ ID NO: 13319 - protein, 452 aa, unidentified
MERRHTVPAFTVDKYGRPGMPTFNVKKIRKLLKSGKAEVFCYRPFTVKLLYADSLDTQPVELCIDAGDRHIGISVKSEKHEFVHAQYNPLPDEKERHDSRRQYRRARRSRKRYRRPRFDNRKKDKGSFAPSVEHKKDLHISIALMYRKVCPLTEITVETASFDTQALEAIERGLPLPEGKGYQQRPRYRLNTLRDAVFFRDGHKCRLCGRTDRPLRVHHLGYWKGDHTDRMSGLATLCTDCHTSANHKKGGALYGWEPGTKPMRGAAFMNQVRYQVVKDLKEKTGLPVHVTFGSATKTARQVLCIEKTHANDAFCMGSFHPKHRQKEEVYIKRRRNNRILSKFYDARYMDIRDGKVKSGQELSCGRTKRSESRHSEKDLRMYRGHKARKGRVSVRRQRYSIQPGTLLMYRGRKVTAKGVHCRGARVMLDTGKSAAVSRVSVVRYPGGWIRTA

SEQ ID NO: 13320 - protein, 515 aa, unidentified
MTALEEKLSKTEYIYVLGFDGKPQMPTRRKRHVLKLLKTGRARIAEDIPFTIRLTYRNAPVLQPVTLAEDPGRTNIGAAVLSPLGDLLFAAVIETRNKEIKKLMTDRQKSRQASRRGERKARQRLAKRYGSMVKSGMVMRKLPMYAADRFVTCKFIRNTQARFCNRKRCPDWITPTVQHLMQTHLNIIRKISRYLPVTDIAFEVNRFAFMHMENPEAMGVDFQNGPLKGYGDVKEAIRTQQHGKCLMCKKPISHFHHIVPRSRGGSDTIQNLAGLCPECHTKVHTDTAFRKDFDEKKSGQLKKYGALSALNQAVPFICKKLLEEYGEEHVHFCRGLDTSLIRTALGFEKTKKNQMHEVDAYCIGLAALEVNEVETPAFDHTFQIRQFRRQDRSIIHHQTGRSYYQGKEKVAQNRKPGFEQKTTALSQWYKEQVRIHGEKEAEKLRSQLRVEKSCRHYNDMDRFLPGAVFLYEGKRYVLSGRITNGKYLRACGQGMKNFPAAECTFIRHNAGLVFI

SEQ ID NO: 13321 - protein, 451 aa, unidentified; identical to SEQ ID NO: 3199

SEQ ID NO: 13322 - protein, 419 aa, Anoxybacillus sp.; identical to SEQ ID NO: 5328

SEQ ID NO: 13323 - protein, 498 aa, unidentified; identical to SEQ ID NO: 2448

SEQ ID NO: 13324 - protein, 477 aa, Massilia sp.; identical to SEQ ID NO: 12758

SEQ ID NO: 13325 - protein, 470 aa, unidentified; identical to SEQ ID NO: 2925

SEQ ID NO: 13326 - protein, 421 aa, Lactobacillus sp.; identical to SEQ ID NO: 5881

SEQ ID NO: 13327 - protein, 414 aa, unidentified
MPCSPAKARLLLKEKKAIVVRRTPFTIQLTIATGETKQPVSLGVDAGYKHVGLSASTEKAELYASEIELRQDITDLLSARRELCRARRNRKTRYRAPRFDNRIRTKRKGWLAPSVENRINAHLSRIEAVLRLLPVTKITVETASFDLQLLKNPDISGKEYQEGEQLGFWNIREYVLCRDGHVCQHCYGRSKDPVLNVHHLESRRTGGDSPGNLVTLCETCHKALHRGEITLKAKRGQSFRAETFMGIMRWEVLDRLKASHPKLEVQNTYGYRTKHARIVNGIAKSHCADAFCIAGNLGAERLGEFLFQKQTRRNNRQIHKLSILKGGIRKRNQVPFEVKGFRLFDKVACKGEEGFIFGRRSSGYFDVRKLDGTHISAGISYKKLRLLEKRQTYLIEIRKEEALPALPEGRGLRA

SEQ ID NO: 13328 - protein, 414 aa, unidentified; identical to SEQ ID NO: 2588

SEQ ID NO: 13329 - protein, 554 aa, Streptomyces sp.; identical to SEQ ID NO: 9809

SEQ ID NO: 13330 - protein, 544 aa, unidentified
MKQKKQKVMIYILNKKGKPLMPTTRCGHVRKLLDSKKAVVVNSNPFTIRLKYDTPNGIQDVFAGIDSGRENIGSGASNEDGDCLYLGELKTSNKSIKIKMTERTGFRRERRRHDRQSKQRKAKKDHTEIQNGNDDICRTTISCKSVQISYPVAEESVTHKIIRGKEGKFANRHRDEGWITPSARQLVQMYMNDLKSMCKILPINHVTLERVAFDFQKLENENIKTWEYGKGKLYWYDSPEEYIHDVQDGKCLVCGKPHIDYLHHIIPRSKGGSDKVSNLAGLCYDCHYGPMGVHNCRETQDRLPELKNKANKQYKVSLLNSVMPVLIEEMDKFCKANSIIFSICEGHDTAKVRDMYDLQKDHCLDGFAISLVGRNVKSVDVMPDRIYQKQRYKKKSKNIIQKRNCREYYDGKKLVAVNRHKGTDQKADSLEEYMNTYAETHTADECKKHFDSLTVKPARRTYTFHKKGCICPFHIGDKVRYEKKNKIKGNTKVETFICESIHFYKDENKAKVEHNKTKSKRMKFCRVLEAGCTPYIDYRKLALM

SEQ ID NO: 13331 - protein, 430 aa, unidentified
MYVYVINKHGEPLMPCSSRKARTLLNNKKACVVKRTPFTIKLLHGSAGYKQPITLGVDAGSKHIGLSVSTETHEIYREEFAPRNDVVDLLSTRREFRRARRNRKTRHRAPRFNNRVHSKHKGWLAPSVEVKIQEHITVIKHVCQIMPISLVRVETAEFDTQRLKAMIAGKPLPVGTDYQLGEMYDEYNVRQYVLKRDNYTCQCCGAHATKTKQVKLHVHHLESRKVGGNAPNNLITLCPICHKAIHEGKKALGKKKRGKPLRDAAFMGIMRKTLLARLREELSIPVQQTYGYVTKMLREKNNLLKSHMNDALCIAKHPKAAPCENCYRSKAVRHHNRQIHKATILKGGIRKNNQAPYIVKGFRLWDKVLYNRQECFISGRRATGYFALKKLDGTVVTTGASYKKLRLLETTKNYLRERLTIKSQPKCVER

SEQ ID NO: 13332 - protein, 470 aa, Anaerostipes sp.; identical to SEQ ID NO: 2825

SEQ ID NO: 13333 - protein, 406 aa, unidentified; identical to SEQ ID NO: 6445

SEQ ID NO: 13334 - protein, 515 aa, unidentified
MATVYVLNKDGKPLMPTTRCGHIRHLLKEKKARVVRTNPFTIKLVYETDDVVQPLYLGIDPGRTNIGVAVVKVDGTAVFTAHLETRNKEIPKLMAKRKEHRQGRRHYRRCKRQRRAAAHGTLSKKCKKQDTAQGGNISKRAQTIGVFERNLPGCEKSVLCIGIKNKEARFNNRVRPARWLTPTANQLLLTHVNFVKKICKFLPISDVVLEINKFAFMALDNPNIQKWQYQQGPLYQKGSLENAVSEQQDHHCLFCEKTIEHYHHVILRSENGSDTIANIVGLCAEHHDLIHKDDKLKEELAKKKQGLNKKYGALSVLNQIIPALTYELGSRFQGHFYVTTGKSTYDYRAAHSVSKDHWLDAYCIACSVLPDGCFDNTINSRVPYELKQFRRHDRQVCQQQNVKRKYYLDKKLVATNRHKAIKQETDSLEEYRNNGGTTDKLVVKEHKPTNKRLNRILPGALMAANGKLNVMVASRGLHNGIPDNYVFDNSSKAKPSKCTLINKNKGIVFVSNSVS

SEQ ID NO: 13335 - protein, 431 aa, unidentified; identical to SEQ ID NO: 9814

SEQ ID NO: 13336 - protein, 413 aa, Blautia sp.; identical to SEQ ID NO: 9603

SEQ ID NO: 13337 - protein, 414 aa, unidentified
MPCSPAKARLLLKEKKAIVVRRTPFTIQLTIATGETKQPVSLGVDAGYKHVGLSASTENAELYASEVELRQDVSDLLSARRALRQSRRSRNTRYRAPRFDNRIRTKRKGWLAPTVENRINVHLSRIETVLRLLPVTKITVETASFDTQLLKNPDIAGKEYQEGEQLGFWNVREYVLFRDGHVCQHCHGRSKDPVLNVHHLESRRTGGDSPGNLITLCETCHKALHRGEIKLKAKRGRSFRAETFMGIMRWGVLNRLKASHPKLEVHNTYGYRTKHARISNGIAKSHCADAFCIAGNLGAERLGEFFFQKQTRRNNRQIHKLSILKGGIRKRNQAPFEVNGFRLFDKVACQGEEGFIFGRRSSGFFDVRKLDGTRISAGISYKKLHLLEKRRTYLTEIRKEEALLALPEGRSLRA

SEQ ID NO: 13338 - protein, 406 aa, unidentified; identical to SEQ ID NO: 2703

SEQ ID NO: 13339 - protein, 466 aa, unidentified; identical to SEQ ID NO: 3943

SEQ ID NO: 13340 - protein, 378 aa, unidentified; identical to SEQ ID NO: 6181

SEQ ID NO: 13341 - protein, 576 aa, unidentified
MDFVLIVDKNSKPCIPIKNGKAGYLLREHKAEIINHEPLVIKRTDDYNSDLENRDIFELKVDSGYLNIGFSVSDNEHEYIAGQVEMLNGMSNRLLERKSMRSFRRNRLRYRKNKNIDYKTVHNPTYKNGNEDGWFAPSIVHKMETHIRIIEQLKQWVPIDKVIVEVANFDIAAMDAYLKDGTILNGKDYQNGEMKGYENVVSYVRARDNYSCYFCNKKKKKDGTLKEKPKRIEVHHKIPRSWGGTNNPGNLICVCQGCHQKIHSNNNNNKYFKELLEQALQENTFKDSTYMNIVRWELLNRLTEKYPELDIEAEYGYNTKINRKEAGLRKFHYNDAVCIKEFKNITLSKKVFIVEQKRCNDRKMESFADAKYIDSRDGKKKKGNDLKVIRHSTKSKRSTNKEHIDNERIFRKEKVSKGKIQFECHSYCVKPGDLIYIKEGKHKGKIAEVSTIQIVGEKIPNPIIDINEINNKKIDFNRELKKRKTTSNMTDYQKRFAKYQIRFTYKESDADGPSITLTQKEYEKLKENKSDRVKIIRTRRGLVWREYDRLTYEAENMDQEEKKLEVKNKKQELKAA

SEQ ID NO: 13342 - protein, 416 aa, unidentified
MVYVLDKNGQPLMPTDRHRKVRLMLQSGQAKVIKRCPFTIQLNYDSGHQTQEISLGIDAGSKHIGVSTTTKIKVLYEVDVELRNDIVDLLSSRRELRRGRRNRKTRYRQAKFNNRRRGNGWLAPSIRQKIGTHLTVVENICKMLPISRIMVETASFDIQKIKNPDIQGAEYQQGDQLGFWNNREYVLFRDNHTCQCCKGKSKDKILNVHHIESRKTGGNAPNNLITLCETCHTGYHKGTVQLPKAIKRGMRFKDAAFMGIMRWAFYEALKQQYEPVGTPVHNTYGYITKHTRIAYNLPKEHYVDARCISGNPEASSNGEYYYQKKVRCHNRQIHKLTVLKGGIRKQNQATYLVKGYRLFDKVSYQGKGYFVFGRRQSGFFDIRTLSGEKVNKGSLSCKKLKFIATRTYYLTERRAV

SEQ ID NO: 13343 - protein, 427 aa, unidentified
MPNKVYVINKHGRPLMPCSPAKARHLLDEGKAKIKKRTPFTIQLVYGSSGYTQEVILGVDAGSKTIGMSASTTKEELLSAEVKPRNDVVDLLSTRREFRRARRNRKTRYRKLRFDNRVRSKHKGWLAPSVEVKIQEHITAIRRVCGILPVSKVVVETAEFDLQLLKAIADGKPVPQGEDYQKGEMYGHYNVRQYVLWRDDYTCQCCGAHATKKKEVRLHVHHLESRKVGGNAPDNQVTLCESCHEKLHKGLIAEKDFKKRKRRSTRDATFMGIMRKTLMQRLCSELPIPVVKTRGYITKATREKLLVLPKSHTNDALAIAQGKRGFNVGYLPEIAQIDKIYTIRPVRHHNRQLHKAAILKGGIRKSNQTEKYVFGYCLFDKVQFNGQDCFIWGRRTTGIFTIKTINGKMIKDGISFKKLKLVEKSTN

SEQ ID NO: 13344 - protein, 419 aa, unidentified; identical to SEQ ID NO: 4877

SEQ ID NO: 13345 - protein, 466 aa, unidentified; identical to SEQ ID NO: 2809

SEQ ID NO: 13346 - protein, 415 aa, unidentified; identical to SEQ ID NO: 7357

SEQ ID NO: 13347 - protein, 512 aa, unidentified
MSTVYVLNKDGKPLMPTTRCGHVRHLLKKQKARVVASKPFTIQLLYETDDVVQPLYLGIDPGRTNIGVAVVKTDGTTVFTAHLETRNKEIPKLMQGRKKARRARRTNGRRCRRQRRAKANGTISKKCVKQTTAQNGSVSKRAKKIGVIKRHLPGCEKKVLCIGIKNKEAKFSNRTRPEGWLTPTANQLLQTHINLIKKIRKFLPVNDVVLEINKFAFMQLDNPNIQKWQYQQGPLYQKASLEEAVSEMQEHHCLFCKKPIAHYHHVVPQSENGSDTIGNIVGLCTKHHDLVHKDTSWQEKLAKKKTGLNKKYGALSVLNQIIPALTKELSFLFPKHFFATNGKSTHDYRAAHDVSKDHWLDAYCIACSILPNDTCDKNINGRVPYKLKQFRRHDRRALHKENMSRVYTLDGKKVATNRHKAIKQTTDSLEEFRQRQPNDVCKLKVKEHHPEYRNPERNFPGCVFLVGKHTHVMQGTSGSHNGKADGYYDTNGNSYPSGKCKFVAKNKGIVFA

SEQ ID NO: 13348 - protein, 431 aa, unidentified; identical to SEQ ID NO: 7729

SEQ ID NO: 13349 - protein, 431 aa, Petrotoga sp.; identical to SEQ ID NO: 11592

SEQ ID NO: 13350 - protein, 413 aa, unidentified; identical to SEQ ID NO: 3220

SEQ ID NO: 13351 - protein, 396 aa, unidentified
  source 1..396: note = Clostridiaceae bacterium UBA4819
VKHLLKDGKAKVVRRTPFTIQLLYDSPEYTQPITLGVDAGSKVVGLSATTEKKELFVSEITLRDDITELLSTRRQNRRARRNRLRYRMSRFLNRTSSKKEGWLAPSVKHKVDSHLKVIENVHRILPISRIVIETASFDIQKIRNPEITGAQYQQGEQLGFWNTREYVLWRDNHECQHCHGKSKDRILNVHHKESRKTGGDSPSNLVTLCETCHKNHHAGRIQLKLTSNKSYRHASFMGIMRWYVYNRLQELYPDVSMTYGYITKNNRIRNSIEKTHSADAYCISGNMSAVRSNEIYLQAIKRKHNRQIHKANFLKGGKKKLNQSQYEVKGFRLFDHVRYKEEDCFIFGRRASGYFDLRKLDGTVVHRSANYKELKLLKRQNVILIERKGCNGVLLS

SEQ ID NO: 13352 - protein, 465 aa, unidentified
MSTCVCVLSNSGERLMPTIRLGKVRQLLKDGKAKIVKHHPFTIQLLYDSKTNTQPIEICEDVGYNYIGISVKSQSHEYVSAQYDTLQDEKACHDSCRKLRRTRRNRLRYRKPRFDNRKRGEGWLAPSLRHKKELNVNVVKMYCAVMPITHATVEVGSFDTMLVKAIQEGKAIPEGADYQKGPRYNLATLREAVFYRDNYTCQVCGRKVADGAILHMHHMFYWKGRHGDSLNELLTVCEKCHTPANHQKSGKLYGFGENVKFADLSGAAFMNAVRWQIVNELYAAFGKDFVTVTYGAMTKEKRIALRLEKSHNNDAYAMGEFHPNCRCTFEHYEKVRRNNRTLEKFYDSRYIDIRTGEIATGKELFNGRINRNHKKDSGNLHRYRGKRTYAGHRALLRKKVNLNPGDLVSLNGEVLVVHSTHTNKKGAVNVEFKTPGKSGQKSASLKKLKIVKAADSMHSAWEKIS

SEQ ID NO: 13353 - protein, 430 aa, unidentified; identical to SEQ ID NO: 7436

SEQ ID NO: 13354 - protein, 436 aa, unidentified
MFWLIAKKHATFYERSHIMVYVLNKDGQPLMPTTRYGKVRRMLNTKQAKVVKRCPFTIQLLYETTDIVQPISLGIDAGSKTIGTSVTTETNELYASEVKLRTDVVKNLSSRREYRRSRRNRKTRYRKARFDNRKRNEGWIAPSIQNKIDTHLTVIDKITKILPVSEIHVEVASFDIQKIKNPDIEGVEYQQGEQLNSYNIREYVLFRDDHTCQCCKGKTKDKILNVHHIESRKTGGNAPNNLITLCKTCHDGYHKGMVQLPKTIKRGMSFRDATFMGIMRWAFYNKLKEIYPNVSLTYGYITKNNRIKYGLTKEHYNDAYCITGNFNAKPLDTFIYQKKVRCHNRQIHKANFLKGGRKKLNQASYLVHDFRLFDKVRYQDEDCFIFGRRSSGYFDIRKLDGTVIHRSASYKKLELLEARKNYLQEERSRQFFSPIN

SEQ ID NO: 13355 - protein, 424 aa, unidentified
MRVFVFNMRGVPLMPCTQRKARILLKEGKAVIYKYNPFTIQLTHATGENTQDCHVGIDTGAKHVGVAITSEGKVLFKGEIELRQDVKSNLDTRRIYRRSRRNRKTRYRQPRFLNRRKADKWLPPSLQNRLDHTFHWIDTLRGLVPSPTLHIEVGKFDTAKMIDPEIHGVDYQHGQTYGFFDERYYVFARDNYTCQCCGKSKGKILQTHHIIYRSNGGTDRTDNLITVCTDCHTSKNHQKGGILYKWQEQHKKVRQYKEPPFMNTLRRRIFAKYPDAAITYGSETTPKRKEKGLDKTHYNDAIIISGVETISENPDEWLFIRQFRKKKRSLHEGTPRKGRKEPNRTQKRNSKNTPYYRGYHLNDKVRVLGKTGYISGFTGGAAYVKDSDNQYITLPNKSYKQVGISNLQHVCHNNNWQYITKTTA

SEQ ID NO: 13356 - protein, 471 aa, Acidithiobacillus sp.; identical to SEQ ID NO: 3868

SEQ ID NO: 13357 - protein, 416 aa, unidentified; identical to SEQ ID NO: 7280

SEQ ID NO: 13358 - protein, 427 aa, unidentified
MKQGNRVFVLNMRGEPLMPCSQRKARVLLKEGKAIINTYNPFTIQLTYATGETKQDCHIGVDTGAKHIGIAVTSEDKVFYKAEVELRQDVSSNLDSKRIYRRGRRSRKCRYRKPRFLNRKRTDKWLPPSLQNRINHTFAWIDEFSVLVPSPVLHIEVGKFDTAKMINPDIHGVDYQLGQTYGFFDERYFVFARDNYTCQVCGKSKGKILQTHHIIYRSNGGTDRVDNLITVCTDCHTSANHKKGGILYKWQAEHKKVKQYKEPPFMNTLRRRIFDKYPNAIITYGSETTLKRKEIGLEKTHYNDAIVISSITAIKANPNEWLLIRQFRKKKRSLHESTARKGRKEPNRTQKRNRKNTPYYKGFWLNDKVSVLDQVGYITGFTSGGAYIKNKNDEYITLPGKSYKQVGISNLRLLSHNNNWQYIRNAV

SEQ ID NO: 13359 - protein, 419 aa, unidentified
GQPLMPCSPAKARHLLKAGKAVVKRRTPFTIQLRIATGETKQNVTLGVDAGAKHVGLSATTEKEEVFASEVELRQDITGLLAARLSLRRDRRHRKTRYRAPRFLNRVRSKHKGWLAPSVENRIQAHMSRIDAVCRLLPVTKIVIETASFDIQKIKDPSVEGTDYQQGDQLGFWNVREYVLFRDGHVCQHCHGRSKDKILNVHHLESRQTGGDAPNNLITLCETCHKAYHAGKIKLKVKRGQSFRAEAFMGIMRWTLLDRVRKAHPGLPVENTYGYLTKHTRITHGLPKTHCVDAYCIAGNLKAVRRGVYLHQRQMRKHNRQIHKFTVLSKRLEDGTKIGYRKLNQSPYLVHGFRLFDKVRCLVQIGFIFGRRSSGYFDVRRLDGVKLSSGISYRKLTLLEKRSTYLTELRKEDGASSPV

SEQ ID NO: 13360 - protein, 440 aa, Clostridium sp.; identical to SEQ ID NO: 5468

SEQ ID NO: 13361 - protein, 472 aa, unidentified
VVDNRLLSIKPLINIGEGVIYSSICTGLSLQTYQKRKEVPCMVYVLDINGQPLMPTTRHGKVRRLLNSHLAKVVKRCPFTIQLLYQSTKEIQPVSLGVDAGSKHIGMAATTEKKVVYQEELSPRNDVVKLLSARRTLRRTRRNRKTRYRKPRFNNRVHSKHKGWLAPSVEVKIQEHITAIKRICQILPISEIHVEISEFDLQRLKAMEEGRTLPVGTDYQLGEQYDFYNTRQYVLHRDGYTCQCCGTHDNNIKLHVHHIESRQTGGNAPSNLITLCEHCHKALHKGKFELPKGKKRGKTYRDATFMGIMRKTLLERLKKEIDVPVAGTYGYITKYWRERAGLEKSHINDAICISKYPYAKPLDTYYLTKVVRNHNRQIHKSNFSKGGIRKRNQAPYLIKGFRLFDKVLYQGKEYFIFGRRATGYFDIRTLDGTKVNKGSISYKKLRIQDTAKAYLKEARAIPHMNKFTCVLA

SEQ ID NO: 13362 - protein, 456 aa, Halomonas sp.; identical to SEQ ID NO: 8582

SEQ ID NO: 13363 - protein, 440 aa, unidentified
  source 1..440: note = Clostridia sp.
MPTTEMRARKLLKRGRAEIIKYRPFTIRMLDREDGAVQPIEYKCDTGYQTIGISICSAKREFFSEERTLLCGEKERHDDRRKYRAGRRSRKTRHRKPRFSNRRGMICEDGFAPSMRNRRDQHIRLFEIYRAVVPITDAVFEMSEFDTQVLAAVEAGQPLPQGKDYQHGHRYGYNTLRAAVFARDKHTCQVCGRSIAEGAVLRVHHLGFRSGDHTDRMGNLLTVCTNCHTPRHHKKGGKLWDLKPSIKPFTGATFMTSVRWDIIRRLKDAAPDVEFHFVYGAATKEARHRLHLRKTHANDAWAMGRFHPKHRTKTVYWQKLRRNNRILAKFYDAVYIDLRDKKRKKGAELPCGRTRRCESRHGTGNERKCRANKVKKGRVSLRRKRYPIRPGDTVWFGRERFEVRGVQHYGEYVALRGQKKSCPVSDVTKICHAGGWLKTR

SEQ ID NO: 13364 - protein, 419 aa, Moorena sp.
MQNYVFVIDTNFRPLNPMSPKKARRLLDKGKAAVFRMYPFTIILKTAIDNPLLLSCQIKIDPGSKFTGFSLVQNNQVIWAMELQHRGSLIKKKLESRRAVRSRRRGRTTRYRKPRCLNRRRSENWLPPSLEHRILTIQTWVERLIKFAPVSEIWIERVKFDTQKISNPEISGIEYQQGSLAGYEVREYLLEKWDRECTYCGKKDIPLQIEHIQPQSKGGSNRVSNLCLSCDKCNQKKGNKPIEDFLKNKPGLLQKIKSFAKKPLKDSAAVNATTDKLVKVMSRLLPVVTGTGAQTKYNRIRLGLPKQHWIDAACVGEVEFLELLTNQPLLVICKGQGGRQKAALNKYGYPIRHNPLKPIKGWCSGDIARNVLTGDFGRVNPRSSSNSFGFTVEGHKLVNIHCKNLMKVHRKDGYNYSFS

SEQ ID NO: 13365 - protein, 442 aa, Streptomyces sp.; identical to SEQ ID NO: 11564

SEQ ID NO: 13366 - protein, 442 aa, unidentified; identical to SEQ ID NO: 6360

SEQ ID NO: 13367 - protein, 414 aa, unidentified
VLNIDGQPFMPTERHGKVRRLLKSGKAKVVKRCPFTIQLLYETTNFKQPVTLGVDAGSKHIGLSATTEQKVLYEADVELRNDIVDLMSTRREARRTRRNRKTRYRKIRFDNRAKPKGWLAPSVNQKIGTHLTVIRKLHEILPISKIIVETASFDIQKIKNPDISGEDYQQGDQLGFWNVREYVLFRDNHTCQCCKGKSKDKILNVHHIESRKIGGNAPNNLITLCETCHSGYHDGTVRLPKTIKRGMKFNDAAFMGIMRWTLYDMLKILYPNVSMTFGYITKNTRILSNLPKEHYIDARCISGNPLAKPLGYYFYQKKVRCHNRQIHKFSISKGGNRKRNQAEYEVHGFRLFDKVEYQNSEYFIFGRRKTGYFDIRDLQGNKVNRGNVSYKKLNLMEKSKSYLTERRKSIPSLI

SEQ ID NO: 13368 - protein, 442 aa, unidentified
MSTSVFVLDKKHRPLMPCRPARARRLLRVGRARVVKRFPFVIRLVDRTVEQSEVQPVLIKLDPGSRETGAAVVRDDEKKRHHALAFFVIKHRGGAIRDALKARSAFRRRRRSQNLRCRSPRFLNRVKPKGWLPPSLRHRVETALSFVRRMCRYLPVSGIAAELVKFDSQKLQTPEVSGIEYQQGTLFEYEVREYLLEKFGRKCVYCGAEGVPLNIDHVVPRAKGGSNRVSNLVLACMSCNQKKGARSLEDFLKGKPKVLARVRRELKTPLRDAAAVNATRWVLFNELKATGLPVETGSGALTKLNRHAFGVEKEHWLDALCVGRLNGVVTRKGLNVLEIRCMGRGSRQRTRLTKYGFPRGYLMRQKCVHGFATGDMVEANVPKGKKAGLWRGRVAVRVSGSFNIQTPKGVIQGVGWKHCRLISHNDGYGYAWLGHAPHSSPA

SEQ ID NO: 13369 - protein, 437 aa, unidentified
MNSHGHWQEGQFSERKAAEMLNNQKEYAFVLDAEGKKLDPTIVQNAWRLVRQKKATLIAKRPMTIQLKKVIDNPNDDEIRIGIDDGAKHVGLALVQKCKTKNKVIFIATMEQRNDVHKLMEQRKNYRRYRRYWKRYRKARFSNRVSVRRKGRIAPTILQKRQAVVHIFDRLNKYIRIDSIYLEDVAIDVRVLTDEKRLYSWQYQQSNRLDENLRKATILRDNCKCQLCGKRNCRLEVHHITPRRMNGANTIGNLITLCSECHSNVTGREIEFAEQLYSKIGKKKNNVSLQYASHVMVGKTWLREELSKRVSVLLTTGGDTANKRIDWNLEKSHEIDAICITNLEPESVGVKSWNIKPLRHQRKTMKVKEILGFRHRDIVCYTFKNGEYHEGYVTALYPSEGKQKEGLNFLSPTKHCKRVNPKKCQRLDRPDKFLWLV

SEQ ID NO: 13370 - protein, 512 aa, unidentified; identical to SEQ ID NO: 6763

SEQ ID NO: 13371 - protein, 433 aa, unidentified
  VARIANT 343..413: note = X can be any naturally occurring amino acid
  source 1..433: note = Cyanobacteria bacterium UBA12227
MSKPNYVFVVDTNRKPLTPCKPSIARKLLTVGKAKVFRLYPFTIILNKEVVDTPEPLTLKIDPGSKVTGLAILLDSNLIWVESKSNRGQSIKASLESRRALRRGRRNRHTRYRQARFLNRTRSKGWLAPSLQHRVKTTITWVNRLLRCSPIKVVFQELVRFDLQQIENPEISGVEYQQGELAGYEVREYLLNKWDRKCAYCGAKNVPLQIEHIYPKAKGGSNRISNLCLACEPCNIRKGTKDIKVFLAKKPDVLKRVLAQAKHPLKDAAAVNSTRWTLFNQLKETGREISTGSGGLTKFNRTRLELPKTHFFDAACVGDTPELLVLANQPLNIKATGHGSRQXXXXXXXXXXXXXXXXXXXXXXXXXXXXXXXXXXXXXXXXXXXXXXXXXXXXXXXXXXXXXXXXXXXXXXXSWFKANVSNRQVWFSLSISA

SEQ ID NO: 13372 - protein, 459 aa, Petrotoga sp.; identical to SEQ ID NO: 6495

SEQ ID NO: 13373 - protein, 416 aa, unidentified
MVYVLDKNGQPLMPTDRHRKVRLMLQSGQAKVIKRCPFTIQLNYDSGHQTQEISLGIDAGSKHIGVSATTKIKVLYEADVELRNDIVDLLSSRRELRRGRRNRKTRYRQAKFNNRRRGNGWLAPSIRQKIGTHLTVVENICKILPISRIMVETASFDIQKIKNPDIQGAEYQQGDQLEFWNVREYVLFRDGHICQCCKGKSKDKILNVHHIESRKTGGNAPNNLITLCETCHTGYHKGTVQLPKAIKRGMRFKDAAFMGIMRWAFYEALKQQYEPVGTPVHNTYGYITKHTRIAYNLPKEHYVDARCISGNPEASSNGEYYYQKKVRCHNRQIHKLTVLKGGIRKQNQATYLVKGYRLFDKVSYQGKGYFVFGRRQSGFFDIRTLSGEKVNKGSLNCKKLKFIATRTYYLTERRAV

SEQ ID NO: 13374 - protein, 442 aa, unidentified; identical to SEQ ID NO: 4418

SEQ ID NO: 13375 - protein, 453 aa, Erysipelotrichaceae sp.
MSVAVLSSTGRKLMPTSNYRARKLLKSHRAAIECYRPIFTIRLTDRKEGNTQPIEYACDTGYQHVGVSIKSEKHEFVHAQYDMLSDETERHNDCRKYRRTRRNRLRYRKPRFDNRSKKNKEMPPSLRHRKENQISLFESFCKVMPITSATFEMGKFDTQLLQAIANGKPLPEGKDYQQGSKYLYQTEREAVFGRDHYTCQVCGKSVKDGVILNTHHIGYWKGYRSNRISNLLTVCEHCHTAKNHRPGGKLWGLEPKSTNLAPAAYMSTVRWAMYRDLVLMHPEIDIHIQYGAKTSVTRKSLHLAKTHANDAYCIGSLRPKHRAAELVYQKKRRNNRILSRFYDAKYIDIRDGKKKSGSALSCGRTNCRESRRSDKNQRIYRGKKCSSGRTSIRKRRYAYQPGDAILFRSQRFAVNGAHCNGTRVILNTGKSVKTADLTCIKKEGGWRFLPAQA

SEQ ID NO: 13376 - protein, 420 aa, unidentified; identical to SEQ ID NO: 8472

SEQ ID NO: 13377 - protein, 372 aa, unidentified
MVYVLSQNGQPLMPTENHAKVRVFLKQGKAKVVQRCPFTIQLLYESTTHTQKINLGIDAGSKTIGISATTDSKVLYEAEVVLRNDIVELLSGRRALRRSRRNRKTRYRKPRFDNRKKPDGWLAPSIRQKIETHVTVVENITKILPMTKIIVETASFDIQKIKNPEIEGAEYQHGEQLDFWNVREYVLFRDGHTCQCCKGKSKDNILNVHHIESRKTGGNAPNNLITLCETCHQAYHKGVITLPKEIHRGMRFRDAAFMGVMRWAFYDRLKELYNLLGVEVINTYGYITKNTRITYDLPKEHYVDARCISGNPAAKPMDYYYLQKKVRCHNRQIHKCKINKGGTRKRNQAAYEVKGFRLYDQVLWKGQKCFIF

SEQ ID NO: 13378 - protein, 512 aa, unidentified
MSTVYVLDKDGKPLMPTTRCGHVRHLLKEQKARVVTSKPFTIQLLYETDDVVQPLYLGIDPGRTNIGVAVVKTDGTAVFTAHLETRNKEIPKLMQGRKKARRTRRTNGRRCRRQRRAKANGTISKKCVKQTTAQNGSVSKRAKEIGVIKRHLPGCEKDVLCVGIKNKEAKFSNRTRQEGWLTPTANQLLQTHINLIKKIRKFLPISNVVLEINKFAFMRLDNPNIQKWQYRQGPLYQKASLEEAVSEMQEHHCLFCKKPIAHYHHVVPQSENGSNTIGNIVGLCTKHHDLVHKDTTWQKKLAKKKTGLNKKYGALSVLNQIIPALTKELSSLFPKHFFATNGKSTYDYRAAHSVSKDHWLDAYCIACSVLANDVCDSNINSRVPYELKQFRRHDRRALNNENMSRVYTLNGKVVATNRHKATKQTTDSLEEFRQNHSDDVCKLKVKEHHPTYRNMNRNYPGSVFLIGKQVHVMQGIAGSKNGEATTYKDTNANSIAAGKCKFVAKNSGILFV

SEQ ID NO: 13379 - protein, 398 aa, unidentified
VKKRTPFTIQLVYGSSGYTQEVILGVDAGSKTIGVSASTKKEELFAANVIPRNDVVDLLSTRRESRRARRNRKTRYRKSRFNNRVRSKHKGWLAPSVEVKIQEHITSIKMVCRILPVSKVVVETAEFDLQLLKAIEEGKPVPQGEDYQQGEMYGHYNVRQYVLWRDNYTCQCCGAHLTKKKEVRLHVHHLESRKVGGNAPGNLVTLCDSCHEKLHKGLITEKDLKKRKHRSTRDATFMGIMRKTLMQRLCSELPIPVAETRGYITKATREKLLVLPKSHTNDALAIAQGKHGFNVGYLPGIEQIDKIYTIRPVRHHNRQLHKAIILKGGIRKSNQAEKYVFGYRLFDKVQFNGQDCFIWGRRTSGYFVVKTIDGKVIHNSASFKKLRLVERASNYLIA

SEQ ID NO: 13380 - protein, 419 aa, unidentified; identical to SEQ ID NO: 8591

SEQ ID NO: 13381 - protein, 512 aa, unidentified; identical to SEQ ID NO: 4329

SEQ ID NO: 13382 - protein, 412 aa, unidentified; identical to SEQ ID NO: 4932

SEQ ID NO: 13383 - protein, 451 aa, Geobacillus sp.; identical to SEQ ID NO: 4536

SEQ ID NO: 13384 - protein, 450 aa, unidentified
VAVFVLERTGKALMPCSEKRARLLLARGRACVHRLVPFVIRLTDRQLDTCTLQPLRIKLDPGSKTTGLALVRDTEHLNTDTGEIQRGVAVLSLIELVHRGRQISEALTARRQMRRRRRGGLRYRAPRFLNRGNKARGWLAPSLQHRINTTMAWVARIRRWSPVTALSAELVRFDMQRLQNPEISGVEYQQGTLAGYEVREYLLAKWSRKCAYCGVENVPLQIDHVHPKAKGGTNRVSNLTLACGPCNARKSAQSVDAFLAKDPKRLTALLAQAKRPLKDAAAVNATRWALVGALKATGLPVETASGGCTKFNRSRLAIPKTHALDAVCVGAVSVVTNWQKPSLTIKCTGRGSYQRTRLDKYGFPRGYLMREKSVKGFKTGDLVRAIVPTGKKAGRHTGRVAIRKSGSFNIQTLAGVVQGIGYRHCRLLQRADGYGYFFNKAACDTAQKRE

SEQ ID NO: 13385 - protein, 418 aa, unidentified; identical to SEQ ID NO: 2710

SEQ ID NO: 13386 - protein, 443 aa, unidentified
LTKDENRPSGRTTGLRAEQAEPAGIRKGDTLKVFVLNMRSKPLMPCSPAKARHMLKAGKAVVVRRTPFTIKLTIATGETKQDVTLGVDAGARHVGISATTEKEEVFASEVALRQDITGLLADRLAFRRARRNRKTRYRAPRFNNRVRSKHKGWLAPSVENRIQAHMSRIDAVCRLLPVTKIVIETASFDVQKIKNPTIEGTDYQQGDQLGFWNVREYVLFRDGHVCQHCHGRSRDKILNVHHLESRKTGGDAPNNLITLCETCHKAYHAGKIKLKVKRGQSFRAEAFMGIMRWTLLDRVRKTHPKLPVENTYGYLTKHKRIALGLPKTHCADAFCIAGNLKALRRGDFLFQQQTRKHNRQIHKCSILKGGVRKLNQAPFLVKGFRLFDKVRIGGQIGFVFGRRVRGTFNIRRLDKTVIGTDINCKKLSLLETRKTFLTELRKE

SEQ ID NO: 13387 - protein, 512 aa, unidentified; identical to SEQ ID NO: 9741

SEQ ID NO: 13388 - protein, 423 aa, unidentified; identical to SEQ ID NO: 2741

SEQ ID NO: 13389 - protein, 431 aa, unidentified
MPNKVYVINKHGRPLMPCSPAKARHLLDAGKAKVKKRTPFTIQLVYGSSGYTQEVILGVDDGSKTIGISASTKKEEVFAADVTPRNDVVNLLSARREFRRARRNRKTRYRKSRFDNRVRSKRKGWLAPSVEVKIQEHITSIKMVCRILPVSKVVIETAEFDLQLLKAIEEGKPVPQGEDYQQGEMYGHYNVRQYVLWRDNYTCQCCGAHATKKKEVRLHVHHLESRKVGGDAPDNQVTLCESCHEKLHKGLITEKDFKKRKRRSTRDATFMGIMRKTLMQRLCSELPIPVVETRGYITKATREKLLVLPKSHTNDALAIAQGKQGFNVGYLPEILQIDKIYTIRPVRHHNRQLHKAAILKGGIRKSNQAGKYVFGYRLFDKVQFNGQDCFVWRRRTTGIFTIKTINGKMIKDGISFKKLKLVEKSTGYLIA

SEQ ID NO: 13390 - protein, 419 aa, Anoxybacillus sp.; identical to SEQ ID NO: 5328

SEQ ID NO: 13391 - protein, 406 aa, unidentified; identical to SEQ ID NO: 3415

SEQ ID NO: 13392 - protein, 465 aa, unidentified
MSTCACVLSKNGERLMPTIRLGKVRHLLKDGKAKIIKHHPFTIQLLYDSETNIQPIEICEDVGYNYIGISVKSQSHEYVSAQYDTLQDEKSCHDACRRMRRTRRNRLRYRQKRFDNRKRDKGWLAPSLKHKKELNVNVIKMYCEVVPITHATVEVGSFDTMLVKAIEEGKATPEGADYQKGPRYNLATLREAVFYRDNYTCQVCGREASEGAILHVHHMFYWKGRHDNSLSELITVCEKCHTPANHQKGGKLYGFGEDIKFANLSGAAFMNTVRWQIVNELYAAFGKPFVTFTYGAMTKEKRIALHLEKSHNNDAYAMGSFHPVDRCAFEHYEKMKRNNRILEKFYDSRYINIRTGEVASGKELFNGRINRNHKKDSENLHKYRGKRIRKGYRALRRKKVALNPGDLVSLNGEILTVHGTHTKKNGSVNVKFKTPSKSGKKSVSLKKLKIIKTISPMRSAWDKVS

SEQ ID NO: 13393 - protein, 457 aa, Lactobacillus sp.; identical to SEQ ID NO: 6035

SEQ ID NO: 13394 - protein, 431 aa, unidentified; identical to SEQ ID NO: 2977

SEQ ID NO: 13395 - protein, 427 aa, Enterococcus sp.; identical to SEQ ID NO: 2410

SEQ ID NO: 13396 - protein, 456 aa, unidentified
MSTCVCVLSNSGERLMPTFRLGKVRRLLKDGKAKIVKHHPFTIQLLYDSKTNTQPIEICEDVGYNYIGISVKSKSHEYVSAQYDTLQDEKEHHDDCRKYRRTRRNRLRYRKPRFDNRKRSEGWLAPSLEHKKQLNIRLVERYVSVIPITHATVEVGSFDTMLLQAIQKGESKPEGADYQKGPRYNLATLREAVFYRDNYTCQVCGRKIADGAILHMHHMFYWKGRHSNSLDELLTVCEKCHTPANHQKSGKLYGFGEDVKFANLSGAAFMNTVRWQIVNELYAAFGKPFVTFTYGAMTKEKRIALHLEKSHNNDAYAMGDYHPAHRCEFGHYQKRCRNNRVLEKFYDATYIDTRTGNKAKGKELFNGRISRNHKKDSEDLHKYRSKKVSKGRRSIRRQRYAIQPYDTVRLESKTYITSGCHNKGTRLLIPANGKSKSVAISKVQVVCHAGAWIQII

SEQ ID NO: 13397 - protein, 442 aa, unidentified; identical to SEQ ID NO: 2903

SEQ ID NO: 13398 - protein, 438 aa, unidentified; identical to SEQ ID NO: 5230

SEQ ID NO: 13399 - protein, 398 aa, unidentified
RLLLKQKKACVIKRTPFTVKLLYGSAGYKQPVTLGVDAGSKHIGISATTEKHELYREEATPRNDVVDLLSARRAFRRSRRNRKTRYRAPRFNNRVHSKHKGWLAPSVEVKIQEHITLIKHACRILPVTLVRVETAEFDTQRLKAMLEGKPLPVGTDYQLGEMYDEYNVRQYVLKRDNYTCQCCGAHSTKTKGVKLHVHHIETRRTGGNAPNNLITLCKACHKALHAEKVTLDGKKRGKPLKDAAFMGIMRKTLMERLRKELKIPVQGTYGYITKYLREKNGIPKSHTNDARCISKNPLAIPCDTCYYTKAVRHHNRQLHKATILKGGIRKANQAPYIVKGYRLWDKVAYNGTECFITGRRTSGYFALKELDGTVVSNSISYKKLRLLEAATNYIIERK

SEQ ID NO: 13400 - protein, 426 aa, unidentified; identical to SEQ ID NO: 6377

SEQ ID NO: 13401 - protein, 413 aa, unidentified; identical to SEQ ID NO: 2636

SEQ ID NO: 13402 - protein, 462 aa, unidentified; identical to SEQ ID NO: 2823

SEQ ID NO: 13403 - protein, 452 aa, unidentified
MSMQTLQREFKNVPTDASLVRSSTNLSLNRLETVSERDIVLSCNNPEVNLRKQVSGLTVIVPVLSLEGSPLMSCTPAKARHLLEKRRAYVVKLNPFIIRLNFKCENKIQEISFGMDAGYKNIGYSVITDTKEILSGEIALDNKTKSRMNERKMYRRNRRYRLRYRKPRFNNRIKPDGWLPPSIKRKFDAHINFINGLKKILPIKKVTVEIGNFDIQKINNPDISGIQYQQGDLYGYYNLKFYLLEREKGKCQLCGKKFTKEDRPHMHHIKQRSEGGTSRAEGIALIHKSCHKNLHDKKLFHKLKPARVYKAETFMSIVGGMFKKFLDCDIAYGYKTCAKRKELGLEKSHVNDAFIIAGGTTQSRCLPSMIEQKRINNRTLQTNRKGFSKSIRKQRHKIQNRDFIWIDNKKYLSGGVACRGAQIYYFDGDEKKLISSKRVEKVYSTDSLVWLK

SEQ ID NO: 13404 - protein, 492 aa, unidentified; identical to SEQ ID NO: 4486

SEQ ID NO: 13405 - protein, 420 aa, unidentified; identical to SEQ ID NO: 5953

SEQ ID NO: 13406 - protein, 436 aa, unidentified
MTRTLTKQTTQACVLDQQGKPLMPTTRLGKVYRLLKTQKAHIVSYEPFTIQLDYEPDTHIIQPMTLGVDSGAIHSGYSVANEHREYYNAEVIARDDISKRLSDRRMYRQNRRSRKTRYRKPRFNNRKNKKKGWLPPSLEQKVDVQLNEIDHLHRYFPIETIIVEVAEFDIQKIKNPDISSIEYQQGTLQGYNIRNYLLEKHKRKCFYCGKSVSKFEVEHMIPKTRGGSNRIDNLTLSCHNCNQKKDTLTAEEFIKQTLPAKKAAAKLKQLPNEKRLFEYMAHMNATRWALYNTIDKKYPNVKITYGYITKYKRIQSSLSKAHHIDAKCIADFPTVPSMEQTVVKVKMRRHNRQLHRAIFSKGHVRKAACLPTATFGFQLYDLVLFDNHRYYIKGRRSSGIFALASVEGLKDTNRSYKKLTQLAHTNAYLINRYVNI

SEQ ID NO: 13407 - protein, 393 aa, Anoxybacillus sp.
  VARIANT 393: note = X can be any naturally occurring amino acid
LFVYVINKHGNPLMPCSPRKARILLKNKKAKVVKRTPFTIQLLYGSSGYKQPISLGVDTGTKHVGLSATTKNQVLLEAEVQLRTDIQELLATRRQFRRSRRNRNTRYRKARFLNRKKPNGWLAPSTQHKVDSHIKLVKWVHSLLPITHITVEVAQFDTQKIKNPDIQGAAYQQGEQLGFWNVREYVLYRDGHTCQWCKGKSKDPVLNVHHIESRKTGGDSPSNLMTLCKTCHDMIHREGLEHEIQRRFSSLKDASHMTVMRWFIWNGLKKVYPHANITYGYITKCIRIANGLPKSHMVDARCISGNPLAKPSGTVYLLKFVRKNNRQLHKATILKGGKRKSNKAPRFVKGFQLFDKVVYEGKECFIFGRRSSGYFDLRLLDGTKVHASASWKX

SEQ ID NO: 13408 - protein, 433 aa, unidentified
LGKDFYPLRRREQFLFSCQFIERSMASMQYVYVLNKHCEPLMPCSPGKARLLLKQQKACVVKRTPFTIKLLYGSAGYKQPVALGIDAGSKHVGLSASTEKRELYREEFTPRNDVVELLSTRRQNRRSRRNRKTRYRAPRFDNRVHSKHKGWLAPSVEVKIQEHITVIKRICRILPITLVRVETAEFDTQRLKAMLKGKPLPVGTDYQLGEMYDEYNVRQYVLKRDNYTCQCCGAHPTEKKPIRLHVHHIESRHVGGNAPNNLITLCVACHKALHEGKITLDKGKKRGKPLRDAAFMGIMRNTLLARLKDELNIPVKQTYGYITKLLREKNKIPKSHVNDARCIAKAPNAKPCDTMLYTRALRHHNRQIHKAKILKGGIRKKNQAPYLVKGFRLWDKVRYNGEECFITGRRSSGYFALKKSMELLSRIAQATKN

SEQ ID NO: 13409 - protein, 416 aa, unidentified; identical to SEQ ID NO: 3007

SEQ ID NO: 13410 - protein, 493 aa, unidentified
MAAVYVISASGKPLMPTTRCGHIRGLLNAGKARVVEREPFTIQLKYETPDVTQPLYLGIDPGRTNVGSAVVREDGECVFTAQLTTRNKDVPKLMKARKQFRVAHRRLKRRCKRQGRAKAAETLSQKGEFQRLLPGYEEPILCKGIRNKEARFNNRQRPAGWLTPTANHLLLTHLNMVKKLQKLLPITDVVLEVNRFAFMAMENPSIRRWQYQQGPLYGKGSVEDAVYAQQDGHCLFCGKPIAHYHHVVPQHKNGSETLENRVGLCNEHHDLVHKDRAWDAKMKETKAGLNKKYHALSVLNQIIPALTEQLTAMFPQHAFVTTGKDTADFREDYGIAKEHHLDAYCIACSVLAEPTKVAAPTGKPHRLMQFRRHDRQVCHKENIKRVYLSEGKAVATNRHKAIEQKDDSLEEFRKTHTQQEVSALTVKDHQPVYKDMRRFMPGGVFLFNGKVHTLQRSHGRYKGMPFYYIDTDGSKNHAKGCIFLQQNCGLRWV

SEQ ID NO: 13411 - protein, 449 aa, Allochromatium sp.
MAVFVLDRQKTPLMPCTEKRARLLLERGRAVVVRLAPFTIRLKDRVGGALQPLRLKLDPGSRVTGLAIVRESEIVDPDTGAVERLEHGLWFGELAHRGQAIREALEQRRHYRRARRARKTHYRAARFLNRTRRAGWLPPSLQHRLDTTLNWVERLRRIAPITMLSQELVRFDTQALQNPEISRVEYQQGELAGYEVREYLLEKWHRTCAYCGATNVPLEIEHIHPKSRGGSDRVSNLTLACRPCNQRKGNRPIEDFLQRQPALLHQIQAQAKAPLKDAAAVNATRWALFAALTATGLPVETGSGGRTKFNRTRLDLPKTHALDAACVGAVDQIRGWNRPVLAIRATGRGAYSRTRTFKNGFPRGYLMREKRVHGFQTGDWVRAEVPTGKKAGVHVGRVAVRQTGSFNIQAQGGTVQGISYRHCRVLQRADGYGYAFQPKPDTEEARRAA

SEQ ID NO: 13412 - protein, 440 aa, unidentified
MSTGLRAEQAEPAGIRKGETLKVFVLNMRGKPLMPCSPAKARHMLKAGKAVVARRTPFTIKLTIATGETKQDVTLGVDAGYKHVGISATTEKEEVFASEVELRQDITGLLADRLAFRRARRNRKTRYREPRFNNRVRSKNKGWLAPSVENRIQAHISRIEAVCRVLPITKIVIETASFDIQKIKNPEVEGTGYQQGDQLGFWNVREYVLFRDGHVCWHCRGRSKDLILNVHHLESRKTGGDAPNNLITLCETCHKAYHAGKIKLKARRGTSFRAEAFMGIMRWTLLDRVRRAHPELPVENTYGYLTKHTRIVLGLSKTHCADAFCIAGNLNALRRGYFLYQRQTRKHNRQIHKCSILKGGVRKLNQAPFLVKGFRLFDKVKCKGRIGIIFGRRSSGSFDVRTLDGARLSAGISSKKLMLLEKRTTFLTQLRKEDGASSPS

SEQ ID NO: 13413 - protein, 278 aa, unidentified
LTHQFKKGVPVMVYVLDKNGQPLMPTDRHRKVRLMLQSGQAKVIKRCPFTIQLNYDSGHQTQEISLGIDAGSKHIGVSATTKIKVLYEADVELRNDIVNLLSSRRELRRGRRNRKTRYRQAKFNNRRRGNGWLAPSIRQKIGTHLTVVKNICKMLPISRIMVETASFDIQKIKNPDIQGAEYQQGDQLEFWNVREYVLFRDGHTCQCCKGKSKDKILNVHHIGSRKTGGNAPNNLITLCETCHTGYHKGTVQLPKAIKRGMRFKDAAFMGIMRWAFYE

SEQ ID NO: 13414 - protein, 426 aa, unidentified
MSLVFVLSSDGQPLDPCHPARARRLLDHGKAAVWRRYPFTIRLNARTAAASVTHPHRLKLDPGSKTTGIAVVAEASGRVVWAGELTHRGQAIRDALLSRRVSRRSRRQRKTRYRQPRFRNRRRPEGWLAPSLQHRVDTTRTWVNRLRRFVPVTAISAELVRFDTQLLENAEISGVAYQQGTLAGYEVREYILEKWGRRCAYCGAKDTPLQIEHIVPRARGGSDRISNLTLACAQCNQQKGMQTAEEFGHSDIQAQARRPLKDAAAVNTTRWALYQQLIATGMPVEVGTGGMTKFNRMRLGLEKSHWHDAACVGASTPDALDVRGVRPLLLRAMGHGTRQMCRMNAFGFPRTGPKGARVVKGFKTGDMVRAIVTTGTKQGVYVGRVAVRTVGSFNITTTTGTTQGLHHRFFRAIQRADGYNYAYEVA

SEQ ID NO: 13415 - protein, 411 aa, unidentified; identical to SEQ ID NO: 8372

SEQ ID NO: 13416 - protein, 506 aa, unidentified
MANLKLIDELLEKTEYIYVLGIDGKPQMPTNRKVRVRKLFKLGMAKIVDTVPFTMRLLYKNEPVLQPITIAEDPGRTNIGTAVLTQLGDLVFSAVVETRNKSIKKLMADRKAHRQASRRGERKARQRLVKRHGSMIKAGMIMRKLPQYAADKFVTCKIIKNTEARFCNRKRMPDWLTPTVNHLVQTHINLIKKIEKYLPITDVAIEVNRFAFMQMENPNISGVNFQNGPLKGFDDVKAAIREQQHGKCLMCKNDIEHFHHIIPRSKGGSDTIQNQAGLCKKCHTKIHADVEFQAKLKDKKNGLIKKIWRTQRFESSCSVYLQRAHQDLRCRACTFLHWKRYIINQMHEVDAYCICLAAIGADKAKRPNFNNVFKIKQFRRQDRSIVNYQRERTYYLEGKKIATNRKPRFEQKGDALSGWYSEQVKLKDKKYADKLTGRITVKKSTRGYNSKNRVMPGTVFYYNGKRLVLTGQLTGGKYYRAYGDTKINYPVNKCQIYKHNEGLVFV

SEQ ID NO: 13417 - protein, 453 aa, unidentified; identical to SEQ ID NO: 9775

SEQ ID NO: 13418 - protein, 304 aa, unidentified
VLEINKFAFMRLDNPNVQKWQYQQGPLYQKASLEEAVSEMQEHHCLFCKNTIDHYHHVVPQHKNGSNTIGNIVGLCAKHHDLVHKDTSWQEKLAKKKTGLNKRYGALSVLNQIIPALTKELSSLFPKHFFATNGKSTYDYRAAHGVSKDHWLDAYCIAGSVLPNDACDNNINNHVPYKLKQFRRHDRRALHKENMGRVYTLNGKSVATNRHKAIKQTTDSLEEFRQRQPNDVCKLKVKEHHPEYRNPKRNFPGCVFLVGKHTHVMQGTSGSHNGKADGYYDTNGNSYSSGKCKFVAKNKGIVFA

SEQ ID NO: 13419 - protein, 414 aa, unidentified
MPCSPAKARLLLKEKKAIVVRRTPFTIQLTIATGESKQPVSLGVDAGYKHVGLSASTEKAELYASEVELRQDITDLLSARRALRQSRRNRKTRYRAPRFDNRIRTKRKGWLAPSVENRINAHLSRIETVIRLLPVTKISVETTSFDMQLLKNSDIAGKEYQESEQLGFWNVREYVLFRDGHVCQHCHGRSKDPVLNVHHLESRRTGGDSPGNLITLCETCHKELHRGEITLKAKRGQSFRAETFMGIMRWEVLDRLKASHPKLEVQNTYGYRTKHARIVNGIAKSHCADAFCIAGNLGAERLGEFFFQKQTRRNNRQIHKLSVLKHGLRKRNQVPFEVNGFRLFDKVACKGEEGFIFGRRSSGFFDVRKLDGTRISAGISCKKLHLLEKRRTYLTEIRKEEALPPLPEGRGLRA

SEQ ID NO: 13420 - protein, 424 aa, unidentified
MSNQVLVLDTNRKPLTPCTPGTARSLLKAGKAAVFRRFPFSIILKKEVKDVPQPLTLKLDPGSKTTGIALLKGSQLLWVAELIHRGAAIKDAILSRRQLRRGRRNRKTRYREARFLNRTRPQCWLAPSLQHRVDTTLTWVKRLTRYTPVAEVRQELVKFDLQLMQNTEISGIEYQQGELQGYEVREYLLEKFNRQCVYCGAKDMPLEVEHIKPRSRGGSDRVSNLVLACHSCNQSKGNQDIKDFLSNKPDVLKRVISQAKAPLKDATAVNVTRWALFNALKELGLPVVTSSGGKTKFNRSRLGLPKTHFFDAACVGETLELQVCTREPLLIKTTGHGTRQMCGTDKFGFPTRHRSKAIIHKGFKTGDMIKAVVTTGKKAGNYVGRVLCRKSGSFDIATKSGRVTGISYKCCQPIQRKDGYSYAI

SEQ ID NO: 13421 - protein, 451 aa, unidentified; identical to SEQ ID NO: 10609

SEQ ID NO: 13422 - protein, 422 aa, unidentified
YWHEEKFSERKVSEMTNYAFVLDANNKQLTPTKEQKAWFLIRKKRATLVSKYPMVIQLKKKIPDKEICKDEVRCGIDDGGLHVGVALVQKCQTRNKVVFKGVIEQRNDVKHLIDVRCGYRRYHRYHKRYRSARFNNRNSSKREERIAPSILQKRQATIRVINQLNKWINITNYWLEDVAIDIRALTDGYKPYRWQYQKSNRLDENIRKAVILRDGYKCMECGKSNCRLEVHHIKPRRLKGSSTLDNLITLCIKCHQKTESVEELYMDRYFALLNSSDNKNLNYAQHVMIGKKWLREQLSNLGMLYLTNGGDTANKRIDWDIAKSHSNDAICITDLRPDTCEIKEWAIKPMRRQSKAKTDNVLGIKHRDLVEYTFRNGETHRGYVTALYPEQNAINFQSPTKHCKKVNAKNVKYFGNILKFTG

SEQ ID NO: 13423 - protein, 545 aa, unidentified
LSRTIPLTANTQPRETQPPVSAGETYSKRRIAYMPTVYVLNKDGKPLMPTTRCMHVRHLLKNGKARVVKSKPFTIQLLYETDDVVQPLYLGIDPGRTNIGVAVVKADGAAVFTAHLETRNKEVPKLMKKRKESRCARRTNGRRCRRQRRAKTNGTISKKCVKQTTAQNGSVSKRAKEIGVIKRHLPGCEKDVLCIGIKNKEAKFTNRARPEGWLTPTANQLLQTHINLVKKIQKFLTISDVVLEVNKFAFMQLDNPNIQKWQYQQGPLYQKGSLENAVSEMQEHHCLFCEKPIEHYHHVVPKSENGSNTIANIVGLCTEHHNLVHKDATWQKKLAKEKVGLVKKYSALSVLNQIIPALTKEMNSLFPKHFFVTNGKSTYDYRTAHGVSKDHWLDAYCIACSVLPNDVCDSNINSHVPYELKQFRRHDRRVLHKANMSRVYTLNGKTVATNRHKAIKQTTDSLEEFRQSHPGDVCKLKVKEHHPAYRNLNRNYPGSVFLVDGQVHVMQGVSGSHNGKADGYYNTNGNAYPYYKCKFVVKNEGIVFA

SEQ ID NO: 13424 - protein, 539 aa, Nocardiopsis sp.; identical to SEQ ID NO: 8959

SEQ ID NO: 13425 - protein, 416 aa, unidentified
MVYVLGQDGHPLMPTCRHGKVRRMLKSGMAKVVKRCPFTIQLQYESTIHTQEINLGIDAGSKTIGISATTDSKVLYEAEVVLRNDIVELLSGRRALRRSRRNRKTRHRKPRFDNRKKPDGWLAPSIRQKIETHVTVVENITKILPMTKIIVETASFDIQKIKNPEIEGAEYQHGEQLDFWNVREYVLFRDGHTCQCCKGKSKDNILNVHHIESRKTGGNAPNNLITLCETCHKAYHKGVITLPKEIHRGMRFRDAAFMGIMRWAFYDRLKELYNPLGAEVINTYGYITKNTRITYDLPKEHYVDARCISGNPAAKHLGHYYFQKKVRCHNRQIHKNTILKGGIRKRNQASYEVKGFRLYDQVLWKGQKCFIFGRRSTGRMDLRLLDGTHINASVGHKNLKLLSMRKNYLIEQRKAG

SEQ ID NO: 13426 - protein, 512 aa, unidentified
MSTVYVLNKDGKPLMPTTRCGHVRRLLKEQKAQVVTSKPFTIQLLYETDDVVQPLYLGIDPGRTNIGVAVVKIDGTAVFTAHLETRNKEIPKLMQGRKKARRARRTNGRRCRRQRRAKANGTISKKCVKQTTAQNGSVSKRAKKIGVIKRHLPGCEKEVLCIGIKNKEAKFSNRARPEGWLTPTANQLLQTHINLVKKIQKFLPISDVVLEINKFAFMRLDNPNVQKWQYQQGPLYQKASLEEAVSEMQEHHCLFCKKPIAHYHHVVPQSENGSNTIGNIVGLCTKHHDLVHKDTTWQKKLTKKKTGLNKKYGALSVLNQIIPALMKELSSLFPKRFFATNGKSTYDYRAAHGVSKDHWLDAYCIACSVLANDVCDSNINSHVPYELKQFRRHDRRALHKENMSRVYTLNGKSVATNRHKAIKQTTDSLEEFRQRQPNDVCKLKVKEHHPEYRNPKRNFPGCVFLVGKHTHVMQGTSGSHNGKADGYYDTNGNSYSSGKCKFVAKNKGIVFA

SEQ ID NO: 13427 - protein, 413 aa, unidentified; identical to SEQ ID NO: 2636

SEQ ID NO: 13428 - protein, 406 aa, unidentified; identical to SEQ ID NO: 2752

SEQ ID NO: 13429 - protein, 431 aa, unidentified
MPNKVYVINKHGRPLMPCSPAKARHLLDAGKAKVKKRTPFTIQLVYGSSGYTQEVILGVDAGSKTIGMSASTTKEELLSAEVKPRNDVVDLLSTRREFRRARRNRKTRYRKPRFDNRVRSKHKGWLAPSVEVKIQEHITSIRRVCRILPVSKVVIETAEFDLQLLKAIEEGKPVPQGEDYQQGEMYGHYNVRQYVLWRDGYTCQCCGAHATKKKEVRLHVHHLESRKVGGDAPDNQVTLCESCHEKLHKGLIAEKDFKKRKRKSTRDATFMGIMRKTLMQRLCSELPIPVIETRGYITKATREKLLVLPKSHTNDALAIAQGKQGFNVGYLPGIVQINKIYTIRPVRHHNRQLHKATILKGGIRKSNQAEKYVFGYRLFDKVQFNGQDCFIWGRRTTGIFTIKTINGKMIKDGISFKKLKLVEKSTSYLIA

SEQ ID NO: 13430 - protein, 515 aa, unidentified
MIPNERRHLMPYIYVIGMDGKPQMPTKRRRHVQKLLDTGKARITERVPFTIQLLYDNDPVLQPVILAEDPGRTNIGLAALDLKGNLLLSAAVETRNKEIAKLMEKRRQCRRASRNGERKARQRLAKKYGTMIRGGMRMRKLPQYAADAFITCKVIRNTQARFCNRRRPDGWLTPSARHLVQTHINLVHKVQKYLPVTDVVIEVNRFAFMQLEDPAICGVDFQTGPLKGYDDRDAAVYDLQDGKCLMCKHEITQYHHIVPRSRNGSNTIGNIAGLCDQCHDRVHKDADFAEQMKEKKEGMDKKYGALSVLNQAIPFICKQLETEFGRGHVHYCTGRETSLVRRSTGYQKTKKNQLHEVDAWCIGALALAEIPENVPDFKEVHLIQQFRRQNRSLVNAQTERVYKLGGRMVAKNRKKRTGQETDALEDWYNRQVETYGKQEADCMRSRLKVTKSERRYNNPGRMMPGAVFLYEGVRYVMRGQHCNGAYLQAVGMGNRDFPARKCKILTRNTGLVFVS

SEQ ID NO: 13431 - protein, 364 aa, unidentified
MYVTSDYKQEIVLGVDAGTKHVGLSATTKSKELYSSEVILRNDIVDLLSTRRELRRARRNRLRYRKPRFNNRIKSKRPGWTAPSVKYKIDAHIRVIDNVCSILPIFRIVIEVAQFDTQKIKNPNISGKEYQEGDQLGFWNTREYVLARDGHKCQYCKGKSKDKILNVHHLESRKTGGDSPSNLITLCETCHKEYHKGNIDLKIKRGSSLRDAAVMGIMKWKLYEELRSRYDRVSMTFGYITKHNRIKYGIEKSHTSDAFVISKNINAKRIGCQYLKRLIRRHNRQIHKMKILKGGKKKNNQAPFEVFGFRLFDKVLYNNKICFVYGRRKSGSFNIRDFNGENSKDVSRKKFKLIRGKRHPIILK

SEQ ID NO: 13432 - protein, 431 aa, unidentified
MPNKVYVINKHGRPLMPCSPAKARHLLDEGKAKIKKRTPFTIQLVYGSSGYTQEVILGVDAGSKTIGMSASTTKEELLSAEVKPRNDVVDLQSTRREFRRARRNRKTRYRKPRFDNRVRSKHKGWLAPSVEVKIQEHITSIKMVCRILPVSKVVIETAEFDLQLLKAIADGKPVPQGEDYQKGEMYGHYNVRQYVLWRDDYTCQCCGAHATKKKEVWLHVHHLESRKVGGDAPDNQVTLCESCHEKLHKGLITEKDFKKRKRRSTRDATFMGIMRKTLMQRLCSELPIPVVETRGYITKATREKLLVLPKSHTNDALAIAQGKRGFNVGYLPGIIQTDKIYTIRPVRHHNRQLHKAAILKGGIRKSNQAGKYVFGYRLFDKVQFNGQDCFIWGRRTSGYFVVKTIDGKVIHNSASFKKLRLVERASNYLIA

SEQ ID NO: 13433 - protein, 424 aa, Anaerostipes sp.; identical to SEQ ID NO: 11329

SEQ ID NO: 13434 - protein, 442 aa, unidentified; identical to SEQ ID NO: 4418

SEQ ID NO: 13435 - protein, 238 aa, unidentified
MYDEYNVRQYVLKRDNYTCQCCGAHPTEKKPVRLHVHHLESRHVGGNAPNNLITLCVACHKALHEGKITLDKGKKRGKPLRDAAFMGIMRNTLLARLKDELNIPVKQTYGYITKLLREKNKISKSHVNDARCIAKAPNAKPCDTMLYTRALRHHNRQIHKAKILNGGIRKKNQAPYLVKGFRLWDKVRYNGEECFITGRRSSGYFALKKYDGTVISNSASYKKLMLLEAATNYITERS

SEQ ID NO: 13436 - protein, 512 aa, unidentified; identical to SEQ ID NO: 9077

SEQ ID NO: 13437 - protein, 420 aa, unidentified; identical to SEQ ID NO: 2681

SEQ ID NO: 13438 - protein, 451 aa, unidentified
MSVAVMSKTGMRLMPTSEYRARKLLKSKKATVYRYNPFTIQLTERETGDVQTVELCMDTGYLHIGTSVKSEKHEYLGVQIDTLTDEKQKHDACRMYRRQRRSRKRYRQSRFNNRKRSDGWIAPSLEHKKDIHIQTISRICNAMPITNITLEMGNFDTQVLKALEENRPLPQGTDYQHGERYGIATLREAVFARDKYTCQCCRKTIADGAILHVHHIIYRSRGGTNRMSNLATVCDRCHTPANHKPGGRLYNWKPKIASFKGATFMTAVRWKMYNEVKSKFSDINIHITYGAETKEQRRAFDITKSHVNDALVMGQFHPKHRSRPVCYKKKRRNNRCLEKFYDAKYIDSRDGKKRSGQELFNGRINRNHKKDSENLHQYRQQKVSAGRRTIRKQHYSIQPHDIIVFNRQQFETFGCHCNGARAILLPQKKSVAIKKLSVHKYAGGYFKSDFT

SEQ ID NO: 13439 - protein, 466 aa, unidentified
  source 1..466: note = Clostridia sp.
VRFEINWLIRGQKGDRKMQKLGERNTYTPTNASQVRSSVVVSLNREETLGEHDLKTCPNNLDGNQLSGKREQDLRVPVLNMRGKPLMPARPAKARHLLKEGKAMVVGRSPFTIQLTTATGEAKQDIALGVDCGYSHVGLSAVSRKQELFSAEVILRGDIVKLNSERRQYRRARRSRLWHRQPRFDNRKKDKGWLAPSIQHKLDSYFKLIGKIKEILPIAKINVEVAAFDIAKIKNPDIEGEGYQNGVQKNFWNTREYVLFRDNHTCQACKGKSKDPVLEVHHLESRKTGGDRPDNLIALCNTCHSKVSKGKFYLNVKIPKGFKAETFMNTVRWKLVNRLKELGNSVSHTYGYITKSKRIEIGLEKNHVNDAFVIAGGTTQERCSSFTVSQTRRNNRRLQTNRKGYRPSIRRKRYELQPNDLVRYDNTEKRVKGVFNYGTWVRLDDGVNTNVKNVEVLKYGKGIQFV

SEQ ID NO: 13440 - protein, 512 aa, unidentified
MSTIYVLNKDGKPLMPTTRGGHVRHLLKEQKARVVRAKPFTIQLLYETDDAVQPLYLGIDPGRTNIGVAVVKANGTAVFTAHLESRNKEILKLMQDRKKARRARRTNGRRHRRQRRAKANGTISKKCVKQDTAQSKNPSKRAKEIGVIKRRLPGHKKDLLCIGIKNKEAKYTNRARPEGWLTPTAIQLLQTHINLVKKIQKFLPISDVVLEVNKFAFMRLDNPDIQKWQYQQGPLYQKGSLENAVSEMQEHHCLFCDKPIDHYHHVVPQSENGSNTIANIVGLCSEHHNLVHKDAAWQKKLAEEKVGLNKKYGALSVLNQIIPALTNKLSVLFPKHFFVTTGKSTHDYRESHSVSKDHWLDAYCIACSVSPSNVCDSNINNHVPYELKQFRRHDRRALHKENMSRVYTLNGKAVATNRHKAIKQTTDSLEEFRQSHPGDVCKLKVKEHHPAYRNLNRNHPGSVFFVGEQAHVMQSIVASKDGKATRYKDTNVNKIAAGQCRFVAKNEGIVFT

SEQ ID NO: 13441 - protein, 418 aa, unidentified; identical to SEQ ID NO: 7351

SEQ ID NO: 13442 - protein, 417 aa, Exiguobacterium sp.
MFVFVLNHHGEPLMPCKPSKARKLLNNGKAKLVKQTPFTIQLLFGSSGYKQEISLGVDAGTKHIGFSATTSTKVLLEGEVQLRTDIQDLLATRRAMRSARRSRKTRYRQARFLNRKKPKGWLAPSVQHKVDAHLKLVRMIHRLLPIKHLTIEVAQFDIQKIKSPDISGDLYQKGDQLGFWNVREYVFFRDKHICQHCKGKSKDKILNVHHIESRHTGGDSPDNLLTFCETCHKKIHKENLEHLFQRKSRSFRDATQMTVMRWFNNAVKETYPYVKLTYGFLTKNIRIQNGLEKRHAVDARCISGNPLSEEPNVSYLFRQVRANNRQLHKMTIGKKGKRKANKAERFVRGYQLFDKVHYEGQTCFVFGRRKTGYFDLRTLQGVRVHKCASHKKLTLLERATTWLVDIQPEGGGGRLRL

SEQ ID NO: 13443 - protein, 458 aa, unidentified; identical to SEQ ID NO: 7647

SEQ ID NO: 13444 - protein, 431 aa, unidentified
MPNKVYVINKHGRPLMPCSPAKARHLLDEGKAKVKKRTPFTIQLVYGSSGYTQEVILGVDAGSKTIGMSASTTKEELLSAEVKPRNDVVDLLSTRREFRRARRNRKTRYRKPRFDNRVRSKHKGWLAPSVEVKIQEHITSIKRVCRILPVSKVVIETAEFDLQLLKAIADGKPVPQGEDYQKGEMYGHYNVRQYVLWRDGYTCQCCGAHATKKKEVRLHVHHLESRKVGGDAPDNQVTLCESCHEKLHKGLIAEKDFKKRKRRSTRDATFMGIMRKTLMQRLCSELPIPVVKTRGYITKATREKLLVLPKSHTNDALAIAQGKQGFNVGYLPEIAQIDKIYTIRPVRHHNRQLHKATILKGGIRKSNQTEKYVFGYRLFDKVQFNGQDCFIWGRRTTGIFTIKTINGKMIKDGISFKKLKPVEKSTSYLIA

SEQ ID NO: 13445 - protein, 426 aa, unidentified; identical to SEQ ID NO: 12111

SEQ ID NO: 13446 - protein, 330 aa, unidentified
LRVFVRNKRGKPLMPCSPAKARLLLKEKKAIVVRRTPFTIQLTIATGETKQPVSLGVDAGYKHVGLSASTEKAELYASEVELRQDITDLLSARRALRQSRRNRKTRYRAPRFDNRIRTKRKGWLAPSVENRINAHLSRIEAVLRLLPVTKITVETASFDLQLLKNPDISGKEYQEGEQLGFWNIREYVLCRDGHVCQHCYGRSKDPVLNVHHLESRRTGGDSPGNLITLCETCHKALHRGEITLKAKRGQSFRAEAFMGIMRWEVLNRLKASHPELEVNNTYGYRTKHARIANDIAKSHCADAFCIAGNLGAERLGEFFFQKQTRRNNRQ

SEQ ID NO: 13447 - protein, 424 aa, unidentified
MRVFVLDKNKKPLDPCQPARARILLKQGRAKVFRRYPFTIMMRDLEELECVTHNHQIKLDPGSQTTGLAIIQEKVVVWGAELTHRGLQIRDGLTSRRKLRRSRRNRKTRYRQPRFLNRKRPDGWLAPSLMSRVYNILTWVKKLTRFCPITGISQELVRFDTQKMENPEISGTEYQQGTLYGYEVREYLLSKWNRKCAYCGVTDTQLEIEHIKPKSKGGSDRVTNLAIACRKCNQIKGNQEIEQFLSGKPDVLKRILSQAKRPLVDAAAVNSTRWKLYNELKALGLPIETGSGGLTKYNRCRQNLPKTHWLDAANVGEVDTLYIESYQPLLISAKGHGTRQMCRTNKFGFPTRYVPRFKFVKGFQTGDIAKAVVTKGKKIGTYTGRIATRKTGSFNISTKHELVQGISHKYCSIVHRKDGYSYSF

SEQ ID NO: 13448 - protein, 380 aa, Bacteroides sp.; identical to SEQ ID NO: 6217

SEQ ID NO: 13449 - protein, 465 aa, unidentified; identical to SEQ ID NO: 3070

SEQ ID NO: 13450 - protein, 418 aa, unidentified
MVYVISKQGMPLMPTERFGKVRRMLKNSLAHVVRRIPFTIQLDYDTTDFTQPITLGIDAGSKHIGVSSTTTEKELYAADVELRNDIVDKLSTRREQRRTRRNRLRHREPRFYNRVSSKNKRRLAPSVENKVHTHMSVVKNVCKILPVSNIVLETASFDMQKIKRPDIQGEEYQQGEQLGFWNVREYVLWRDGHACQHCHGKSKDHVLNVHHLESRKTGGDAPNNLITLCETCHNAFHRGKFELKIKRGKPLRDAAFMGIMRWVFYKRLKKEHPNVSMTFGYITKNTRITNNLPKEHYVDARCISGHPQAKPMGYYFYQKKVRCQNRQIHKVNFLKGGRKKLNQAPFLVRGFRLFDLVSYEGILYYVFGRRVSGYFDIRKLDGTKANNGSVSYKKLKLINTQKTILTERRNSGSIPPRS

SEQ ID NO: 13451 - protein, 428 aa, unidentified
LKVFVLNMRGRPLMPCSPAKARHLLKAGKAVVRRRTPFTIQLRIATGETKQSVTLGVDAGAKHVGLSAATEKEEVFASEVELRQDITGLLAARLSLRRERRQRKTRYRAPRFLNRVRSKHKGWLAPSVENRIQAHMSRIDAVCRLLPVTKIVIETASFDIQKIKDPSVEGTDYQQGDQLGFWNVREYVLFRDGHVCQHCHGHAKDKILNVHHLESRQTGGDAPNNLITLCERCHKACHAGKIKLKVKRGQSFREEAFMGIMRWTLLDRVRKAHPGLPVENTYGYLTKNTRITQGLPKAHCVDAYCIAGNLKAVRRGVHLYQRQVRKHNRQIHKCTVLSKTLKDGTKIGYRKLNQTPHLVKNFRLFDKVRCLGQTGFIFGRRSSGYFDVRRLDGVKISSCINYRKLTLLEKRGTCLTELRKEDGASSPV

SEQ ID NO: 13452 - protein, 418 aa, unidentified
MVYILNKHNEPLMPCSERKARLLLKDGMAIVYRKDIFTIKLINGSYGYKQHITLGIDCGSKHIGVSATTDKQELFSANAELRNDVVKLLSDRRMLRRNRRSRKTRYRKPRFNNRIVKNGWIAPSIKQKIQSHFNLVGFLHKLLPITNIVVETAAFDIQKINNPSISGSEYQQGEQLDFFNVREYVLFRDNHTCQHCKGKSKDKVLNVHHIESRKTGGNSPNNLITLCETCHKAYHRGEFELNVKRGKSFRDSAFMGIMRWELYDELKLRYDNVSMTFGYITKYKRIKLGLDKEHYNDAYCICGNLAAKMLSAHHFIRFIPRHSRVLHIQKFSKGGVRRSASAPYWLNGGKPSKSGAMFTMFDKVKFNGIVCFISGSSNGYAALRDINWNKIDGCKTVVTVNKLLLISRKYGGFIVEKK

SEQ ID NO: 13453 - protein, 418 aa, unidentified
MVYVLSKTGQPLMPTENHAKVRVLLKQQKAKIVHSCPFTIQLLYDSTDYTQPVSLGIDAGSRHIGVSATTETKVLYEADVTLRNDIVDLLSTRREARRTRRSRKTRYRKPRFNNRTRKDGWLAPSIQQKVDTHLTTVRKVTEILPVNSITVETASFDIQKIKNPDIAGTGYQQGEQLDFWNVREYVLFRDGHKCQCCKGKSKDPVLNVHHIESRKTGGNAPNNLITLCETCHKGYHNGTVSLPKNIRRGMKFNDAAFMGIMRWAFFNRVKETYEPLGIMVNMTYGYITKNTRIEHDLPKDHFIDARCISGHPDATSGGTVFYQKKVRCHNRQIHKQKILKGGIRKRNQAPYLVKGFRLFEKVKYHGKQYFIFGRRSSGFFDIRTLDGTKVNKGSVSCKKIRSLDMPRSYLTEERKVIV

SEQ ID NO: 13454 - protein, 414 aa, unidentified
MVYVINKQGQALMPTERFGKVRRLLKNSLAHVVCRIPFTIQLDYDTTDYTQPVSLGIDAGSKHIGISATTSEKEMYAADVELRNDIVDKLSTRREQRRTRRSRLRYRKARFNNRVSSKRKGWLAPSVENKIQTHLTVVEKIHKFLPITNIVVETASFDIQKINNPSISGSEYQQGEQLDFFNVREYVLFRDNHICQHCKGKSKDKVLNVHHIESRKTGGDSPKNLITLCETCHKAYHRGDFELNVKRGKSFRDSAFMGIMRWSFYDRLKNIYPNVSMTFGYITKNTRITNNLPKEHYVDARCISGNPTAKPLGYYFYQKKVRCQNRQIHKANFLKGGRKKLNQAPFLVKGFRLFDLVEYQKELYYIFGRRSSGSFDIRKLDGTKVNKGSINCKYLRLIATRKSILTEKRMQVNL

SEQ ID NO: 13455 - protein, 421 aa, unidentified
MQYVYVLNKHGEPLMPCSPGKARLLLKQQKACVVKRTPFTIKLLYGSAGYKQPITLGVDAGSKHVGLSASTEKRELYREEFTPRNDVVDLLSTRRQNRRSRRNRKTRYRAPRFDNRVHSKHKGWLAPSVEVKIQEHITVIKRICRILPITLVRVETAEFDTQRLKAMLKGKPLPVGTDYQLGEMYDEYNVRQYVLKRDNYTCQCCGAHPTEKKPVRLHVHHLESRHVGGNAPNNLITLCVACHKALYEGKITLDKGKKRGKPLRDAAFMGIMRNTLLARLKDELNIPVKQTYGYITKLLREKNKIPKSHVNDARCIAKAPNAKPCDTMLYTRALRHHNRQIHKAKILNGGIRKKNQAPYLVKGFRLWDKVRYNGEECFITGRRSSGYFALKKYDGTVISNSASYKKLMLLEAATNYITERS

SEQ ID NO: 13456 - protein, 478 aa, Simplicispira sp.
MAVFVLDRQGKALMPCTEKRARLLLERGRARVHRLVPMVIRLVDREVASCELQPLRLKLDPGSKTTGLALVRDAQVIDPQSGEVQTSSVVLNLMELVHRGRQISEALTVRRQMRRRRRSNLRYRAPRFLHRGNKKSGWLAPSLQHRVDTCMTWVGRIQRWAPIRAISCELVRFDMQALQNPEISGIQYQQGTLFGYELREYLLEKWGRQCAYCDIKDVPLQIEHIRPKAQGGSNRASNLTLACSCCNQKKAARSIEDFLAKDPKRLANVLASAKKPLRDAAAVNATRWALANALKATGLPVELASGGRTKFNRCTLGIPKTHALDAACVGKIDAIQHWQRPTLTLKATGRGSYQRTRLNKFGFPRGYLMRSKRVQGFGTGDMVRADVPSGAKAGIHTGRVAIRASGSFNIQKHQGGKAVVVQGISHRHCRVIQRGDGYGYFFNRADNTGREQARPTTTDAAHPALYLPALNGGVSRAV

SEQ ID NO: 13457 - protein, 420 aa, unidentified
MQYVYVLSKHGEPLMPCSPEKARLLLKRQKACVVKRTPFTIKLLYGSAGYKQPITLGVDAGSKHVGLSASTETRELYREEFSPRNDVVKLLSTRRQNRRSRRYRKTRYRAPRFDNRVHSKHKGWLAPSVEVKIQEHITVIKHICKILPITLVRVETAEFDTQRLKAMLAGKPLPVGTDYQLGEMYNEYNVRQYVLKRDHYSCQYCGAHTTAEKMVKLHVHHLESRKTGGNAPSNLITLCTTCHENLHKGKVTLDGRERGKPLRDAAFMGIMRKTLMVRLKEELPVPVQETYGYITKMRREQNDIKKSHVNDARCISKHPLAEPCSICYRTKAIRHHNRQTHKVNFSKGGYRKRSQTPYIVEGYRLWDKVLYKGQECFISGRRSSGSFALKKLDGTVVINSITFKKLRLLEPATNYLIERM

SEQ ID NO: 13458 - protein, 221 aa, unidentified
MPNKVYVINKHGRPLMPCSPAKARHLLDDGKAKVKKRTPFTIQLVYGSSGYTQEVILGVDAGSKTIGMSVSTTKEELLSAEVKPRNDVVDLLSTRREFRRARRNRKTRYRKPRFNNRVRSKHKGWLAPSVEVKIQEHITSIKMVCRILPVSKVVVETAEFDLQLLKAIEEGKPVPQGEDYQQGEMYGHYNVRQYVLWRDNYTCQCCGAHPTKKKEVRLHVH

SEQ ID NO: 13459 - protein, 411 aa, unidentified
MFVYVLDKNGQPLMPTSRFGKVRRLLRDKKAKVVKSCPFTIRLLYEPKTKIAQDVILGVDTGSKYVGIACVGNDKVLYQSQTELRDDIKKKMDSRRMYRRNRRQRKTRYRKCRFLNKRNSIREDRYCPTITSKCFGHIREIEFCKRILPIEHLVFETAKFDTQLMEKPWLQEQKWAYRKGVNYGYANAREHALIRDKYTCQCCGKKNCRIEAHHIVFRSKNGSDDLENYITLCEDCHKAVHLGKIELKLKGKHRSNLRHATQMSIIRSMLLRKYPNVIETFGFVTKANRENLGLKKSHCIDACVIASGGLRFKELGVLYRKKCVPVQSRILARGNRGEQRLPTGKVHGFKRYDKVKYLGVVCFVKARRVGGSFTLMDINSKVLDFRGVGGKNYPPIQVHREIKYPKQCFMY

SEQ ID NO: 13460 - protein, 512 aa, unidentified; identical to SEQ ID NO: 2990

SEQ ID NO: 13461 - protein, 420 aa, unidentified
MQYVYVLNKHGEPLMPCFPGKARLLLKQQKACVVKRTPFTIKLLYGSAGYKQPITLGVDAGSKHVGLSASTEKRELYREEFTPRNDVVELLSTRRQNRRSRRNRKTRYRAPRFDNRVHSKHKGWLAPSVEVKIQEHITIIKRICKILPISLVRVETAEFDTQRLKAMLAGKPLPVGTDYQLGEMYDEYNVRQYVLKRDHYTCQCCGAHNTAKKVVKLHVHHLESRKTGGNAPSNLVTLCTTCHKNLHKGKVTLDGKERGKPLRDAAFMGIMRKTLMARLKEELPIPVQGTYGYITKMSREQNDIKKSHTNDARCISKHPLAEPCSVCYRTKAIRHHNRQTHKANFSKGGYRKRSQTPYIVEGYRLWDKVLYKGQECFVSGRRSSGSFALKKLDGTTISKGVTFKKLRLLEPATNYLIERM

SEQ ID NO: 13462 - protein, 513 aa, unidentified; identical to SEQ ID NO: 3179

SEQ ID NO: 13463 - protein, 406 aa, unidentified; identical to SEQ ID NO: 3980

SEQ ID NO: 13464 - protein, 453 aa, Lactobacillus sp.; identical to SEQ ID NO: 4050

SEQ ID NO: 13465 - protein, 431 aa, unidentified
MPNKVYVINKHGRPLMPCSPAKARHLLDAGKAKVKKRTPFTIQLVYGSSGYTQEVILGVDAGSKTIGMSASTTKEELLSAEVKPRNDVVDLLSTRREFRRARRNRKTRYRKPRFDNRVRSKHKGWLAPSVEVKIQEHITSIKRVCRILPVSKVVIETAEFDLQLLKAIEEGKPVPQGEDYQQGEMYGHYNVRQYVLWRDGYTCQCCGAHATKKKEVRLHVHHLESRKVGGDAPDNQVTLCESCHEKLHKGLIAEKDFKKRKRRSTRDATFMGIMRKTLMQRLCSELPIPVIETRGYITKATREKLLVLPKSHTNDALAIAQGKRGFNVGYLPEIAQIDKIYTIRPVRHHNRQLHKATILKGGIRKSNQTEKYVFGYRLFDKVQFNGQDCFIWGRRTTGIFTIKTINGKMIKDGISFKKLKLVEKSTSYLIA

SEQ ID NO: 13466 - protein, 430 aa, unidentified
MLVYVLKQNGQPFMPTARFGKIRRLLKAKKAKVVRKEPFTIRLLYEPKTDVVQECYCGVDTGSRHIGVAVVSNDKVLYQSQTELRSDIKRKMDARRVCRRNRRNRKTRYRKPRFLNRGNSTKSDRLPPSVKHKVQAHIDEIEFCKKILPISDSNLIIEVSQFDTALMKDPRLFSEKVKHWGYQQGFNYGYSSRREAILHRDHYTCQCCGKKNCRLEVHHVKFKSNGGTDDEENLITLCEDCHKGVHAGTVVLSKKPKKSKNLKYATHMSIIRSYLLKKYPNAIETIGFVTSENRNHLNLEKDHYIDACIIASGGLEFKELDVIYYKRRVSKGNYQLTKGFRGEQKIPKGKICGFKRFDKVEYFDNEYFIESRKSSGFATLIDIFGNQIDFSYMPRGMKTPKLSNCKRISARRSCLCISQIRKERAIHVLS

SEQ ID NO: 13467 - protein, 378 aa, unidentified
QLQYESTIHTQEINLGIDAGSKTIGVSATTEKKVLYESEVILRNDIVELLSGRRALRNSRRSRKTRYRKPRFDNRKKPDGWLAPSIRQKIETHVTVVGNVMKILPVTKIIVETASFDIQKIKNPEIEGEGYQHGEQLDFWNVREYVLFRDGHTCQCCKGKSKDNILNVHHIESRKTGGNAPNNLITLCETCHKAYHKGIITLPKEIHRGMRFRDAAFMGIMRWAFYDRLKELYNPLGAEVINTYGYITKNTRIEHGLPKEHYVDARCISDNPAAKPLDHYYFQKKVRCHNRQIHKNTILKGGIRKRNQAAYLVKGYRLFDKVKYQNQEYFIFGRRSSGFFDIRTLDGTKVNKGSISCKKLQLVEKSKHYLTEQRKVAA

SEQ ID NO: 13468 - protein, 374 aa, unidentified; identical to SEQ ID NO: 12633

SEQ ID NO: 13469 - protein, 420 aa, unidentified; identical to SEQ ID NO: 3247

SEQ ID NO: 13470 - protein, 414 aa, unidentified; identical to SEQ ID NO: 6490
  source 1..414: note = Lachnospiraceae bacterium UBA4226

SEQ ID NO: 13471 - protein, 493 aa, Streptosporangium sp.; identical to SEQ ID NO: 3095

SEQ ID NO: 13472 - protein, 444 aa, unidentified
LAKDHNRLQGRGEQNLRVFVLNKRRKPLMPCSSAKARILLKEKKAVVVRRTPFTIQLTIATGETKQPISLGVDAGYKHVGLSASTEKAELYASEVELRQDITDLLSTRLALRRSRRNRKTRYRAPRFDNRVRSKHKGWLAPSVENRINAHLSRIAAVLRILPLTKITVETAAFDTQLLKNPDVSGEAYQQGEQLGFWNVREYVLFRDGHVCQHCHGKSKDPVLNVHHLESRRTGGDSPSNLLTLCETCHKALHRGEIKLKTQRGKSFRAETFMGIMRWTVLNRLKSAYPELDVRNTYGYLTKHARITHGIAKSHCADAFCIAGNFGAKRLGYYYFQKQTRRHNRQIHKLSILKGGLLKRNQAPYEVKGFRLFDKVACKGEDAFIFGRRSSGSFDVRKLDGTRISAGISFKKLRLLEKRRTYLTEIRKEAALPPLPKRRGLRVDF

SEQ ID NO: 13473 - protein, 460 aa, Moorena sp.
LTFAQACAKHERELNPSNRSISIMRVFALDKNRKPLDPCHPARARILLKQGRAKVLRRYPFTIILGDLEIENCVTHFHQLKIDPGAKTTGLAIVQNHRVVWAAELTHRGFQIRDALTSRRQMRRSRRNRKTRYRQPRFLNRKKPEGWLPPSLMSRVHNILTWVKKLIRFCPIAGCSQELVRFDTQKMQNPKISGTDYQQGTLYGYELREYLLEKWHRTCAYCGATATPLEIEHIKPKSKGGSDRGSNLTIACHSCNQAKGNQEIEQFLSNKPSILKGILSQTKRPLADTAAVNTTRWKLYNELKSTGLSVEVGSGGLTKYNRCRQNFPKTHWLDAANVGSVETLYVEDYQPLLITAKGHGTRQICRTDKFGFPKRHCSRIKIHKGFQTGDIAKAIVTKGKKIGTYVGRVATRATGYFNISTNNGLVQGISHRYCQAIHRKDGYSYQFHRASRCYPFSSPL

SEQ ID NO: 13474 - protein, 415 aa, unidentified; identical to SEQ ID NO: 5395

SEQ ID NO: 13475 - protein, 544 aa, unidentified; identical to SEQ ID NO: 11743

SEQ ID NO: 13476 - protein, 430 aa, unidentified; identical to SEQ ID NO: 4817

SEQ ID NO: 13477 - protein, 435 aa, Moorena sp.
MQNYVFVIDTNFQPLNPIHPKKARRLLEKGKAAVFRMYPFTVILKTAIRQSRRCANANPTISPCQVKIDPGSKVTGFALVQKDQVIWAMELEHRGGLIKKKLESRRAVRRGRRNRNTRYRKPRFLNRKRPEGWLPPSLEHRILTTQTWVKRLIKFCPVSEIWVERVKFDTQKMQSPEISGVEYQQGELAGYEVREYLLEKWGRECAYCGKQNVPLQIEHIHPKSKGGSNRVSNLCLACEKCNQRKGNKPVEDFLKKKPKLLQKIKAKAKQPLKDAAAVNATRNRLVKVLQGIKPVITGTGAQTKYNRTKLGFPKQHWVDAACVGNIETLTLKISQPLLVTCKGQGGRQKAALNKCGYPIRHNPLKPIGRRPRCANKGWVTGDLVRHQRLGIGKVTPRSKGSFGFTPLGMKGYKSCKPQDISAIHRKDGYIYSFCG

SEQ ID NO: 13478 - protein, 439 aa, unidentified
VCGYALPAFGQSIWFNERSRMVLVYVLDNHKRPLMPTTPVMARILLKQGRAKVVRKLPFTIKLQYNIVAAQVAPLTLGVDTGSSTLGSAVTDDKGNVLYLSEVAIRNDIAEKMTRRREYRRNRRYRKTRYRLPGSENRKNSIKSDRFSPTMRSKIDSHLKEIRFVESILPIKATILETASFDPHALKNPEVLANPLLYQQGINYGFANTKAYVLDRDSYTCQHCAGKSKDRRLHVHHIIFRTNGGSDEEENLVTLCKTCHVELHAGSISLKLTGKKKGQLRHATQMNSIRVQLLKRLPEARETFGYITKEHRQLFTDVKDHSVDAVFIATQGMKPIFKTSLVIQKKCVSDGDYRQTRGARSEECIPTGKIMGFRKFDATFYRGERYFIMGRMSTGYAILMNIAGETVKLKPIPKLHLMARAAARKSWIISQRTMANVCS

SEQ ID NO: 13479 - protein, 420 aa, unidentified; identical to SEQ ID NO: 3504

SEQ ID NO: 13480 - protein, 410 aa, unidentified
MTNYAFVLDVNGKQLAPTKEQKAWFLIRKKRATLISKYPMVIQLKKEISDEQICKDEICCGIDDGGLYVGVALVQKCKTKNKVVFKGTIEQRNDVKHLMEVRKGYRGYHRFHKRYRQARFNNRKSSKRIAPSILQKRQATIRVIKQLNKWINIANYLLEDVAIDIRALTDGYKLYRWQYQQSNRLDENIRKTVILRDDCKCMECGKSNCRLEVHHIKPRRLNGSNTLDNLISLCETCHQRTEGQEELYMDRYFSILNSTDNKNLNYAQHVMIGKKWLREQLSELGTLILTTGGDTANKRIDWNIEKSHSNDAICITGLQPDTCNVKEWTIKPMRRQSKAKTDNVLGIKHRDLVEYTFRNGETHRGYVTALYPEQNALNFQSPTKHCKRVNAKKCKLIWKYSKIYWLDNVS

SEQ ID NO: 13481 - protein, 406 aa, unidentified
MVYVQDIDGRPLMPTTRHGKVRRLLKSKKATVVNLCPFTIRLLYDTIGYKQEITLGVDTGTKHVGLSATTKSKELYASEVILRSDVVDLLSTRRELRKIRRYRLRYRKPRFMNRIKSKKRGWIAPSIRQKIDSHIRIIGFVYSILPVSKLIIEVAQFDTQKIKNPEISGKEYQEGEQLGFWNVREYVLARDEHKCQHCKGKSKDPVLNVHHIESRKTGGDSPSNLITLCKTCHKEFHKGNIKLKVNRGESLRDAAVMSIMKWELYDELKSLYPNVKITFGYITKYNRINHGIEKSHVSDAFVISRNFDSERLGYYYKRKLVRRHNRQIHKMKAPKGGNKRMNQSPFKVFGFRLFDKVMFQGKERFIYARRLRGIFNIRDINGENKKDISYKKLEYVSHGLISIVAG

SEQ ID NO: 13482 - protein, 426 aa, unidentified; identical to SEQ ID NO: 3614

SEQ ID NO: 13483 - protein, 446 aa, unidentified
MAVYVLDKSGKPLMPCSEKRARLLLARGRARVHRLAPLVIRLVDRRLTDSAVQPLTLKLDPGSRFTGLALVRQQDRGVSVLSLLELIHRGAAISKAMGQRASYRRRRRSQNLRHRAPRFDNRNRPEGWLPPSLRHRLDTTLSWVQRLRRWAPITDLTIERVKFDLQKLQNPEISGIEYQQGALQGYEVREYLLEKWGRSCAYCAAESVPLEIEHILARSNGGSDRVTNLTLACRPCNQRKANQPVEVFLKGKPELLTRIKARSKAPLRDAAAVNATRNALFDALLQTRLPVATGTGAQTKFNRQRLGIPKTHALDAACVGEVESVASWRRPTLAIKATGRGEYQRTRLTAHGFPRGYLTRQKRHFGFQTGDQVRAQVTAGKKAGAHQGRVAVRQTGSFNIQTPHGVVQGVHHRHCTLIQRADGYAYSQLPFDSAQPRKEAARAGAR

SEQ ID NO: 13484 - protein, 512 aa, unidentified
MSTVYVLNKDGKPLMPTTRGGHVRHLLKEQKARVVQSNPFTIQLLYETNDVVQPLYLGIDPGRTNIGVAVVKADGTAVFAAHLETRNKKIPKLMQDRKKARRARRTNGRRCRRQRRAKANGTISKKCVKQDTAQSKNPSKRAKEIGVIKRHLPGCKKDVLCVGIKNKEAKYTNRARLEGWLTPTANQLLQTHINLVKKIQKFLPISDVVLEVNKFAFMRLDNPNIQKWQYQRGPLYQKGSLENAVSEMQEHHCLFCEKPIEHYHHVVPKSENGSNTIANIVGLCAEHHNLVHKDVAWQEKLVEEKTGLNKKYGALSVLNQIIPALTKELSFLFPKHSFMTNGKSTHDYRAAHGISKDHWLDAYCIACSVLPIDVCDSTINNCVPYELKQFRRHDRRALNNENMNRVYTLNDKVVATNRHKATEQEAASLEEFRKEHPNDVCKLKVKEHHPTYRNMNRNYPGSVFLVGKQIHVMQGIASSKDGKATKYNDTRATTIAAGKCKFVAKNSGILFV

SEQ ID NO: 13485 - protein, 469 aa, unidentified
MNKVFVLDKNKVPLMPCHPARARELLTKGRAAVYRTAPFTIILKDRTVEDSVLQPLELKLDPGAKTTGIAINAWFKTNPENKQATLIFGANLTHKAFQIKDALTKRAILRRSRRGRKCRYREKRFNNRKNKKEGWIAPSVQSIVNNIDTWIKKLIKLAPIKFISAEINKFDSQKLQNPFISGVQYQQGTLIGYQIRQYLLEQYDYTCIYCGAKNIPLEVDHVIPRTKSGSNRVSNLVISCKPCNLAKSNLDLNQFVKDPKKLAIIKAGLKKPLRASAYVNIIRKKLVLLIESYGLPYLLGDGATTKFNRTKQRYLKDHFIDAACVNEGAGSNVYIKPGFKPLLIKAMGRGDHQVSHVDKYGFPTGEPARGKRFFDFTSGDIVQFTHTLTRRSFRINPRKTGTFNIIDLELRVILKFKDQKLSKQKLNQLVTKIKTMTKTQVKTLKLPASVNHKNLKLVQRNDGYKYSYS

SEQ ID NO: 13486 - protein, 544 aa, unidentified
  source 1..544: note = Proteobacterial sp.
LEKLHGDQGEFLRLAIDERTMLHAELKTNGGVLPQLRPLEAQAADSLRGSARNGSACDAGMQPARGESSEHASPEPSPAKAECGVSRVFVLDKKNRPLMPCLPARARKLLRAGKAVVARRFPFTIRLKERQSGAVQPVRVKIDPGAKTTGLAVVREGGNGQYVLHLSELTHRGWKVQKSMGQRSAYRRRRRSSNLRHRAPRFDNRPKPNGWLPPSLRCRVDNVIAWVGRFRRLSPVSAISVERVKFDTQLMENPDISGAEYQNGSLFGYELKEYVLEKCNRTCQYCGGLSKDPILEIEHVVPRNPKSGTRGSNRLSNLTLGCRTCNLAKGNLLPQEWLECLSKSQSRLDKRRAAGLERILDGKKPSLAPAAAVNATRNALYFSLIATGLPVETGTGGRTKYNRHRLLVHKAHCLDAACTGEVSSLHGWKQPVLLVTAMGRGSYQRTRVDKYGFPRGYLMRQKSVHGFQTGDIVQATVPKGKNTGTYVGRVAVRASGNFNIKVGATTITDVGWKHCRLISKSDGYGYARAALPLPPEGSSPRAEE

SEQ ID NO: 13487 - protein, 420 aa, unidentified
MQYVYVLNKHGEPLMPCLPGKARVLLKQQKACVVKRTPFTIKLLYGSTGYKQPITLGVDAGSKHVGLSASTEKRELYCEEFTPRNDVVDLLSTRKQNRRSRRNRKTRYRAPRFDNRVHGKHKGWLAPSVEVKIQEHITVIKRICRILPITLVRVETAEFDTQRLKAMLAGKPLPVGTDYQLGEMYDEYNVRQYVLKRDNYTCQCCDAHTTAKKVIKLHVHHLESRKVGGNAPSNLITLCTTCHNNLHKGKITLDGKKRGKTLRDAAFMGIMRNTLLTRLHNELNIPVQNTYGYITKLLREQNDIKKSHVNDARCISKHPLAEPCSVCYHTKAIRHHNRQIHKAKILKGGIRKANQAPYIVKGFRLWDKVLYNGQECFISGRRSSGYFALRKLDGTAITNSISFKKLQLLEPATNYLIERM

SEQ ID NO: 13488 - protein, 453 aa, Erysipelotrichaceae sp.; identical to SEQ ID NO: 4156

SEQ ID NO: 13489 - protein, 447 aa, unidentified; identical to SEQ ID NO: 8397

SEQ ID NO: 13490 - protein, 414 aa, unidentified; identical to SEQ ID NO: 2588

SEQ ID NO: 13491 - protein, 620 aa, Streptomyces sp.; identical to SEQ ID NO: 11696

SEQ ID NO: 13492 - protein, 392 aa, Halomonas sp.
MAVFVLDKKKQPLMPCSEKRARLLLARGRAVVHKRYPFTIRLKNRVGGEAQPLRLGIDPGSKTTGLALIREPDSQQRHVLCLFELIHRGYQIKKALQQRAAFRRRRRSANLRYRAPRFNNRTKPKGWLAPSLQHRVDTVTAWVNRLNRLAPVTAISQELVRFDTQKLDNPEINGVEYQQGTLLGYEVREYLLEKWGRECAYCGTADTPLEIEHVIPRSRGGSNRVSNLTLSCHPCNQSKDALSLVDFFATDKGLKKRLKANGHTANARLERVQRQLKQPLRDASAVNATRWALFSALNATGLPVTVASGGRTKYNRQRLNIPKSHALDAACVGAFEKLHDWTVPTLTIKAMGRGSYQRTRLTKYGFPRGFLMRQKQVHGFQTGHGACDSTHR

SEQ ID NO: 13493 - protein, 498 aa, unidentified
MPTTRCGHVRHLLKEQKARVVASKPFTIQLLYKTNDVVQPLYLGIDPGRTNIGVAVVKADGTAVFTAHLETRNKEIPKLMKKRKDSRRARRTNGRRCRRQRRAKANGTISKKCVKHDTAQNGSVSKRAKEIGVIKRHLPGCEKDVLCIGIKNKEAKFSNRTRPEGWLTPTANQLLQTHINLVKKIRKFLPISDAVLEINKFAFMQLDNPNIQKWQYQQGPLYQKANLEEAVSEMQEHHCLFCKKPIAHYHHVVPQSENGSDTIGNIVGLCTKHHDLVHKDTAWQKKLAKKKTGLNKKYGALSVLNQIIPALTKELSSLFPKHFFATNGKSTYDYRSAHGVSKDHWLDAYCIACSVLPNDVCDSGINNRVPYELKQFRRHDRRALNNENMSRVYTLNDNVVATNRHKATKQTTDSLEEFRQNHPDDVCKLKVKEHHPTYRNMNRNYPGSVFLIGKQVHVMQGIAGSKDGEATTYKDTNANSIAAGKCKFVAKNSGILFV

SEQ ID NO: 13494 - protein, 432 aa, unidentified; identical to SEQ ID NO: 6011

SEQ ID NO: 13495 - protein, 455 aa, unidentified; identical to SEQ ID NO: 12675

SEQ ID NO: 13496 - protein, 509 aa, Kandleria sp.
  source 1..509: note = isolate UBA3656
VSTALSFLREGRKRGYVIMSGKKNKSNHYIYVVDRHGNPVMPSRRPGRIRHLLKEGKAVPISTHPFVVKLKYDIPGRTQPIHLGIDTGRENIGVGASLENGENVFLSDVETKNKAVTKAMSDRRAYRMSRRRHRREKKQRHAHTKKSEMKNGRPAVKGERHTRKTIGRDIQYPGCKNPVTHKVIKGKEARIANRRRDEGWQTPSARQLIQTHMRIVKSVMKFLPVTHITIEMVSFDFQKLANVEIRDWEYSEGPLHGFKSPADYVWSRQNGKCYFCDKKIAVCHHAMHKAKGGSDRVGNLVGLCSECHQKLHSDMSMDKRLQEEFGMPRTRVSVLNSAMPEIDRQMRALCDARGIVYATCTGFDTYEARKRYGIPKDHCTDGYAISLYGRNANNVRLTDSVCMMRRFRKKSGSIIQKLNQRVYKLKGKVVAVNRHKRTDQKEPALDDYMSRYAQTHSEAECRRHFHELKIIPAKRTYTYRKQKLVSPVHIGDTVRYEKRNKTSGITKKA

SEQ ID NO: 13497 - protein, 283 aa, unidentified
LLPVTKITVETASFDIQLLKNPNIAGKEYQEGEQLAFWNVREYVLFRDGHVCQHCHGRSKDPVLNVHHLESRRTGGDSPGNLITLCETCHRALHRGEMKLRAKRGQSLRAEAFMGIMRWEVLGRLKTSHPELEVNNTYGYRTKHVRIRNGIAKSHCADAFCIAGNLGAERLGEFFFQKQTRRNNRQIHKLSILKGGIRKRNQAPFEVKGFRLFDKVACKGEEGFIFGRRSSGFFDVRKLDGTRISAGLSCKKLHLLEKRQTYIKEIRKEEALPPLPDGRDLRA

SEQ ID NO: 13498 - protein, 414 aa, unidentified; identical to SEQ ID NO: 2588

SEQ ID NO: 13499 - protein, 431 aa, Escherichia sp.; identical to SEQ ID NO: 3801

SEQ ID NO: 13500 - protein, 415 aa, unidentified
MVYVLANDGQPLMPTERHGKVCRMLKSGMAKVVKKCPFTIQLQYESERNVQPVSLGVDAGSKHIGISATTKTKVLYESDVELRDDIVKLLATRRQLRRSRRSRKTRYRPVRFDNRKRKEGWLAPSIRQKIGSHLTVVANACKILPINQIIVETASFDIQKIKDPEIQGIEYQQGEQMDFWNIREYVLFRDGHTCQCCKGKSKDKVLNVHHIESRKTGGNAPNNLITLCETCHKGYHNGTVTLPKNIKRGMKFKDAAFMGIMRWTFYNTLKEQYEPDIPVHYTYGYITKNTRINHNLPKGHCIDARCISGNPDAVSDGTYYYQKKVRCHNRQIHKQTILKGGIRKSNQAEYLVRGFRLFDKVRYQGREYFIFGRRKSGFFDIRTLSGEKVNKGSINVKRLTFVDTRKNYLTERRTV

SEQ ID NO: 13501 - protein, 502 aa, Flavonifractor sp.; identical to SEQ ID NO: 2616

SEQ ID NO: 13502 - protein, 426 aa, Parasutterella sp.; identical to SEQ ID NO: 3045

SEQ ID NO: 13503 - protein, 458 aa, Scytonema sp.; identical to SEQ ID NO: 6982

SEQ ID NO: 13504 - protein, 472 aa, unidentified
LYFLLILLNLLKESSVMTNIYILDINGKPLMPCHNGAFVRCRLKNKEAKVVKRKPFTVQLMYEVKNNYKQDIYLGVDAGYKYIGFSASTSNQELFSGELEQDCGMVERNKERRMYRRQRRSRLRYRKARFNNRKAGKPQGWTAPSLQRKRDTHLRFIMMLSSIMPITDINVEIGLFDPALMKATAEGRTIKGADYQHGEAEGFENMKSYIRYRDSYTCQNPDCKCHKMKKEDREKLKLHVHHIGYYKHDRSSRPGNLITLCELSHTPETHQPGNLLYGWKPKMKSLRETAFMNTVRKEIVDTLKVIYPDKTVRYTYGYKTNLTRRDWHVPKSHHDDAFCIAGQYSLKRAETIYFNQQRRNNRSLEIFHDAKYIDSRDGKRKTGKELYCGRNTRNKNFNKENLHQYRSKKVSKGKRNIRKQHYKYQPNDIVVFEGQKYKIRGSHCKGSRVILDTKKSVSVKKIHILKHCSGIC

SEQ ID NO: 13505 - protein, 279 aa, unidentified
VVVETAEFDLHLLKAIADGKPVPQGEDYQKGEMYGHYNVRQYVLWRDNYTCQCCGAHATKKKEVRLHVHHLESRKVGGDAPDNQVTLCESCHEKLHKGLIAEKDFKKRKRRSTRDATFMGIMRKTLMQRLYSELPIPVIETRGYITKATREKLLVLPKSHTNDALAIAQGKRGFNVGYLPEIAQIDKIYTIRPVRHHNRQLHKAAILKGGIRKSNQAGKYVFGYRLFDKVQFNGQDCFIWGRRTTGIFTIKTINGKMIKDGISFKKLKPVEKSTSYLIA

SEQ ID NO: 13506 - protein, 418 aa, unidentified; identical to SEQ ID NO: 6784

SEQ ID NO: 13507 - protein, 427 aa, Scytonema sp.
MPKVFLIDTDKKPLDPIHSAQARQLLRNGKAAIFRRFPFTLILKESRPDAPVQPLRLKIDPGAKTTGFALVNDATGEVVLKSELQHRGFAIRDALTSRRQIRRGRRARKTRYRAPRFNNRKRPSYWLPPSLQSRVENIKTWVKRLIKLAGIGAISQELVRFDMQLMLNPDIQGNEYQQGTLAGYETREYLLQKWDRTCVYCGAKDIPLQVEHIHPRAKGGSNRLSNLTLSCEKCNVKKGTKDVKDFLKKDPEKLKRILSQTKKPASDAAAVNTTRFALLQCLKQFGLPVETASGGLTKFNRSSQLLDKQHWIDAACVGKSTPTLNIKGVKPLLIKAIGHGNRQMCITNKFGFPIKHRSNIKFHFGFRTGDMVRATLPTGKFAGTHVGRVVTRATGVFEMVTVNGKISPVRYKYVHKIQRHDGYSYGT

SEQ ID NO: 13508 - protein, 423 aa, Arthrospira sp.; identical to SEQ ID NO: 3350

SEQ ID NO: 13509 - protein, 448 aa, unidentified
VQLAEQALKTLAKRTLPRNGVSQMSNFVFVLDTNKRPLDPVHPGAARHLLNAGKAAVFRKYPFTIILKEACPDVPVQDLELKLDPGSKVTGIAIKQGNKLIFGAELQHRGQQIKDALLSRRQLRRSRRNRKTRYRKARFLNRTRPDGWLAPSLQHRVLTTLTWVRKFMRLAPIASIAQELVRFDVQLISNPEISGVEYQQGELQGYEVREYLLEKWNRKCAYCSVENVSLEIEHIQPKSKGGSDRVSNLALACHPCNQSKGNQDIRDFLADKPDLLSRILKQAKSPLKDAAAVNSTRWALFNALKITGLPVTTGTGGQTKFNRTRLNLPKSHWFDAACVGNVGTLKVLASKPLLIAAKGHGSRQMCGTDKYGFPTRHKSRVQIHKGFQTGDIVTATVTAGKKIGSYVGRVLCRASGSFDINTTAGRVAGISHKYCKPIHKKDGYSYGF

SEQ ID NO: 13510 - protein, 411 aa, unidentified; identical to SEQ ID NO: 2663

SEQ ID NO: 13511 - protein, 470 aa, unidentified
MSVFVVGLNGCRLMPTSERKARLLLKQGKAFVEQKVPFTIRLNYKIGSTTQLGYLGIDTGSQHIGVSVVREDGTVLHKEEIGLRDSMSKRKLLEAKASLRRGRRYRKTRYRHPKWRPKTKRVYCEVPDRKGRHWQKKKITFTSKRPKGWLPPSLQSKTDHHIRWIKKLQDLLPEGYRLSIELGRFDPARMKNPEIHGDLYQKGPQYDYENVRAYVLDRDRYTCQICKKKGGKLHVHHILYRSHGATDDPQYMVTVCSDCHSAQNHLPGGILYQWMQEQKRFSRGLRDATFMNILRKRLIRAFPEAVFTYGNVTKVDREKLKLPKSHGNDATAIALVKTGITAVKDKESVICIQQVRRKKRSLHEETPRKGRKEPNRTAARNNKNTKAVTVTKRQNKKKVSMTGCLFDRVELNGKKGWISGFTGKSCYVKDADDQYLSTSPKYKQVSLSKLRILHHCGNWIIGAKKTLGKG

SEQ ID NO: 13512 - protein, 412 aa, unidentified; identical to SEQ ID NO: 6276

SEQ ID NO: 13513 - protein, 457 aa, unidentified
  source 1..457: note = Candidatus Competibacteraceae bacterium
MAVFVLDRHQKPLMPCSEKRARKLLACGRARVHRLMPFSIRLVDRTVNESVLQPVKIKLDPGSKTTGMALVRESETIDDATGEIHTTVHVLNLLELHHRGQQISESLTARRQMRRRRRSKLRYRKPRFLNRGNKSKGWIAPSLQHRIDTVSAWVNRFQRLAPITGIAQELVRFDAQQMENPEISGIEYQQGTLAGFETREYLLNKWVRECAYCGARSVPLQIEHIHPRARGGSNRVANLTLACQPCNQQKGAQEIEVFLAKDPKRLARIQAHAKAPLKDAAAVNSTRWALFNTLKSTGVPVTTGSGGRTKFNRAQLQIPKTHALDAACVGNIEAIQGWKKPTLAIKATGRGSYQRTRLNAYGFPRGYLTRQKRIKGFQTGDMVKAEVTKGKKTGSYLGRVAVRASGSFNPQIAQGVVQGVGYRYCKVIQRADGYGYSQLGTFQKEAELRSARSASPA

SEQ ID NO: 13514 - protein, 520 aa, Nocardiopsis sp.
MATFRAGRKTHRAVLPQRPALESAPADTPRIGNETGRGDHHPVVPGAEHGRGETGTAPPGGSGVTPAPSGAGERGREAHTPHPFVFVLDEHGTPLQPCPPARARKLLAKGRAVVHRRTPFTIRLRGRTAADSRIDGVEIGIDPGSRHTGLAVFTAVAGERRDRYAIRLDHRGPAIRKKMGQRSGYRRRRRSAHLRHRPPRFDDRTRPAGWLAPSLRHRVGTTVSWVGRLSRLAPVRAAHVERVAFDTHALSADQPLEGVEYQHGALHGFEVREYLLATFDRACVYRGATNTPLNLDHVRPRSRGGSDRVSNLVLACVPCDQAKSNRPVEEFMARKPKLLAQTLARAKAPLRDAAAVQSTRWALWRALDSRLPTHVGSGGRTKWNRTRNRLPKSHTLDALAVGEIDTITQTVDTVLVAGCTGRGSYARTRPDRHGFPRLRLPRTKRFFSFATGDLVRAVVPTGKETGTHTGRVAVRSSGSFNVTTAHGTVQGIHHRHLRLLQRADGYTYTTRKEKGVSSRP

SEQ ID NO: 13515 - protein, 371 aa, unidentified
MLRTNLWPVSSSGTPRPGSVTGNAVRTGSPPTVQHLVQTHLNIIRKISRYLPVTDIAIEVNRFAFMHMENPKAVGVDFQNGPLKGYDDVKEAIRTQQHGKCLMCKKPIAHFHHIVPRSRGGSDTIQNLAGLCTEFHTKVHTDTAFRKDFDEKKSGQLKKYGALSALNQAVPFICKKLLEEYGEEHVHFCRGLDTSLIRTALGFEKTKKNQMHEVDAYCIGLAALEVNEVETPAFDHTFQIRQFRRQDRSIIHHQTGRSYYQGKEKVAQNRKPGFEQKTTALSQWYKEQVRIHGEKEAEKLRSQLRVEKSCRHYNDMDRFLPGAVFLYEGKRYVLSGRITNGKYLRACGQGMKNFPAAECTFIRHNAGLVFI

SEQ ID NO: 13516 - protein, 512 aa, unidentified
MSTVYVLNKDGKPLMPTTRGGHVRYLLKEKKARVVTSKPFTIQLLYETDDVVQPLYLGIDPGRTNIGVAVVKTDGTAVFTAHLETRNKEIPKLMQGRKKARRARRTNGRRCRRQRRAKANGTISKKCVKQTTAQNGSVSKRAKKIGVIKRHLPGCEKKVLCIGIKNKEAKFSNRTRPEGWLTPTANQLLQTHINLIKKIRKFLPVNDVVLEINKFAFMQLDNPNIQKWQYQQGPLYQKASLEEAVSEMQEHHCLFCKKSIVHYHHVVPQSENGSDTIGNIVGLCTKHHDLVHKDTAWQKKLAKKKTGLNKKYGALSVLNQIIPTLTKELSSLFLKHFFVTNGKSTYDYRAAHGVSKDHWLDAYCIACSVLPNDTCDKNINGRVPYKLKQFRRHDRRALHKENMSRVYTLDGKKVATNRHKAIKQTTDSLEEFRQRQPNDVCKLKVKEHHPEYRNPERNFPGCVFLVGKHTHVMQGTSGSHNGKADGYYDTNGNSYSSGKCKFVAKNKGIVFA

SEQ ID NO: 13517 - protein, 413 aa, unidentified
MTSYAFVLDANGKQLAPAKEQKAWFLIRKKRAALVSKYPMVIQLKKEIPENEICKDEIRCGIDDGGLHVGIALVQKCKTKNKVVFKGTIEQRNDVKHLMEVRRGYRRYHRYHKRYRPARFDNRKSSKRKKRIAPSILQKRQAIIRVIHWLNKWINITNYWLEDVSIDIRALTDGYKPYRWQYQKSNRLDENIRKAAILRDGGKCMECGKSNCRLEVHHIKPRRRNGSDTLDNLITLCKSCHQKTEGQEELYMDRYFSLLKSSDHKNLNYAQHVMIGKEWLRKQLSSLGVLYLTNGGDTANKRIDWNIEKSHANDAVCITNLQPDTYDMKEWTVKPMRRQSKAKTDNVLGIKHRDLVEYTLKNGETHRGYVTALYPEQKAINFQSPTKHCKKVNARKCKLLWKYSKIYWFENAS

SEQ ID NO: 13518 - protein, 470 aa, unidentified; identical to SEQ ID NO: 2825

SEQ ID NO: 13519 - protein, 430 aa, unidentified
MPKVYVLNRHGRPLMPCTPAKARHLLDAGKAKVRHRTPFTIQLLYGSTGYTQEVILGVDAGSKTIGLSAATETEELFSAEVKPRNDVVELMSARRQFRRARRNRTTRYRKPRFDNRVRSKHKGWLAPSVEVKIQEHMTAIRRACAILPVSKVVVETAEFDLQLLKAVAEGKPVPQGEDYQKGEMYGHYNVRQYVLWRDSYTCCICGVHGSVRKGVPLHVHHLESRRVGGDAPDNLVTLCTACHDKLHKGIIMAADIKKRKRRSTRDATFMGIMRMTLLRRLREQLPVPVVETRGYITKATRENLLVLPKSHANDALAIAHGPQGFRAEHLPNIRQADRLYTISPVRHHNRQLHKATILKGGVRKTNQAEKYICGFRLYDKVLYNGIECFVWGRRTSGSFLLRQLNGEKVKDGVSYKHLKLLERSQSYLVA

SEQ ID NO: 13520 - protein, 424 aa, unidentified; identical to SEQ ID NO: 9122
  source 1..424: note = Cyanobacterium sp.

SEQ ID NO: 13521 - protein, 416 aa, unidentified
MVYVLDKNGQPLMPTDRHRKVRLMLQSGQAKVIKRCPFTIQLNYDSGHQTQEISLGIDAGSKHIGVSTTTKIKVLYEVDVELRNDIVDLLSSRRELRRGRRNRKTRYRQAKFNNRRRGNGWLAPSIRQKIGTHLTVVENICKMLPISRIMVETASFDIQKIKNPDIQGAEYQQGDQLEFWNVREYVLFRDGHICQCCKGKSKDKILNVHHIESRKTGGNAPNNLITLCETCHTGYHKGTVQLPKAIKRGMRFKDAAFMGIMRWAFYEALKQQYEPVGTPVHNTYGYITKHTRIAYNLPKEHYVDARCISGNPEASSNGEYYYQKKVRCHNRQIHKLTVLKGGIRKQNQATYLVKGYRLFDKVSYQGKGYFVFGRRQSGFFDIRTLSGEKVNKGSLSCKKLKFIATRTYYLTERRAV

SEQ ID NO: 13522 - protein, 437 aa, unidentified
MPCSEKRARLLLARGRACVHRLVPFVIRLTDRQLDTCTLQPLRIKLDPGSKTTGLALVRDTEHLNTDTGEIQRGVAVLSLIELVHRGRQISEALTARRQMRRRRRGCLRYRAPRFLNRGNKARGWLAPSLQHRINTTTAWVARFRRWSPVTALSAELVRFDMQRLQNPEISGVEYQQGTLAGYEVREYLLAKWSRKCAYCGVENVPLQIDHIHPKAKGGTNRVSNLTLACGPCNARKSAQSVDAFLAKDPKRLTALLAQAKRPLKDAAAVNATRWALVGALKATGLPVETASGGCTKFNRSRLAIPKTHALDAVCVGAVSVVTNWQKPSLTIKCTGRGSYQRTRLDKYGFPRGYLMREKSVKGFKTGDLVRAIVPTGKKAGRHTGRVAIRKSGSFNIQTLAGVVQGIGYRHCRLLQRADGYGYFFNKAACDTAQKRE

SEQ ID NO: 13523 - protein, 469 aa, Streptomyces sp.; identical to SEQ ID NO: 6877

SEQ ID NO: 13524 - protein, 453 aa, unidentified
MSVAVVSKTGMLLMPTSEYRARKPLKSKKAIIHGYHPFTIQLTERETGYIQPVELCMDTGYIHIGTSVKSEKHEYLGEQIDTLTDERQKHDACRMYRRQRRNRKRYRQPRFNNRERDDGWIAPSLEHKKTIHIQAISRICKVMPVTDITLEMGNFDTQVLKAREEGRPLPQGLDYQHGERYSVTTLREAVFLRDGYTCQCCGRTIKDGAILHAHHVIYRSQGGTNRISNLITVCDKCHTPANHKPGGKLYGWKPKVASFKGATYMTTIRWKLYNEVKALFLDIDIHITYGAETKERRRAFDITKSHVNDAFVMGQFHPKHRSKPVCYKKKRRNNRCLEKFYDAKYIDSRDGKKRTGQELFNGRISRNHKKDSENLHQYRRQKISAGKRTIRKQHYAIQPHDIVIFNGEKFETSGCHNNGTRVILLPQKKSVAIKKLNIYRYAGGYFKSAFNQK

SEQ ID NO: 13525 - protein, 529 aa, unidentified; identical to SEQ ID NO: 8480

SEQ ID NO: 13526 - protein, 455 aa, Halomonas sp.; identical to SEQ ID NO: 5795

SEQ ID NO: 13527 - protein, 414 aa, unidentified
MPCSPAKARLLLKEKKAIVKRRTPFTIQLTIATGESKQPVSLGVDAGYKHVGFSASTEKAELYASEVELRQDVSDLLSARRALRQSRRNRKTRYRAPRFDNRIRTKRKSWLAPSVENRINAHLSRIEAVLRLLPVTKITVETASFDMQLLKNPDISGKEYQEGEQLGFWNVREYVLFRDGHVCQHCHGRSKDPVLNVHHLESRRTGGDSPGNLITLCETCHKALHRSEITLKTKRGQSFRAEAYMGLMRWEVLNRLKTSHPGLEVHNTYGYRTKYTRIVNGIDKSHCADAFCIAGNLGAERLGEFFFQKQTRRNNRQIHKLSILKGGIRKRNQAPFEVNGFRLFDKVACKGEEGFIFGRRSSGFFDVRKLDGTCISAGISYKKLHLLEKRRTYLTEIRKEEALPPLPEGSGLRA

SEQ ID NO: 13528 - protein, 431 aa, unidentified
MPDKVYVISRLGHPLMPCSPAKARHLLDDKKAKVVKRMPFTIRLLYGSTKYIQPIILGVDAGRKTIGLSASTAKGEVFAAEVMPRNDVVENLSTRREFRRARRNRTTRYRKPRSDNRVRSNHERWLAPSVKVKIQEHITSIKRVCTILPISKVVIETAEFDLQLLKAIQEGKTIPEGEDYQKGEMYGSYNVCQYVLWRDNYTCICCGVRGTPKNPVRLHVHHFESRKYGGNAPDNHGTLCDDCHKKFHLGIIADVKLKTRRRQSTRDAAFMGIMRKTLMWRLRTELFIPVAETKGYITKATREKLLVLPKSHTRDALAIAQGRHGFSIKEYAYVEPANHIYTVRPVRHHNRQLHKASILKGGIRKRNQASKYVFGFRLYDKVLYQGKACFVWGRRTSGTLLLRTIDGIKVKDGVSYRNLTLLERSSNYLIA

SEQ ID NO: 13529 - protein, 442 aa, unidentified; identical to SEQ ID NO: 7213

SEQ ID NO: 13530 - protein, 426 aa, Anabaena sp.; identical to SEQ ID NO: 9126

SEQ ID NO: 13531 - protein, 537 aa, unidentified
MQYVYVVDKHGKALMPTTRYRHVRKLLKSGKAVAICNKPFTTRLKYESSTYTQDLWEGIDTGRQNIGDAVSNEKGENVYLADVRTNNKSIKSNMQDRAGFRRERRRHDRQSKQRKAKHDGTEIQNGDDDTVRTKHSCKSIKISYPTADEPVIHKVIRGKEGKFANRKRPEGWITPSARQVIQITMNEIRQTARILPVNHINLERISFDFQKLENQDIRRWEYGKGVLYGYKTYKNYIWDEQHGKCACCGKPITQYHHIIHRTEGGIDSVKNIIGLCNGCHNKIHASKDAEDKLKGLKEGVRQRYYVGLLNSVIPALIEEVSAYCDEHGIEFTVTDGKTTAETREKYGLSKDHCTDAYAISLADRDVKSVSVSDRIYEKRRFKKKSGNIIAKRNQRIYKFDGKIIAYNRHKATNQKDDSFEEYMTKYAETHTDKECRQHVAQIEIIPAKRTYTYHKQGLVAPCHAGDIVRYEKHNKIKGNTKKDTFVATSVEMNGEGHIKYGDACGSRKIKFCRPIDSGCLQAVHNYQADEYLRKIAE

SEQ ID NO: 13532 - protein, 391 aa, Methanobrevibacter sp.
MLVYVLNKYEKPLMPCKPAKARKLLKNKKAIVINREPFTIKLLYGSSGYKQNISLGVDPGSKIIGLSATTEKKELFASNVELRNDIVNLISTRKEYRKNRRSRKTRYRKPRFDNRRKKEGWIAPSIKNKIDTHLNVIENIYKILPITKLIVETASFDIQKIKNPRISGEEYQKGVQLNFYNIREYILTRDNHICQHCKGKSKDSILNVHHIESKKIGGNSPDNLITLCKTCHMDFHNGKIDLNFKRKSSFRDATFMGFIGQRLYEILKKIYVNVHVTYGYITKNIRIKQGLPKEHYVDARCISGNPNVEPLDYYFYQKKVRRHNRQIHRGNPKKGKRSLNQAPYIVKGFRLYDKVLYNNQECFIFGRRRNGYFLLKRLDGTIIHGTAIIKN

SEQ ID NO: 13533 - protein, 417 aa, unidentified; identical to SEQ ID NO: 5520

SEQ ID NO: 13534 - protein, 545 aa, unidentified
VQFAWWLCHPKPSDNIEDVKHETALMLLQIKAGTETFGTAPCGSGPKAEGVSPERKAMNTVAVVTNTNKPLMPTSPYRARKLLSSGKAKIVKHRPFTILLVNRSDGNVQEIEYKSDTGYLHVGISVCSEKREFVREQRDLLPDEKEKHNDRRKYRRTRRNRKRYRKARFDNRIGKIRKKEKNEHVWLPPSLEHKVDAQVQLFLRLYQVMPVKRAVFEMGQFDPALMKALEKGESAPQGIDYQMGERYQIATRRAAVFTRDRYACVFCGRSIKDHAILHVHHIGFWKQDRSNRLDNLATCCEQCHTSENHRPGGILYGVEPKLESLASATYMNVVRFELLRRLKEAAPDVEFHISYGAKTSVIRKQRSISKSHTNDAYCLGQYFPKLRAEEIGFQKIRRNDRILQKFYDAEYLDSRDGTTKKGKELTNGRISRNHKKDHENLHQYRGKKLSKGRITIRRGRSSLKPGGLVRFDGEVLTVHGTHRSRKKNKAGHIKVSVNVEFERPSKTGRKSAALSKCQIISRSYNTGWKQIQLRKEEQGRIAAVV

SEQ ID NO: 13535 - protein, 477 aa, unidentified; identical to SEQ ID NO: 2707

SEQ ID NO: 13536 - protein, 441 aa, unidentified; identical to SEQ ID NO: 4242

SEQ ID NO: 13537 - protein, 512 aa, unidentified; identical to SEQ ID NO: 5238

SEQ ID NO: 13538 - protein, 420 aa, unidentified
MQYVYVLNKHGEPLMPCSPGKARLLLKQQKACVVRRTPFTIKLLYGSAGYKQPITLGVDAGSKHVGLSASTEKRELYSEEFTPRSDVVKLLSTRKQNRRSRRYRKTRYRAPRFDNRVHSKHKGWLAPSVEVKIQEHITVIKHICKILPISLVRVETAEFDTQRLKAMLAGKPLPVGTDYQLGEMYDEYNVRQYVLKRDHYTCQCCGTHNTAKKVVKLHVHHLESRKTGGNAPSNLVTLCTTCHKNLHKGRVTLDGKERGKPLRDAAFMGIMRKTLMVRLKEELPIPAQGTYGYITKMRREQNDIKKSHTNDARCISKHPLAEPCSVCYRTKAIRHHNRQTHKANFSKKGIRKRSQMPYLVEGFRLWDKVLYKGQECFVSGRRSSGSFTLKKLDGTSVSKGVTFKKLRLLEPATNYLIERM

SEQ ID NO: 13539 - protein, 407 aa, unidentified
MVYVVANDGQPLMPTERHGKVCRMLKSGMAKVIKKCPFTIQLQYESKRNVQPVSLGVDAGSKHIGISATTKTKVLYESDVELRDDIVKLLATRRQLRRSRRNRKTRYRPARFDNRKRKEGWLAPSIRQKMESHLTVVANVCKILPVSRIIVETASFDIQKIKNPDIQGVEYQQGEQMDFWNIREYVFFRDGHTCQCCKGRSKDKILNVHHIESRKTGGNAPNNLITLCETCHKGYHNGTVILPKNIKRGMKFKDAAFMGIMRWAFYNALKEQYEPAIPVSMTYGYLTKNTRIRHNLPKEHHIDARCISGNPDAVSDGTYYYQKKVRCHNRQIHKQTILKGGIRKSNQAEYLVKGYRLFDKVRYHGREYFIFGRRKTGFFDIRTLSGEKVNKGSISVKKLTFADTRKN

SEQ ID NO: 13540 - protein, 451 aa, unidentified
MSVAVISKTGERLMPTSEYRARKLLKSGKAVKCSYHPFTIQLTERKTGDAQPIELCMDTGYIHIGISVKSEKHEYLAEQIDTLTNERTRHDACRMYRRQRRGRKRYRQPQFNNRKRDKGWIAPSLEHKKDIHIQAISRINKVMPLTDITMEMGNFDTQVLRAKEEGKPLPQGADYQHGERYGTATLREAVFSRDNYKCQCCGRTISDGAILHVHHIKYRSHGGTNSMVNLATVCDKCHTPKNHKPGGKLYDWKPKLPDFKGTTFMTTIRWQLYSEVKSLFPDINIHITYGAATKEQRRELNIDKSHVNDAFAMGKFHPKHRVNAILYKKKRRNNRCLEKFYDAKYIDSRDGSKKTGQELFNGRINRNHKKDSENLHQYRLQKIKAGKRTIRKQHYSIQPHDIVIYENRKRETLGCHNNGTRVMLLPDKKSVSIKKVKIYKYAGGYFKSAFN

SEQ ID NO: 13541 - protein, 512 aa, unidentified; identical to SEQ ID NO: 12368

SEQ ID NO: 13542 - protein, 446 aa, unidentified; identical to SEQ ID NO: 12638

SEQ ID NO: 13543 - protein, 544 aa, Ruminococcus sp.; identical to SEQ ID NO: 2457

SEQ ID NO: 13544 - protein, 279 aa, unidentified
VVIETAEFDLQLLKAIEEGKPVPQGEDYQQGEMYGHYNVRQYVLWRDGYTCQCCGAHATKKKEVRLHVHHLESRKVGGDAPDNQVTLCESCHEKLHKGLIAEKDFKKRKRRSTRDATFMGIMRKTLMQRLCSELPIPVIETRGYITKATREKLLVLPKSHTNDALAIAQGKQGFNVGYLPEIAQIDKIYTIRPVRHHNRQLYKATILKGGIRKSNQTEKYVFGYCLFDKVQFNGQDCFIWGRRTTGIFTIKTINGKMIKDGISFKKLKLVEKSTSYLIA

SEQ ID NO: 13545 - protein, 423 aa, unidentified
MVYVLNIDGQPLMPTDRHGKVRHLLKDGRAEVVKRCPFTIRLLYDSTHYTQDIVLGVDAGSKHIGLSGTTETKELYASDVELRNDIVDLISTRRQNRRSRRNRKIRYRKARFQNRVSDKKDWLAPSIRQKVDTHMTVVSRVCKILPVTKIIVETASFDIQKIKDPDISGTGYQHGEQLDFWNVREYVLFRDGHTCQCCKGKSKDPVLNVHHIESRKTGGDAPNNLITLCETCHKGYHSGAVQLPKAIHRGMRFKDAAFMGIMRWAFYNKLKEVYEPQDIEVSMTFGYLTKNTRIRHYLPKEHYIDARCISGHPEAIPSNEVFYQKKVRCHNRQIHKNTILKGGVRKRNQAGYLVKGFRLFDKVAYEGREYFIFGRRQSGFFDLRNLSGCKVNKGSLSYRKIGFLEPRQYYLCERRVMDTQGCA

SEQ ID NO: 13546 - protein, 422 aa, unidentified
MLVYVLKQNGQPFMPTERFGKVRRLLKEGKAKVVRREPFTIRLLYEPETDVIQECYCGVDTGSKHVGVAVVGNDRVLYQSQTELRSDIKKKMDRRRDFRKARHFRKTRYRKSRFLNRRNSIRKDRLPPSVKHKVQAHIDEIEFCKKILPVLDENIILEVSQFDTTLMKNPSLINEKVKHWGYQQGFNYGYSSRRSAILHRDAYTCQCCGKKNCRLEVHHIKFRSNGGTDDEENLITLCTDCHKGIHAGTVVLNKRPKRSKGLKYATHMSIIRSRLLREYPNAIETFGFVTSENRNHLNLKKDHYIDACVIASGGLEFKSSEIVYYKRRLSKGEYQLTRKACGKEFICRGKILGFKQFDKVEYFGVKCFISSRRNNGIATLVDIFRNPLDFQHLPNGYKNPKMRLLKRISSRKTVVIENDRHL

SEQ ID NO: 13547 - protein, 516 aa, unidentified
LHRELKTNGGMLPQSRPLEARVADNLQGCGRNGSGHTAAVQQSRGESSTDARVEPSPAFAENGVSRVFVLDKKGNPLMPCHPARARKFLARGRARVHQSFPFTIRLVDRIRESSNVQPVNVKLDPGAKTTGMAVVRQDGGHAQILHLSELTHRGAVIRKKLGQRSNYRRRRRTANLWYRKKRFHNRTRPKGWLPPSLKSRVDNTLSWVKKYQRFCPVTGIVLERVRFDTQKLQNPDISGIAYQQGTLFGYEVKEYLLERFKRTCAYCNGLSKDPVLEIEHFVPRNPSKGDKGSNRISNLAIACKTCNQDSKKNLQPADWISLLSRSRKKIDQVRLQNATRFLEGKRPSLASTAAVNATRNAIFFELRGLGLPVECATGGRTKYNRSRLDIPKTHCLDAACTGQVDSVSGWKQNVFLIKAMGRGSYQRTRVNKYGFPRGTLMAQKTVKGFATGDMVKAVVPSGKKQVTYFGRVAVRKSGSFNIQTNTETVQGISWKYCKIISRQNGYNFASQVSSPT

SEQ ID NO: 13548 - protein, 436 aa, unidentified
MTKTLTTKTTQVCVLDQNGKPLMPTTRLGKVYRLLKTQKAHIASYEPFTIQLDYEPDTHIIQPMTLGVDSGAIHSGYSVANAHREYYSAEVIARDDISKRLSDRHMYRQHRRYRKTRYRKPRFNNRKNKKKGWLPPSLEQKVAVQLNEIDHLHRHFPIQKIIVEVAEFDIQKIKDPNISSIEYQQGTLQGYNIRNYLLEKHNRKCFYCGKTVSKFEVEHMLPKSRGGSNRIDNLTLSCHDCNQKKDTMTAEEFIKQTLPAKKATAKLKQLPNEKRLFEYMAHMNATRWALYNAINEKYPNVKMTYGYITKYNRIQANLPKAHHIDVKCITGFATVPSIDQIVIKIKMRRHNRQLHRATFSKGHARKAACLPTVTFGFQLYDLVCFNNHRYYIKGRRSSGSFKLVSIEGLKNTNRNYKKLTRLAHTNAYLINRYTNL

SEQ ID NO: 13549 - protein, 459 aa, unidentified; identical to SEQ ID NO: 11427
  source 1..459: note = Cyanobacteria bacterium UBA11149

SEQ ID NO: 13550 - protein, 414 aa, unidentified; identical to SEQ ID NO: 5510

SEQ ID NO: 13551 - protein, 420 aa, unidentified; identical to SEQ ID NO: 11835

SEQ ID NO: 13552 - protein, 391 aa, Methanobrevibacter sp.; identical to SEQ ID NO: 13532

SEQ ID NO: 13553 - protein, 518 aa, unidentified; identical to SEQ ID NO: 2751

SEQ ID NO: 13554 - protein, 461 aa, unidentified
VQPLYLGIDPGRTNIGVAVVKADGTAVFTAHLETRNKEIPKLMKKRKDSRRARRTNGRRCRRQRRAKANGTISKKCVKQATAQNGSASKRAKKIGVIKRHLPGCEKEVLCIGIKNKEAKFNNRTRPAGWLTPTANQLLQTHINLIKKIQKLLPISDVVLEINKFAFMQLDNPNIQKWQYQQGPLYQKANLEETVSEMQEHHCLFCKKKIDHYHHVVPQHKNGSNTIDNIIGLCTQHHDLVHKDATWQKRLAKKKTGLNKKYGALSVLNQIIPALTKELSSLFPKHFFVTNGKSTYDYRAAHGVSKDHWLDAYCIACSVLPNDTCDKTINSRVPYELKQFRRHDRRALNNENMSRVYTFNGKMVATNRHKATEQTTDSLEEFRQRQPNDVCNLKVKEHHPTYRNMNRNYPGSVFLVGNQVHVMQGIAGSKDGEATTYKDTNANSIAAGKCKFVAKNSGILFV

SEQ ID NO: 13555 - protein, 428 aa, unidentified; identical to SEQ ID NO: 7211

SEQ ID NO: 13556 - protein, 430 aa, unidentified
MVYVLDVSGNPLTPTKRHGKARHLLETGKAVCVKRCPFTIRLTYQNAGPEPEGLSLGVDCGSKHIGLSVSSEEQEYYSSEVELRQDITANLSTRREFRRARRYRKTRYRKPRFLNRTASKKKGWLAPSVRQKVESHLNRIDKAVKMMPIREIKVEVAAFDLQKLQADLKGLKRPKGEEYQQGPQLDFWNVREYVLFRDHHECQCCHGKSGDKVLNVHHLRSRKVGGDAPDNLITLCEYCHGQYHKGELELPESAKKPKPLRDAVFMGIMRWTLYNRLKEIYEPQGIKVKLTYGYITKHTRIENGLEEKSHHLDALCIAGHPKAKRCEEWFLQKKVRCHNRQLHKATIQKGGVRKANQLPAVVKGFRLYDKVLFQNRECFIWGRRKTGYFALKTLDGIMICDGVSSKKLTLLEKRKSYLTERRKQELCNSF

SEQ ID NO: 13557 - protein, 442 aa, unidentified; identical to SEQ ID NO: 7496

SEQ ID NO: 13558 - protein, 424 aa, Enterococcus sp.; identical to SEQ ID NO: 4034

SEQ ID NO: 13559 - protein, 456 aa, unidentified
MNTCVCVLSNNGERLMPTFRLSKVRRLLKDGKAKIVKHHPFTIQLLYDSKTNTQPIEICEDVGYNYIGISAKSKSREYVSTQYDTLQDEKEHHDDCRKMRRSRRNRLRYRKPRFDNRKRDEGWLAPSLEHKKQLNISLIERYVSVIPITHATVEVGSFDTMLLQSIQKGEAKPEGADYQKGPRYNLATLREAVFYRDNYTCQVCKRKITDGAILHMHHMFYWKGRHGYQLDELVTVCEKCHTPANHQKGGKLYGFGKDKKFANLSGAAFMNAVRWQIVNALYATYGKEFVTITYGAMTKEKRIALQLEKTHNNDAYAMGDYHPARRCKFRHYQKRRRNNRVLEKFYDATYVDTRTGNKAKGKELFNGRISRNHKKDCENLHKYRSKKVSKGRRSIRRQHYAIQPYDTVRFEGKTYITSGCHNKGTRLLIPVNGKSKSVAISKVQVVCHAGAWIQII

SEQ ID NO: 13560 - protein, 428 aa, unidentified; identical to SEQ ID NO: 7211

SEQ ID NO: 13561 - protein, 413 aa, unidentified; identical to SEQ ID NO: 10467

SEQ ID NO: 13562 - protein, 518 aa, unidentified; identical to SEQ ID NO: 10514

SEQ ID NO: 13563 - protein, 440 aa, unidentified; identical to SEQ ID NO: 3187

SEQ ID NO: 13564 - protein, 462 aa, unidentified
MSVLVIGRNGRALMPTNPRKARLLLKKKTASVVCRHPFTIQLLYKTGCATQEGSIGIDTGSQHIGVGITCGDKVILKDEHALRSSMEKRSLLATRAVMRRGRRYRKVRYRKPKWRHHTKRMYFEKANRRGQHWRKVKTTTQSPRSKGWLPPSLQSKCDHHFRIIDRYLKYLPDPITRNLVIETGRFDMARMNDPTIHGEMYQRGPMYDAENLRAYIFARDNYQCACCKAKAGTTRKADGTTVKLVAHHILFRSRGATDNPKYIISVCDHCHTTKAHQPGGILYSWMENNKKVARGLRDATFMNILRKRLFARYPQAAFTYGNITAADRKKLRLPKSHANDAVAISLFGKEASTVKNICQTMHYKQIRKSKRSLHEAIPRKGRKNPNTKAVRNKKNTTQVNGFKLWDSVLANGKKLFICSFTGTSAYLIDKNGCYISQPGKTYKQWPLSKLKRLHPNGNWLMA

SEQ ID NO: 13565 - protein, 447 aa, unidentified
MVTVQQSTHHLLFSRVFIRMNLFMVYVISQDGKPLMPCSNPIARLLLKQGKAKVKKREPFTIKLTYETTNYVQDLTLGVDTGSGTIGTAVGKDNGDIVYMSEVTVRNDITGKMTQRAKYRRNRRNRKTRYRKSRWLNRANSIKKDRFSPTMQSKFHSHVKEIEYIKSILPITEMVFETGQFDTHLMKNPSLSNPKVKHWGYQKGTNYGFENTKVFVLNRDNYTCQCCKGKHKDSKLEVHHIVFRSQGGSDEESNLITLCHTCHKDLHSGKINPKLSGKVKGNLKYATQMNSIRKQLFRLYPNAIETFGYVTKANRLHLGVDKEHYYDACTIATQGNAFNVKSNLYKEKCVSDGDFQKTKGIRSEQPVVTDKICGFRKFDKVRYFGNDYFIKGRMSTGYAILMDIDGNKIDFSAMPKGYKTPKMVNLKRLEARSTWMITTVEVTPNIA

SEQ ID NO: 13566 - protein, 420 aa, unidentified; identical to SEQ ID NO: 8769

SEQ ID NO: 13567 - protein, 431 aa, unidentified
MPDKVYVISRLGHPLMPCSPAKARHLLDDKKAKVVKRMPFTIRLLYGSTKYIQPIILGVDAGSKTIGLSASTAKGEVFAAEVMPRNDVVENLSTRREFRRARRNRTTRYRKPRSDNRVRSNHERWLAPSVKVKIQEHITSIKRVCTILPISKVVIETAEFDLQLLKAIQEGKPIPEGEDYQKGEMYGSYNVCQYVLWRDNYTCICCGVRGTPKNPVRLHVHHFESRKYGGNAPDNHGTLCDDCHKKFHLGIITDVKLKTRRRQSTRDAAFMGIMRKTLMWRLRTELFIPVAETKGYITKATREKLLVLPKSHTRDALAIAQGRHGFGIKEYAYVEPANHIYTVRPVRHHNRQLHKASILKGGIRKRNQASKYIFGFRLYDKVLYQGKACFVWGRRTSGTFLLRTIDGIKVKDGVSYRNLTLLERSSNYLIA

SEQ ID NO: 13568 - protein, 419 aa, unidentified; identical to SEQ ID NO: 3670

SEQ ID NO: 13569 - protein, 443 aa, Anoxybacillus sp.; identical to SEQ ID NO: 2800

SEQ ID NO: 13570 - protein, 417 aa, unidentified
MPCSPAKARLLLKERKAIVKRRTPFTIQLTIATGEAKQPVTLGVDSGYKHIGLSATTEQAELYASEVELRQDITDLLSARLALRRSRRSRKTRYRAPRFDNRVASKRKGWLAPSVENRITAHMSRVEAVMRVLPVTAITVETAAFDTQLLKDPDITGEAYQQGEQLGFWNVREYVLFRDGHVCQHCRGKSKDPILNVHHIESRRTGGDAPNNLITLCETCHKAFHRGEIELKVKRGKSFKAETFMGIMRWPLFERLKKSHPELSVRNTYGYLTKHKRISYGIAKSHCADAYCIADNLGAKRLEGFFFQKQTRKHNRQIHKLSILKGGLRKKNQAPYEVKGLRLFDKVICKGEEAFIFGRRTSGSFDVRRLDGTRISAGINYKKLRLLEPRTTYLTEFRKEAALPPLHECRGFRAEFL

SEQ ID NO: 13571 - protein, 469 aa, Burkholderia sp.; identical to SEQ ID NO: 5751

SEQ ID NO: 13572 - protein, 430 aa, unidentified
MPKVYVLNRHGRPLMPCTPAKARHLLDAGKAKVRHRTPFTIQLLYGSTGYTQEVILGVDAGSKTIGLSAATETEELFSAEVKPRNDVVELMSARRQFRRARRNRTTRYRKPRFDNRVRSKHKGWLAPSVEVKIQEHMTAIRRACAILPVSKVVVETAEFDLQLLKAVAEGKPVPQGEDYQKGEMYGHYNVRQYVLWRDSYTCRICGVHGSVRKGVPLHVHHLESRRVGGDAPDNLVTLCTACHDKLHTGIIMAADIKKRKRRSTRDATFMGIMRMTLLRRLREQLPVPVVETRGYITKATRENLLVLPKSHTNDALAIAHGPQGFRAEYLPNIRQADRLYTICPVRHHNRQLHKATILKGGVRKANQAEKYICGFRLYDKVLYNGIECFVWGRRTSGSFLLRQLNGEKVKDGVSYKHLKLLERSQSYLVA

SEQ ID NO: 13573 - protein, 450 aa, unidentified; identical to SEQ ID NO: 4205

SEQ ID NO: 13574 - protein, 557 aa, Blautia sp.; identical to SEQ ID NO: 7395

SEQ ID NO: 13575 - protein, 408 aa, unidentified; identical to SEQ ID NO: 6548

SEQ ID NO: 13576 - protein, 426 aa, Parasutterella sp.; identical to SEQ ID NO: 3045

SEQ ID NO: 13577 - protein, 464 aa, unidentified
MAISAACVARSSPRAEPMPNSAVPAPRRMAVTSEKSTWMYEFIVIRSVMPCTPAKARHLLDAGKAKVRHRTPFTIQLLYGSTGYTQEVILGVDAGSKTIGLSAATETEELFSAEVKPRNDVVELMSARRQFRRARRSRKTRHRKPRFNNRVRSKHKGWLAPSVEVKIQEHMTAIRRVCVILPISKVVVETAEFDLQLLKAVAEGKPVPQGEDYQKGEMYGHYNVRQYVLWRDSYTCCICGVHGSVRKGVPLHVHHLESRKVGGDAPDNLVTLCTACHDKLHKGIIMAADIKKRKRRSTRDATFMGIMRMTLLRRLREQLPVPVVETRGYITKATRENLLVLPKSHANDALAIAHGPQGFRAEHLPNIRQADRLYTIRPVRHHNRQLHKATILKGGVRKANQAETYICGFRLYDKVLYNGIECFVWGRRTKGTFLLKQLNGEKVKDGVSYKHLKLLERSQSYLVA

SEQ ID NO: 13578 - protein, 442 aa, unidentified
MSTSVFVLDKKHRPLMPCRPARARRLLRAGRARVVKRFPFVIRLVDRTVEQSEVQPVLIKLDPGSRETGAAVVRDDEKKRHHALAFFVIKHRGGAIRDALKARSAFRRRRRSQNFRCRSPRFLNRVKPKGWLPPSLRHRVETTLSFVRRMCRYLPVSGIATELVKFDSQKLQNPEGSGGKYQQGTLFEYEVREYLLEKFGRKCVYCGAEGVPLNIDHVVPRAKGGSNRVSNLVLACVSCNQKKGARSLEDFLKGKPEVLARVRRELKTPLRDAAAVNATRWVLFNELKATGLPVETGSGALTKLNRHAFGVEKEHWLDALCVGRLNGVVTRKGLNVLEIRCMGRGSRQRTRLTKYGFPRGYLMRQKCVHGFATGDMVEANVPKGKKAGLWRGRVAVRVSGSFNIQTPKGVIQGVGWKHCRLISHNDGYGYAWLGHAPHSSPA

SEQ ID NO: 13579 - protein, 408 aa, unidentified; identical to SEQ ID NO: 4810

SEQ ID NO: 13580 - protein, 425 aa, Paraburkholderia hospita; identical to SEQ ID NO: 3655

SEQ ID NO: 13581 - protein, 415 aa, unidentified
MENRIEYCFVVDKNNRPLTPTKVNKGWYLVRKSRAKLKSKYPMVIQLEKEVKSDEDDESHIVCGIDDGSAHVGLAIVQKCPTKNKVVFKGTIEQRQDVKHLMDVRRGHRRYHRYHKRYRQARFNNRSSSKRTCRLAPSIKQKKDAILRVLYQLNKWVNIQEYHLEDVCIDIRALTDDYKPYRWQYQKSNRLDENLRKATILRDECRCQECGKSNCVLEVHHIRARKYGGADTIGNLITLCSGCHQKTEGRERDFEDRYFNMIKSKPKRFDYAMHVMQGKTYLREKISELGSLHLTNGGETANKRIEWNVEKSHGNDAICVTDCIPDNCDVKEWIIKPMRRKSKAKTNNLLGIRHRDLVSYTYKNGETHTGYVTALYPEQLVLNFQSKTKHCKKVNARKCRLLWKFNKIYWLEQCV

SEQ ID NO: 13582 - protein, 512 aa, unidentified; identical to SEQ ID NO: 5549

SEQ ID NO: 13583 - protein, 420 aa, unidentified; identical to SEQ ID NO: 3685

SEQ ID NO: 13584 - protein, 401 aa, unidentified
LNKRGKPLMPCSPAKARLLLKEKKAIVVRRTPFTIQLTIATGESKQPVSLGVDAGYKHVGLSASIEKAELYASEVELRKDITDLLSARRALRQSRRNRKTRYRAPRFDNRIRTKRKGWLAPSVENRINAHLSRIEAVLRLLPITKITVETASFDMQRLKNPDISGKEYQEGEQLGFWNVREYVLFRDGHVCRHCHGRSKDPVLNVHHLESRRTGSDSPDNLITLCETCHKALHRGEITLKAKRGQSFRAQAFMGIMRREVLNRLKASYPELKVHETYGYLTKHARIANGIVKSHGADAFCIAGNLGAERLGEFFFQKQTRRNNRQIHKLSILKGGIRSAIRHPLRPKASVFLIRLPAREKKASFSAVDHPGLLMYESSTAPAFQPASAARSCVCWRRDGPI

SEQ ID NO: 13585 - protein, 445 aa, Clostridium sp.
LIKRGVPLMVYVLSKEGKPLMPTNRYAKVRVLLKSKKAVVVNSKPFTIKLLYNTKSFTQPITLGIDSGYLNIGFSAITKEKELIVGEVKLLKGMSERLKEKAMYRRQRRSRLRYRKPRFDNRKRSKDWLAPSIQHKYDSHIRFIDKLKKLLPITNIIIEVANFDAHKLKDPSIEGADYQNGEQKDFFNLREYILHRDGHKCQNPNCKNKNAESILQVHHIGFWKQNRSDRPGNLITLCNKCHTPKNHKKNGFLYGWQPKVKSFKEATFMSMIRWRLVNTLDCNHTYGYITKSNRIALKLEKTHYNDAFCIAGGSSQSRVNPLIFEQIKRNSRSLEKFYDAKVIDIRTNTKVSGLELFNGRRTRNKNLNSENLRKYRGVKVSKGQRRIRTKRYFYQPGDLVKYEDKVYTVKGTQNKGKYIALKELKKVPKVELLEPYKFRKGLVCA

SEQ ID NO: 13586 - protein, 423 aa, unidentified
VWNKRRKPLMPCSPAKARHLLKEKKAAVVRRTPFTIQLTIATGESKQPVTLGVDAGYKHVGLSASTEKAELYASEVELRQDVSDLLSARRALRQSRRNRKTRYRAPRFDNRIRTKRKSWLAPSVENRINAHLSRIEAVLRLLPVTKITVETASFDMQLLKNPDISGKEYQEGEQLGFWNVREYVLFRDGHVCQHCHGRSKDPVLNVHHLESRRTGGDSPGNLITLCETCHKALHRSEITLKTKRGQSFRAEAYMGLMRWEVLNRLKTSHPGLEVHNTYGYRTKYTRIVNGIDKSHCADAFCIAGNLGAERLCEFFFKKQTRRNNRQIHKLSILKGGIRKRNQAPFEAKGFRLFDKVACKGEEGFIFGRRSSGFFEVRKLDGTCISAGISYKKLHLLEKRRTYLTEIRKEEALPPLPEGSGLRA

SEQ ID NO: 13587 - protein, 524 aa, unidentified
MEILRIDWKDICPTGRSGLPQKELFMRPVYVLDMNGKPLMPTCRFGKVRRMLKSDEAKVVDTLPFTIQLDRPTKTHVVQSVTLGCDPGRTNIGLAAVRSDGTDLYRTHCETRNKEVVDLMDTRRAARRASRRGERLARKRLAAKHETATTFPDGRKLPGYEKPIMLKNIINTEARFNNRVRPAGWLTPTATQLLRTHLNLIKRISRILPVSDIALEINKFAFMQLDEPDKNKWNIDFQHGPLYGTGGLKAAVRQLQNDTCLLCQENVIEHFHHLIPRSKRGDNTINNIAGLCQRCHEAVHKSADTAEKLSTLKKGQTKRYGGTSVLNQIIPKLVEELGKTYHEHLHLTYGWQTKEFRTKHKLEKTHDTDAYCIAAGTMQTVNPNIWTDVYEIKQFRRHNRANIHHQTERTYKLNGQTVARNRRKRTDQKTDSLAEWFENTVKQYGQQKAEHLRAGLKVRKSTRYYNFKDRVMPGAVFQYEGNRYVVTGQLSGGQYYRAYGKGNQNFPAKKIRIISLNRGLVYVA

SEQ ID NO: 13588 - protein, 456 aa, unidentified
MAIFVLDKKKQPLMPCSEKRARLLLQRGRAVVHKRYPFTIRLKDRVGGSTQPLSLGIDPGSKTTGLALIREPDSQQRHVLCLFELIHRGYQIKKALQQRAAFRRRRRSANLRYRAPRFNNRTKPKGWLAPSLQHRVDTVTAWVNRLSRLAPVTAISQELVRFDTQKLDNPEISGVEYQQGTLLGYEVREYLLEKWGRECAYCGTADTPLEIEHVIPRSRGGSNRVSNLTLSCHPCNQSKDALSLVDFFATDKGLKKRLKANGHTANARLERVQRQLKQPLRDASAINATRWALFNALKATSLPVAVGTGGRTKYNRQRLGIPKTHALDAACVGAFDALHAWQVPTLTIKAMGRGSYQRTRLTKHGFPRGYLMRQKQVHGFQTGDMVRAMVPTGKKAGTHTGRVAVRKTGSFNIQTEQGAVQGISHKYCTLIQRGDGYGYHFTPFTHLTGGAGQAVA

SEQ ID NO: 13589 - protein, 414 aa, unidentified; identical to SEQ ID NO: 2588

SEQ ID NO: 13590 - protein, 413 aa, unidentified; identical to SEQ ID NO: 11784

SEQ ID NO: 13591 - protein, 512 aa, unidentified
MSTVYVLNKNGKPLMPTTRCGHIRYLLKEKKARVVASKPFTIQLLYETDDVVQPLYLGIDPGRSNIGVAVVKTDGMAVFTAHLETRNKEIPKLMKKRKDSRRARRTNGRRCRRQRRAKANGTISKKCVKQTTAQNGSVSKRAKEIGVIKRHLPGCEKDVLCIGIKNKEAKFNNRTRPTGWLTPTANQLLQTHINLVKKIQKFLPISDVVLEVNKFAFMQLDNPNIQKWQYQKGPLYQKESLKSAVSEMQEHHCLFCKKKIDHYHHVVPQHKNGSNTIDNIVGLCTQHHDLVHKDATWQKRLAKKKTGLNKKYGALSVLNQIIPALTKELSSLFPKHFFVTNGKSTYDYRAAHGVSKDHWLDAYCIACSVLPNDTCDKTINSRVPYELKQFRRHDRRALNNENMSRVYTFNGKMVAANRHKATEQTTDSLEEFRQRQPNDVCNLKVKEHHPTYRNMSRNYPGSIFLVEKQVHIMQGIAGSKDGKATTYKDTNANSIAAGKCKFVAKNSGILFV

SEQ ID NO: 13592 - protein, 434 aa, Anoxybacillus sp.; identical to SEQ ID NO: 10651

SEQ ID NO: 13593 - protein, 414 aa, unidentified
MPCSPAKARLLLKEKKAIVVRRTPFTIQLTIATGESKQPVSLGVDAGYKHVGLSASTEKAELYASEVELRKDITDLLSARRALRQSRRNRKTRYRAPRFDNRIRTKRKGWLAPSVENRINAHLSRIEAVLRLLPITKITVETASFDMQRLKNPDISGKEYQEGEQLGFWNVREYVLFRDGHVCRHCHGRSKDPVLNVHHLESRRTGSDSPDNLITLCETCHKALHRGEITLKAKRGQSFRAQAFMGIMRREVLNRLKASYPELKVHETYGYLTKHARIANGIVKSHGADAFCIAGNLGAERLGEFFFQKQTRRNNRQIHKLSILKGGIRKRNQAPFEAKGFRLFDKVACQGEEGFIFGRRSSGSFDVRKLDGTRISAGISCKKLRLLERRRTYLTEIRKEEALPPLPEGRGLRA

SEQ ID NO: 13594 - protein, 465 aa, unidentified
MSTCVCVLSNSGERLMPTFRLGKVRRLLKDGKAKIVKHHPFTIQLLYDSKTNTQPIEICEDVGYNYVGISVKSESHEYVSAQYDTLQDEKEHHDDCRKMRRSRRNRLRYRKPRFDNRKRGESWLAPSLRHKKELNVNVVKMYCAVMPITHATVEVGSFDTMLVKAIQEGKAVPEGADYQKGPRYNLATLREAVFYRDNYVCKVCGRKATEGAILHVHHMLYWKGRHGNSLSELITVCEKCHTPANHQKSGKLYGFGENVKFADLSGAAFMNTVRWQIVNVLYAAFGKPFVTFTYGAMTKEKRIALHLEKSHNNDAYAMGSFHPVNRCAFEHYEKVKRNNRILEKFYDSQYIDIRTGEIATGKELFNGRISRSHKKDSENLHKYRGKRICKGHRALRRKKVALNPGDLVSLNGEILVVHGTHTKKNGSVNVEFKTPSRGGKKSASLKKLKIVKTTDSMHSAWEKIS

SEQ ID NO: 13595 - protein, 356 aa, unidentified
MHMNDLKSMCKILPINHVTLERVAFDFQKLENENIKTWEYGKGKLYGYDSPEEYIHDVQDGKCLVCGKPHIDYLHHIIPRSKGGSDKVSNIAGLCYDCHYGPMGVHNCQNTQDRLPELKSEANKQYKVSLLNSVMPVLIEEMDKFCKANSIMFSICEGHDTAKVRDMYDLQKDHCIDGFAISLVDRNVKSVDVMPDRIYQKQRYKKKSKNIIQKRNCREYYDGKKLVAVNRHKGTDQKADSLEEYMNTYAETHTTDECKKHFDSLVVKPARRTYTFHKEWRICPFHIGDKVRYEKKNKIKGNTKVETFICESIHFYKDKNKAKVEHNKTKSKRMKFCRVLEAGCTPYIDYRKLALM

SEQ ID NO: 13596 - protein, 404 aa, unidentified
MSKKVYVQDKNGKALDPTTSIRARKLLSKGRAEVVQREPFTIKILDRKKKSSYTKDVTLGIDAGYKEVGFSVINEDEELISGVLELRNDIPKKLEQKANYRRNRRHRNTRYRQPRFDNRKKSKPKGWLAPSIKHKMNSHIKLVNKLKEILPISKVIVEVAQFNTQKMQNPEIEGVEYQQGTLQGYNVRNYLLEKFNRQCAYCGKEDVPLEVEHIIPKSRGGSNRVDNLTISCHNCNQEKDSQTAKEFGYPNVQKQAKQTLKSTAFMNIVRWKIVNKLDCDYTFGHITKKNRIEQDLEKTHYNDAFIIANGKNQKRCKPIKAIINRRNNRSLQTNRKTYGRSVRKQKYLLSPGDLVKYEGKVCEVKGMFNYGKWVRMKDSDGNTVNSNVKDVELVKYRKGLCFVS

SEQ ID NO: 13597 - protein, 268 aa, Eubacterium hallii; identical to SEQ ID NO: 7943

SEQ ID NO: 13598 - protein, 536 aa, Anaerostipes sp.; identical to SEQ ID NO: 4526

SEQ ID NO: 13599 - protein, 419 aa, Geobacillus sp.
LFVYIINKHGKPLMPCSPRKARLLLKQKKAKVVRRTPFTIQLLYGSSGYKQPVSLGVDMGTRHVGISATTKKDVLFEAEAQLRTDIVELLAIRRQFRRSRRNRKTRYREARFLNRRKPEGWLPPSIQHKINSHIKLIDLVHNILPVTSVTIEVAAFDTQKLKNLNIRGVEYQQGEQIGFWNVREYVLYRDNHTCQYCKGKKKDPVLQVHHIESRKTGGDSPDNLVTLCKTCHHEIHEKGLEHIFQRKRPPMRDASQMTAMRWAMFSRIREKYSHANITYGYITKCIRIANGLSKSHMVDARCISGNPLAKPSGTVYLLKFVRKNNRQLHKATILKGGKRKSNKAPRFVKGFQLFDKVVYERKECFIFGRRSSGYFDLRLLDGTKVHASASWKKLKRVEHASTLLIERRKGDSSPTFALA

SEQ ID NO: 13600 - protein, 417 aa, unidentified
MIYVRSKEGSVLMPTERCGKIGYLLRHGKAHVVSRVPFVVQLDYDSTTYTQDVSLGIDAGSKHIGVSASSEKKEMLAAQVELRSDIVNLLSTRRELRQTRRNRKTRYRKARFDNRKKKDGWLAPSVEQKIESHLKVIRLVHKILPITKTTIEVAQFDAQKIKNPYIKGDEYQQGEQMGFWNVREYVLARDGHKCVHCKGKSKDPILNVHHLESRKAGGNSPSNLVTLCETCHKAYHRGEFDLKIKRGSSLRDAAVMNIMRWAVYERAKAEFGNVHLTYGYITKHTRIENGIAKTHAADAFCIAKNVHAMRLSSFFMCRCVPRHTRALHVANPKKCGIRRNTIASHKIGKSNFQRFDMVRWMGKECFIFGSTHGRPVLRDIDGLQVANQPSVNIKTIKFLKRLKNNILMEEKNFRRLN

SEQ ID NO: 13601 - protein, 552 aa, unidentified
MTSCTCTVFPACNHAKASSSQGKHNLLLRQERFIVKEVANMSTVYVLNKDGKPLMPTTRGGHVRHLLKEQKARVVRAKPFTIQLLYETNDVVQPLYLGIDPGRTNIGVAVVKANGTAVFTAHLETRNKEVPKLMQDRKKARRARRTNGRRCRRQRRAKANGTISKKCVKQDTAQSKNPSKRAKEIGIIKRRLPGYKKDVLCIGIKNKEAKYTNRTRPEGWLTPTANQLLQTHINLVRKMQKFLPISDVVLEVNKFAFMRLDNPDIQKWQYQQGPLYQKGSLENAVSEMQEHHCLFCDKPIDHYHHVVPQSENGSNTIANIVGLCAEHHNLVHKDAAWQKKLAEEKVGLNKKYGALSVLNQIIPALTNKLSVLFPKHFFVTAGKSTHDYRATHGVSKDHWLDAYCIACSVLPSDVCDSNINNHMPYELKQFRRHARRALNNENMNRVYTLNDKAVAINRHKATEQEAASLEEFRKEHPNDVCKLKVKEHHPTYRNMNRNYPGSIFLVGKHVHIMQGIAGSKDGKATTYKDSNANSITASKCKFVAKNSGILFV

SEQ ID NO: 13602 - protein, 320 aa, unidentified
RAPRFDNRIRTKRKGWLAPSVENRINAHLSRIEAVLRLLPVTKITVETASFDLQLLKNPDISGKEYQEGEQLGFWNIREYVLCRDGHVCQHCYGRSKDPVLNVHHLESRRTGGDSPGNLITLCETCHKALHRGEITLKAKRGQSFRAEAFMGIMRWEVLNRLKASHPELEVNNTYGYRTKHARIANDIAKSHCADAFCIAGNLGAERLGEFLFQKQTRRNNRQIHKLSILKGGIRKRNQVPFEVKGFRLFDKVACKGEEGFVFGRRSSGYFDVRKLDGTRISTGISYKKLRLLEKRQTYLTEIRKEEALPPLPEGRGLRA

SEQ ID NO: 13603 - protein, 417 aa, unidentified
MQLVYVLNKDGLPLMPTHKLGKVRHLLKDGKAKVVKRNPFTIQLNYKCDNYIQPITLGVDAGSKHIGLSASTKKQELYCSDVELRNDVVELLSTRRENRRTRRNHLRYRPARFDNRKKEDSWLAPSIRQKIDSHLKVIEEVHKILPISQTIVEVASFDTQLLKALLEGKTISGIDYQQGEMLGYNTREYVLYRDNHTCQHCHGKSKDKVLEVHHLETRKTGGNAPSNLIALCKTCHNKYHNGEIILKQKRGAKYDDASFMGIMRWTFYNKLKEIYPNVSMTYGYITKYNRINYGIAKDHYNDAYCISQNFKAKPLDTIIYQKKVRCHNRQIHKANFLKSGIKKLNQAPYIVKDFRLFDKVRYQDEECFIFGRRSSGYFDIRKLDGTIIHRSASYKKLELLEARKSYLQEERSRQFLS

SEQ ID NO: 13604 - protein, 468 aa, unidentified; identical to SEQ ID NO: 3693

SEQ ID NO: 13605 - protein, 434 aa, unidentified; identical to SEQ ID NO: 5659

SEQ ID NO: 13606 - protein, 406 aa, unidentified
MVYVQDIDSKPMMPTTRHGKVRRLLKDNKAVVVNTCPFTIKLTYKTSDYKQEIVLGVDAGTKHVGLSATTKSKELYSGEVILRNDVVELLSTRRESRRARRNRLRYRKPRFENRVKSKRLGWVAPSVRHRIDAHIRVIDNVCSILPISRIIIEVAQFDTQKINNPNISGNEYQKGDQLGFWNVREYVLARDGHKCQHCKGKSKDSILNIHHVESRKTGGDSPSNLITLCETCHKEYHKGNIDLKVKRGKSLRDAAVMGIMKWKLYDELKSKYDNVSMTFGYITKYNRIKYGIEKSHTSDAFVISRSFNAKRIERQYLKRLIRRHNRQIHKMKILKGGKKKNNQAPFEVFGFRLFDKVLYNNEICFIYGRRKSGCFDIRDFDGKNSKNVTYKKLKLIRGKRYPIILK

SEQ ID NO: 13607 - protein, 475 aa, Blautia sp.; identical to SEQ ID NO: 4128

SEQ ID NO: 13608 - protein, 371 aa, Methanosarcina sp.
LNGPTVVWLAQIHHKTNIKSNIDSRRAMRRTRRNRNTRYRKPKFNNRGRKEGWLPPSLQSRVDNIKNWVIKLQRLCSLTHISYENVKFDTQLMQNPEISGIEYQQGELQGYEIREYLLEKWDRKCAYCGAENISLEIEHIIPKSRGGTSRISNLTLACHACNQVKGDMTAEEFGYPDIQKQAKKPLKDAALVTATRWKVYNVLSETGLNIECGTGARTKMNRILLNLPKNHHFDAVCVGTSTPNDIIFRTNSVLHIKAKGRGSHCRTNLNKYGFPRGYLARQKSFFGFQTGDIVKAIVPKGKHQGTWIGAVACRKTGYFDIKNKEGVKAAQGINHKYCKMLSRVDGYEYASEHVGVDGIPLMTEVTSILPY

SEQ ID NO: 13609 - protein, 456 aa, Halomonas sp.; identical to SEQ ID NO: 2773

SEQ ID NO: 13610 - protein, 426 aa, Anoxybacillus sp.
MVFVLDTNKRPLAPCHEAVARKLLKQGKAAIYRRFPFTIILKKSVDESEIKATYRLKIDYGSRHTGLAILRGQEVVWLGQLDHRTDIKERIDKRRAFRRARRNRKTRYRKPRFLNRKRKEGWLPSSLESRVQNIQTWVNRLKKLCPIGYISYENAKFDTQLMRNPEINGVEYQQGTLQGYEVREYLLEKFGRKCCYCGKENVPLEVEHIIPKSRGGTDRVDNLCLACHDCNQRKGSKTAEEFGYPHIQKQVKESLKDASAINSTRWKAYEVLKQTGLDVECGTGARTKMNRIRLDLPKTHYFDACCVGESTTNHLYFKTKEVLFIKAKGRGSRSRTNLDRYGFPRGYLARQKFFFVFQTGDMVKAVVPRGKYQGVWFGEVACRKTGSFDIKGKDGKRIAQGINYRYVQVIQRFDGYTYRREGMNIA

SEQ ID NO: 13611 - protein, 428 aa, Symploca sp.
VSKVFVLDTNKQPLNPIHPGRARMLLSQGKAAVFRRYPFTLILKQKASKLTVEPLTIKIDPGAKTTGLALVNDARGEVVWAGELQHRGFQIRDTLTSRRQLRRSRRNRKTRYRKSRFLNRTRTKGWLSPSLSSRVANILTWVKRLSSLCQITAISQELVRFDTQKMEDADIRGVGYQQGTLAGYEVREFLLEKWNRTCAYCGAKDTKLEIEHIQPRSKDGSNRVSNLCLACVPCNQKKGSQDIKDFLKGKPNLLKRILAQAKRPLADTAAVNATRWNLYKNLKEIGLPVEVGTGGRTKYNRTIRGLDKTHYWDAACVGASTPEQLITSGVKPLLIAAKGHGTRQQCRSDKFGFPSRYCSRTKFHKGFQTGDIVKAIVTSGKKIGTYVGRVATRATGSFNISTTDGLVQGISHKYCTHIHKKDGYSYAT

SEQ ID NO: 13612 - protein, 505 aa, Ruminococcus sp.
MPYIYVLAPDGHPLMPTRRRRHVKKLLNSGKARIAAHIPFTIQLKYQTPEICQPLTLGIDPGRTNIGCAAIESKGRLVYSAVCETRNKEISKLMDERRQHRRASRNGERKRRQRRARKYGTMLQAGCVMRRLPHYDTEIMCRWITNTEARFCNRKRPVGWLTPTVEQLVRTHVNLFRKVSKILPITDAAIEINRFAFARMEDPSITGLDFQNGPLKGYTDVKAAVADQQKGLCLLCGRAKISRYHHIIPRYRNGSESLDNRAGLCDSCHEKVHKDVEAAGRLAAKKQGMMKKYHALSALNQAIPYICSRLSEAISPEHLYFTTGRDTSEAREGLSIRKDWKASPCHDADAYLIACNGMGITPESVDFKNSYRIKQYRRHDRQLIHAQRERAYRLDGKTVARNRRKRTEQQGDSLHEWYLKTKALIGRAGARRLQKQMKVAPSTRYYKNPKRLMPGTVFIARGKRYVICGQLSNGMYLRAEGCGTENFPIRDCRILRQNGGLVYVA

SEQ ID NO: 13613 - protein, 431 aa, Escherichia sp.; identical to SEQ ID NO: 3801

SEQ ID NO: 13614 - protein, 408 aa, unidentified
MVYVQDINGKPMMPTTRHGKVRRLLKSNKAIVVNLCPFTIKLTYVTSDYKQEIVLGVDAGTKHVGLSATTKSKELYSSEVILRNDIVDLLSTRRESRKVRRNRLRYRKPRFDNRVKSKRPGWIAPSVKYKVDAHIRVIGNVCSILPISRIVIEVAQFDTQKINNPNISGKEYQEGDQLGFWNVREYVLARDGHKCQYCKGKSKDNILNVHHIESRKTGGDSPSNLITLCETCHKEYHKGNIDLKIRRGKSLRDAAVMGIMKWRLYEELRSKYGIVSMTFGYVTKYNRINHGIEKSHVSDAFVISKNFNAIRLGYYYKVRLVRRHNRQIHKQKIQKGGIKRLNQSPFEVFGFRLFDRVMFENSYYFIFGRRKTGSFNIRDIDGKNQKNVTYKKFKLSRCKRFMIQKEMN

SEQ ID NO: 13615 - protein, 438 aa, Petrotoga sp.; identical to SEQ ID NO: 8698

SEQ ID NO: 13616 - protein, 431 aa, unidentified; identical to SEQ ID NO: 6230

SEQ ID NO: 13617 - protein, 457 aa, Erysipelotrichaceae sp.
MSVAVISKTGMRLMPTNEYRARHLLKAGKAVIEQYRPIFTIRLTEREEGETQPIEYASDTGYQHVGVSIKSEKHEFVHAQYDMLGNETERHNDCRKYRRARRNRLRYRKPRFDNRKPKMAKGEALAPSLQHRVDNQTRLFDACCRIMPITTATFEMGKFDIQLLQAQADGRPLPHGTDYQHGSRYLYQTERMAVFGRDHYTCQICGRSIQDGAILHTHHIGFWMMPPYRSNRISNLLTVCEKCHTAKNHKPGGKLWGIHPKTSNLAGASYMSSVRWRMYYALVLAHPEVKIHIQYGAKTAAVRKERHLAKTHANDAYCIGSFHPLHRCKEVLFIKKRRNNRILAKFYDAKYIDIRDSSKKSGAQLSCGRTNRSESRRTEKNERICRGQKCSKGRVSVRRQHYAFQPGDTVCWKSAGYIVKGTHCNGTRVLLNTGKSVKLADLHITKRQGGWSVSSHE

SEQ ID NO: 13618 - protein, 408 aa, unidentified
LVPVYVINKHGKPLMPCGPRKARVLLKQGKAKVFRYVPFTIQLLHGSSGYRQKIYAGRDRGLTQGIIACREDGRVLLRFQVTGRIDISELLYWRACLRRSRRNRKTGYRPCRNKNRKRPEGWLAPSVAHLWYEHQKTRHLVESTLPVTAWAEEVNKFDTRRMWDPEVKGKGYQEGPLKGKKNVRQYVLERDSYRCVLCGNPEDLETHHIVWRFRGGSDRPKNMVTLCKKCHDKVTAGKIEIKVLVKSYRWPARLNALNPLFNALDAVKITPGKVKKARTELSLGKEHWADAAALVFAAFGVKPDIENLPLLLQGRFVRTKNRQLHRTNPSKGGKRAKAQGNRYLINKSGVRFMRNDLVEYKGATGYVSSLRSSGSVRVCDWQGKELINVSVNKLKKLQNRDSIIWEVS

SEQ ID NO: 13619 - protein, 428 aa, unidentified; identical to SEQ ID NO: 8932

SEQ ID NO: 13620 - protein, 442 aa, unidentified
MSTSVFVLDKKHRPLMPCRPARARRLLRAGRARVVKRFPFVIRLVDRTVEQSEVQPVLIKLDPGSRETGAAVVRDDEKKRHHALAFFVIKHRGGAIRDALKARSAFRRRRRSQNFRCRSPRFLNRVKPKGWLPPSLRHRVETTLSFVRRMCRYLPVSGIATELVKFDSQKLQNPEVSGVKYQQGTLFEYEVREYLLEKFGRKCVYCGAEGVPLNIDHVVPRAKGGSNRVSNLVLACVSCNQKKGARSLEDFLKGKPEVLARVRRELKTPLRDAAAVNATRWVLFNELKATGLPVETGSGALTKFNRHAFGVEKEHWLDALCVGRLNGAVTRKGLNVLEIRCMGRGSRQRTRLTKYGFPRGYLMRQKCVHGFATGDMVEANVPKGKKAGLWRGRVAVRVSGSFNIQTPKGVIQGVGWKHCRLISHNDGYGYAWLGHAPHSSPA

SEQ ID NO: 13621 - protein, 453 aa, unidentified; identical to SEQ ID NO: 6204

SEQ ID NO: 13622 - protein, 434 aa, Lactobacillus sp.; identical to SEQ ID NO: 8535

SEQ ID NO: 13623 - protein, 413 aa, unidentified; identical to SEQ ID NO: 3476

SEQ ID NO: 13624 - protein, 419 aa, unidentified
MVYVLDINGQPLMPTTRHGKVRRLLNNHLAKAVKRCPFTIQLLYQSTKETQSVSLGIDAGSKHIGLAATTEQKVVYQEELIPRNDVVKLLSARRALRYSRRNRKTRYRKSRFNNRVHSKHKGWLAPSVEAKIQEHITAIKRICQILPVSEIHVETAEFDLQRLKAIEEGKPLPVGTDYQLGEQYDFYNTRQYVLHRDGYTCQCCGTHDNNVKLHVHHIESRQTGGNAPNNLITLCEHCHKALHEGKLKLSKGKKRGKSYRDATFMGITRKTLLERLKKEVDVPVTGTYGYITKYWREKAGLEKSHINDAVCISKHPYVEPLDTYYLTKAVRHHNRQIHKVNFSKGGIRKRNQAPHLVKGFRLFDKVLYQGKECFIFGRRVSGRMDIRLLDGIRINASVGYKNLELLELRKAYLTERRTC

SEQ ID NO: 13625 - protein, 424 aa, unidentified
MVPVLDANKKPLAPCHEARARKLLSKGKAAVYLRYPFTIILKRVVNDEVEPCTIKIDPGSQHTGISIVRGQDVLFMAQIDHRTTIKDAMKKRAAYRRNRRSRKLRYREPRFLNRTKPEGWLPPSVRSPLQNTVTMFKRLNRLFPIGNIEYELVKFDTQKLVNPDIAGVEYQQGPLYRTDIRSFLCKTYQNTCQYCGGATGDRQMEWEHLLPRSRGGSNSVSNATWACHTCNQEKGNLTPQEWASVIKAKKTRSPLDEARLSGIKKVQKQNYGPALADAAKVNSIRLALKTQLEQETGLPVRTSAAYNTKVNRVRLGLEKDHCIDAACVGREIPDTLYFKTNRCLVITACGRGKHCRTNVDSTGFPRSYLPRQKTFFGFQTGEMVVANVPSGKHAGRYVGRVSCRSSGSFGITTSAGRVDGINHK

SEQ ID NO: 13626 - protein, 426 aa, unidentified; identical to SEQ ID NO: 3614

SEQ ID NO: 13627 - protein, 456 aa, unidentified
MSTCVCVLSNSGKRLMPTFRLGKVRRLLKDGKAKIVKHHPFTIQLLYDSKTNTQPIEICEDVGYNYIGISVKSESHEYVSAQYDTLQDEKACHDSCRKLRRTRRNRLRYRKPRFDNRKRGEGWLAPSLRHKKELNVNVVKMYCAVMPITHATIEVGSFDTMLVKAIEEGKATPESADYQKGPRYKLATLREAVFYRDNYTCQVCGRKANEGAILHVHHMFYWKGRHGNSLSELITVCEKCHTPANHQKGGKLFGFGEDKEFANLSGAAFMNAVRWQIVDALHATYGKEFVTITYGAMTKEKRIILGIEKTHNNDAYAMGDYHPVHRCVFRHYQKRRRNNRVLEKFYDATYIDTRTGNKAKGKELFNGRISRNHKKDSEDLHKYRSKKVSKGRCSIRRQRYAIQPYDTVRLESKTYITSGCHNKGTRLLIPANGKSKSVAISKVQVVCHAGAWIQII

SEQ ID NO: 13628 - protein, 442 aa, Lactobacillus sp.; identical to SEQ ID NO: 5193

SEQ ID NO: 13629 - protein, 430 aa, unidentified
MPKVYVLNRHGRPLMPCTPAKARHLLDAGKAKVRHRTPFTIQLLYGSTGYTQEVILGVDAGSKTIGLSAATETEELFSAEVKPRNDVVELMSARRQFRRARRNRTTRYRKPRFDNRVRSKHKGWLAPSVEVKIQEHMTAIRRACAILPVSKVVVETAEFDLQLLKAVAEGKPVPQGEDYQKGEMYGHYNVRQYVLWRDSYTCRICGAHGSVRKGVPLHVHHLESRRVGGDAPDNLVTLCTACHDKLHKGIIMAADIKKRKRRSTRDATFMGIMRMTLLRRLREQLPVPVVETRGYITKATRENLLVLPKSHANDALAIAHGPQGFRAEYLPNIRQADRLYTIRPVRHHNRQLHKATILKGGVRKTNQAEKYICGFRLYDKVLYNGIECFVWGRRTSGSFLLRQLNGEKVKDGVSYKHLKLLERSQSYLVA

SEQ ID NO: 13630 - protein, 456 aa, unidentified
MSTCVCVLSNSGERLMPTFRLGKVRHLLKDGKAKIVKHHPFTIQLLYDSKTNTQPIEICEDVGYNYIGISVKSQSHEYVSAQYDTLQDEKACHDSCRKYRRTRRNRLRYRKPRFDNRKRSEGWLAPSLRHKKELNVNVVKMYCAVMPITHATVEVGSFDTMLVKAIQEGKAIPEGADYQKGPRYNLATLREAVFYRDNYVCKVCGRKATEGAILHVHHMFYWKGRHDNSLSELITVCEKCHTPANHQKGGKLYGFGENVKFADLSGAAFMNTVRWQIVNELYAAFGKDFVTVTYGAMTKEKRIALHLEKSHNNDAYAMGNCHPAHRCEFGHYQKRCRNNRVLEKFYDATYIDTRTGDKAKGKELFNGRISRNHKKDSEDLHKYRSKKVSKGRRSIRRQRYAIQPYDTVRLESKSYITSGCHNKGTRLLIPANGKSKSVAISKVQVVCHAGAWIQII

SEQ ID NO: 13631 - protein, 412 aa, unidentified; identical to SEQ ID NO: 4932

SEQ ID NO: 13632 - protein, 414 aa, unidentified
MVYVINKQGQALMPTERFGKVRRLLKNSLAHVVCRIPFTIQLDYDTTDYTQPVSLGVDAGSKHIGISATTSDKELYAADVELRNDIVDKLSTRREQRRTRRSRLRYRKARFNNRISSKRKGWLAPSVENKIQTHLTVVEKIHKFLPITNIVVETASFDIQKINNPSISGSEYQQGEQLDFFNVREYVLFRDNHICQHCKGKSKDKVLNVHHIESRKTGGDSPKNLITLCETCHKAYHRGDFELNVKRGKSFRDSAFMGIMRWSFYDRLKNIYPNVSMTFGYITKNARITNNLPKEHYVDARCISGNPVAKPLGYYFYQKKVRCQNRQIHKANFLKGGRKKLNQAPFLVKGFRLFDLVEYQKDLYYIFGRRDSGFFDIRKLDGTKVNKGSINCKYLRLVDKRKSILIEKRMQVNL

SEQ ID NO: 13633 - protein, 426 aa, unidentified
LAKDLYRSIDREETNLRVYVLNKRGEPLMPCSAAKARILLKEKKAVVKRRTPFTIQLTIATGETKQSVTLGVDAGYKHIGLSASTEKAELYASEIELRQDVSELLAGRSALRQARRSRKPRHRAPRFDNRKREKGWLAPSVENRIGAHVSRVEAVLRILPVTKIIVETASFDVQRLKNTDMQGVEYQQGEQLGFWNVREYVLFRDGHECQHCHGKSKDKVLNVHHIESRRTGGDAPNNLITLCETCHKAFHRGEIELKVKRGRSFQAETFMGVMRRTFFERLRASHPEIEVRNTYGYLTKDTRIANKIEKSHCADAFCIAGNLKAKRLGYYFFQKQTRRHNRQIHKLTILKGGVRKRHQTPYEIKGFRLYDKVLYRGKVAFIFSRRSSGYFDIRTLDGERIAASGSYKKLRLLEKRRTFLIELRRN

SEQ ID NO: 13634 - protein, 512 aa, unidentified; identical to SEQ ID NO: 3971

SEQ ID NO: 13635 - protein, 442 aa, unidentified
MSTSVFVLDKKHRPLMPCRPARARRLLRAGRARVVKRFPFVIRLVDRTVEQSEVQPVLIKLDPGSRETGAAVVRDDGKKRHHALAFFVIKHRGGAIRDALKARSAFRRRRRSQNLRCRSPRFLNRVKPKGWLPPSLRHRVETTLSFVRRMCRYLPVSGIATELVKFDSQKLQNPEVSGVKYQQGTLFEYEVREYLLEKFGRKCVYCGAEGVPLNIDHVVPRAKGGSNRVSNLVLACVSCNQKKGARSLEDFLKGKPEVLARVRRELKTPLRDAAAVNATRWVLFNELKATGLPVETGSGALTKLNRHAFGVEKEHWLDALCVGRLNGAVTRKGLNVLEIRCMGRGSRQRTRLTKYGFPRGYLMRQKCVHGFATGDMVEANVPKGKKAGLWRGRVAVRVSGSFNIQTPKGVIQGVGWKHCRLISHNDGYGYAWLGHAPHSSPA

SEQ ID NO: 13636 - protein, 418 aa, unidentified
MVYVINKDGQALMPTERFGKVRRLLKNGLAHVVCRIPFTIQLDYETTHFVQPISLGVDAGSKHIGISATTSEKELYAADVELRNDIVEKISTRREQRRTRRNRLRYRKARFNNRVSSKHKGWLAPSVENKIQTHLTVVEKIHKFLPITKIIVETASFDIQKIKNPSISSEEYQQGEQLDFFNVREYVLFRDNHTCQHCKGKSKDHILNVHHIESRKIGGDSPSNLITLCESCHKAYHNGKIDIKVKRGASFRDAAFMGIARWTTYERLKNIHPNVSMTFGYITKNTRITNGLPKEHHVDARCISGNPKSKPLGYYFYQKKVRCQNRQIHKANFLKGGRKKLNQSPFLVKGYRLFDLVEYQKELYYIFGRRDSGFFDIRRLDGTKVNKGSISCKHIRLVDIRRSILTERRNSCSTIPTN

SEQ ID NO: 13637 - protein, 424 aa, Moorena sp.
ITRVFVLNKNRQPLDPCKPARARILLSVGKAKVYRRYPFTIILTEEVKQPITHDQQLKIDPGAKISGLAIVQGKRVIWGSELTHRGFQIQEALTSRRQLRRSRRNRKTRYRKPRFLNRTRPKGWLAPSLTSRVQNILTWVKKLIRFCPITGISQELVRFDTQKLQNPELSGIEYQQGTLYGYELREYLLEKWNRKCAYCGATGTQLEIEHIKPKSKGGSNRVSNLTIACHPCNQAKSNQDIELFLSKKPSILKRILSQSLRPLADAASVNSTRCTLYYELKSIGLPVEVGSGGLTKFNRCRQNLPKTHWLDAANVGKVETLIIEVTLPLVITAKGHGTRQLCRTNKYGFPIRHCSRIKFHKGFQTGDIVRAVVTKGKNIGTYVGRVATRKSGSFNISTLGGLVQGISHKYCRFIHRKDGYAYTN

SEQ ID NO: 13638 - protein, 509 aa, unidentified; identical to SEQ ID NO: 12136

SEQ ID NO: 13639 - protein, 442 aa, unidentified; identical to SEQ ID NO: 10884

SEQ ID NO: 13640 - protein, 515 aa, unidentified
VTDVSTIYVLNKDGKPLMPTTRCGHVRYLLKEKKARVAASKPFTIQLLYETNDVVQPLYLGIDPGRTNIGVAVVKTDGTAVFTAHLETRNKEIPKLMQGRKKARRARRTNGRRCRRQRRAKANGTISKKCVKQTTAQNGSVSKRAKEIGVIKRHLPGCEKDVLCIGIKNKEAKFSNRTKPEGWLTPTANQLLQTHINLVKKIRKFLPISDVVLEINKFAFMQLDNPNVQKWQYQQGPLYQKANLEEAVSEMQEHHCLFCKKPIAHYHHVVPQSENGSNTIGNIVGLCTKHHDLVHKDTAWQKKLTKKKTGLNKKYSALSVLNQIIPALTKELSSLFPKHFFATNGKSTYDYRAAHGVRKDHWLDAYCIACSVLPNDVCDKNINSRVLYELKQFRRHDRRALNNENMSRVYTLNENVVATNRHKATKQTTDSLEEFRQNHPDDACKLKVKEHHPTYRNMSRNYPGSVFLVGNQVHVMQGVAGSKDGKATTYKDTNANSIAAGKCKFVAKNSGILFV

SEQ ID NO: 13641 - protein, 512 aa, unidentified
MSTVYVLNKDGKPLMPTTRCGHVRYLLKEKKARVVTSKPFTIQLLYETNDVVQPLYLGIDPGRTNIGVAVVKTDGTAVFTAHLETRNKEIPKLMQGRKKARRARRTNGRRCRRQRRAKANGTISKKCVKQTTAQNGSVSKRAKEIGVIKRHLPGCEKELLCIGIKNKEAKFSNRTRPEGWLTPTANQLLQTHINLVKKIQKFLPISDVVLEINKFAFMQLDNPNIQKWQYQQGPLYQKASLEEAVSEMQEHHCLFCKKPIAHYHHVVPQSENGSDTIGNIVGLCTKHHDLVHKDTAWQKKLAKKKTGLNKKYGALSVLNQIIPALTKELSSLFPKHFFATNGKSTHDYRAAHDVSKDHWLDAYCIACSILPNDTCDKNINGRVPYKLKQFRRHDRRAPHKENMSRVYTLDGKKVATNRHKAIKQTTDSLEEFRQRQPNDVCKLKVKEHHPEYRNPERNFPGCVFLVGKHTHVVQGTSGSHNSKADGYYDTNGNSYSSGKCKFVAKNKGIVFA

SEQ ID NO: 13642 - protein, 425 aa, unidentified; identical to SEQ ID NO: 9937

SEQ ID NO: 13643 - protein, 434 aa, Lactobacillus sp.
MQNRVFVINRQGEPLMPCKQQKCRNLLQAGRAKVIKKEPFTIQLLFGSTGYKQPVSIGVDSGQHHVGLAVTSQDKVLFQGEVSLRQDVKKLLDTRRIYRRGRRNRNTRYRPPRFLNRAKPAGWLPPSVASKVQHNITWIQRVQAVLPQAELHIEVGKFDMAKMKQPGITGLGYQQGDLYGYETAKQYVLDRDNYTCQICHGKTKDPKLKIHHIIYRSTGGTNQVSNLLTVCATCHTQANHQPGGKLYALQAKRFQSHHSLKGATFMNILRRRLFTAFPEASFQYGAQTTLNRAKLELPKAHYNDAVTISGIQRISQQPTAVVMFRQFRKKKRSLHEATARKGRKTPNTTSKRNAKNKKFSKGFYLNDYVQLPNGQKGNVSGFSGKTLCFVKAGDGHYLAISSKYKHINLSKLKVIRHQNNWNVTEIEVKTYQMA

SEQ ID NO: 13644 - protein, 418 aa, Exiguobacterium sp.; identical to SEQ ID NO: 2406

SEQ ID NO: 13645 - protein, 404 aa, unidentified
LRVFVLNKRGKPLMPCSPAKARLLLKEKKAIVKRRTPFTIQLTIATGETKQPVGLGVDAGYKHVGLSASTDKAELYASQVELRQDITDLLSARRALRRARRNRKTRYRAPRFNNRIRTKRKGWLAPSVENRINAHLSRIEAVLRLLPVTKITVETASFDMLLLKNPDIAGKEYQEGEQLGFWNVREYVLFRDGHVCQHCYGRSKDPVLNVHHLESRRTGGDSPGNLITLCETCHEALHRGEIALKTKRGHSFRAEAFMGMMRWEVLNRLKASHSELEVNNTYGYRTKHARIVNGIDKSHCADAFCIAGNLGAERLCEFFFQKQTRRNNRQIHKLSILKGGIRKRNQAPFEIKGFRLFDKVACKGEESFIFGRRSSGYFDVRKLDGTRISAGISYKKLRLLEKRR

SEQ ID NO: 13646 - protein, 512 aa, unidentified; identical to SEQ ID NO: 8277

SEQ ID NO: 13647 - protein, 431 aa, unidentified
MPNKVYVINKHGRPLMPCSPAKARHLLDAGKAKVKKRTPFTIQLVYGSSGYTQEVILGVDAGSKTIGVSASTKKEELFAANVIPRNDVVDLLSTRRESRRARRNRKTRYRKPRFDNRVRSKHKGWLAPSVEVKIQEHITAIRRVCGILPVSKVVVETAEFDLQLLKAIEEGKPVPQGEDYQKGEMYGHYNVRQYVLWRDNYTCQCCGAHATKKKEVRLHVHHLESRKTGGDAPGNLVTLCDSCHEKLHKGLIAEKDFKKRKRKSTRDATFMGIMRKTLMQRLCSELPIPVIETRGYITKATREKLLVLPKSHTNDAQAIAQGKQGFNVGYLPGIEQIDKIYTIRPVRHHNRQLYKATILKGGIRKSNQTKKYVFGYRLFDKVQFNGQDCFIWGRRTSGYFVVKTIDGKVIHNSASFKKLRLVERASNYLIA

SEQ ID NO: 13648 - protein, 512 aa, unidentified
MSTVYVLNKDGKPLMPTTRCGHVRRLLKEQKAQVVTSKPFTIQLLYETDDVVQPLYLGIDPGRTNIGAAVVKTDGTAVFTAHLETRNKEIPKLMQGRKKARHARRTNGRRCRRQRRAKANGTISKKCVKQATAQNGSVSKRANEIGVIKRHLPGCEKEVLCIGIKNKEAKFSNRTRPEGWLTPTANQLLQTHINLVKKIQKFLPISDVVLEINKFAFMRLDNPNVQKWQYQQGPLYQKASLEEAVSEMQEHHCLFCKKPIAHYHHVVPQSENGSDTIGNIVGLCTKHHDLVHKDTAWQKKLAKKKTGLNKKYGALSVLNQIIPALTKELSFLFPKHFFATNGKSTYDYRAAHGVGKDHWLDAYCVAGSVLPNDACDNNINNHVPYELKQFRRHDRRALHKENMGRVYTLNGKSVATNRHKAIKQTTDSLEEFRQRQPNDVCKLKVKEHHPEYRNPKRNFPGCVFLVGKHTHVMQGTSGSHNGKADGYYDTNGNSYSSGKCKFVVKNEGIVFT

SEQ ID NO: 13649 - protein, 425 aa, Moorena sp.
MSTNYVLVLDTNRKPLNPCKPGMARSLLKAGKAAVFKQYPFTIILNKAVDDAPKPVQLKIDPGSKVTGLALVQDDKVLWGTELYHRGQQIKADLEDRRKLRRGRRNRKTRYRQPRFLNRTRPEGWLAPSMLHRVLTTMTWVRRLTKFVPVTGISLERVRFDTQKMINPEVSGVDYHQGELQGYEVREYLLEKWNRQCAYCQATDTRLEVDHIHPKSKGGSDRVSNLTLACHDCNQAKGNQDIRDFLCGKSDLLNRILSQVKQPLLDAAAVNSTRNKIAEELIATGLPIEFGTGGQTKYNRCRLDLPKTHWLDAACVGVVVHLTLETKQCLTITASGHGNRQMAGVDKYGFPYRHRTRQQVHFGFRSGDIVRAVVPKGKKAGTHVGRVLCRKSGSFDIQTKSGRVTGINHKYCSTIHGRDGYAYVF

SEQ ID NO: 13650 - protein, 420 aa, unidentified
MQYVYVLNKHSEPLMPCSPGKARLLLKRQKACVVKRTPFTIKLLHGSAGYKQPITLGVDAGSKHVGLSASTEKRELYSEEFTPRNDVVELLSTRRQNRCSRRNRKTRYRTPRFNNRVHSKHKGWLAPSVEVKIQEHITVIKRICRILPITLVRVETAEFDTQRLKAMLAGKPLPVGTDYQLGEMYDEYNVRQYVLKRDNYTCQCCGAHTTAKKAIKLHVHHLESRKVGGNAPSNLITLCTACHDNLHKGKVTLDGKKRGKTLRDAAFMGIMRNTLLIRLRNELNIPVQNTYGYITKLLREQNDIKKSHVNDARCISKHPLAEPCSVCYRTKAIRHHNRQIHKAKILKGGIRKANQAPYIVKGFRLWDKVLYNGQECFISGRRSSGYFALKKLDGTAITNSISFRKLRLLEPAINYLIERM

SEQ ID NO: 13651 - protein, 434 aa, unidentified
MSKIFVLNTDTRPLDPIHPAQARQLLRNKKAAVSRRFPFTIILKESRPKAPIKPLRLKIDPGAKHTGIALVNDTTGEVVFGGELKHRGFAIRDALTSRRQLRRSRRNRKTRYRQPRFLNRTRSEEWLAPSLQSRVDNIKTWVNRLRKLAPIKAISQELVRFDMQLMRNPDIQGKEYQQGTLAGYETREYLLEKWNRQCAYCGIKDVPLQIEHIHPRAKGGSNSITNLTLSCEKCNIKKGTKDVKDFLKKDPTKLQKILAQAKKSLADAAAVNATRYALLEVLKATGLTVECGSGGLTKFNRSQQNLVKTHWTDAACVGKSTPILKIKGIKPLLITANGHGTRQMAGTDKFGFPTRHRSNKQIHYGFSTGDIVKAVVTNGQKVGEYLGRVLCRATGSFDIATKMGRIAGISYKYCSAIHKKDGYSYAFSNFLDYD

SEQ ID NO: 13652 - protein, 414 aa, unidentified
MPCSPAKARLLLKEKKAIVKRRTPFAIQLTIATGETKQPVSLGVDAGYKHVGLSASTEKAELYASEVELRQDITDLLSARRALRQSRRNRKTRYRAPRFDNRIRTKRKGWLAPSVENRINAHLSRIEAVLRLLPVTKITVETASFDMQLLKNPDIAGKEYQEGEQLGFWNVREYVLFRDGHVCQHCHGRSKDPVLNVHHLESRRTGGDSPGNLITLCETCHKALHRGEITLKAKRGQSFRAEAFMGIMRWEVLNRLKASHPELEVNNTYGYRTKHARIANDIAKSHCADAFCIAGNLGAERLGEFFFQKQTRRNNRQIHKLSILKGGIRKRNQAPFEVNGFRLFDKVACQGEEGFIFGRRSSGFFDVRKLDGTRISAGISCKKLHLLEKRRTYLTEIRKEEALLALPEGRSLRT

SEQ ID NO: 13653 - protein, 423 aa, unidentified
MRVFVFNMRGEPLMPCTQRKARLLLKTGKAKIYKYNPFTIQLKYVTGENKQECHVGIDTGSKYIGLAVTSENKVLFKGEVELRQDVKSKIDTKRIYRRSRRNRKTRYRRCRFLNRKRFGKWLPPSLQNRINHTFKWIDKLCSFIPESILHIEVGKFDIAKMINPEVHSVDYSQGQTYGYQGERYFIFARDNYTCQVCGERNKPLQTHHIIYVSNGGTNRVDNQITVCKNCHNSTNHKNGGIFYKWQKEHKKVKQYKEPPFMNVLRQQILNQYPQALITYGFETTIKRKNIGLEKTHYNDAIVISGVSTISENLHEWLLIRQFRKKKRSLHEGVPRKGRKEPNRIQKRNSKNTPYYRGFYLNDKVSVFGKSGYITGFTNSGAYVKGVDGEYIVLPNKSYKRVNIASLKFICHNNNWQYITKNAV

SEQ ID NO: 13654 - protein, 432 aa, unidentified
VLQTTNPFQHWRRITTDRKVEQTEPVRYPSMENTLKVFVLNMRGQPLMPCSPPKARKLLRAGKAVPVRRTPFVIQLTVPTGETKQPITLGVDAGYKHVGLSATTAKEELLASEVELRQDVTGLLSDRLALRRARRNRKTRCRAPRFDNRVRSKHKGWLAPSVENRIQAHISRIEAVCRVLPITKIVIETASFDIQKIKNPEVEGTDYQQGEQLGFWNVREYVLFRDGHVCQACKGRSKDLILNVHHIESRKTGGDAPGNLITLCEACHKAYHAGKLKQFSPRRGASFRAETFMGIMRWTVLNRLRERHPELPVTNTYGYLTKHKRIVAGLPKTHCADAFCIAGVLDAKRRGEYLFQKQTRRHNRQIHKLTILKGGVRKRHQAPYLVHGFRLFDKVLCKGEVGFIFGRRSSGAFDVRRLNGTKISAGISYKKL

SEQ ID NO: 13655 - protein, 428 aa, unidentified
LKVFVLNMRGQPLMPCSPAKARHLLKAGKAVVRRRTPFTIQLRIATGEMKQSVTLGVDAGAKHVGLSATTEKEEVFASEVELRQDITGLLAARLSLRRERRQRKTRYRAPRFLNRVRSKHKGWLAPSVENRIQAHMSRIDAICGLLPVTKIVIETASFDIQKIKHPDVEGTDYQQGDQLGFWNVREYVLFRDGHVCQHCHGHAKDKILNVHHLESRQTGGDAPNNLITLCETCHKACHAGKIKLKVKRGQSFRAEAFMGIMRWTLLDRVRKAHPGLPVENTYGYLTKNTRIAMGLPKAHCVDAYCIAGNLKAVRRGVHLYQRPVRKHNRQIHKCTVLSKTLKDGTKIGYRKLNQTPHLVKNFRLFDKVRCLGKTGFIFGRRSSGYFDVRRLDGVKLSSGISYRKLTLLEKRSTYLTELRKEDGASSPV

SEQ ID NO: 13656 - protein, 477 aa, unidentified; identical to SEQ ID NO: 8085

SEQ ID NO: 13657 - protein, 438 aa, unidentified; identical to SEQ ID NO: 4848

SEQ ID NO: 13658 - protein, 504 aa, unidentified
MAWEAIQTRRIKPHDIGEGTLRRHAAGTVSFPVLCKNRKETLMSVLVIGRNGRALMPTNPRKARLLLKKKTASVVCRHPFTIQLLYKTGCATQEGCIGIDTGSQHIGVGITCGDRVILKDEHALRSSMEKRSLLATRTVMRRGRRYRKVRYRKPKWRHHTKRMYFEKANRRGQHWRKVKTTTQSPRLKGWLPPSLQSKCDHHFRIIDRYLKYLPDPITRNLVIEAGRFDMARMNDPTIHGEMYQRGPMYDAENLRAYIFARDNYQCACCKAKAGTTRKADGTTVKLVAHHILFRSRGATDNPKYIISVCDHCHTTKAHQPGGILYSWMENKKKVARGLRDATFMNILRKRLFARYPQAAFTYGNITAADRKQLRLPKSHANDAVAISLFGKEASTVKNICQTMHYKQIRKSKRSLHEAIPRKGRKNPNTKAVRNKKNTTQVNGFKLWDSVLADGKKLFICSFTGTSAYLIDKNGCYISQPGKTYKQWPLSKLKRLHPNGNWLMA

SEQ ID NO: 13659 - protein, 431 aa, unidentified
MPNKVYVINKHGRPLMPCSPAKARHLLDAGKAKVKKRTPFTIQLVYGSSGYTQEVILGVDAGSKTIGVSASTKKEELFAANVIPRNDVVDLLSTRREFRRARRNRKTRYRKPRFDNRVRSKHKGWLAPSVEVKIQEHITAIRRVCGILPVSKVVVETAEFDLQLLKAIADGKPVPQGEDYQKGEMYGHYNVRQYVLWRDNYTCQCCGAHATKKKEVRLHVHHLESRKVGGDAPDNQVTLCESCHEKLHKGLIAEKDFKKRKRRSTRDATFMGIMRKTLMQRLCSELPIPVIETRGYITKATREKLLVLPKSHTNDALAIAQGKRGFNVGYLPEIAQIDKIYTIRPVRHHNRQLHKATILKGGIRKSNQAEKYVFGYRLFDKVQFNGQDCFIWGRRTTGIFTIKTINGKMIKDGISFKKLKPVEKSTSYLIA

SEQ ID NO: 13660 - protein, 422 aa, unidentified
MQYVYVVGSNGKPLMPCSPTKARKLLKSKSAAVLQRTPFTIKLLHHAGGYKQPITLGVDAGSKHVGLSACTDTEELYKEELTPRNDVVKLLSARRECRRGRRHRKTRYRAPRFNNRVHSKHKGWLAPSVEVKIQEHITAIHRICRRLPITKIVVETAEFDTQRLKAMLEGKPLPVGIDYKRGEMYDEYNVRQYVLKRDNYTCQHCGARGSAEKGIKLHVHHLETRQTGGNAPNNLITLCKDCHTALHDGKITLKLDKKKRGKPLRDSAFMGIMRKTLLSRIRKEVAIPVVETQGYITKLLREENHIQKSHTNDARCIAGCPKALPCDTTYHTKAIRHHNRKIYKTNILKGGVRKLNQAPYKVFGFRIWDKVKYKGQECFITGRRSSGYFALKKLGGTTISNSANYKKIHFLEPANHYIIERS

SEQ ID NO: 13661 - protein, 427 aa, Parasutterella sp.; identical to SEQ ID NO: 12981

SEQ ID NO: 13662 - protein, 421 aa, unidentified
  REGION 1..421: note = Ga0307928_10000789
VDPLQHAGGQNLRVSDNMHVFVLNKRKEVLMPTSCRKARLLLKSGKAVVIKRFPFIIQLTYATGENKQKITCGVDPGYSDIGFSCITKTRELIGGTVKLDNFTSKHLSEKRMYRRNRRNRLRYRSPRFLNRRRSNKWIPPSIERRYQTHINLINKLKQFLPISNITIEIGNFDIQKLNNPDINGKGYQQGNLYNYSNLKSFVLSREKHICQLCNKNDLKNDKWKLHHIILKSKGGTDKSNNMALLHESCHKKLHKQNLYNKLKKNKQYKESIFMNIIKSRFKNSLNCKLVFGYETYCRRNELKLEKSHSNDSFVVAGGTNQKRSMEYNIKQRRRNNRTLQLNRKGFSPSIRRKRYKLQPYDLVKIDNNIYDVVGTHCLGKRVKVKSEKNKKKEISIKKIDWYFNNNSLIWKKGVSGNSSHY

SEQ ID NO: 13663 - protein, 451 aa, unidentified; identical to SEQ ID NO: 7526

SEQ ID NO: 13664 - protein, 431 aa, unidentified; identical to SEQ ID NO: 5232

SEQ ID NO: 13665 - protein, 457 aa, unidentified; identical to SEQ ID NO: 4365

SEQ ID NO: 13666 - protein, 431 aa, unidentified
MPDKVYVISRLGHPLMPCSPAKARHLLDDKKAKVVKRMPFTIRLLYGSTKYIQPIILGVDAGSKTIGLSASTAKEEVFAAEVMPRNDVVENLSTRREFRRARRNRTTRYRKPRSDNRVRSNHERWLAPSVKVKIQEHITSIKRVCTILPISKVVIETAEFDLQLLKAIQEGKPIPEGEDYQKGEMYGSYNVCQYVLWRDNYTCICCGVRGTPKNPVRLHVHHFESRKYGGNAPDNHGTLCDDCHKKFHLGIITDVKLKTRRRQSTRDAAFMGIMRKTLMWRLRTELFIPVAETKGYITKATREKLLVLPKSHTRDALAIAQGRHGFGIKEYAYVEPANHIYTVRPVRHHNRQLHKASILKGGIRKRNQASKYVFGFRLYDKVLYQGKACFVWGRRTRGTLLLRTIDGIKVKDGVSYRNLTLLERSSNYLIA

SEQ ID NO: 13667 - protein, 442 aa, unidentified; identical to SEQ ID NO: 2903

SEQ ID NO: 13668 - protein, 458 aa, Lactobacillus sp.; identical to SEQ ID NO: 4474

SEQ ID NO: 13669 - protein, 451 aa, Ruminococcus sp.; identical to SEQ ID NO: 2424

SEQ ID NO: 13670 - protein, 411 aa, unidentified; identical to SEQ ID NO: 3917

SEQ ID NO: 13671 - protein, 406 aa, unidentified
MDAWDIIVVLNKRGKPLMPCSPAKARHLLKEKKAAVVRRTPFTIQLTIATGESKQPVSLGVDAGYKHVGLSASTEKAELYASEVELRQDITDLLSARRALRQSRRNRKTRYRAPRFDNRIRTKRKGWLAPSVENRINAHLSRIEAVLRLLPVTKITVETASFDMQLLKNPDISGKEYQEGEQLGFWNIREYVLCRDGHVCQHCYGRSKDPVLNVHHLESRRTGGDSPGNLITLCETCHKALHRGEITLKAKRGQSFRAEAFMGIMRWEVLNRLKASHPELEVNNTYGYRTKHARIANGIAKSHCADAFCIAGNLGAKRLGEFLFQKQTRRNNRQIHKLSILKGSLRKRNQAPFEVKGFRLFDKVAYQGEEGFIFGRRSSGFFDIRRLDGTRISAGINYKFPHVLKG

SEQ ID NO: 13672 - protein, 515 aa, unidentified
MTALEERLSKTEYIYVLGFDGKPQMPTRRKRHVLKLLKTGRARIAEDIPFTIRLTYRNAPVLQPVTLAEDPGRTNIGAAVLSPLGDLLFAAVIETRNKEIKKLMTDRKKSRQASRRGERKARQRLAKRYGSMVKSGMVMRKLPMYAADRFVTCKFIRNTQARFCNRKRCPDWITPTVQHLVQTHLNIIRKISRYLPVTDIAFEVNRFAFMHMENPEAMGVDFQNGPLKGYGDVKEAIRTQQHGKCLMCKKPISHFHHIVPRSRGGSDTIQNLAGLCTECHTKVHTDTAFRKDFDEKKSGQLKKYGALSALNQAVPFICKKLLEEYGEEHVHFCRGLDTSLIRTAFGFEKTKKNQMHEVDAYCIGLAALEVNEVETPAFDHTFQIRQFRRQDRSIIHHQTGRSYYQGKEKVAQNRKPGFEQKTTALSQWYEEQVRIHGEKEAEKLRSQLRVEKSCRHYNDMDRFLPGAVFLYEGKRYVLSGRITNGKYLRACGQGMKNFPAAECTFIRHNAGLVFI

SEQ ID NO: 13673 - protein, 443 aa, unidentified
LTKDENRPSGRTTGLRAEQAEPAGIRKGDTLKVFVLNMRGKPLMPCSPAKARHMLKAGKAFVVRRTPFTIKLTIATGETKQDVTLGVDAGARHVGISATTEKEEVFASEVALRQDITGLLADRLAFRRARRNRKTRYRSPRFNNRVRSKHKGWLASSVENRIQAHMSRIDAVCRLLPVTKIVIETASFDIQKIRNPEVEGTGYQQGDQLGFWNVREYVLFRDGHICQHCRGRSKDPILNVHHLESRKTGGDAPNNLITLCETCHKAYHAGKIKLKVKRGQSFRAEAFMGIMRWTLLDRVRKTHPKLPVENTYGYLTKHKRIALGLPKTHCVDAFCIAGNLKALRRGDFLFQQQTRKHNRQIHKCSILKGGVRTLNQAPFLVKGFRLFDKVRIGGQIGFVFGRRVRGTFNIRRLDKTVIGTDINCKKLSLLETRKTFLTELRKE

SEQ ID NO: 13674 - protein, 442 aa, unidentified; identical to SEQ ID NO: 3218

SEQ ID NO: 13675 - protein, 380 aa, Kandleria sp.
  source 1..380: note = isolate UBA4329
LLSRYPMVIQLKKKISDQEICKDEIRCGIDDGGLHVGVALVQKCQTRNKVIFKGTIEQRNDVKHLMDVRRGFRRYHRDHKRYRPVRFDNRKSSKRKGRIAPSILQKRQATIRVINQLNKWVNITNYWLEDVAIDIRALTDGYKPYRWQYQKSNRLDENIRKAVILRDGCQCMECGKSNCRLEVHHIKPRRLKGSNTLGNLITLCTGCHQKTEGAEELYMNRYFALLNSSDNKKLNYAQHVMIGKKWLREQLSKLGMLHLTNGGDTANKRIDWGIAKSHSNDAICITDLRPDTCEIKEWEIKPMRRQSKAKTDNVLGIKHSDLVEYTFMNGETHRGYVTALYPEQNALNFQSPTKHCKKVNARKCKVLWKYSKIYWLDDVS

SEQ ID NO: 13676 - protein, 417 aa, unidentified
MVYVISKDNKPLMPCSNAIARLLLKQGKAKVKKREPFTIKLTYDTTNYIQDLTLGVDTGSGTIGTAVSKDNGDIIYMSEVVVRNDISEKMAQRAKYRRNRRTRKTRYRKARWLNRKSSIKSGRFSPTMISKFHSHIKEIEFIKSILPIKNLVLETGKFDPQLMQNPELKYKPWGYQKGKNYGFSNTREMVLNRDNYTCQCCKGKRKDRKLEVHHIVFRSNNGSDDENNLITLCRTCHNLLHKGEIKLNLRGYKKGSLKYATQMNSIRKQLLRHYPEAIETFGYITKENRLNINIEKEHYLDACVIATGGNSFKIRSNLYKKKHIPKGDYQQTKGIRSEQRLNTKKICGFRKFDKVKYFGKEYFIKGRMSAGYTILMDFDGNKIDFSNMQKGFKTPRLNNCKRINERSSQMVCRQFIS

SEQ ID NO: 13677 - protein, 433 aa, unidentified
MQHVFVLDQNKKPLDPCHPARARKLLRSGQAAVFRRFPFTIILMERTLKESVTHKYCVKIDPGSKQTGMALVREGDHKVVWAAIIQHRGQVIRDNLLARRAIRRGRRAHHCRYRPARFDNRHRQKGWLPPSLESRLANIETWVRRLALHTPLTAISMELVKFDTQKIENPEISGVEYQQGKLVGYEVREYLLEKWGRKCAYCGKTGVPLEIEHIIPKSRGGSNQVSNLTLACETCNRAKNNLSAVEFGHPEIQKKAKLPLKDAAAVNSIRWELWRRLSAWGFVVECGTGGRTKYNRISQNLPKTHWLDAACVGEAGKNIFVPNGLDGLGIKSYGHGSRQMCRMNKFGFPRTSAKGAKKVFDFQTGGIVRAVVTKGKKVGTYVGRVAVRSSGYFDIQCGTQIVQGISYIYCRLLHKPDGYSYTYRKDEGFTPLG

SEQ ID NO: 13678 - protein, 446 aa, Azotobacter sp.
MAVYVLDKTGKPLMPCSEKRARLLLERSRARVHRLLPFVIRLTDRRQADCTLQPLALKLDPGSRFTSMALVRRQGRRVSVLSLLELIHRGAAIRQALLQRAAFRRRRRSANLRYRAPRFDNRTRPAGWLPPSLRHRLDTSLAWVARLRRWAPIASLAVERVKFDLQALQNPGIVGIEYQQGTLQGYEVREYLLEKWGRRCAYCGTEQVPLEVEHIVPRSAGGSDRVSNLTLACRTCNQNKGNRPLEVFLARQPLRLARIMAQAKAPLRDAAAVNATRNALFASLLATGLSVEAGSGGQTKFNRRRLGLPKSHALDAVCVGEVEAVAGWQRPTLAIRATGRGEYQRTRLTAHGFPRGYLTRRKRHFGFQTGDRVHAVVPTGKKAGVHRGRVAVRQTGSFNIQTAGGVVQGIGHRHCHLVQRADGYGYSLQSFDSAQLEKEAARAGAR

SEQ ID NO: 13679 - protein, 493 aa, unidentified; identical to SEQ ID NO: 2644

SEQ ID NO: 13680 - protein, 428 aa, unidentified
MLVYVLDKNEQPLMPTHNGAKVRVLLKQKRAKVVSKCPFTIKLLYESTNFTQPLTLGVDTGSKYVGSAVINDATSEVVYESQTELRDDIKSKMDRRRQFRRARRNKLRYRPVRFNNRKSSKRKDRYNPTLTSKFQGHTREIEFVKSILPISDIVLEVGEFDPQLLQAPTLAYRKWGYQKGELYQQENFKQATKARDDYKCQCCGKQNCGLEVHHLIPRSSGSDKLANLITLCTDCHHLAHSSEEQLLAFQKKFGKKTKGTLRYATQMNVLRHMLQREYPNAEVTYGFITKEMRRVFGLEKSHMIDACCIASRGSEFHNENSNRYKKKCVAKGDYTRTGVSGGKFGILPNGKIVGFRRYDKVFYNSKEYFIAGRMSIGKVYLIDIDNNRLQVERTRRGTGEKYTSKAMIKVSLVRKVTSAKTCLCTINK

SEQ ID NO: 13681 - protein, 435 aa, unidentified; identical to SEQ ID NO: 4814

SEQ ID NO: 13682 - protein, 406 aa, unidentified; identical to SEQ ID NO: 7406

SEQ ID NO: 13683 - protein, 278 aa, unidentified; identical to SEQ ID NO: 12272

SEQ ID NO: 13684 - protein, 444 aa, unidentified
  source 1..444: note = Candidatus Anoxychlamydiales bacterium
MLVFVLNKLKKPLMPCSSAKARGLLKKGLAKVISKKPFTIKLLFGSSGYKQKIIAGMDTGSKIIGIAAIANGKVLYQAETKLRGEEIKKKMDQRRMYRRSRRGRKLRYRKPRFLNRRASTATNRLAPSVKHKVFSHIREKRFIESILPISMWIVETASFDIHKITNPKGVSKALGKGSSYQKGRMLDFYNVKQYVLNRDKYQCQKCKKKTNLKLHVHHIQFRSNSGSNSPDNLVTLCETCHDKLHNLKKEEAEKSSKKLQKKAQKQTKHATEVSILRSQICKHFRNNKTSQPFEETFGYITKFNRESENLPKSHHIDAICIASRGERIEMHNQNNISDLFLRRCVSKGDYQQRRGSRSELKIPTGKLFGLKKFDLVKTSKGVGFVKGKRSSGFFAISDINGTIISDSVNIKKNTNRIQARKAVLTWRSQFVSDLKDRVSLREKR

SEQ ID NO: 13685 - protein, 442 aa, unidentified; identical to SEQ ID NO: 3218

SEQ ID NO: 13686 - protein, 229 aa, unidentified
QYVLKRDHYTCQCCGAHNTAEKVVKLHVHHLESRKTGGNAPSNLVTLCTTCHKNLHKGKVTLDGKERGKPLRDAAFMGIMRKTLMARLKEELPIPVQGTYGYITKMRREQNDIKKSHTNDARCISKHPLAEPCSVCYRTKAIRHHNRQTHKANFSKKGIRKRSQMPYLVEGFRLWDKVLYKGQECFVSGRRSSGSFALKKLDGTSISKGVTFKKLRLLEPATNYLIERM

SEQ ID NO: 13687 - protein, 498 aa, unidentified
MTTVYVLSKNGKPLMPTTRCGHVRILLKEKKARVVERNPFTIQLTYETEENTQPLTLGIDPGRTNIGASVITQDGECVFSAQLVTRNKDVPKLMKQRKLFRMAHRRLKRRCKRQRRAKAAGTISQKGDFERPLPGYEKPIICKGIKNKEARFNNRKRPIGWLTPTANHLLLTHINLVKKLQKFLPITDVVLEINKFAFMQLDNPHIQRWQYQKGPLYGKGSVEEAVYAQQDGHCLFCGKAIAHYHHIVPQHKNGSETLENRVGLCNEHHDLVHKDRAWEAKMRSTKEGINKKYHALSVLNQIIPALADQLALLFPQRTFVTAGKDTADFRADHGIHKEHHLDAYCIACSILETAAKVKEPAEQPYLMTQFRRHDRQACHKANITRKYYDTDNKLVASNRHKAMDQKADSLEEYRIAHGEKAVSQLAVKPHPPAYKDINRVTPGSLLADNNGKVFTLTRSDGKHNGIADYFVDTQDIKHLAKRCILLQKNQGIVFAETG

SEQ ID NO: 13688 - protein, 432 aa, unidentified
  source 1..432: note = Bacilli bacterium
LKQKEYVFVVDKKGKQLSPTDINNAWRLIRTKKAKCIKYNPFTIKLNKIVKEEELDQSVFEMGIDDGSSNVGFSILQYCKKDNQITRIKVIQKATMEQRKDVKHLMEIRRGYRRNRRSEKRSRECQFNNRSASKRDGRIAPTIKQKRDAVVRIVKYYKKLVNITQIALEDVSIDIRALTEEKELKGEEYQQSNRQDDNIRRAVYLRDKGICQMCGEHKQKMEAHHIHPRRLGGPDSIYNEILLCHDCHSSINGKELQYKDTFYKKINGKLIRTDYAQHVMQGKYYLRNELSLLGELHLTFGGTTANKRNTWNIEKSHTNDAICIGCKDINMKPDTVNVKEYTIKPIRHKRKSNTTSMKFELGDYVELEIRSNKLKKKIKVTGYITSFVKCQKGKDKGKLTYINLTANDGTIYKRYSLKKCKLLERQKHLRFL

SEQ ID NO: 13689 - protein, 470 aa, unidentified; identical to SEQ ID NO: 2825

SEQ ID NO: 13690 - protein, 431 aa, unidentified; identical to SEQ ID NO: 3801

SEQ ID NO: 13691 - protein, 422 aa, unidentified
LNKRGKPLMPCSPAKARLLLKEKKAIVVRRTPFTIQLTIATGESKQPVSLGVDAGYKHVGLSASTEKAELYASEVELRKDITDLLSARRALRQSRRNRKTRYRAPRFDNRIRTKRKGWLAPSVENRINAHLSRIEAVLRLLPITKITVETASFDMLLLKNPDIAGKEYQEGEQLGFWNVREYVLFRDGHVCQHCYGRSKDPVLNVHHLESRRTGGDSPGNLITLCETCHKALHRGEITLKAKRGQSFRAQAFMGIMRREVLNRLKASYPELKVHETYGYLTKHARIANGIVKSHGADAFCIAGNLGAERLGEFFFQKQTRRNNRQIHKLSILKGGIRKRNQAPFEIKGFRLFDKVACQGEEGFIFGRRSSGSFDVRKLDGTRISAGISCKKLRLLEKRRTYLTEIRKEEALPPLPEGRGLRA

SEQ ID NO: 13692 - protein, 521 aa, unidentified; identical to SEQ ID NO: 7054

SEQ ID NO: 13693 - protein, 423 aa, unidentified; identical to SEQ ID NO: 3951

SEQ ID NO: 13694 - protein, 415 aa, Bacillus sp.; identical to SEQ ID NO: 7196

SEQ ID NO: 13695 - protein, 344 aa, Halomonas sp.; identical to SEQ ID NO: 3540
  source 1..344: note = isolate UBA1491

SEQ ID NO: 13696 - protein, 416 aa, unidentified; identical to SEQ ID NO: 9724

SEQ ID NO: 13697 - protein, 424 aa, unidentified; identical to SEQ ID NO: 5075

SEQ ID NO: 13698 - protein, 411 aa, unidentified; identical to SEQ ID NO: 6901

SEQ ID NO: 13699 - protein, 424 aa, unidentified
MVYVLSKEGTPLMPTNRHGRVRHLLDAGEAKAVKRCPFTIQLLYQSTTYTQEITLGVDAGSKTIGLSASTEKKELYASETRLRMDITDLLSVRRQFRRTRRNRKTRYRKARFNNRVHAKHKGWLAPGIEAKIGTHFRAVRDVCRILPVTEIIVETASFDIQKIKALENGEPVPEGTDYQEGDQLGFWNVREYVLWRDGYKCRCCNGKSKDQVLNVHHIESRKTGGDAPNNLATLCGYCHKQYHKGTILLPKSVRRGNSFRDAAFMGIMRRTFYNRLKEQYPRVAMTYGYITKNTRIRNSLPKTHYADARCIAGHPQAEPLEVYYFQKKVRCHNRQIHKANILKGGKKKRNQAEYLVKGYRLYDRVRYQNREYYVFGRRASGFFDIRTLGGNKGNKGSVSCKKLRFLEPRKTMLIERRMQEQEAV

SEQ ID NO: 13700 - protein, 493 aa, unidentified; identical to SEQ ID NO: 2644

SEQ ID NO: 13701 - protein, 416 aa, unidentified
MVYVLSQHGQPLMPTENHAKVRALLKHGKAKVIQRCPFTIQLLYESTTHTQKINLGIDAGSKTIGVSATTDSKVLYESEVVLRNDIVELLSGRRALRRSRRNRKTRYRKPRFDNRKKPDGWLAPSIRQKIETHVTVVENITKILPMTKIIVETASFDIQKIKNPEIEGAEYQHGEQLDFWNVREYVLFRDGHTCQCCKGKSKDNILNVHHIESRKTGGNAPNNLITLCETCHKAYHKGIITLPKEIHRGMRFRDAAFMGVMRWAFYDRLKELYNLLGVEVINTYGYITKNTRITYDLPKEHYVDARCISGNPAAKPMDYYYLQKKVRCHNRQIHKCKINKGGTRKRNQAAYEVKGFRLYDQVLWKGQKCFIFARRSTGRMDLRLLDGTHVNASVGYKNLKLLSMRKNYLIEQRKAG

SEQ ID NO: 13702 - protein, 461 aa, unidentified; identical to SEQ ID NO: 2919

SEQ ID NO: 13703 - protein, 520 aa, Micromonospora sp.
LYTGVKTNSGVLPQLRTLESVSADTAPRSHETGHGRRKAAGVRHGRGETGVSRRHPEPASAGTGEGREAHTHPVVFVVDRHHRPLQPCSPARARKLLASGRAVVHRHTPFVIRLKDRGVADSQVDGVELGIDPGSKVTGIAVFRADNTLRTGLFAIEVRHRGGQIRDKLTARAVFRRGRRSRNLRYRAPRFLNRRRSDGWLAPSLRHRIDNTVSWVQRLCRWAPVTGLHVERVAFDTQLMQNPNIAGVEYQHGTLHGYEVREYLLAKWGRECAYCGASGEPLNIDHIVPRSRGGSDRVSNLTLACVPCNLAKGATPVEVFLADRHDVLARIRLQAKLPLRDAGAVSATRRAVWQALAATGLPVEVCTGGRTKWNRHQTGAPKTHSLDALHVGVLAGVQSCPGEVLVAAATGRGSYARTRCDRYGFPRLRLPRSKSVYGFQTGDLVHAVVSAGKNKGRHIGRVAVRTTGEFNIRTSHALVQGIHHRHFRLLQRADGWAYAREEERRFFPALNGRVSTPQRR

SEQ ID NO: 13704 - protein, 422 aa, unidentified; identical to SEQ ID NO: 5333

SEQ ID NO: 13705 - protein, 515 aa, unidentified; identical to SEQ ID NO: 5111

SEQ ID NO: 13706 - protein, 425 aa, unidentified
  REGION 1..425: note = Ga0315277_10034546
MQRVFVLSSDQKPLDLCHPARARKLLKQGRAAIFRRQPFTIILKDRTAAESVTHPYRLKFDPGSKTTGIAIVQEQTGEVVWAAELQHKSNLVADRMEKRVGCRGRRRTANLRYRPPRFGNRRREKGWLTPCMRSRVGNIRTWTARLMRVCPITAFSLELVKFDTQAMQNPEISGVEYQRGTLAGWDVREYLLEKWERKCAYCGAKDVPFEAEHILPKSRGGTDRVSNLTLACHECNQAKGNQTAAEFGHPEVQVEAKQSLKDAAAVTTTRWAVYAVLRDTGLPVETGTGGRTKYNRTRLGLPKAHWIDAACVGASTPDALGVRGPGWQSRPLIIRAMGRGSRQMCRMDKHGFPRTAAKSVKRVHGFQTGDLVRAIVPTGKHAGTHVGRVAVRTSGSFRVGTVDGIGYRHCRLLQRTDGYEYVSHS

SEQ ID NO: 13707 - protein, 426 aa, Parasutterella sp.; identical to SEQ ID NO: 3045

SEQ ID NO: 13708 - protein, 421 aa, unidentified; identical to SEQ ID NO: 12209

SEQ ID NO: 13709 - protein, 440 aa, Clostridium sp.; identical to SEQ ID NO: 10253

SEQ ID NO: 13710 - protein, 453 aa, unidentified; identical to SEQ ID NO: 9767

SEQ ID NO: 13711 - protein, 504 aa, unidentified; identical to SEQ ID NO: 3854

SEQ ID NO: 13712 - protein, 475 aa, Ferroplasma sp.; identical to SEQ ID NO: 9016

SEQ ID NO: 13713 - protein, 458 aa, Acidithiobacillus sp.
MPCHPARARELLREGRARVHRIVPFTIRLVDRLQADSVLQPLRLKLDPGSKTTGLALAREKETVDPTTGEVLRTLTILMLLELKHRGHAIRDALTSRSALRRRRRGNLRYRPARFDNRTKPEGWLAPSLQHRVDTTLAWVKRLMRWAPVTALSQELVRFDMQQMQNPEISGTEYQQGTLAGYEVREYLLEKWGRECVYCRAQHTPLEIDHIHPRSKGGSDRVNNLTVSCHDCNQRKGNRPLEQFLAKAPERAEKILKQAKARLNDAAAVNSTRWTLFQRLKATGLDVEVASGGRTKWNRIRLGLPKAHCIDAACVGHLDAIKNWQQPVLSIKATGRGSYQRTRLTKYGFPRGVLTRSKSAFGFQTGDMVKAVVTRGKKAGAWLGRVAIRVSGSFNIQTATGLVQGIHHRFCTLIQRADGYSYSWTKIASTQGDAGLGRSQTAALSLPGLNPGVSRATG

SEQ ID NO: 13714 - protein, 455 aa, unidentified; identical to SEQ ID NO: 11167

SEQ ID NO: 13715 - protein, 366 aa, unidentified
VVGNRLLSIKPLINIGEGVIYSSICTGLSLQTYQKRKEVPCMVYVLDINGQPLMPTTRHGKVRRLLNSHLAKVVKRCPFTIQLLYQSTKEIQPVSLGVDAGSKHIGMAATTEKKVVYQEELSARNDVVKLLSARRTLRRTRRNRKTRYRKPRFNNRVHSKHKGWLAPSVEVKIQEHITTIKRICQILPISEIQVETAEFDLQRLKAMEEGRTPPVGTDYQLGEQYDFYNTRQYVLHRDGYTCQCCGTHDNNIKLHVHHIESRQTGGDAPNNLIILCEHCHKALHEGKLELPKGKKRGKSYRDATFMGVMRKTLLERLKKEIDVPVEGTYGYITKYWRERAGLEKSHIHDAVCISQYPYAKPLDIYY

SEQ ID NO: 13716 - protein, 418 aa, unidentified
MVYVLGQDGHPLMPTCRHGKVKRMLKSRMAKVVKKCPFTIQLQYESTTHTQKINLGIDAGSKTIGVSATTDSKVLYESEVVLRNDIVELLSGRRALRRSRRNRKTRYRKPRFDNRRRPDGWLTPSIRQKIKTHVTVVENVMKILPVTKIIVETASFDIQKIKNPEIEGAEYQYGEQLDFWNVREYVLFRDGHTCQCCKGKSKDNILNVHHIESRKTGGNAPNNLITLCETCHKAYHKGVITLPKEIHRGMRFRDAAFMGIMRWAFYDRLKELYTPFGVEVINTYGYITKNTRIEHGLPKEHYVDARCISGNPAAKPLGHYYFQKKVRCHNRQIHKNTILKGGIRKRNQAAYLVKGYRLFDKVKYQNQEYFIFGRRSSGFFDIRTLNGTKVNKGSISCKKLQLVEKSKHYLTEQRKVTA

SEQ ID NO: 13717 - protein, 408 aa, unidentified
MVYVQDINGKPLMPTTRHGKVRRLLKDKKAVVVNLCPFTIKLTYVTSDYKQEIVLGVDAGTKHVGLSATTKSKELYSSEVILRNDIVDLLSTRRELRRSRRNRLRYRKPRFDNRIKSKRPGWVAPSVKYKVDAHIRVIDNVCSILPISRIVIEVAQFDTQKINNPEISGKEYQEGDQLGFWNVREYVLARDGHKCQHCKGKSKDPVLNVHHIESRKTGGDSPSNLITLCETCHKEYHKGNIDLKIRRGKSLRDAAVMGIMKWRLYEELKSKYDNISMTFGYVTKYNRIKHGIEKSHVFDAFVISKNFDAIRLGYYYKVRLVRRHNRQIHKQKIPKGGIKRPNQSPFEVFGFRLFDRVMFENSYYFIFARRKTGSFNIRDIDGKNQRDITYKKLKLSRCKRFMVQKEMD

SEQ ID NO: 13718 - protein, 424 aa, unidentified
MRVFVFNMRGVPLMPCTQRKARILLKEGKAVIYKYNPFTIQLTHATGENTQDCHVGIDTGAKHAGVAITSEGKVLFKGEIELRQDVKSNLDTRRIYRRNRRNRKTRYRQPRFLNRRKADKWLPPSLQNRLDHTFHWIDTLRGLVPSPTLHIEVGKFDTAKMIDPEIHGVDYQHGQTYGFFDERYYVFARDNYTCQCCGKSKGKILQTHHIIYRSNGGTDRADNLITVCTDCHTSKNHQKGGILYMWQEQHKKVRQYKEPPFMNTLRRRIFAKYPDAAITYGSETTPKRKEKGLDKTHYNDAIIISGVQTISENPDEWLFIRQFRKKKRSLHEGTPRKGRKEPNRTQKRNSKNTPYYRGYHLNDKVRVLGKTGYISGFTGGAAYVKDSDNQYITLPNKSYKQVGISNLQHVCHNNNWQYITKTTA

SEQ ID NO: 13719 - protein, 430 aa, unidentified
MPKVYVLNRHGRPLMPCTPAKARHLLDAGKAKVRHRTPFTIQLLYGSTGYTQEVILGVDAGSKTIGLSAATETEELFSAEVKPRNDVVELMSARRQFRRARRNRTTRYRKPRFDNRVRSKHKGWLATSVEVKIQEHMTAIRRACAILPVSKVVVETAEFDLQLLKAVAEGKPVPQGEDYQKGEMYGHYNVRQYVLWRDSYTCCICGVHGSVRKGVPLHVHHLESRRVGGDAPDNLVTLCTACHDKLHKGIIMAADIKKRKRRSTRDTTFMGIMRMTLLRRLWEQLPVPVVETRGYITKATRENLLVLPKSHTNDALAIAHGPQGFRAEYLPNIRQADRLYTIRPVRHHNRQLHKATILKGGVRKANQAEKYICGFRLYDKVLYNGIECFVWGRRTSGSFLLRQLNGEKVKDGVSYKHLKLLERSQSYLVA

SEQ ID NO: 13720 - protein, 493 aa, unidentified; identical to SEQ ID NO: 2644

SEQ ID NO: 13721 - protein, 442 aa, Lactobacillus sp.
MKHENANRVFLLNRDGKPLMPCRPRKARLLLKSGKAFVVKKYPFTIQLKYGSYGYKQKASLGVDTGQRHIGFAIVSQNKVLYQSEVELRQDVHKNLYTRKIYRRSKRNRKTRYRQARFLNRVHGKRDGLWLPPSIKGKVSHNIAWIKRYLAVLPNTDLHIEVGKFDMAKMINPEISGKQYQEGSLKDWKNYEYYVLARDEYTCQLCHKHGEGVKLVVHHIVYRSHGGTDRISNLITLCTDCHTTKNHQPGGKLYKWMKAKKKVTKQLKCATFMNILRKRIMTAFPEASFQYGSQTYVDRKNLLLPKGHFMDAIAISGIKSVGQMPDTVTLISQFRKKKRSLHEATARKGRKQPNTSSKRNEKNMNHARGLWLNDYVRVIGNHAKGYVKGFKSKGYYVYLTDGLGNYVLSNGKNYINRKQCRLIMHNGNWQKAEQKLSLYEFK

SEQ ID NO: 13722 - protein, 419 aa, unidentified
MVYVLDINGQPLMPTARHGKVRRLLNSHLAKVVKRCPFTIQLLYQSTKETQPVSLGVDAGSKHIGLAATTEKKVVYQEELTPRNDVVKLLSARRTLRRSRRNRKTRYRKVRFNNRVHSKHKGWLAPSVEVKIQEHITVIKNVCKILPISEIHVETAEFDLQRLKAMEEGKPLPVGTDYQLGEQYDFYNTRQYVLHRDGYACQCCGTHDNDVKLHVHHIESRQTGGNAPNNLITLCEHCHKALHEGKIELPKGKKRGRPYRDAAFMGTMRNTLLERLKKEMDIPVMMTYGYITKYWREKTGLEKSHINDAICISKHPYAKPLDTCYLTKAVRHHNRQIHKANFSKGGIRKRNQAPYLVKGFRLFDKILYQGKECFIFGRRVSGGMDVRLLDGTHINAFVGYKKLKLLESRKAYLIERRTC

SEQ ID NO: 13723 - protein, 470 aa, unidentified; identical to SEQ ID NO: 2825

SEQ ID NO: 13724 - protein, 427 aa, unidentified
MSKVFVIDSEKRQLDPMHSAQARQLLRNKKAAVFRRFPFTIILKESKPESPVSPLRLKLDPGAKTTGIALVNDSTGEIVFAAELKHRGFAIRDALTSRRQLRRGRRNRKTRYRKPRFLNRTRPEGWLAPSLQSRVENIKTWVNKLRKFAPIKAISQELVRFDMQLMRNPEIQGEEYQQGTLAGYETREYLLEKWNRQCAYCGVKDVPFQVEHIHPRAKGGSNSIANLTLSCEKCNTKKGTKDIKEFLKKDPSKLTKILGQAKRPLADAAAVNTTRWALFKTLRETGLPVETGSGGLTKFNRSQQKLEKTHWLDATCVGKSTPKLIIKCVKPLLIISNGHGSRQSCRTDKFGFPNRHVPREKIHFNFQTGDIVKAVVTTGKKVGNYVGKVAIRSSGSFNVSTKKGLIQGISHKFCKRIHAKDGYSYAQ

SEQ ID NO: 13725 - protein, 429 aa, Moorena sp.
MQNRVFVIDVNKQPLNPIHPGRGRKLLKQGKTAVFRTYPFTIILKKTVRDPVNEPDRIKLDPGAKVTGMALVNQRTDAVVWAAELTHRGDMIRQKLADRRRVRRNRRHRKTRYRPARFDHRKRPDGWLAPSLQHRVETTMNWVERLGKCCSITDLSMELVRFDTQKLQNPEISGVQYQQGVLFGYELREYLLTKWRHECAYCGAQKVPLEIEHIHPKSKGGSDRVSNLAIACHQCNQKKGNKPVEQFLKKKPEVLKRLLAQANAPLKDAAAVNSTRWALFNRLQETGLAIEIGTGGLTKYNRTLQGLPKTHWLDAACVGKSTPMLNIATSQPLLITCTGRGGRQKAAINKYGYPIRHNPLKPIGRRPRCANKGWQTGDIAKHRVHGIGRITPRSRGSFVLSKPDKTKKSVKPIDLKPVFRRDGYSYKWA

SEQ ID NO: 13726 - protein, 408 aa, Petrotoga sp.; identical to SEQ ID NO: 11663

SEQ ID NO: 13727 - protein, 420 aa, unidentified; identical to SEQ ID NO: 5988

SEQ ID NO: 13728 - protein, 434 aa, unidentified; identical to SEQ ID NO: 9304

SEQ ID NO: 13729 - protein, 450 aa, unidentified; identical to SEQ ID NO: 2935

SEQ ID NO: 13730 - protein, 432 aa, unidentified
MSNFVFVIDTNKKPCDPVPPGQARRLLKQGNAAVFRRYPFVIILKYPASLHPGPHQLKIDPGSKTTGLAIIQQDKVVWGAQLQHRGQKISNDLKARNAVRRSRRNRKTRYRRPPIKNRGKRQRSKGWLAPSLKSRVYNIMTWVLRIKKYVPITGVSQELVKFNTQVLVNPETTGIEYQQGELFGYEVREYLLQKWGRKCAYCSATNTRLEIDHIHPRSRGGSNRVSNLTIACHECNQAKSNQDIRDFLAQKPDVLNRVLSQAKQPLKDAASVNSTRWALFNQLQQTDLPVEIGTGGRTKYNRTRLELPKTHWLDAACVGTQDMLTVLTSQPLLISAKGWGTRQMCITNKHGFPIKHRERKKVFFGFQTGDMAQANLPRGKFAGTHVGRLTVRKTGVFEMTKHIGKVSPVRHKYCKAIHRNDGYMYAFSTISH

SEQ ID NO: 13731 - protein, 475 aa, Blautia sp.; identical to SEQ ID NO: 4128

SEQ ID NO: 13732 - protein, 422 aa, unidentified
LNKRGKPLMPCSPAKARLLLKEKKAIVVRRTPFTIQLTIATGESKQPVSLGVDAGYKHVGLSASTEKAELYASEVELRKDITDLLSARRALRQSRRNRKTRYRAPRFDNRIRTKRKGWLAPSVENRINAHLSRIEAVLRLLPITKITVETASFDMQRLKNPDISGKEYQEGEQLGFWNVREYVLFRDGHVCRHCHGRSKDPVLNVHHLESRRTGSDSPDNLITLCETCHKALHRGEITLKAKRGQSFRAQAFMGIMRREVLNRLKASYPELKVHETYGYLTKHARIANGSVKSHGADAFCIAGNLGAERLGEFFFQKQTRRNNRQIRKLSILKGGIRKRNQAPFEAKGFRLFDKVACQGEEGFIFGRRSSGSFDVRKLDGTRISAGISCKKLRLLEKRRTYLTEIRKEEALPPLPEGRGLRA

SEQ ID NO: 13733 - protein, 326 aa, unidentified; identical to SEQ ID NO: 10937

SEQ ID NO: 13734 - protein, 442 aa, unidentified; identical to SEQ ID NO: 2903

SEQ ID NO: 13735 - protein, 512 aa, unidentified; identical to SEQ ID NO: 3493

SEQ ID NO: 13736 - protein, 457 aa, unidentified
VWLYQAVYNLGEGFLPSSEERTAFYWLLIYRKEHGIMQYVYVLNKHGEPLMPCSPGKARLLLKQQKACVVKRTPFTIKLLYGSAGYKQPITLGVDAGSKHVGLSASTEKRELYREEFTPRNDVVDLLSTRRQNRRSRRNRKTRYRAPRFDNRVHSKHKGWLAPSVEVKIQEHITVIKRICRILPITLVRVETAEFDTQRLKAMLKGKPLPVGTDYQLGEMYDEYNVRQYVLKRDNYTCQCCGAHPTEKKPVRLHVHHLESRHVGGNAPNNLITLCVACHKALHEGKITLDKGKKRGKPLRDAAFMGIMRNTLLARLKDELNIPVKQTYGYITKLLREKNKIPKSHVNDARCIAKTPNAKPCDTMLYTRALRHHNRQIHKAKILNGGIRKKNQAPYLVKGFRLWDKVRYNGEECFITGRRSSGYFALKKYDGTVISNSASYKKLMLLEAATNYITERS

SEQ ID NO: 13737 - protein, 507 aa, unidentified
VSEYIYVIGVDGDPQMPTKRKRHVEQLLQAGRARVFRQVPFTIQLTYENKPVLQPITIAEDPGRSNIGMAVVSLSGELLSAAVVQTRNKEIVKLMEKRKQHRRASRNGERKTRQRLAKKCYTMLKAGLLMRKLPTYGKDKRVQCNVIRNTEARFCNRKRSDGWLTPSAEHLVRTHINLIHKMQKFLPITDIAIEINRFAFLSLEDPSISGVDFQNGPLKGYDDLNAAVEDLQDGHCLMCNSPIEHRHHIVPRSMQGSNTIGNIAGLCCKCHEKVHKDSAFEDHLKKKKTGLNKRYVAVSVLNQAIPFICKRLEQEFGKEHVHYCSGRDTSMVRRSFGYHKTKEEQLHEVDAWCIAVLSLQQIPEKAPSFDHVHEILQFRRQDRSIIDAQTSRMYYHEGKKVAKNRKKAEGQREDSLQEWRKRQVERYGEEQTRKMISQLKVKKSIRRYNRLDRLMPGAVFYYQDVRYVMRGQHCEGTYLQAVGMGSKDFPAKKCKIVAHNEGLVFVS

SEQ ID NO: 13738 - protein, 413 aa, unidentified; identical to SEQ ID NO: 4790

SEQ ID NO: 13739 - protein, 419 aa, Lachnospira sp.; identical to SEQ ID NO: 3034

SEQ ID NO: 13740 - protein, 425 aa, Anabaena sp.
MSNFVLVLDTNKKPLTPIHPGDARFLLNQQKAAVFRRFPFTIILKEPKSDVLTQPIELKIDPGSKTTGFALVQNNKVIWGMELQHRGLAIKESLETRKGVRRGRRSRHTRYRQARFLNRTKPQGWLAPSLSHRVLTINTWVKRLCNFAPITDIVQELARFDLQQLENPEISGFEYQQGELQGYEVREYLLNKWNRKCAYCTAENVPLQVEHIKPKAKGGTNRISNLCLACEKCNIKKGTQDIEKFLGKKPELLKQILSQAKRTLKDASAVNSTRWALFNKLKETGLPITTGSGGLTKFNRTRLGLPKTHWIDAACVGKVETLKILTTKILTVKSTGHGCRRFCRINKFGFPCTEPKKIFTHVSTGDFVKATLHKDRKNITSGRYVSRVKTPTKNGCEIVINGFRVEFSTMKDITKVHCSDGYSYV

SEQ ID NO: 13741 - protein, 512 aa, unidentified; identical to SEQ ID NO: 12075

SEQ ID NO: 13742 - protein, 397 aa, Desulfurobacterium sp.; identical to SEQ ID NO: 8895

SEQ ID NO: 13743 - protein, 439 aa, unidentified; identical to SEQ ID NO: 3280

SEQ ID NO: 13744 - protein, 431 aa, Escherichia sp.; identical to SEQ ID NO: 3801

SEQ ID NO: 13745 - protein, 518 aa, unidentified; identical to SEQ ID NO: 7468

SEQ ID NO: 13746 - protein, 470 aa, unidentified; identical to SEQ ID NO: 2825

SEQ ID NO: 13747 - protein, 409 aa, unidentified
MINYAFVLDADGKQLAPTKEQKAWFLIRKKRAVLVSKYPMVIRLKKKILDNEVCKDEMRCGIDDGGLHVGISVVQKCQTKNKVLFKGTIEQRNDVKRLMEVRRGYRRYHRNHKRHRPARFNNRSSPRRKGRIAPSILQKRQATIRVINCLNRWVNITSYWFEDVSIDIRALTDGYRPYKWQYQKSNRLDENIRRAVILRDGCKCMECGKSDCGLEVHHIKPRRLNGSNTLGNLITLCKNCHQKTEGKEEQFMDWYFSILGSSDNKNLNYAQHVMIGKNWLRDKLSGLGELHLTNGGDTANKRIDWNIEKSHSNDAICITGLLPDTCDVKEWIVKPMRRQSKAKTDNVLGIRHRDLVEYTYKSGETHMGYVTALYPCQHALNFQSPTKHCKKVNAKKCKLLWSYSKIYFL

SEQ ID NO: 13748 - protein, 406 aa, unidentified; identical to SEQ ID NO: 6079

SEQ ID NO: 13749 - protein, 478 aa, Pantoea sp.
VAVFVLDIHGKALMPCTEKRARLLLDRGRARVHRLLPMVVRLVDRQAGDCEFQPLRLKIDPGSKTTGLALVREVAAVDALTGEVQLGVAALNLLELVHRGRQISEAMTARRQMRRRRRSNLRYRAPRFLNRGGDKTGRLAPSLQHRVDTTMAWVRRIQRWAPVRAISSELVRFDMQALQNPEIEGIEYQQGTLFGYELREYLLEKWGRQCAYCGARNLPLQIEHIRARAHGGSNRASNLTLACACCNQKKAARSVEDFLAQDHKRLNAILAQAQKPLRDAAAVNATRRALANALQATGLPVELASGGRTKFNRSALGVPKTHALDAACVGQVHSIENWDRPTLALKAMGRGSYQRTRLDKFGFPRGYLMRSKRVHDFATGDMVRADVPKGLKAGVHWGRVAVRASGNFNIQSHQAGVSAVVQGIHYRHCRIVQRNDGYGYFLNPANHTKRDQVRPKASDASHPALYLPGMNAEVSRAL

SEQ ID NO: 13750 - protein, 406 aa, unidentified
MVYVQDINGKPLMPTTRHGKVRRLLKDKKAVVVNLCPFTIKLMYVTSDYKQEIVLGVDAGTKHVGLSATTKSKELYSSEVILRNDIVDLLSTRRELRKARRNRLRYRKPRFDNRVKSKRPGWIAPSVKYKVDAHIRVVENVCSILPISRIVIEVAQFDTQKIKNPEILGKEYQEGDQLEFWNTREYVLARDGHKCQYCKGKSKDSILNVHHIESRKTGGDSPSNLITLCETCHKEYHKGNIDLKIRRGKSLRDAAVMGIMKWRLYEELKSRYDRVFMTFGYITKHNRIKYGIEKSHTSDAFVISKNINAKRIERQYLKRLIRRHNRQIHKMKILKGGKKKNNQAPFEVFGFRLFDKVLYNNKIFFVYGRRKSGSFNIRDFNGENSKDVSRKKFKLIRGKRHPIILK

SEQ ID NO: 13751 - protein, 415 aa, unidentified
MVYVVANDGQPLMPTERHGKVCRMLKSGMAKVIKKCPFTIQLQYESKRNVQPVSLGVDAGSKHIGISATTKTKVLYESDVELRDDIVKLLATRRQLRRSRRNRKTRYRPARFDNRKRKEGWLAPSIRQKMESHLTVVANVCKILPVSRIIVETASFDIQKIKNPDIQGVEYQQGEQMDFWNIREYVFFRDGHTCQCCKGRSKDKILNVHHIESRKTGGNAPNNLITLCETCHKGYHNGTVILPKNIKRGMKFKDAAFMGIMRWAFYNALKEQYEPAIPVSMTYGYLTKNTRIRHNLPKEHHIDARCISGNPDAVSDGTYYYQKKVRCHNRQIHKQTILKGGIRKSNQAEYLVKGYRLFDKVRYHGREYFIFGRRKTGFFDIRTLSGEKVNKGSISVKKLTFADTRKNYLTERRTV

SEQ ID NO: 13752 - protein, 442 aa, unidentified; identical to SEQ ID NO: 3161

SEQ ID NO: 13753 - protein, 416 aa, unidentified
MVYVLDIDGQPLMPTNRHGKVRHLLKDGMAKVVQRCPFTIQLLYNNTNYTQEITLGVDAGSKHIGLSATTERIVLYEAEVELRNDIPKLLATRKQNRRSRRNRKTRYRKSRFDNRRRKEGWLAPSVQQKVDCHLKVVENVCKLLPVTKIIAEVASFDIQKIKNPKIEGTDYQKGDQLGFWNVREYVLFRDGHTCQCCKGKSKDKILNVHHIESRQTGGNAPDNLITLCETCHKRYHKGLIKLPEKIKRGMAFKDAAFMGIMRWAFYGRLKETYLPLGIDVSLTYGYLTKNTRISHQLPKKHHIDARCISGHPDAVSDGIYYHQKKMRCHNRQIYKAKTLKRGIRKRNQAEYLVIGFRLFDKVRYQGKDYFIFGRRKSGYFDIRDLNGEKVNKGSINYKKLRLVETRRSYLTERRLA

SEQ ID NO: 13754 - protein, 424 aa, Phormidium sp.
MSNYVFVIDTDKTPCDPVHPAQARLLLNQNKAAVFRRYPFTIILKETQNKKPTPLTVKIDPGSKTTGLAILRGEDVIWGAELSHRGQQIKASLESRRAIRRGRRSRKTRYRPARFLNRKKPKGWLAPSLQHRVDTTLTWVNKLIRYSPIVGITRELVRFDLQKMETPEISGVEYQQGELQGYEVREYLLEKWNRQCAYCGGRDIPLQVEHIQPKAKGGTNRISNLCLACEPCNIRKGTHDIKDFLSGQPDLLSRILKQAKSPLRDATAVNSTRWVLFNTLKGTGLPVITVRGGQTKFNRTRLGLPKTHWLDAACVGKVNSLKLLTSKPLLISAKGHGTRQMCRTDRYGFPSRYVPRHKLVKGFQTGDIVKAIVTRGKKVGEYLGRVAVRSQGSFNITTNQGLIQGISYKYCKHIHKKDGYSYVA

SEQ ID NO: 13755 - protein, 512 aa, unidentified
MSTVYVLNKDGKPLMPTTRCGHVRHLLKEQKARVVASKPFTIQLLYKTNDVVQPLYLGIDPGRTNIGVAVVKADGTAVFTAHLETRNKEIPKLMKKRKDSRRARRTNGRRCRRQRRAKANGTISKKCVKQDTAQNGSVSKRAKEIGVIKRHLPGCEKDVLCIGIKNKEAKFSNRTRPEGWLTPTANQLLQTHINLVKKIRKFLPISDAVLEINKFAFMQLDNPNIQKWQYQQGPLYQKANLKEAVSEMQEHHCLFCKKPIAHYHHVVPQSENGSDTIGNIVGLCTKHHDLVHKDTAWQKKLAKKKTGLNKKYGALSVLNQIIPALTKELSSLFPKHFFATNGKSTYDYRSAHGVSKDHWLDAYCIACSVLPNDVCDSGINNRVPYELKQFRRHDRRALNNENMSRVYTLNDNVVATNRHKATKQTTDSLEEFRQNHPDDVCKLKVKEHHPTYRNMNRNYPGSVFLIGKQVHVMQGIAGSKDGEATTYKDTNANSIAAGKCKFVAKNSGILFV

SEQ ID NO: 13756 - protein, 423 aa, Moorena sp.
MRVFVLNKNRQPLDPCKPARARIILSKGKAKVYRRYPFTIILTEEIEEPITHGSQLKIDPGSKTSGLAIIQNNRVVWGCELTHRGFQIRDALTSRRQLRRARRHRKTRYRQPRFLNRTRPKGWLAPSLMSRVHNILTWVKKLTRLCPITGLSQELVRFDTQKLQNPEISGIEYQQGTLYGYELREYLLEKWNRKCAYCGAKGTHLEIEHIKPLSKGGSNRVSNLAIACHSCNQAKSNQEIEQLLSGKPEILKRILSQAKRPLSDAAAVNTTRWKLYHELKLFGLPVEVGSGGLTKFNRCRQNLPKTHWLDAANVGKVDTLIVEDYKPLLVAAKGHGTRQICRINKYGFPIRYCSRVKIHKGFQTGDIVRAVVTKGKKIGTYVGRVATRKSGYFNISTKSGMVQGISHKYCQFIHRKDGYAYTD

SEQ ID NO: 13757 - protein, 450 aa, unidentified; identical to SEQ ID NO: 2935

SEQ ID NO: 13758 - protein, 523 aa, unidentified
VSLSLNRQAEKKASTSAVTKHANARREEAAGMQSQYKGVTATNERGKNMVITLDKNKRPLGFMSERRCRILLEKKRAVLYRYFPTIVILKDVDARKLSGLSSYRIKIDPGAKYTGIAIVMDDTNEFMYAMQIEHRGEQIKKNLDTRRGARRNRRSRETGYRRPKWGNRCAAKEQRQSYDSRRDENWLPPSIKSTADNIISWIRRLCRWINITNCSIESVRFDTQLMENPEIEGVEYQQGTLYGYEVKEYLLEKYGHTCQYCGGKSNDPILEWEHMLPRSRGGSDRLKNATLACHNCNQDKGNHTLEEWQTILQDRIPKERGKQKELDQIRQKFVQQVMEGKTPVKGLRYAAWVNSSRRYSQRHLYLRFPELECSSGGRTKYNRNALGYPKEHHYDALCVGEIPEDGFVDRTNGYYLYAKATGRGTRLRGQINQCGVIIRTWMDRSKTAFGFQTGDLVVADVPKDTKYKYKGHFSGRVMIRKSGSFDIRTLSGEMVTVNAKFCRLLQNNSGYQMMIKRAIPLGN

SEQ ID NO: 13759 - protein, 451 aa, unidentified; identical to SEQ ID NO: 6972

SEQ ID NO: 13760 - protein, 411 aa, unidentified
MVYVQDIDGKPMMPTTRHGKVRRLLKDNKAVVVNTCPFTIKLTYKTSDYKQEIVLGVDSGTKHVGLLATTKSKELYASEVILRSDVVDLLSTRRGLRRTRRSRLRYRKQRFNNRVKSKKDGWIAPSVRHKIDSHIRIISFVYSILPVSKLIVEVAQFDTQKIKNPEISGKEYQEGEQLGFWNVREYVLARDGHKCQHCKGKSKDPILNIHHIESRKIGGDSPSNLITLCETCHKEFHKGNIKLKVSRGKSLRDAAVMGIMKWKLYEELKSRYDNVSMTFGYITKYNRINHGIEKSHVSDAFVISRNFNSCRLGYYYKRKLVRRHNRQIHKMKILKGGIRKRNQAPFKVFGFRLFDKVMFQGEEHFIYARRLSGQFNIRDINGENKKDVSCKKLKYVSHGLVSVKTNLFLSQ

SEQ ID NO: 13761 - protein, 431 aa, unidentified; identical to SEQ ID NO: 5232

SEQ ID NO: 13762 - protein, 512 aa, unidentified; identical to SEQ ID NO: 5238

SEQ ID NO: 13763 - protein, 431 aa, Moorena sp.
MRVFVLDKNLKPLDPCRPARARLLLKQGRAKVFRRYPFTIILSDLEVENCTTHNHQLKIDPGAKITGLAIRQNDTVIWSAEITHRGFQIRDALTSRRQLRRSRRNRKTRYRKPRFLNRKRPSGWLAPSLMSRVHNILTWVKKLIRLCPIAGIFQELVRFDTQKMENPEISGTEYQQGTLCGYEIREYLLEKWNRKCAYCGATDVRLEIEHIKPKSLGGSDRVNNLAIACHDCNQTKGNQEIEQFLSGKPDILKRILSQAKRSLADAAAVNSTRWKLYNELKLTGLPVKTGSGGQTKYNRRQFSLPKTHWLDAACVGDVQSIFVEDYQILSIVAKGHGTRQICRTDKFGFPKRYCSRTKIHKGFQTGDIVKAVVTKGKKIGTYVGRVATRKTGSFNISTANGLIQGISYKYCTPIHKKDGYAYQINTLPSLS

SEQ ID NO: 13764 - protein, 420 aa, unidentified; identical to SEQ ID NO: 5918

SEQ ID NO: 13765 - protein, 442 aa, unidentified; identical to SEQ ID NO: 2903

SEQ ID NO: 13766 - protein, 447 aa, unidentified; identical to SEQ ID NO: 3915

SEQ ID NO: 13767 - protein, 465 aa, unidentified; identical to SEQ ID NO: 3603

SEQ ID NO: 13768 - protein, 431 aa, unidentified
MPDKVYVISRLGHPLMPCSPAKARHLLDDGKAKVVKRTPFTIKLLYGSTEYTQPVILGVDAGSKTIGLSASTTKEELFAAEVMPRNDVVENLSTRREFRRARRNRTTRYRKPRFNNRVHSKNNGWLAPSVEVKIQEHITSIKRVCAILPISKIVVETAEFDLQLLKAVQDGKPVPEGEDYQKGEMYGSYDVRQYVLWRDNYTCTCCGVKGTDKKPVKLHVHHFESRKHGGNAPDNYGTLCEDCHKKLHLGIITDISLKTRKRPSTRGAAFMGIMRKTLMQRLITGLFIPVAETKGYITKAAREEILKLPKTHTNDALAIAQGRHGFGIREQAYVKPTNRIYTVRPVRHHNRQLHKATMLKGGIRKLNQASKYIFGFRLYDKVLYQGGECFVWGRRRSGSFLLRTIDGTKVKDGVGYRNLTLLERSTNYLIA

SEQ ID NO: 13769 - protein, 446 aa, Actinomadura sp.; identical to SEQ ID NO: 11832

SEQ ID NO: 13770 - protein, 309 aa, Oscillatoria sp.
MSNHVFVLDTNRKPLTPCKPGVARSLLKAGKASVFRRYPFTIILNKEVDANPEPLELKLDPGSKVTGIALKQGNHIIFAAELQHRGEPIKKALLSRRQLRRSRRNRKTRYRPARFLNRTRPEGWLAPSLQHRVDTLMTWVNRFRRLAPVGSIAQELVRFDLQLMENPEISGVEYQQGELQGYEVREYLLFKWGRTCAYCGAKNVPLEVEHIQPRSKGGSDRVSNLTLACHSCNQAKGHGDIRDFLSGQPDVLSRLLGQAKSPLKDAAAVNSTRWALFKALKATGLPVTTGTGGQTKFNRLRLNGTGGRH

SEQ ID NO: 13771 - protein, 413 aa, Clostridium sp.; identical to SEQ ID NO: 4134

SEQ ID NO: 13772 - protein, 395 aa, unidentified
MMPTTRHGKVRRLLKSKKATVVNLCPFTIRLLYDTTGYKQEITLGVDTGTKHVGLSATTKSKELYASEVILRSDVVDLLSTRRELRKIRRYRLRYRKPRFMNRIKSKKRGWIAPSIRQKIDSHIRIIGFVYSILPVSKLIIEVAQFDTQKIKNPEISGKEYQEGEQLGFWNVREYVLARDEHKCQHCKGKSKDPVLNVHHIESRKTGGDSPSNLITLCKTCHKEFHKGNIKLKVNRGESLRDAAVMSIMKWELYDELKSLYPNVKMTFGYITKYNRINHGIEKSHVSDAFVISRNFDSERLGYYYKRKLVRRHNRQIHKMKAPKGGNKRMNQSPFKVFGFRLFDKVMFQGKERFIYARRLRGIFNIRDINGENKKDISYKKLEYVSHGLISIVAG

SEQ ID NO: 13773 - protein, 442 aa, unidentified; identical to SEQ ID NO: 3658

SEQ ID NO: 13774 - protein, 402 aa, unidentified
CRRQRRAKTNGTISKKCVKQTTAQNGSVSKRAKEIGVIKRHLPGCEKDVLCIGIKNKEAKFTNRARPEGWLTPTTNQLLQTHINLVKKIQKFLPISDVVLEVNKFAFMQLDNPNIQKWQYQQGPLYQKGSLENAVSEMQEHHCLFCEKPIEHYHHVVPKSENGSNTIANIVGLCTEHHNLVHKDATWQKKLAKEKVGLVKKYSALSVLNQIIPALTKEMNSLFPKHFFVTNGKSTYDYRTAHGVSKDHWLDAYCIACSVLPNDVCDSNINSHVPYELKQFRRHDRRVLHKANMSRVYTLNGKTVATNRHKAIKQTTDSLEEFRQSHPGDVCKLKVKEHHPAYRNLNRNYPGSVFLVDGQVHVMQGVSGSHNGKADGYYNTNGNAYPYYKCKFVVKNEGIVFA

SEQ ID NO: 13775 - protein, 512 aa, unidentified
MSTVYVLNKDGKPLMPTTRCGHVRRLLKEQKARVVTSKPFTIQLLYETNDVVQPLYLGIDPGRTNIGVAAVKTDGTAVFTAHLETRNKEIPKLMQGRKKARRARRTNGRRCRRQRRAKANGTISKKCVKQTTAQNGSVSKRAKEIGVIKRHLPGCEKELLCIGIKNKEAKFSNRTRPEGWLTPTANQLLQTHINLVKKIQKFLPISDVVLEINKFAFMQLDNPNIQKWQYQQGPLYQKASLEEAVSEMQEHHCLFCKKPIAHYHHVVPQSENGSNTIGNIVGLCTKHHDLVHKDATWQKKLAKKKTGLNKEYGALSVLNQIIPALTKELSSLFPKHFFATNGKSTYDYRAAHGVSKDHWLDAYCIACSVLANDVCDSNINSHVPYELKQFRRHDRRALHKENMSRVYTLNGKSVATNRHKAIKQTTDSLEEFRQRQPNDVYKLKVKEHHPEYRNPKRNFPGCVFLVGKHTHVVQGTSGSHNSKADGYYDTNGNSYSSGKCKFVAKNKGIVFA

SEQ ID NO: 13776 - protein, 431 aa, unidentified; identical to SEQ ID NO: 2689

SEQ ID NO: 13777 - protein, 414 aa, unidentified
MPCSPAKARLLLKEKKAIVKRRTPFTIQLTIATGESKQPVTLGVDAGYKHVGLSASTEKAELYASEVELRQDVSDLLSARRALRQSRRNRKTRYRAPRFNNRLRTKRKGWLAPSVKNRINAHLSRIEAVLRLLPVTKISVETASFDMQLLKNPDIAGKEYPEGEQLGFWNVREYVLFRDRHVCQHCYGRSKDPVLNVHHLESRRTGGDSPGNLITLCETCHKALHRGDITLKAKRGKSFRAEAFMGIMRWEVHNRLRALHPGIEVSNTYGYRTKHARIANGIAKSHCADAFCIAGNLGAERLCEFFFQKQTRRNNRQIHKLSILKGGIRKRNQAPFEVKGFRLFDKVACQGEEGFIFGRRSSGFFDVRKLDGTRISAGISCKKLHLLEKRRTYLTEIRKEEALPPLPEGRGLRA

SEQ ID NO: 13778 - protein, 420 aa, unidentified; identical to SEQ ID NO: 4855

SEQ ID NO: 13779 - protein, 396 aa, unidentified; identical to SEQ ID NO: 4508

SEQ ID NO: 13780 - protein, 421 aa, unidentified
MQYVYVLNKHGKPLMPCSPGKARLLLKEGKARVVKRTPFVIKLLHGSAGYKQPVALGVDAGSRHVGLSACTEGRELYKEELSPRNDVVELLSVRRQYRRSCRNRKTRYRAPRFNNRVHSKHKGWLAPSVEVKIQEHITVIKRVCRILPIVLVRVETAEFDTQRLKAMLEGKPLPVGSDYQLGEMYDEYNVRQYVLKRDNYTCQCCGAHPAEKKPVRLHVHHIESRHVGGNAPNNLITLCAVCHKALHEGKITLGNGKKRGKPLRDAAFMGIMRNTLLARLKDELNIPVKQTYGYITKLLREENHVEKSHTNDARCIAKAPNAKPCDTMFRTRALRHHNRQIHKAKILKGGTRKKNQAPYLVKGFRLWDKVRYNGEECFITGRRTSGYFAIKKYDGTVISNSASYKKLTLLEAATNYITERS

SEQ ID NO: 13781 - protein, 456 aa, Halomonas sp.; identical to SEQ ID NO: 2773

SEQ ID NO: 13782 - protein, 278 aa, unidentified
LKVFVLNMRGQPLMPCSPAKARHLLKAGKAVVKRRTPFTIQLRIATGETKQSVTLGVDAGAKHVGLSAATEKEEVFASEVELRQDITGLLAARLSLRPERRQRKTRYRAPRFLNRVRSKHNGWLPPSVENRIQAHLSRIDAICGLLPVTKIVIETASFDIQKIKHPDVEGTDYQQGDQLGFWNVREYVLFRDGHVCQHCHGHAKDKILNVHHLESRQTGGDAPNNLITLCETCHKACHAGKIKLKVKRGQSFRAEAFMDIMRWTLLDRVRKAHPGLPV

SEQ ID NO: 13783 - protein, 424 aa, unidentified
MRVFVFNMCGEPLMPCTQRKARVLLKENKAIIYKYNPFTIQLTYTTGETAQDCRIGVDTGSKHMGIAVTSKDKVLFKGEVELRQDVKSNIDTKRIYRRSRRNRKTRYRKARFFNRKKADKWLPPSLQNRINHTFYWIDTFISLIPNPTLHVEVGKFDTAKMINPEINGVDYQHGQTYGFFDERYFVFARDNYTCQCCGKSKNKILQTHHIIYRSNGGTNRVDNLITVCTDCHTSKNHKKGEILYKWQEQHKKVKRYKEPPFMNVLRQRIFVTYPNAEITYGSETTPKRNIMGLSKTHYNDAIVISGINEINENCEDWLLIKQFRKKKRSLHEATARKGRKNPNRNQIRNNKNTPYYKGFYLNDKVSILGISGYVTGFTNGGAYIKDDNDNYITLPNKTYKQININKIKRKCHNNNWQYIVKNVA

SEQ ID NO: 13784 - protein, 442 aa, Anaerostipes sp.; identical to SEQ ID NO: 2903

SEQ ID NO: 13785 - protein, 404 aa, unidentified
  source 1..404: note = Archaeon sp.
MQKLLVELKNTPGDAPQVPCSVSGALNREETLSVSRTVLANNSSDEDQHSGRSGQTLNVPVINMHGKPLMPTSPGKARRLLQQGKAAVVQRSPFTIQLCYLTGNYTQNIKLGIDSGYSNIGFSAVTDKNELLSGELTLRKRISKLIEQKKGYRRDRRNKLWYRKPRFNNRSKPEGWFAPSIQHKLETHLRLIEKLKKILPITKIIVEVAKFDQQKMSKPEIKGVEYQQGELEGYEVREYLLEKWKHECAYCDKGNIPLEIEHIIPKIRGGTDRVSNLTLACHKCNQKKGDKTAEEFGYPNIQKKANQTLKSTAFMNIVRKKLVNILMANTTKVNTLKCAWTYGYITKHDRIKMKLEKSHVNDAFVIAGGTTQSRTIPYMATQTRRNNRRIQTNRKEYKPSISLL

SEQ ID NO: 13786 - protein, 413 aa, unidentified; identical to SEQ ID NO: 2636

SEQ ID NO: 13787 - protein, 425 aa, unidentified; identical to SEQ ID NO: 13021

SEQ ID NO: 13788 - protein, 431 aa, unidentified
MPNKVYVINKHGRPLMPCSPAKARHLLDAGKAKVKKRTPFTIQLVYGSSGYTQEVILGVDAGSKTIGMSASTKKEEVFAADVTPRNDVVDLMSTRREFRRARRNRKTRYRKPRFDNRVRSKHKEWLAPSVEVKIQEHITAIRRVCGILPVSKVVVETAEFDLQLLKAIEEGKPVPQGEDYQKGEMYGHYNVRQYVLWRDDYTCQCCGAHATKKKEVRLHVHHLESRKVGGDAPDNQVTLCESCHEKLHKGLIAEKDFKKRKRRSTRDATFMGIMRKTLMQRLCSELPIPVVKTRGYITKATREKLLVLPKSHTNDALAIAQGKRGFNVGYLPEIAQIDKIYTIRPVRHHNRQLHKATILKGGIRKSNQTEKYVFGYRLFDKVQFNGQDCFIWGRRTTGIFTIKTINGKMIKDGISFKKLKPVEKSTSYLIA

SEQ ID NO: 13789 - protein, 425 aa, unidentified
MSNFVLVLDTNKKPLAPIHPGDARFLLNQQKAAVFRRFPFTIILKEPKSDVPTQPIELKIDPGSKTTGFALVQNNKVIWGMELQHRGLAIKESLETRKGVRRGRRSRHTRYRQARFLNRTKPQGWLAPSLSHRVLTINTWVKRLCNFAPITDIVQELARFDLQQLENPEISGFEYQRGELQGYEVREYLLNKWNRKCAYCTAENVPLQVEHIKPKAKGGTNRISNLCLACEKCNIKKGTQDIEKFLVKKPELLKQILSQAKRPLKDASAVNSTRWALFNKLKETGLPITTGSGGLTKFNRTRLGLPKTHWIDAACVGKVETLKILTTKILTVKSTGHSCRRFCRINKFGFPCTEPKKIFTHVSTGDFVKVTLHKDRKNITSGRYVSRVKTPTKNGCEIVINGFRVEFSTMKDITKVHCSDGYSYV

SEQ ID NO: 13790 - protein, 450 aa, unidentified; identical to SEQ ID NO: 2935

SEQ ID NO: 13791 - protein, 431 aa, Calothrix sp.; identical to SEQ ID NO: 5518

SEQ ID NO: 13792 - protein, 401 aa, unidentified
MVNLTMPTTRHGKVRRLLKDKKAVVVNLCPFTIKLMYVTSDYKQEIVLGVDAGTKHVGLSATTKSKELYSSEVILRNDIVDLLSTRRELRRSRRNRLRYRKPRFDNRIKSKRPGWVAPSVKYKVDAHIRVIDNVCSILPISRIVIEVAQFDTQKINNPNISGKEYQEGDQLGFWNVREYVLARDGHKCQHCKGKSKDPVLNVHHIESRKTGGDSPSNLITLCETCHKEYHKGNIDLKIKRGSSLRDAAVMGIMKWRLYEELKSKYDNISMTFGYVTKYNRIKHGIEKSHVFDAFVISKNFDAIRLGYYYKVRLVRRHNRQIHKQKIPKGGIKRPNQSPFEVFGFRLFDRVMFENSYYFIFARRKTGSFNIRDIDGKNQRDITYKKLKLSRCKRFMVQKEMD

SEQ ID NO: 13793 - protein, 419 aa, Geobacillus sp.; identical to SEQ ID NO: 13599

SEQ ID NO: 13794 - protein, 413 aa, Sutterella sp.
LKVFVLNMRGKPLMPCSPAKARHMLKAGKAFVVRRTPFTIKLTIATGETKQDVTLGVDAGARHVGISATTEKEEVFASEVALRQDITGLLADRLAFRRARRNRKTRYRAPRFNNRVRSKHKGWLAPSVENRIQAHISRIEAVCRLLPVTKIVIETASFDIQKIRNPEVEGTGYQQGDQLGFWNVREYVLFRDGHICQHCRGRSKDPILNVHHLESRKTGGDAPNNLITLCETCHKAYHAGKIKLKVKRGQSFRAEAFMGIMRWTLLDRVRKTHPKLPVENTYGYLTKHKRIALGLPKTHCADAFCIAGNLKALRRGDFLFQQQTRKHNRQIHKCSILKGGVRTLNQAPFLVKGFRLFDKVRIGGQIGFVFGRRVRGTFNIRRLDKTVIGTDINCKKLSLLETRKTFLTELRKE

SEQ ID NO: 13795 - protein, 442 aa, Lactobacillus sp.; identical to SEQ ID NO: 5262

SEQ ID NO: 13796 - protein, 421 aa, unidentified
MRGQPLMPCSPAKARHLLKAGKAVVRRRTPFTIQLRIATGETKQSVTLGVDAGAKHVGLSATTEKEEVFASEVELRQDITGLLAARLSLRRERRQRKTRYRAPRFLNRVRSKHKGWLAPSVENRIQAHMSRIDAVCRLLPVTKIVIETASFDIQKIKDPSVEGTDYQQGDQLGFWNVREYVLFRDGHVCQHCHGHAKDKILNVHHLESRQTGGDAPNNLITLCETCHKACHAGKIKLKVKRGQSFRAEAFMGIMRWTLLDRVRKAHPGLPVENTYGYLTKNTRITPGLPKAHCVDACCIAGNLKAVRRGVCLHQRQVRKHNRQIHKCTVLSKTLKDGTKIGYRKLNQTPHLVKNFRLFDKVRCLGQTGFIFGRRSSGYFDVRRLDGVKLSSGISYRKLTLLEKRSTYLTELRKEDGASSPV

SEQ ID NO: 13797 - protein, 446 aa, unidentified; identical to SEQ ID NO: 11687

SEQ ID NO: 13798 - protein, 418 aa, unidentified; identical to SEQ ID NO: 5737

SEQ ID NO: 13799 - protein, 443 aa, Anoxybacillus sp.
MVEENMTCFMQRKGENPMVFVLDTNKRPLAPCHEAVARKLLKQGKAAIYRRFPFTIILKKSVDESEIKATYRLKIDYGSRHTGLAILRGQEVVWLGQLDHRTDIKERIDKRRAFRRARRNRKTRYRKPRFLNRKRKEGWLPPSLESRMQNIKTWVERLRKICPIEHISYENAKFDTQLMRNPEINGVEYQQGTLQGYEVREYLLEKFGRKCCYCGKEGVPLEVEHIIPKSRGGTDRIDNLCLACRDCNQRKGSQTAEEFGYPHIQEMVKKTLKDASVVNATRRKVYEVLKQSGCEVECGTGARTKMNRIRLGLPKIHYFDACCVGKSTPLQLHFKTKEVLFIKAKGRGSRSRTNLDRYGFPRGYLARQKYFFGFQTGDMVKANVPKGKYQGVWFGEVACRKTGSFDIKGKDGKRIAQGINYRYVQVIQRFDGYAYGKGVAELA

SEQ ID NO: 13800 - protein, 339 aa, Pseudoalteromonas sp.; identical to SEQ ID NO: 9888

SEQ ID NO: 13801 - protein, 420 aa, unidentified; identical to SEQ ID NO: 2812

SEQ ID NO: 13802 - protein, 451 aa, unidentified; identical to SEQ ID NO: 10609

SEQ ID NO: 13803 - protein, 427 aa, Enterococcus sp.; identical to SEQ ID NO: 2410

SEQ ID NO: 13804 - protein, 461 aa, Desulfotignum sp.
MGAFAVNGVSRVFVLDKKGKPLMPCHPARARKFLAQGRARVHQMFPFTIRLVDRIREDSDVQPVNVKIDPGAKTTGMAVVRQDGGHIHILHLSELTHRGSAIRKKLDQRSNYRRRRRTTNHWYRKPRFNNRTRPKGWLPPSLRSRVDNTLSWVKKYQKFCPVTGIVLERVRFDTQKLQNPDISGIEYQQGTLFGYEVKEYLLEKYKRTCAYCNGLSKDPVLEIEHFVPRNPSKGDKGSNRISNLAIACKTCNQDSKKNLQPADWISLLSRSRKKIDQVRLQNATRFLEGKRPSLASTAAVNATRNAIFFELRGLGLPVECSTGGRTKYNRSRLDIPKTHCLDAACTGQVDSVSGWKQNVFLIKAMGRGSYQRTRVDKYGFPRGTLMSQKTVKGFATGDMLKAVVPSGKKQGTYFGRVAVRKSGSFNIQTNTETVQGISWKYCKIISRQNGYNFASQVSSPT

SEQ ID NO: 13805 - protein, 415 aa, unidentified; identical to SEQ ID NO: 12104

SEQ ID NO: 13806 - protein, 427 aa, unidentified
LRVFVLNKRGKPLMPCSPAKARLLLKEKKAIVVRRTPFTIQLTIATGESKQPVSLGVDAGYKHVGLSASIEKAELYASEVELRKDITDLLSARRALRQSRRNRKTRYRAPRFDNRIRTKRKGWLAPSVENRINAHLSRIEAVLRLLPITKITVETASFDMQRLKNPDISGKEYQEGEQLGFWNVREYVLFRDGHVCRHCHGRSKDPVLNVHHLESRRTGSDSPDNLITLCETCHKALHRGEITLKAKRGQSFRAQAFMGIMRREVLNRLKASYPELKVHETYGYLTKHARIANGIVKSHGADAFCIAGNLGAERLGEFFFQKQTRRNNRQIHKLSILKGGIRKRNQAPFEAKGFRLFDKVACQGEEGFIFGRRSSGSFDVRKLDGTRISAGISCKKLRLLEKRRTYLTEIRKEEALPPLPEGRGLRA

SEQ ID NO: 13807 - protein, 442 aa, unidentified; identical to SEQ ID NO: 4533

SEQ ID NO: 13808 - protein, 424 aa, Fervidobacterium sp.; identical to SEQ ID NO: 6057

SEQ ID NO: 13809 - protein, 403 aa, unidentified
QDISLHLDAGYANIGFSAQTKSRELLGGVLELLKGMSERIKERAMYRNNRRSRLRYRKPKFKKGGDFVSNRPDGWLAPSIQHKLDSHLNLIRKIQQILPITSIQIETASFDIQKINNPDIEGAGYQEGEQLGFWNLREYILHRDNHTCQNPNCKNKSKEKILQVHHIGFWKQDRSDRPANLITLCTKCHTTKNHQKNGFLYGWEPRLKSFKPETFMTTVRRGLVNQAREIFNLPVEETFGYLTKSSRIQKELPKSHHYDAFAMGNAKTVSRPYTINQTRRNNRSLENFNDAKYLHKETKEKVSGRDLTSGRRTRNKESHLNSLNLRYLRGHKISKGYRAIRRRRYPLQPNDTIRYEGKICKVTGTHSLGKTVRFKLPCGTTADKSVNKVKQIASCKGLAFKLD

SEQ ID NO: 13810 - protein, 456 aa, unidentified; identical to SEQ ID NO: 12153

SEQ ID NO: 13811 - protein, 512 aa, unidentified
MSTVYVLNKDGKPLMPTTRGGHVRHLLKEQKARVVRTKPFTIQLLYETNDVVQPLYLGIDPGRTNIGVAVVKTDGTTVFTAHLETRNKEIPKLMKKRKDSRRARRTNGRRCRRQRRAKANGTISKKCVKQTTAQSGSVSKRANEIGVIKRHLPGCEKEVLCIGIKNKEAKFSNRTRPEGWLTPTANQLLQTHINLVKKIQKFLPISDVVLEINKFAFMRLDNPNVQKWQYQQGPLYQKASLEEAVSEMQEHHCLFCKNTIDHYHHVVPQHKNGSNTIGDIVGLCAKHHDLVHKDTEWQKKLAKKKTGLNKKYGALSVLNQIIPALTKELSSLFPKHFFATNGKSTYDYRAAHGVSKDHWLDAYCIACSVLADDVCDNNINSHVPYELKQFRRHDRRALHKENMSRVYTLNGKSVATNRHKATEQTTDSLEEFRQRQPNDVCKLKVKEHHPEYRNPKRNFPGCVFLVGKHTHVMQGTSGSHNGKADGYYDTNGNSYSSGECKFVAKNGGIVFA

SEQ ID NO: 13812 - protein, 426 aa, Calothrix sp.; identical to SEQ ID NO: 12058

SEQ ID NO: 13813 - protein, 512 aa, unidentified
MSTVYVLNKDGKPLMPTTRCGHVRHLLKEQKARVVRTKPFTIQLLYETDDVVQPLYLGIDPGRTNIGVAVVKADSTAVFTAHLETRNEEIPKLMQGRKKARRTRRTNGRRCRRQRRAKANGTISKKCVKQTTAQNGSVSKRAKEIGVIKRHLPGCEKDVLCVGIKNKEAKFSNRTRQEGWLTPTANQLLQTHINLIKKIRKFLPISNVVLEINKFAFMRLDNPNIQKWQYRQGPLYQKASLEEAVSEMQEHHCLFCKKSIAHYHHVVPQSENGSNTIGNIVGLCTKHHDFVHKDTAWQKKLAKKKTGLNKKYGALSVLNQIIPALTKELSSLFPKHFFATNGKSTYDYRAAHSVSKDHWLDAYCIACSVLANDVCDSNINSRVPYELKQFRRHDRRALNNENMSRVYTLNGKVVATNRHKATKQTTDSLEEFRQNHSDDVCKLKVKEHHPTYRNMNRNYPGSVFLIGKQVHVMQGIAGSKNGEATTYKDTNANSIAAGKCKFVAKNSGILFV

SEQ ID NO: 13814 - protein, 427 aa, unidentified; identical to SEQ ID NO: 8384

SEQ ID NO: 13815 - protein, 671 aa, Clostridium sp.
MKPWITTRILQASVREDARKCRKETIMVAVLSNTDVALMPTSSCRARILLRSKRAEIVGYHPFTIRLLDRETGNTQPIEYKSDTGSVYVGVSICSEKHEYISEERILLDDEKKKHDNCRTLRRTRRNRLRYRKPRFDNREKAKGWIAPTLQNKLDRQLDIFHAYKKVMPITSATFEVGKFDIQLLAAMESGKPVPEGKDYQQGARYQQETLRQAVFFRDSFTCQVCQKGVKDGVILRMHHIGFRKNDHSDRMANLLTVCTTCHSSKNHNPGGELWDLKPEIKPLHDAAFMNTIRWKLIDTLKETHPDVELHFTYGARTKCTRRTMHIGKSHANDAYCIGEFHPKHRCDTVYYQKQRRNNRVLEKFYDAVYLDLRTGEDEKAAALGSGRTKRNTHLAYKDQRPYRGRKVSSGHRSITRKRSPYKKGDILRVQKEYTVKEPDQNGKLQKVTKVMDVTAKLASSHSKVDSKTLKAFRTGKIKKIPKSAVMMAYDFTEPLPNGRQSCDGKHVKAVKTTKIQAWKRISKPEPKKRRLTPNDKEQTRRIPRTTYKGGGTLRHDNGKTVFRIPYIQIKNKGFKIASQISRSSVPDRPHPYRIFLPVAICKRRLYAWAARYAGTRFLKCHDRWLYAADVLICTFHQPIHYGIHYHAAYDRGISEYRGNAKGRKDRTGPF

SEQ ID NO: 13816 - protein, 340 aa, Anoxybacillus sp.
MVFVLDTNKCPLAPCHEAVARKLLKQGKAAIYKRYPFTIILKEIVDNFRPKTPYRLKIDHGSKHTGLAILRGQEVVWLGQLDHRTDIKERMDKRRAFRRARRNRKTRYRKPRFLNRKRKEGWLPPSLESRVQNIQTWVNRLKKLCPIGYISYENAKFDTQLMRNPEINGVEYQQGTLQGYEVREYLLEKFGRKCCYCGKENVPLEVEHIIPKSRGGTDRVDNLCLACHDCNQRKGSKTAEEFGYPHIQKQVKETLKDTSAINSTRWKAYEVLKQTGLDVECGTGARTKMNRIRLDLPKTHYFDACCVGESTTNHLYFKTKEVLFIKAKGRGSRSRTNLDR

SEQ ID NO: 13817 - protein, 430 aa, unidentified
MPKVYVLNRHGRPLMPCTPVKARHLLDAGKAKVRQRTPFTIQLLYGSTGYTQEVVLGVDAGSKTIGLSASTETEELFSAEAKPRNDVVELMSARRQFRRARRTRKTRHRKLRFNNRVRSKHKGWLAPSVEVKIQEHMTAIRRVCGILPVSKVVVETAEFDLQRLKAVAEGKPVPQGEDYQKGEMYGHYNVRQYVLWRDGYTCRVCGAHGSVKKGVPLHVHHLESRRVGGDAPDNLVTLCTACHDKLHKGIITVEDFKKRKRRSTRDATFMGIMRMTLLRRLWEQLPVPVVETRGYITKVTREKLLVLPKSHTNDALAIAHGPQGFRAGYLPNIRQADRLYTIRPVRRHNRQLHKATILKGGVRKANQAEKYICGFRLYDKVLYNGIECFVWGRRTSGSFLLRQLNGEKVKDGVSHKQLKLLERSQSYLVA

SEQ ID NO: 13818 - protein, 450 aa, Clostridium sp.; identical to SEQ ID NO: 2935

SEQ ID NO: 13819 - protein, 421 aa, unidentified; identical to SEQ ID NO: 4235

SEQ ID NO: 13820 - protein, 452 aa, unidentified; identical to SEQ ID NO: 4732

SEQ ID NO: 13821 - protein, 458 aa, Lactobacillus sp.; identical to SEQ ID NO: 6016

SEQ ID NO: 13822 - protein, 466 aa, unidentified; identical to SEQ ID NO: 11103

SEQ ID NO: 13823 - protein, 267 aa, unidentified
VETAEFDTQRLKAMLEGKPLPVGTDYQLGEIYDEYNVRQYVLKRDHYTCQCCGAHTTTKKTVKLHVHHLESRKVGGNAPSNLITLCTTCHDALHKGKVSLDGKERGKPLRDAAFMGIMRKTLMARLRDELSIPVQGTYGYITKMRREQNDIKKSHVNDARCISKHPLAEPCSVCYRTKAIRHHNRQTHKANFSKGSIRKRSQMPYVVEGYRLWDKVLYKGQECFVSGRRASGSFTLKKLDGTRISKGVTFKKLRLLEPATNYLIERM

SEQ ID NO: 13824 - protein, 462 aa, unidentified; identical to SEQ ID NO: 2823

SEQ ID NO: 13825 - protein, 428 aa, Sutterella sp.; identical to SEQ ID NO: 5624

SEQ ID NO: 13826 - protein, 425 aa, unidentified
MLVYVLKQNGQPFMPTSRFGKVRRLLKTKKAKVVRREPFTIKLLYEPETDVVQECYCGVDTGSRHIGVAVVENDKVLYQSQTELRSDIKRKMDSRRMYRRNRRNRKTRYRKPRFLNRRNSIRKDRLSPSVRHKVQAHIDEIEFCKKILPIKDENLILEVSQFDTALMKNPILMNEKIKHWGYQQGFNYGYSSRRKAVLHRDNYTCQYCGKKNCRLEVHHVKFRSNGGTDDEENLITLCKECHDGVHAGTVTLDRKPKKSKGLKHATHMSIIRSRLLKEYPDAIETFGFVTNENRNHLKLEKDHYIDACVIASGGLEFKELEVIFYKNRVSKGDYQLTKGIRGEQKLPTGKICGFRKFDKVEYLGEKYFIKGRMNSGFAILMNIFSEKVDFSSMPKGLKTPKLSNCNRISTRRSCLCINQIRKVIN

SEQ ID NO: 13827 - protein, 424 aa, unidentified; identical to SEQ ID NO: 3351

SEQ ID NO: 13828 - protein, 442 aa, unidentified; identical to SEQ ID NO: 2903

SEQ ID NO: 13829 - protein, 419 aa, unidentified; identical to SEQ ID NO: 4877

SEQ ID NO: 13830 - protein, 442 aa, Lactobacillus sp.; identical to SEQ ID NO: 13721

SEQ ID NO: 13831 - protein, 462 aa, unidentified; identical to SEQ ID NO: 4058

SEQ ID NO: 13832 - protein, 419 aa, unidentified
MVYVISKDSKPLMPCSNVIARLLLKQGKAKVKKREPFTIKLTCETTNYTQDLTLGVDAGSGTIGTAVSKNNGDIVYMAEVVVRNDITDKMTRRAKYRRNRRNRKTRYRKARWLNRTNSIRNDRFSPTMQSKLHSHVKEIEYIKSILPVTKMVFETGQFDTHLMKNPSLANPKIKHWGYQKGPNYGFENTKAFVLNRDNYTCQCCKGKHKDSKLEVHHIVFRSQGGSDEESNLITLCHTCHKDLHSGKINIKLKGKVKGNLKYATQMNSIRKQLFRLYPSAIETFGYVTKANRLLLGVDKKHYYDACTIATQGNTFNVKSNLYKKRCVSDGDFQKTKGVRSEQPIVTDKIYGFRKFDKVRYFGKNYFIKGRMSTGYAILMDIDGNKIDFSAMPKGYKTPKLSNCNRVSARTTQMIQTVAI

SEQ ID NO: 13833 - protein, 341 aa, unidentified
TDLLSARRALRQSRRNRKTRYRAPRFDNRIRTKRKGWLAPSVENRINSHLSRIEAVLRLLPVTKITVETASFDLQLLKNPNISGKEYQEGEQLGFWNIREYVLCRDGHVCQHCYGRSKDPVLNVHHLESRRTGGDSPGNLITLCETCHKALHRGELTLKAKRGQSFRAEAFMGIMRWEVLNRLKASHPELEVNNTYGYRTKHARISNGIAKSHCADAFCVAGNLGAERLGEFLFQKQTRRNNRQIHKLSVLKHGLRKRNQVPFEVNGFRLFDKVACKGEEGFIFGRRSSGFFDVRKLDGTRISAGISYKKLHLLEKRQTYLIEIRKEEAFPPLPEGRGLRA

SEQ ID NO: 13834 - protein, 463 aa, unidentified
MAVFVLDRSGRPLMPCTEKRARLLLARGRARVHKVMPFTIRVVDRLAEDNEFQALRVKLDPGSKTTGMALVRETAENGVAVINLFELMHRGKQISEALTARRGHRSLRRSRLRYRPARRLNRGNKKSGWLAPSLQHRVDTTLAWVNRIQRYAPVSAISTELVRFDMQALENPEIEGAQYQQGTLAGYEVREYLLEKWHRTCAYCGAKNVPLQIEHIHPKSKSGSDRISNLTLACQCCNAKKAALPVEVFLAKQPERLKRIQAQAKRPLKDAAAVNATRWALINALKTTGLVVETASGGRTKFNRIELGIPKTHALDAACVGPMNSMTGWRKPTLCIKAMGRGSYQRTRLDKFGCVRGYLTRSKNIQGFQTGDRVKAIVTKGKKAGCHIGRVAVRASGSFNIQTSNGLVQGVSHRYCTVVQRGDGYGYQLVAKTEATGTQPKQGDALHPALYLPGLKAGISRAN

SEQ ID NO: 13835 - protein, 362 aa, unidentified
MVYVLNMDGQPLMPTNRHGKVRHLLKDGMAEVVKRCPFTIKLLYRSTNYTQPVTLGVDAGSKHIGLSATTEDKELFASDVELRNDIVDLISTRRQNRRGRRSRKTRYRKPRFLNRTGNRKSGWVAPSIENKIQTHLTVVDKVCRMLPVSKIVVETASFDIQKIKNPDICGTEYQQGEQLNFWNVREYVLFRDGHKCQCCKGKSKDKILNVHHIESRKTGGDAPNNLITLCETCHTGYHKGTVKLPKTIHRGMVFRDAAFMGIMRWAFYNELKRRYPNVSHTYGYITKNIRIENNLPKYHYIDARCISGHPLAVPSGEVFYQKKVRCHNRQIHKNTIGKGGYRKRNQAEYIVKGLRLFDKVSY

SEQ ID NO: 13836 - protein, 477 aa, unidentified
MVITLDKNKQPLGVCSERRARILLQKKRAYVRKYFPFTIVVKDTDIRTLEKRDEYRIKIDPGSKYTGIAVVRLTDDAVVFFQQIEHRGGQVKSDLETRSATRRNRRSRETRYRRPKWRNKQLAKNKKPGYDTSRPEGWLPPSEKSIADNIISWVIRLKKLFNITQCSFEAVRIDTQLMDNPEIEGVEYQHGELAGWECREYLLDKYGHTCQYCRGASGDKILEVEHINPKAQGGSNKIKNLTIACHTCNQAKGARTPKQWLVSFEGNETKLAEERCKGIRNVIRNKVSGVSNRYCAWVNSTRRYIEKALFFLFGDVECASGGRTKANRVKLKLPKDHHYDALCVGAIPENGFKDLSNGYCFMAKAIGRGSRLRGNINKCGIIILKFKKGPKRRFGFQNGDIVRANVPKGKYSGVHVGRVMTRASGSFDIRKANGERASSNYRYCRILQHDNGFLCSYQNRKAKTQFLSAINNRDPLR

SEQ ID NO: 13837 - protein, 396 aa, unidentified; identical to SEQ ID NO: 4508

SEQ ID NO: 13838 - protein, 499 aa, unidentified
MRYVYVLDVDGKPLMPTCRYGKVRRMLKSGQAKAVDTLPFTIQLTYQTKTKILQPVTAGQDPGRTNIGLAAVREDGIDLYRSHCETRNKEISKLMEERLAHRRASRRGERLARKRLAKKFGTIAKKLNGRLLPGYKEPLAVKDIINTEAKFNARLRPEGWLTPTATQLLRTHLNLLERVSRILPVTDVAIEINRFAFMELADPDKKHSEIDFQHGALFGTGGLEQAIREQQQDRCLLCGKRDIEHFHHIIPRTKRGSNTIANLAGLCEECHTLVHQSEEAKSRLEEKKQGLLKQYGGTSVLNQIIPSLVKELEIRYPGHLYVTTGKDTKAFREKHGLEKDHDVDAYCIAASRMENIKPKIQTEPFEIQQFRKHNRANIHHQTERTYKLDGKVIAKNRKKRMDQKTDALEDWYNAMMQQHGKQQAERMCARLTVQKSIRYYNNLDRIMPGMVFLYRKKRYVMTGQKNRGYYYLAYGEGVTPFSSKKVNIVCHNTGLVYVA

SEQ ID NO: 13839 - protein, 512 aa, unidentified; identical to SEQ ID NO: 5549

SEQ ID NO: 13840 - protein, 465 aa, unidentified; identical to SEQ ID NO: 9038

SEQ ID NO: 13841 - protein, 414 aa, Streptomyces sp.; identical to SEQ ID NO: 6272

SEQ ID NO: 13842 - protein, 442 aa, unidentified; identical to SEQ ID NO: 2903

SEQ ID NO: 13843 - protein, 431 aa, Escherichia coli; identical to SEQ ID NO: 6926

SEQ ID NO: 13844 - protein, 408 aa, unidentified
MVYVQDIDGKPMMPTTRHGKVRQLLKDKKAVVINTCPFTIKLMYKTSDYKQEIVLGVDAGTKHVGLSATTKSKELYSSEVILRSDIVDLLSTRRELRRTRRNRLRYRKPRFDNRIKSKRTGWVAPSVRHRIDAHIRVIDNVCSILPISRIIVEVAQFDTRKIKNPNISGNEYQEGNQLGFWNVREYVLTRDGHKCRHCKGKSKDPILNVHHIESRKTGGDSPSNLITLCETCHKEYHKGKIDLRVKRGKSLRDAAVMGIMKWKLYEELKSRYDNVSMTFGYITKYNRIKYGIEKSHISDAFVISKNFNALRLGYHYKVRLVRRHNRQIHKQKVLKGGVKKPNQSSFEVFGFRLFDRVMFEGNCYFIFGRRKSGSFNIRDIDGGNQRDITYKKLKLLRCKRFMIQKETN

SEQ ID NO: 13845 - protein, 465 aa, unidentified
MSTCACVLSKNGERLMPTIRLGKVRHLLKDGKAKIIKHHPFTIQLLYDSETNIQPIEICEDVGYNYIGISVKSQSHEYVSAQYDTLQDEKDCHDSCRKMRRTRRNRLRYRKPRFDNRKHDKGWLAPSLEHKKELNVNVIKMYCEVMPITHATVEVGSFDTMLVKAIEEGKATPESTDYQKGPRYNLASLREAVFYRDNYTCQVCGRKANEGAILHVHHMFYWKGRHGNSLNELVTVCEKCHTPANHQKGGKLYGFGENIKFANLSGAAFMNTVRWQIVNELYAAFGKPFVTFTYGAMTKEKRIALHLDKSHSNDAYAMGNFHPVDRCAFEHYEKVKRNNRILEKFHDSRYIDIRTGKEAKGKELFNGRISRSHKKDSENLHKYRGKRIRKGYRALRRKKVTLNSGDLVSLNGETLIVHGTHTNKKGNVRVEFKVAALNGKKSASLKKLKIVKTSTPMHSAWAKVS

SEQ ID NO: 13846 - protein, 462 aa, unidentified
MSVLVIGRNGRALMPTNPRKARLLLKKKTASVVCRHPFTIQLLYKTGCATQEGCIGIDTGSQHIGVGITCGDKVILKDEHALRSSMEKRSLLATRAVMRRGRRYRKVRYRKPKWRHHTKRMYFEKANRRGQHWRKVKTTTQSPRPKGWLPPSLQSKCDHHFRIIDRYLKYLPDPITRNLVIETGRFDMARINDPTIHGEMYQRGPMYDAENLRAYIFARDNYQCACCKAKAGTTRKADGTTVKLVAHHILFRSRGATDNPKYIISVCDHCHTTKAHQPGGILYSWMENNKKVARGLRDATFMNILRKRLFARYPQAAFTYGNITAADRKKLRLPKSHANDAVAISLFGKEASTVKNICQTMHYKQIRKSKRSLHEAIPRKGRKNPNTKAVRNKKNTTQVNGFKLWDSVLANGKKLFICSFTGTSAYLIDKNGCYISQPGKTYKQWPLSKLKRLHPNGNWLMA

SEQ ID NO: 13847 - protein, 429 aa, Moorena sp.
MCNYVFVLDANHKPLNPCRPVTARKLLTAGKAAVYRRYPFTIILKKQVEAEPKPMSLKIDPGSKMTGLAIVYGNQVVWSAEIEHRGSKIKSALDSRRAVRRSRRNRKCRYRKPRFNNRKRPEGWLAPSLQHRVATTMTWVLRLIKLTPIGSISQELVRFDTQKLQNPEISGIEYQQGELMGYEVREYLYQKWDRQCVYCGAHSVKLEIEHIVPKSKGGTNRVSNLTLACHRCNQAKGNLNAQDFLLGKPDVLKRILARAKQPLLDAAAVNSTRWKLYQSLKKTGLSVEVGTGGRTKYNRIKLGLPKSHWIDAACVGEVATLEIVTRQPLLIKAMGHGCRQVIQMDGIGFPRKGYKPKHPVKGWKTGDIVNVVAGKNAGLKGVRIKTVRAKGNFDLIGADQDSSNKVLSASRNYIQCVHRQDGYYYSFAK

SEQ ID NO: 13848 - protein, 445 aa, Clostridium sp.
LIKRGVPLMVYVLSKEGKPLMPTNRYAKVRVLLKSKKAVVVNSKPFTIKLLYNTKSFTQPITLGIDSGYLNIGFSAITKEKELISGEVKLLKGMSERIKEKAMYRRQRRSRLRYRKPRFDNRKRSKDWLAPSIQHKYDSHIRFIDKLKKLLPITNIIIEVANFDTHKLKNPSIEGAVYQNGEQKDFFNLREYILHRDGHKCQNPNCKSKGAESILQVHHIGFWKQDRSDRPSNLITLCNKCHTPKNHKENGFLYGWQPKVKSFKEATFMSMIRWRLVNTLGCKHTYGYITKSNRIALKLEKTHYNDAFCIAGGSNQNRANPLIFEQIKRNSRSLEKFYDAKVIDIRTNTKVSGLELFNGRRIRNKNLNSENLRKYRGVKVSKGQRRIRTKRYFYQPGDLVKYEDKVYTVKGTQNKGKYIALKELKKVPKVELLAPYKFRKGLVCV

SEQ ID NO: 13849 - protein, 414 aa, unidentified
MPCSPAKARLLLKEKKAIVKRRTPFTIQLTIATGESKQPVTLGVDAGYKHVGLSASTEKAELYASEVELRQDVSDLLSARRALRQSRRSRNTRYRAPRFDNRIRTKRKGWLAPTVENRINVHLSRIETVLRLLPVTKITVETASFDTQLLKNPDIAGKEYQEGEQLGFWNVREYVLFRDEHVCQHCHGRSKDPALNVHHLESRRTGGDSPRNLITLCETCHKALHRGEITLKAKRGQSFRAEAFMGIMRWEVLNRLKASHSELKVHNTYGYLTKHARIANSIAKSHGADAFCIAGNLGAARLGEFFFQKQTRRNNRQIHKLSILKGGLRKRNQAPNEIMGFRLFDKDACKGEEGFIFGRRSSGYVDVRKLDGTRISASISCKKLRLLEKRRTYLTEIRKEEALPSLSEGRGLRA

SEQ ID NO: 13850 - protein, 420 aa, unidentified
MQYVYVLNKHGEPLIPCSPGKARLLLKQQKACVVKRTPFTIKLLFGSAGYKQPITLGVDAGSKHVGLSASTEKRELYSEEFTPRSDVVELLSTRRQNRRSRRNRKTRYRVPRFDNRVHSKHKGWLAPSVEVKIQEHITVIKHICKILPISLVRVETAEFDTQRLKAMLAGKPLPVGTDYQLGEMYDEYNVRQYVLKRDHYTCQCCGTHNTAKKVVKLHVHHLESRKTGGNAPSNLVTLCTTCHKNLHKGKVTLDGKERGKPLRDAAFMGIMRKTLMARLKEELPIPVQGTYGYITKMRREQNDIKKSHTNDARCISKHPLAEPCSVCYRTKAIRHHNRQTHKANFSKKGIRKRSQMPYLVEGYRLWDKVLYKEQECFVSGRRSSGSFTLKKLDGTSVSKGVTFKKLRLLEPATNYLIERM

SEQ ID NO: 13851 - protein, 442 aa, unidentified; identical to SEQ ID NO: 3161

SEQ ID NO: 13852 - protein, 411 aa, unidentified
MPCSQRKARLLLKNKKAKIYAYHPFTIQLFYASGETIQKCNIGVDTGSRHIGLAITSENKVLFKGEIDLRQDVKSNLDTRRTYRRNRRNRKTRYRKARFFNRVTSKQKNWLPPSMESKIHHTFHWMNKLENLVADSNLHIEVGKFDMAKMIRPDIQGKEYSQGQCYGYFDTRYFVFARDDYTCQCCKKKNKILRTHHIRYRSNGGTDRADNLITVCTDCHTSKNHKKGGILYEWQQRHKKGKPYKEPPFMNIIRKRIYQKYPDAVISYGSQTTPKRKERNLDKTHYNDAIIISGIEDIKENPKEWLRIKQFRKKKRSLHEAAARKGRKEHNRTQKRNRKNTSYDKGWYLNDYVEVFGKKGYISGFTNSGVYIKNTNDDYITMPDKKYKQVSHHNLVRICHNNNWQYEIQKI

SEQ ID NO: 13853 - protein, 438 aa, unidentified; identical to SEQ ID NO: 4848

SEQ ID NO: 13854 - protein, 427 aa, Enterococcus sp.; identical to SEQ ID NO: 5630

SEQ ID NO: 13855 - protein, 529 aa, unidentified; identical to SEQ ID NO: 6786

SEQ ID NO: 13856 - protein, 431 aa, unidentified; identical to SEQ ID NO: 9553

SEQ ID NO: 13857 - protein, 427 aa, unidentified
VYVINKHGRPLMPCSPAKARHLLDAGKAKVKKRTPFTIQLVYGSSGYTQEVILGVDAGSKTIGMSASTTKEELLSAEVKPRNDVVDLLSTRREFRRVRRNRKTRYRKPRFDNRVRSKHKEWLAPSVEVKIQEHITSIKRVCRILPVSKVVIETAEFDLQLLKAIADGKSVPQGEDYQKGEMYGHYNVRQYVLWRDNYTCQCCGAHATKKKEVRLHVHHLESRKVGGDAPSNLITLCDSCHEKFHKGIITAANLKKRKRRSMRDATFMGIMRKTLIQRLRAELTIPVAETRGYITKTTREKLLVLPKSHTNDALAIALGKHGFNVGYLPEIAQIDKIYTIRPVRHHNRQLHKVTILKGGIRKSNQAEKYVFGYRLFDKVQFNGQDCFIWGRRTTGIFTIKTINGKMIKDGISFKKLKLVEKSTSYLIA

SEQ ID NO: 13858 - protein, 380 aa, Arthrospira sp.; identical to SEQ ID NO: 3156

SEQ ID NO: 13859 - protein, 507 aa, unidentified
LKKEAAGHRQGKDCRPVRYGPPYRAGMPDGRRKPERKHMVAVVTSTGKPLMPTSAYRARKLLKKGRAVIFKYRPYFTIQLVDRADGEVQEVEYKSDTGSVHVGISVCTEKKELLSEQRDLLENEPEHHNDRKKNRRTRRNRKRYRKPRFDNRKKKPQEGHEKWLPPTLLHKMEVQVRLFREFCRVVPVTSACFEMGKFDTQALKAVSKGEPVPEGEGYQKGERYGTDTLRAAVFLRDGHTCRFCGRSVKDGAILHVHHVGYWKGDRTNRPANLASACEQCHTPANHGKNGILYGKEPEFKTLKDASYMTSVRWIMLDEIKKAAPGVQVSVTYGVTTKRKRQELHLPKSHVNDAFSMASFHPKKRSDTEYWKKIPRHDRVLQKFYDAIYLDTRDGSEKKGSELSNGRISRNHKKDSENLHQYRGHKVSKGHNSIRRGASSLKPGSIVMYKGEKMTVHGTHTRYVKGKDGKTAKKVNVQFTCPASDGKKSASLEKCTPVSRVYNTGWKR

SEQ ID NO: 13860 - protein, 451 aa, unidentified
MSVAVMSKTSMRLMPTSEYRARKLLKSKKATVYGYHPFTIQLTERETGDVQPVELCMDTGYLHIGMSVKSKKHEYLGVQIDTLTDEKQKHDACRMYRRQRRSRKRYRQSRFNNRKRSDGWIAPSLEHKKDIHIQTISRICNAMPITNITLEMGNFDTQVLKALEENRPLPQGTDYQHGERYGIATLREAVFARDKYTCQCCRKTIADGAILHVHHIIYRSRGGTNRMSNLATVCDRCHTPANHKPGGRLYNWKPKIASFKGATFMTAVRWKMYNEVKSKFSDINIHITYGAETKEQRRAFDITKSHVNDALVMGQFHPKHRSRPVCYKKKRRNNRCLEKFYDAKYIDSRDGKKRSGQELFNGRINRNHKKDSENLHQYRQQKVSAGRRTIRKQHYSIQPHDIIVFNRQQFETSGCHCNGARAILLPQKKSVAIKKLSIHKYAGGYFKSDFT

SEQ ID NO: 13861 - protein, 412 aa, unidentified
MVYVISQNGQPLMPTENHAKVRILLKNKKAKVIKRCPFTIQLAYDSTNYTQDITLGVDSGSKHIGLSATTKNKVLFESDVELRNDIVNLLSTRRQNRRTRRNRKTRYRKPRFNNRRRKEGWLAPSVQNKVDSHLTVIRKVHEILPITKVIVEVASFDIQKIKNPTISGTEYQQGEQLDFWNVREYVLFRDSHICQCCKGKSKDKILNVHHIESRKTGGDAPNNLITLCETCHTGYHKGIIKLPKTIHRGMSFKDATFMGIMRWAFYTKLKEIYPNVSLTYGYITKNTRIRNSLPKEHYIDARCISGNPKAISDGMVYYQKKVRCHNRQIHKNTILKGGIRKRNQASYDVMGFRLFDKVKWKGQNCFIFGRRSTGRMDLRLLNGTKINASVGYKNLKIIEMRKNYLTEQRKGG

SEQ ID NO: 13862 - protein, 453 aa, Anaerotruncus sp.; identical to SEQ ID NO: 10259

SEQ ID NO: 13863 - protein, 442 aa, Selenomonas sp.; identical to SEQ ID NO: 4776

SEQ ID NO: 13864 - protein, 456 aa, unidentified
MSTCVCVLSNNGERLMPTIRLGKVRRLLKDGKAKIIKHHPFTIQLLYDSKTNTQPIEICEDVGYNYIGISVKSESHEYVSAQYDTLQDEKEHHDDCRKYRRTRRNRLRYRKPRFDNRKRSEGWLAPSLEHKKQLNIRLIERYVSVIPITRATVEVGSFDTMLLQAIQKGESKPEGVDYQKGPRYNLATLREAVFYRDNYTCQVCGRKIADGAILHMHHMFYWKGRHGYQLDELVTACEKCHTPANHQKGGKLYGFGKDKKFANLSGAAFMNAVRWQIVDALHATYGKEFVTITYGAMTKEKRIILGIEKTHNNDAYAMGDYHPAHRCVFRHYQKRRRNNRVLEKFYDVTYIDARTGNKAKGKELFNGRISRNHKKDSEDLHKYRSKKVSKGRRSIRRQRYAIQPYDTVRLESKTYITSGCHNKGTRLLIPANGKSKSVAISKVQVVCHAGAWIQII

SEQ ID NO: 13865 - protein, 493 aa, unidentified
MAAVYVISASGKPLMPTTRCGHVRGLLNAGKARVVEREPFTIQLKYETPDVTQPLYLGIDPGRTNVGSAVVREDGECVFTAQLTTRNKDVPKLMKARKQFRMAHRRLKRRCKRQRRAKAAETLSQKGEFQRLLPGYEEPIICKGIRNKEARFNNRQRPAGWLTPTANHLLLTHLNMVKKLQKLLPITDVVLEVNRFAFMAMENPSIRRWQYQQGPLYGKGSVEDAVYAQQDGHCLFCGKPIAHYHHVVPQHKNGSETLENRVGLCNEHHDLVHKDRAWDAKMKETKAGLNKKYHALSVLNQIIPALTEQLTAMFPQHAFVTTGKDTADFREDYGIAKEHHLDAYCIACSVLAEPTKVAAPTGKPHRLMQFRRHDRQVCHKENIKRVYLSEGKAVATNRHKAIEQKDDSLEEFRKTHTQQEVSALTVKDHQPVYKDMRRFMPGGVFLFNGKVHTLQRSHGRYKEMPFYYIDTDGSKNHAKGCIFLQQNCGMRWA

SEQ ID NO: 13866 - protein, 518 aa, Anaerostipes sp.; identical to SEQ ID NO: 2751

SEQ ID NO: 13867 - protein, 473 aa, unidentified
MVAVVTNTGRPLMPTSTYRARKLLKGGRAVIYKYRPYFTIMLVDRAEGEVQDIEYKSDTGSKHAGISACTEKQELLSEQRDLPDREPEHHKEQQRYRRGRRNRKRYRKPKFDNRKKKPQEGHEKWLAPTNLHKLEIQVDLFKDFCQVVPVTSAYFEMGKFDTQVLKAVLEGRPIPQGEDYQRGEQYGTDTLRAAVFLRDDYTCRICGRTIKNGAILHVHHVGYWMQDRTNRPANLATVCEQCHTPANHGRNGILYGRKPEHGTLKDASYMTSVRWIMLKELKEAAPEVDIHVTYGVTTKRMRQGLHLPKSHVNDAFSMGRFHPKKRADTVYWKKTIRHDRSLQKFYDAVYLDTRDGREKKGSELSNGRISRNHKKDSENLHKYRGHKVSKGHVSIRRDGNKLKPGSVVLYNGERLTVHGTHTSYRKNKKGEEVKSVNVQFTRPASDGKKSASLKKCKIVTRNYNTGWKRYRPA

SEQ ID NO: 13868 - protein, 512 aa, unidentified; identical to SEQ ID NO: 7636

SEQ ID NO: 13869 - protein, 450 aa, unidentified; identical to SEQ ID NO: 2935

SEQ ID NO: 13870 - protein, 415 aa, unidentified
MRVFVLDKNRKPLDPCHPAKARKLLKSGRAKVLRRYPFTIIIKDLEAENCSTHDHQLKIDPGAKTTGLAIVQGDRVIWGAELTHRGFQIKEALTSRRQLRRSRRNRKTRYRQPRFLNRTRPKGWLPPSLMSRVHNILTWVNKLIRFCPVTGISQELVRFDTQKMLNPEVSGIEYQQGTLYGYELREYLLEKWNRTCAYCGADNTRLEIEHIKPKSKGGTDRVSNLAIACHDCNQAKGNLEIEQFLSRKPSILKRILSQAKKPLADAAAVNATRWKLHDELKLIGLPVEVGSGGLTKYNRCRQNLPKTHWLDAANVGKVDTLYIEDYQPLLITAKGHGTRQICRTDKFGFPRLHCSLKKIHKGFQTGDIVRAVVTKGKKIGTYMGRIATRKTGSFDIAAAKGKVSGISYKYCQAIH

SEQ ID NO: 13871 - protein, 405 aa, unidentified
VSVVREDGTVLHKEEIGLRDSMSKRKLLEAKASLRRGRRYRKTRYRHPKWRPKTKRVYCEVPDRKGRHWQKKKITFTSKRPKGWLPPSLQSKTDHHIRWIKKLQDLLPEGYRLSIELGRFDPARMKNPEIHGDLYQKGPQYDYENVRAYVLDRDRYTCQICKKKGGKLHVHHILYRSHGATDDPQYMVTVCSDCHSAQNHLPGGILYQWMQEQKRFSRGLRDATFMNILRKRLIRAFPEAVFTYGNVTKVDREKLKLPKSHGNDATAIALVKTGITAVKDKESVICIQQVRRKKRSLHEETPRKGRKEPNRTAARNNKNTKAVTVTKRQNKKKVSMTGCLFDRVELNGKKGWISGFTGKSCYVKDADDQYLSTSPKYKQVSLSKLRILHHCGNWIIGAKKTLGKG

SEQ ID NO: 13872 - protein, 428 aa, unidentified
  source 1..428: note = uncultured Lachnospiraceae bacterium
MVYVSDKDGQPLMPTKRYGKVRHLLKEGKAKVVRCMPFTIQLLYDSGEHTQPVDLGVDAGSKYIGLSACSDKAELFAAEVEPRDDISKNLTSRKESRRTRRSRKTRYREPRFDNRTHHKKEGWLAPSVKCRCETHLTAIRKVMSLLPVSGITIEMAPFDTQKLKADIFDMKAPSGTDYQHGESEGYDNIKAYVRWRDGYKCAVCGREHIPLQVHHKKQRKDGGSNMPANLITVCVDCHKAYHAGLLPDGQAAVMQPDTDVKPMRDAAFMNIMRWAVWDRLKELGLPLHMSFGYITARQREKYGIEKSHHADARCISGHGDLPPAGEWFFCKKVRCHNRQIHKKNPGAGGYRKLAQQGHVIKGFKLNDTVLFGGKEWFIHGRREKGAFVLEDLDGNRTERAPSKLKFMHPNGTLLIERRKLIQGGSSHD

SEQ ID NO: 13873 - protein, 473 aa, unidentified; identical to SEQ ID NO: 3562
  source 1..473: note = uncultured beta proteobacterium

SEQ ID NO: 13874 - protein, 428 aa, unidentified
LKVFVLNMRGQPLMPCSPAKARHLLKAGKAVVKRRTPFTIQLRIATGETKQNVTLGVDAGAKHVGLSATTEKEEVFASEVELRQDITGLLAARLSLRRDRRHRKTRYRAPRFLNRVRSKHKGWLAPSVENRIQAHMSRIDAVCRLLPVTKIVIETASFDIQKIKDPSVEGTDYQQGDQLGFWNVREYVLFRDGHVCQHCHGRSKDKILNVHHLESRQTGGDAPNNLITLCETCHKAYHAGKIKLKGKRGQSFRAEAFMGIMRWTLLDRVRKAHPGLPVENTYGYLTKHTRITHGLPKTHCVDAYCIAGNLKAVRRGVYLHQRQMRKHNRQIHKFTVLSKRLEDGTKIGYRKLNQSPYLVHGFRLFDKVRCLGQIGFIFGRRSSGYFDVRRLDGVKLSPSISWRKLTLLEKRSTYLTELRKQDGASSPV

SEQ ID NO: 13875 - protein, 524 aa, Butyricicoccus sp.; identical to SEQ ID NO: 8949

SEQ ID NO: 13876 - protein, 421 aa, Lactobacillus sp.; identical to SEQ ID NO: 5881

SEQ ID NO: 13877 - protein, 453 aa, unidentified; identical to SEQ ID NO: 6331
  REGION 1..453: note = Ga0315284_10003077

SEQ ID NO: 13878 - protein, 420 aa, unidentified; identical to SEQ ID NO: 3247

SEQ ID NO: 13879 - protein, 430 aa, unidentified; identical to SEQ ID NO: 3328

SEQ ID NO: 13880 - protein, 465 aa, unidentified
MSTCVCVLSNSGERLMPTFRLGKVRRLLKDGKAKIVKHHPFTIQLLYDSKTNTQPIEICEDVGYNYIGISVKSESHEYVSAQYDTLQDEKEHHDDCRKYRRTRRNRLRYRKPRFDNRKRDDGWLAPSLEHKKELNVNVIKMYCEVMPITHAIVEVGSFDTMLVKAIEEGKATPESADYQKGPRYKLATLREAVFYRDNYTCQVCGRKANEGAILHVHHMFYWKGRHGNSLSELITVCEKCHTPANHQKGGKLYGFGEDIKFANLSGAAFMNTVRWQIVNVLNAAFGKPFVTFTYGAMTKEKRIALHLEKSHNNDAYAMGSFHPVNRCAFEHYEKVKRNNRILEKFYDSQYIDTRTGELTNGKSLFNGRISRSHKKDSENLHKYRGKRLYKGHRALVRKKVNLNPGDLVSLNGEVLVVHGTHTNKKGAINVEFKVPSKSGKKSASLKKLEIIKTSNSMRSAWKKVS

SEQ ID NO: 13881 - protein, 512 aa, unidentified; identical to SEQ ID NO: 13135

SEQ ID NO: 13882 - protein, 433 aa, Clostridium sp.; identical to SEQ ID NO: 7140

SEQ ID NO: 13883 - protein, 415 aa, unidentified; identical to SEQ ID NO: 6044

SEQ ID NO: 13884 - protein, 749 aa, unidentified
LKVFVLNMRGQPLMPCSPAKARHLLKAGKAAVRRRTPFTIQLRIATGETKQSVTLGVDAGAKHVGLSAATEKEEVFASEVELRQDITGLLAARLSLRRDRRHRKTRYRAPRFLNRVRSKHKGWLAPSVENRIQAHMSRIDAICGLLPVTKIVIETASFDIQKIKHPDVEGTDYQQGDQLGFWNVREYVLFRDGHVCQHCHGHAKDKILNVHHLESRQTGGDAPNNLITLCETCHKACHAGKIKLKVKRGQSFRAEAFMDIMRWTLLDRVRKAHPGLPVENTYGYLTKNTRITLGLPKAHCVDAYCIAGNLKAVRRGVYLHQRQVRKHNRQIHKCTVLSKTLKDGTKIGYRKLNQTPHLVKNFRLFDKVRCLGQTGFIFGRRSSGCFDVRRLDGVKLSSGISYRKLTLLEKRGTHLTELIKEDGASSSVRRQRFLRRVSMNKPCTYLLSALMASAVLAPVAASAADKSELEVRMEAAQKVLADRSYYERWSPEAALKTVEDAKAANEAGSARQKEIDGALDVMKDWCHTRFLVNACIKDARDLHHEREKEIRSVRLKADEMIRLDRVEQRRARQESQKQNVKQPMKLGGSTESPESRSESRAEEVKTKQSRAEERRALEEANVRAYEEKQARAARKAEERHDPIRVKSRVKAPSSPIEGHLGRTAADVEAGRAEAAERMAQEDANVAAFNAKQAEAKKRLEEAEATAAERKASREARQANFNKTLEERRAAQKRYEESRENKDSGLKKYF

SEQ ID NO: 13885 - protein, 424 aa, unidentified; identical to SEQ ID NO: 8578

SEQ ID NO: 13886 - protein, 407 aa, unidentified
VYVQDINGKPMMPTTRHGKVRRLLKDKKAVVVNLCPFTIRLTYVTSDYKQEIVLGVDAGTKHVGLSATTKSKELYSSEVILRSDIVDLLSTRRELRKTRRNRLRYRKPRFDNRVKSKRSGWIAPSVKYKIDAHIRVVDNVCSILPISRIVIEVAQFDTQKIKNPNISGKEYQEGDQLGFWNVREYVLARDGHKCQYCKGKSKDPVLNVHHIESRKTGGDSPSNLITLCETCHKEYHKGNIDLKIKRGSSLRDAAVMGIMKWRLYEELKSKYDNISMTFGYVTKYNRIKHGIEKSHVSDAFIISKNFNAIRLGYYYKVRLVRRHNRQIHKQKIPKGGVKRLNQSPFEVFGFRLFDRVMFENSYYSIFGRRKTGRFNIRDIDGKNQRDITYKKLKLSRCKCFMVQNEMN

SEQ ID NO: 13887 - protein, 414 aa, unidentified; identical to SEQ ID NO: 13302

SEQ ID NO: 13888 - protein, 369 aa, unidentified
HIGLAATTEKKVIYQEELIPRNDVVKLLSARRTLRRSRRSRKTRYRKPRFNNRVHSKHKGWLAPSVEVKIQEHITAIKNVCKILPVSEIHVETAEFDLQRLKAMEEGKPLPVGTDYQLGEQYDFYNTRQYVLHRDGYTCQCCDAHDKDVKLHVHHIESRQTGGNAPNNLVTLCEHCHKALHEGKIELPKNKKRGKSHRDAAFMGIMRNTLLERLKKEVDVPATMTYGYITKYWREKAGLEKSHINDAICISKHPYAKPLDAYYLTKAVRHHNRQIHKANFSKGGIRKRNQAPYLVKGFRLFDKVSYQSKEYFIFGRRATGFFDIRTLDGTKVNKGSVSYKKLRIQDTAKAYVKEVRAIPHMNEFTCVLA

SEQ ID NO: 13889 - protein, 447 aa, unidentified; identical to SEQ ID NO: 11247

SEQ ID NO: 13890 - protein, 415 aa, unidentified; identical to SEQ ID NO: 5821

SEQ ID NO: 13891 - protein, 465 aa, unidentified; identical to SEQ ID NO: 3070

SEQ ID NO: 13892 - protein, 417 aa, unidentified
MPCSPAKARLLLKEKKASVKRRTPFTIQLTIATGEAKQPVTLGVDSGYKHIGLSATTEKAELYASQVELRQDITDLLSARLALRRSRRSRKTRYRAPRFNNRVANKREGWLAPSVENRIAAHVSRVETVIRLLPVTAITVETAAFDTQLLKNPDIAGVAYQQGDQIGFWNVREYVLFRDGHVCQHCRGKSKDPILNVHHIESRRTGGDAPNNLITLCETCHRAFHRGEIELKVKRGKSFKAETFMGIMRRTLLERLKKAHPELNVRNTYGYLTKHKRISHGIAKSHCADAYCIADNLGAKRLEGFFFQKQTRKHNRQVHKLSILKGGLRKKNQAPYEVKGFRLFDKVICKGEEAFIFGRRTSGSFDVRRLDGTRISAGINYKKLRLLEPRTTYLAEFRKEAAHPPLHECRGFRAEFL

SEQ ID NO: 13893 - protein, 442 aa, unidentified; identical to SEQ ID NO: 2903

SEQ ID NO: 13894 - protein, 512 aa, unidentified
MSTVYVLNKDGKPLMPTTRCGHVRHLLKEQKARVVASKPFTIQLLYKTNDVVQPLYLGIDPGRTNIGVAVVKADGTAVFTAHLETRNKEIPKLMKKRKDSRRARRTNGRRCRRQRRAKANGTISKKCVKHDTAQNGSVSKRAKEIGVIKRHLPGCEKEALCIGIKNKEAKFNNRTRPEGWLTPTANQLLQTHINLVKKIQKFLPISDVVLEVNKFAFMRLDNPNIQKWQYQQGPLYQKVSLEEAVSEMQEHHCLFCKNTIDHYHHVVPQHKNGSNTIDNIVGLCTKHHDLVHKETAWQEKLAKKKTGLNKKYGALSVLNQIILALTKGLSFLFPKHFFVTTGKNTYDYRTAHSVSKDHWLDAYCIACSVLPNDVCDSSINSHVPYELKQFRRHDRRALHKENMSRVYTLNGKKVATNRHKAIEQTTDSLEEFRQRQPNDVYKLKVKEHHPEYRNPKRNFPGCVFLVGKRTHVMQGTSGSHNGKADGYYDTNGNSYSSGKCKFVAKNEGIVFA

SEQ ID NO: 13895 - protein, 431 aa, unidentified; identical to SEQ ID NO: 2746

SEQ ID NO: 13896 - protein, 430 aa, unidentified; identical to SEQ ID NO: 4310

SEQ ID NO: 13897 - protein, 515 aa, unidentified; identical to SEQ ID NO: 3339

SEQ ID NO: 13898 - protein, 408 aa, unidentified; identical to SEQ ID NO: 4080

SEQ ID NO: 13899 - protein, 431 aa, unidentified
MVYVLDINGQPLMPTARHGKVRRLLNSHLAKVVKRCPFTIQLLYQSTKETQPVSLGVDAGSRHIGLAATTEKKVIYQEELIPRNDVVKLLSARRVLRRSRRSRKTRYRKPRFNNRVHSKHKGWLAPSVEVKIQEHITAIKNVCKILPVSEIHVETAEFDLQRLKAMEEGKPLPVGTDYQLGEQYDFYNTRQYVLHRDGYVCQCCGAHDKDVKLHVHHIESRQTGGNAPNNLITLCEHCHKALHEGKIELPKNKKRGKSHRDAAFMGIMRNTLLERLKKEVDVPVTMTYGYITKYWREKAGLEKSHINDAICISKHPYAKPLATYYLTKAVRHHNRQIHKANFSKGGIRKRNQAPYMVKGFRLFDRVLYQGKNYFIFGRRATGFFDIRTLDGTKVNKGSVSYKKLRIQDTAKTYLKEVQAIPRMNEFTCVLA

SEQ ID NO: 13900 - protein, 442 aa, unidentified; identical to SEQ ID NO: 3161

SEQ ID NO: 13901 - protein, 406 aa, unidentified; identical to SEQ ID NO: 6176

SEQ ID NO: 13902 - protein, 413 aa, unidentified
MTSYSFVLDANGKQLAPTKEPKAWFLIRKKRAALVSKYPMVIQLKKKIQENEICKDEIRCGIDDGGLHVGIALVQKCKSKNKVVFKGTIEQRNDVKHLMEVRRNYRRYHRYHKRYRQARFDNRKSSKRKGRIAPSILQKRQATIRVINRLNKWINITNYWLEDVSIDIRVLTDGYKSYSWQYQKSNRLDENIRKATILRDGGKCMECGKSNCRLEVHHIKPRRRNGSNTLDNLITLCESCHQKTEGQEELYMDRYFSLLKSSDNKNLNYAQHVMIGKMWLRKQLSGLGVLYLTSGGDTANKRIDWNIEKSHTNDAVCITDLQPDTCDMKEWTMKPMRRQSKAKTDHVLGIHHRDLVEYTFKNGETHRGYVTALYPEQKAINFQSQTKHCKKVNARKCKLLWNYSKIYWFENAS

SEQ ID NO: 13903 - protein, 423 aa, Lactobacillus sp.; identical to SEQ ID NO: 5050

SEQ ID NO: 13904 - protein, 454 aa, unidentified
VSYTARYVPAYRFKHITKKEVPYMVYVLDIDGQPLMPTSRHGKVRRLLNSHLAKVVKRCPFTIQLLYQSTKETQPVSLGVDAGSRHIGLSATTEREVVYQEELVPRNDIVKLLSARRALRRSRRNRKTRYRRVRFNNRVHSKHKGWLAPSVEVKIQEHITATKRICQILPIFDIHVETAEFDLQRLKAMEEGRLLPAGTDYQLGEQYDFYNTRQYVLHRDEYTCQCCGTHDNNVKLHVHHVESRQTGGEAPNNLITLCEHCHKSIHAGKMMLPKGKKRGKSYRDAAFMGIMRNTLLERLRKEVNVPVTMTYGYITKYWREKAGLEKSHINDAICISKHPYARPLETYYLTKAVRHHNRQIHKTKFSKGGIRKRNQAPYLVKGFRLFDKVLYQGESYFIFGRRITGYFDIRTLDGTKVNKGSTSYKKLRIQDTAEAYLTEVRAIPHMNEFTCVLA

SEQ ID NO: 13905 - protein, 427 aa, Nostoc sp.
MCKVFVIDSEKRPLNPIHPAQARQLLRNHKAAVFKRFPFTIIVKESHLDAPVQSLRLKLDPGAKYTGIAIVNDASGEVVFAAELKHRGFAIRDALTSRRQLRRARRNRKTRYRQPRFLNRTRPQGWLAPSLQSRIENIKTWVSRLCKVARITAISQELVKFDMQLIRHPDIQGKEYQQGTLAGFETRQYLLEKWNRECAYCGIKDAPLQIEHIHPKSKGGSNSITNLTLSCEKCNLKKSSQDIRDFLKKDKSRLEKILALTKKPLADAAAVNTTRFALLETLKSTGLPVETGSGGLTKFNRTQQGLSKSHWLDACCVGTSTPTLKIKGVKPLLITANGHGTRQSCRTDKYGFPIRHCSRTKFHFGFQTGDIVKTVVTKGKKVGTYIGRIATRATGSFNISTAQGLIQGISYKYCKTIHKKDGYAYTM

SEQ ID NO: 13906 - protein, 430 aa, Calothrix sp.; identical to SEQ ID NO: 10070

SEQ ID NO: 13907 - protein, 436 aa, unidentified
MTKTLTTQTTQACVLDQNGKPLMPTTRLGKVYRLLKTQKAHIVSYEPFTIQLDYEPDTHIIQPMTLGVDSGAIHSGYSVANEHREYYSAEIIARNDISNRLSDRRMYRQTRRSRKTRYRKPRFNNRKNKKKGWLPPSLEQKVATQLNEIDHLHRYFPIETIIVEVAEFDIQKIKNPDISGIEYQQGTLQGYNIRNYLLEKHGRKCFYCGKTVSDFEVEHMFPKSKGGSNRIDNLTLSCHDCNEKKGTLTAEKFIQQTLPAKKAAAKLKQLPKEKRLFKYMAHMNATRWTLYNTIKEKYPNVKMTYGYITKYNRIQAGLPKAHHIDAKCITGFSNVPSISQTVVKVKMRRHNRQLHRATFSKGHIRKAASLPTKVFGFQLYDLVLFNNHRYYIKGRRSSGSFALVSVEGLKNEKRSYKKITLLAHTNAYLINHYVNV

SEQ ID NO: 13908 - protein, 295 aa, unidentified
ARFNNRSSSKRTCRLAPSIKQKKDAILRVLYQLNKWVNIQEYYLEDVCIDIRAMTDDYKPYRWQYQKSNRLDENLRKATILRDGCRCQECGKSNCILEVHHIRARRYGGANTIGNLITLCKKCHDKTESREKDFEERYFNMIKSKPKRFDYAMHVMQGKTYLREKISELGILHLTNGGETANKRIEWDIVKSHSNDAICIADGIPDTCDIKEWIIKPMRRKSKAKTDNVLGIKHRDLVSYTYKSGETHTGYVTALYPEQLALNFQSKTKHCKKVNARKCRLLWKFNKIYWLEQCV

SEQ ID NO: 13909 - protein, 456 aa, unidentified; identical to SEQ ID NO: 4421

SEQ ID NO: 13910 - protein, 417 aa, unidentified
VMVYVLDKNGQPLMPTDRHRKVRLMLQSGQAKVIKRCPFTIQLNYDSGHQTQEISLGIDAGSKHIGVSTTTKIKVLYEVDVELRNDIVDLLSSRRELRRGRRNRKTRYRQAKFNNRRRGNGRLAPSIRQKIGTHLTVVENICKMLPISRIMVETASFDIQKIKNPDIQGAEYQQGDQLEFWNVREYVLFRDGHTCQCCKGKSKDKILNVHHIESRKTGGNAPNNLITLCETCHTGYHKGTVQLPKAIKRGMRFKDAAFMGIMRWAFYEALKQQYEPVGTPVHNTYGYITKHTRIAYNLPKEHYVDARCISGNPEASSNGEYYYQKKVRCHNRQIHKLTVLKGGIRKQNQATYLVKGYRLFDKVSYQGKGYFVFGRRQSGFFDIRTLSGEKVNKGSLSCKKLKFIATRTYYLTERRAV

SEQ ID NO: 13911 - protein, 427 aa, unidentified; identical to SEQ ID NO: 8384

SEQ ID NO: 13912 - protein, 442 aa, unidentified; identical to SEQ ID NO: 2903

SEQ ID NO: 13913 - protein, 406 aa, unidentified; identical to SEQ ID NO: 2703

SEQ ID NO: 13914 - protein, 424 aa, Petrotoga sp.; identical to SEQ ID NO: 8893

SEQ ID NO: 13915 - protein, 470 aa, Blautia sp.; identical to SEQ ID NO: 2925

SEQ ID NO: 13916 - protein, 425 aa, unidentified
MENTLKVFVLNMRGQPLMPCSPPKARKLLRAGKAVPVRRTPFVIQLTVPTGETKQPITLGVDAGYKHVGLSATTAKEELLASEVELRQDVTGLLSNRLALRRARRNRKTRYRAPRFDNRVRSKHKGWLAPSVENRIQAHISRIEAVCRVLPITKIVIETASFDIQKIKNPEIEGEGYQQGEQLGFWNVREYVLFRDGHVCQACKGRSKDLILNVHHIESRKTGGDAPGNLITLCEACHKAYHAGKLKQFSPRRGASFRAETFMGIMRWTVLNRLRERHPELPVTNTYGYLTKHKRIVAGLPKTHCADAFCIAGVLDAKRRGEYLFQKQTRRHNRQIHKLTILKGGVRKRHQAPYLVHGFRLFDKVLCKGEVGFIFGRRSSGAFDVRRLNGTKISAGISYKKLSLLEKRKMFLTELRKEGRDSSRV

SEQ ID NO: 13917 - protein, 430 aa, unidentified
MPKVYVLNRHGRPLMPCTPAKARHLLDAGKAKVRQRTPFTIQLLYGSTGYTQEVILGVDAGSKTIGLSAATETEELFSAEVKPRNDVVELMSARRQFRRARRNRTTRYRKPRFDNRVRSKHKGWLAPSVEVKIQEHMTAIRRACAILPVSKVVVETAEFDLQLLKAVAEGKPVPQGEDYQKGEMYGHYNVRQYVLWRDSYTCRICGMHGSVRKGVPLHVHHLESRRVGGDAPDNLVTLCTACHDKLHKGIIMAADIKKRKRRSTRDATFMGIMRMTLLRRLREQLPVPVVETRGYITKATRENLLVLPKSHTNDALAIAHGPQGFRAEYLPNIRQADRLYTIRPVRHHNRQLHKATILKGGVRKANQAEKYICGFRLYDKVLYNGIECFVWGRRTSGSFLLRQLSGEKVKDGVSYKHLKLLERSQSYLVA

SEQ ID NO: 13918 - protein, 414 aa, unidentified; identical to SEQ ID NO: 2588

SEQ ID NO: 13919 - protein, 431 aa, unidentified
MPNKVYVINKHGRPLMPCSPAKARHLLDAGKAKVKKRTPFTIQLVYGSSGYTQEVILGVDAGSKTIGVSASTKKEELFAANVIPRNDVVDLLSTRREFRRVRRNRKTRYRKPRFDNRVRGKNKEWLAPSVEVKIQEHITAIKRVCYILPVSKVVVETAEFDLQLLKAIEEGKPVLQGEDYQQGEMYGHYNVRQYVLWKDNYICQCCGAHATKEKEVRLHVHHLESRKTGGDAPGNLVTLCDSCHEKLHKGLIAEKDFKKRKRRSTRDATFMGIMRKTLMQRLCSELPIPVVETRGYITKATREKLLVLPKSHTNDALAIAQGKRGFNVGYLPGIIQTDKIYTIRPVRHHNRQLHKAAILKGGIRKSNQAGKYVFGYRLFDKVQFNEQDCFIWGRRTTGIFTIKTINGKMIKDGISFKKLKLVEKSTSYLIA

SEQ ID NO: 13920 - protein, 413 aa, unidentified; identical to SEQ ID NO: 2636

SEQ ID NO: 13921 - protein, 351 aa, unidentified; identical to SEQ ID NO: 10636

SEQ ID NO: 13922 - protein, 451 aa, unidentified; identical to SEQ ID NO: 7526

SEQ ID NO: 13923 - protein, 431 aa, unidentified; identical to SEQ ID NO: 8285

SEQ ID NO: 13924 - protein, 451 aa, unidentified; identical to SEQ ID NO: 3199

SEQ ID NO: 13925 - protein, 414 aa, unidentified
MVYVINKQGQALMPTERFGKVRRLLKNSLAHVVCRIPFTIQLDYDTTDYTQPVSLGVDTGSKHIGISATTSEKEMYAADVELRNDIVDKLSTRREQRRTRRSRLRYRKARFNNRISSKRKGWLAPSVENKIQTHLTIVEKIHKFLPITNIVVETASFDIQKINNPSISGSEYQQGEQLDFFNVREYVLFRDNHICQHCKGKSKDKVLNVHHIESRKTGGDSPKNLITLCETCHKAYHRGDFELNVKRGKSFRDSAFMGIMRWSFYDRLKNIYPNVSMTFGYITKNARITNNLPKEHYVDARCISGNPMSKPLGYYFYQKKVRCQNRQIHKANFLKGGRKKLNQAPFLVKGFRLFDLVEYQKELYYIFGRRSSGSFDIRKLDGTKVNKGSINCKYLRLVDKRKSILIEKRMQVNL

SEQ ID NO: 13926 - protein, 451 aa, unidentified
VTTILKTCFAAFNLAKVVVLMDAWDIIVVLNKRGKPLMPCSPAKARLLLKEKKAIVKRRTPFTIQLTIATGETKQPVSLGVDAGYKHVGLSASTEKAELYASEVELRQDITDLLSARRALRQSRRNRKTRYRAPRFDNRIRTKRKGWLAPSVENRINAHLSRIEAVLRLLPVTKITVETASFDLQLLKNPDISGKEYQEGEQLGFWNIREYVLCRDGHVCQHCYGRSKDPVLNVHHLESRRTGGDSPGNLITLCETCHKALHRGEITLKAKRGQSFRAEAFMGIMRWEVHNRLRALHPGIEVSNTYGYRTKHARIANGIAKSHCADAFCIAGNFGAKRLGEFFFQKQTRRNNRQIHKLSILKGGIRKRNQAPFEVKGFRLFDKVACQGEEGFIFGRRSSGYFDVRKLDGTRISAGISCKKLHLLEKRRTYLTEIRKEEALPPLPEGRGLRA

SEQ ID NO: 13927 - protein, 415 aa, unidentified; identical to SEQ ID NO: 2674

SEQ ID NO: 13928 - protein, 412 aa, unidentified; identical to SEQ ID NO: 6913

SEQ ID NO: 13929 - protein, 477 aa, Acidithiobacillus sp.; identical to SEQ ID NO: 5650

SEQ ID NO: 13930 - protein, 502 aa, Flavonifractor sp.; identical to SEQ ID NO: 2616

SEQ ID NO: 13931 - protein, 494 aa, unidentified; identical to SEQ ID NO: 12763

SEQ ID NO: 13932 - protein, 494 aa, unidentified
MDMVYVLNKDGKPLMATTRGGRVRYLLKEKKARVVSSTPFTIQLNYDTPDATQDLILGIDPGRTNIGVAVVKEDGSCVFSAHLETRNKDVPLLMKKRAAFRRNHRTLDRRRKRQRRAKAAGTTIAEGSVERLLPGYEKPIMCHHIRNKEARFNNRSRPAGWLTPTANHLLQTHINLIAKVAKFLPITKVVVELNRFAFMAMDNPNIRRWEYQQGPLCGLGSVEDAVYAQQDGHCLFCKKPIDHYHHVIPRHKRGSETLANRCGLCAKHHDLVHTDKAWADKLVTRKEGMNKKYHALSVLNQIIPHLMEYIGSETLYDAYATDGRSTKGFRIAKNVPKEHYTDAYCIACSILDTDIEVSAPVEPFEMKQFRRHDRQACIRQMVDRKYILDGKVVATNRHKAIEQKSDSLEEFREAHGNAAVSQLTVKPHHPQCKDMARIMPGAVMVFDGAVGVFQGSSGRNNGTPNYYNSTKGERFLTRSCVLLAQNAGMVFIPA

SEQ ID NO: 13933 - protein, 426 aa, Lactobacillus sp.; identical to SEQ ID NO: 3294

SEQ ID NO: 13934 - protein, 465 aa, unidentified; identical to SEQ ID NO: 10277

SEQ ID NO: 13935 - protein, 393 aa, unidentified
MPCSPAKARLLLKEKKAIVVRRTPFTIQLTIATGESKQPVSLGVDAGYKHVGLSASTEKAELYASEVELRKDITDLLSARRALRQSRRNRKTRYRAPRFDNRIRTKRKGWLAPSVENRINAHLSRIEAVLRLLPITKITVETASFDMQRLKNPDISGKEYQEGEQLGFWNVREYVLFRDGHVCRHCHGRSKDPVLNVHHLESRRTGSDSPDNLITLCETCHKALHRGEITLKAKRGQSFRAQAFMGIMRREVLNRLKASYPELKVHETYGYLTKHARIANGIVKSHGADAFSIAGNLGAESSANSSSRSRLAETTGRFTNFPSSKGAFESAIRHPLRPKASVFLIRLPAREKKASFSAVDHPGLLMYESSTAPAFQPASAARSCVCWRRDGPI

SEQ ID NO: 13936 - protein, 420 aa, unidentified; identical to SEQ ID NO: 5136

SEQ ID NO: 13937 - protein, 529 aa, unidentified; identical to SEQ ID NO: 6786

SEQ ID NO: 13938 - protein, 419 aa, unidentified
MPTTRHGKVRRLLNSHLAKVVKRCPFTIQLLYQSTKEIQPVSLGVDAGSKHIGMAATTEKKVVYQEELSPRNDVVKLLSARRTLRRTRRNRKTRYRKPRFNNRVHSKHKGWLAPSVEVKIQEHITTIKRICQILPISEIQVETAEFDLRRLKAMKEGKPLPVGTDYQLGEQYDFYNTRQYVLHRDGYTCQCCGTHDNNIKLHVHHIESRQTGGDAPNNLIILCEHCHKALHEGKLELPKGKKRGKSYRDATFMGVMRKTLLERLKKEIDVPVEGTYGYITKYWRERAGLEKSHIHDAVCISKYPYAKPLDIYYLTKTVRHHNRQIHKSNFSKGGIRKRNQAPYLVKGFRLFDKVLYQGKEYFIFGRRATGYFDIRTLDGTKVNKGSISYKKLRIQDTAKAYLKEARAIPHMNKFTCVLA

SEQ ID NO: 13939 - protein, 420 aa, unidentified
MQYVYVLNKHGEPLMPCSPGKARILLKQQKACVVKRTPFTIKLLYGSTGYKQPITLGVDAGSKHVGLSASTEKRELYSEEFTPRNDVVELLSTRRQNRRSRRNRKTRYRAPRFNNRVHSKHKGWLAPSVEVKIQEHITVIKRICRILPITLVRVETAEFDTQRLKAMLAGKPLPVGTDYQLGEMYDEYNVRQYVLKRDNYTCQCCGAHTTAKKTVKLHVHHLESRKVGGNAPSNLITLCTTCHNNLHKGKITLDGKKRGKTLRDAAFMGIMRNTLLTRLRNELNIPVQNTYGYITKLLREQNDIKKSHVNDARCISKHPLAKPCSVCYRTKAIRHHNRQIHKAKILKGGIRKANQAPYIVKGFRLWDKVLYNEQECFISGRRSSGYFALRKFDGTTITNSISFKKLRLLEPATNYLIERK

SEQ ID NO: 13940 - protein, 422 aa, unidentified; identical to SEQ ID NO: 5333

SEQ ID NO: 13941 - protein, 420 aa, unidentified
MQYVYVLSKHGEPMMPCSPGKARLLLKQQKACVVRRTPFTIKLLYGSAGYKQPITLGVDAGSKHVGLSASTEKRELYREEFTPRNDVVELLSTRRQNRRSRRNRKTRYRAPRFDNRVHSKHKGWLAPSVEVKIQEHITVIKRICKILPISLVRVETAEFDTQRLKAMLAGKPLPVGTDYQLGEMYDEYNVRQYVLKRDNYTCQCCGAHTTAKKLVKLHVHHLESRKTGGNAPSNLVTLCTTCHKNLHKGKVTLDGKERGKPLRDAAFMGIMRKTLMARLKEELPIPVQGTYGYITKMRREQNDIKKSHTNDARCISKHPLAEPCSVCYRTKAIRHHNRQTHKANFSKKGIRKRSQMPYLVEGFRLWDKVLYKGQECFVSGRRSSGSFALKKLDGTSISKGVTFKKLRLLEPATNYLIERM

SEQ ID NO: 13942 - protein, 442 aa, unidentified; identical to SEQ ID NO: 2903

SEQ ID NO: 13943 - protein, 460 aa, Fischerella sp.; identical to SEQ ID NO: 9149

SEQ ID NO: 13944 - protein, 430 aa, unidentified
MPKVYVLNRHGRPLMPCTPAKARHLLDAGKAKVRHRTPFTIQLLYGSTDYTQEVILGVDAGSKTIGLSAATETEELFSAEVKPRNDVVELMSARRQFRRARRNRTTRYRKPRFDNRVRSKHKGWLAPSVEVKIQEHMTAIRRACAILPVSKVVVETAEFDLQLLKAVAEGKPVPQGEDYQKGEMYGHYNVRQYVLWRDSYTCRICGAHGSVRKGVPLHVHHLESRRVGGDAPDNLVTLCTACHDKLHKGIIMVADIKKRKRRSTRDTTFMGIMRMTLLRRLWEQLPVPVVETRGYITKATRENLLVLPKSHTNDALAIAHGPQGFRAEYLPNIRQADRLYTIRPVRHHNRQLHKATILKGGVRKANQAEKYICGFRLYDKVLYNGIECFVWGRRTSGSFLLRQLNGEKVKDGVSYKHLKLLERSQSYLVA

SEQ ID NO: 13945 - protein, 424 aa, unidentified
MRVFVFNMRGVPLMPCTQRKARILLKEGKAVIYKYNPFTIQLTHATGENTQDCHVGIDTGAKHVGVAITSEGKVLFKGEIELRQDVKSNLDTRRIYRRSRRNRKTRYRQPRFLNRRKADKWLPPSLQNRLDHTFHWIDTLRGLVPSPTLHIEVGKFDTAKMIDPEIHGVDYQHGQTYGFFDERYYVFARDNYTCQCCGKSKGKILQTHHIIYRSNGGTDRADNLITVCTDCHTSKNHQKGGILYKWQEQHKKVRQYKEPPFMNTLRRRIFAKYPDAAITYGSETTPKRKEKGLDKTHYNDAIIISGVQTISENPDEWLFIRQFRKKKRSLHEGTPRKGRKESNRTQKRNSKNTPYYRGYHLNDKVRVLGKTGYISGFTGGAAYVKDSDNQYITLPNKSYKQVGISNLQHVCHNNNWQYITKTTA

SEQ ID NO: 13946 - protein, 477 aa, unidentified; identical to SEQ ID NO: 8085

SEQ ID NO: 13947 - protein, 422 aa, Parasutterella excrementihominis
LNKRGKPLMPCSPAKARLLLKEKKAIVKRRTPFTIQLTIATGESKQPVTLGVDAGYKHVGLSASTEKAELYASEVELRQDVSDLLSARRALRQSRRNRKTRYRAPRFNNRLCTKRKGWLAPSVENRINAHLSRIEAVLRLLPVTKITVETASFDMQLLKNPDISGKEYQEGEQLGFWNIREYVLCRDGHVCQHCYGRSKDPVLNVHHLESRGTGGDSPGNLITLCETCHKALHRGEITLKAKRGQSFRAEAFMGIMRWEVHNRLRALHPGIEVSNTYGYRTKHARIANGIAKSHCADAFCIAGNLGAERLCEFFFQKQTRRNNRQIHKLSILKGGIRKRNQAPFEVKGFRLFDKVAYKGEEGFIFGRRSSGFFDVRKLDGTRISAGISYKKLHLLEKRRTYLTEIRKEEALPPLPEGRGLRA

SEQ ID NO: 13948 - protein, 419 aa, Eubacterium hallii
MVYVISQDSKPLMPCSNPIARLLLKQGKAKVKRREPFTIKLIYETTGYTQDLTLGVDTGSGTIGTAVSKDNGDIVYMSEVVVRNDITDKMTQRAKYRRNRRNRKTRYRKARWLNRSNSIKKDRFSPTMQSKLHSHVREIEYIQSILPITEMVFETGQFDMHLMKNPSLANPKVRPWGYQKGTNYGFENTKAMVLNRDNYTCQCCKGKHKDSKLEVHHIVFRSQGGSDEESNLITLCHTCHKDLHSGKINLKLSGKVKGNLKYATQMNSIRKQLFRLYPNAIETFGYVTKANRLHLGVDKEHYYDACTIATQGNAFNVKSNLYKKKCISDGDFQKTKGIRSEQAIVTDKICGFRKFDKVRYFGNDYFIKGRMSAGYAILMDIDGNKIDFSTMPRGYKTPKLSNCKRITARSTVMTQVKVV

SEQ ID NO: 13949 - protein, 422 aa, unidentified; identical to SEQ ID NO: 5333

SEQ ID NO: 13950 - protein, 440 aa, unidentified
MPTNSYRARRLLKSKRAVIYRYRPVFTIKLVDRTNGYTQPIEYKCDTGYQNIGISICSDTKEFVNEQRDLLKDEVKRHSDSRKYRRTRRNRLRYRKKRFDNRRGVISRDGFAPSIRNKRDVHVRLYEEYYKVFPITKAVFEMGQFDTQVLKAVEAGLPVPEGTDYQRGEQYGYATLREAVFARDSYTCICCGKSAIKDGVKLRIHHIGYLSGDRSNRMANLGSVCENCHTSKNHKPGGKLYNLKPKLKTFKGATFMTMVRYSMVKQLKAATPDVDIRVTYGAATKLARKALNVKKTHSNDAYCMGEFHPKHRSNFKHHRKCRRNSRVLSKFYDAKYMDLRNSSIKKGSQLACGRTNRRIPRHTELNERIYRGHKISKGKLVVRRQHYQYRPGDTVWAEGKRCTVKGIISNGTRIALNERNPVSVNKIDKTVHTGGWAKAS

SEQ ID NO: 13951 - protein, 436 aa, Deinococcus sp.; identical to SEQ ID NO: 9112

SEQ ID NO: 13952 - protein, 419 aa, Geobacillus sp.; identical to SEQ ID NO: 4579

SEQ ID NO: 13953 - protein, 411 aa, unidentified; identical to SEQ ID NO: 2663

SEQ ID NO: 13954 - protein, 452 aa, unidentified
MVYVLNISGQPLMPTDNCAKVRILLKSGKARVVRRCPFTIQLMYDTTSYTQEIALGVDSGSRHIGLSVTTKDKVLFESDVELRNDIADLLSTRRQNRRARRSRKTRYRKQRFSNRKRKDGWLAPSVQNKVDTHLTAIRRVHEILPVSRIIVEVASFDIQKIKNSDISGTEYQQGEQMGFWNVREYILFRDGHECQCCHGRSGDKILNVHHIESRKTGGNAPNNLITLCETCHTGYHNGTVKLPKTIHRGMTFRDAAFMGIMRWVLYDKLKVIYPDVHLTYGYITKSIRIENGLPKDHYIDARCISGNSNAKSDGTMYCQKKVRCHNRRIHKNGILKGGIRKRNQAPYEVMGFRLFDKVKWKGRKCFIFGRRSTGRMDLRLLDGTKVNASVGYKNLHLLEMRKNMLVEERRKAVPPTGKPVGFPARHLWQRHKIDKGILKNEKGLFFLLYCLS

SEQ ID NO: 13955 - protein, 423 aa, unidentified; identical to SEQ ID NO: 3951

SEQ ID NO: 13956 - protein, 451 aa, unidentified; identical to SEQ ID NO: 9425

SEQ ID NO: 13957 - protein, 427 aa, Alicyclobacillus sp.; identical to SEQ ID NO: 2399

SEQ ID NO: 13958 - protein, 415 aa, unidentified; identical to SEQ ID NO: 6534

SEQ ID NO: 13959 - protein, 494 aa, unidentified
VCGAVSSPQKEIYEGICHRQEWLGTGAYNPKESQTPAKKRKAVIEHRQPFTIRLKYKTGCASEHLKCGVDTGSQHIGTSLISPECKRVLDKSEYELRSTMEKRTLMEIRREYRRGRRFRKTRYRHPKYKPHTKRVYVEKPVTYRKHLTHWKKQVNTFASSREEGWLPPSIRSKLDQHILLIRRYQQALPPKTIVRIEVGRFDIQHMMDPSIRGEMYQRSPMYESENIKAYIFTRDNYQCQCCGKKAGVVRKDGTTVKLKVHHVDFQSKGATDNPSRLASVCDKCHTEAAHKPGGVLYGWMIEGKKFSRGYRDATFMNIIRKRLREEFPDAEFTYGNITAADRKILKLEKTHGNDAVAIAAHGMNTVDNTEETTYYRQLRKQKRSLHEANPRKGRKEPNRLAARNRKNTCVAGGRYLNDKVKVLDQIGWISGFSGNSSVYVKNREGEYISMPGKGYKMVPISQTKLITHCNNWAVYTKCDKPLSGQNDAFISAIE

SEQ ID NO: 13960 - protein, 422 aa, unidentified; identical to SEQ ID NO: 5333

SEQ ID NO: 13961 - protein, 440 aa, unidentified
MPTNSYRARRLLKLKRAVIYKYRPVFTIKLVDRTNGYTQPIEYKCDTGYQNIGISICSDTKEFVNEQRDLLKDEVKRHSDSRKYRRTRRNRLRYRKKRFDNRRGMISKDGFAPSIRNKRDVHVRLYEEYYKVFPITKAVFEMGQFDTQVLKAVEAGLPVPAGTDYQRGEQYGYATLREAVFARDNYKCICCGKSAIKDGVKLRIHHIGYLSGDRSNRMANLGSVCESCHTSKNHKPGGKLYNLKPELKTFKGATFMTTVRYSMVKKLKAATPDVDIRVTYGAATKLARKDINVKKTHSNDAYCMGEFHPKHRSDFKHYRKCRRNSRVLSKFYDAKYRDLRDGSVKTGSQLSCGRTNRKISRHTELDGRIYRAHKISRGRVSIRRQHYSLRPGDKVLYDGKAYFVTGMQNSGTRVKLTNRKVCSLKKVHVLQHCNAWTAVI

SEQ ID NO: 13962 - protein, 442 aa, unidentified; identical to SEQ ID NO: 12673

SEQ ID NO: 13963 - protein, 442 aa, unidentified; identical to SEQ ID NO: 4522

SEQ ID NO: 13964 - protein, 420 aa, unidentified
MQYVYVLSKHGEPMMPCSPGKARLLLKQQKACVVKRTPFTIKLLYGSAGYKQPITLGVDAGSRHVGLSASTEKRELYREEFAPRNDVVELLSTRRQNRRSRRNRKTRYRAPRFDNRVHSKHKGWLAPSVEVKIQEHITIIKRICKILPISLVRVETAEFDTQRLKAMLAGKPLPVGTDYQLGEMYDEYNVRQYVLKRDNYTCQCCGAHTTAKKLVKLHVHHLESRKTGGNAPSNLITLCTTCHKNLHKGKVTLDGKERGKPLRDAAFMGIMRKTLMARLKKELPIPVQGTYGYITKMRREQNDIKKSHTNDARCISKHPLAEPCSVCYRTKAIRHHNRQTHKANFSKKGIRKRSQMPYLVEGYRLWDKVLYKEQECFVSGRRSSGSFTLKKLDGTSVSKGVTFKKQRLLEPATNYLIERM

SEQ ID NO: 13965 - protein, 570 aa, unidentified
  source 1..570: note = Candidatus Collierbacteria bacterium
MKQSKQSNKKFKAQALNSKEKSALDILGLRPDLVYQAQESMPKGIATPEGVTTTFKITSKDALRDDNSSPGPCKNETSKALTKAERLAKATERQLTEAQRNLNIVEENIASKATVPSREIARKGIHTQGRVLVIGQDSNPCMPCNPARARKLLKAGKAKIHLYFPFVIQLNYSPTGTQPVQLKGDPGTRTTGICLNILTQRGWRTVWAMHLVHHPDDIRNSLTKRRSQRNGRRSRNTRYRPPRWNNRKRAKGWLAPSLMTNVINLVTWVKRLKKHAPVTQITIEDVKFDTQLMQNPDISGLEYQYGTLHGTDVREHTFWKCNYTCSYCGKKNVPLTVDHIKSQSPRTPDRQAGTNTPSNLTAACKPCNQEKSNYSVEEFAIMRGVKSFPLLKINNEKNLKAVGISNSIRLRIIEETKKATRINPELGSGGRTKFNRENQKYPKTHFIDAACAGESGAKVSLNPNMQIYIVKACSRNARRMQQPDSFGFPKGKAKEFSCIHGVRTGDIGKAVVTKGKNKGTWIGRISIRSTGTFKVGNKDGVNYKKIKVIQRNNGYSYNFAYPPLFQNPKP

SEQ ID NO: 13966 - protein, 413 aa, unidentified; identical to SEQ ID NO: 5965

SEQ ID NO: 13967 - protein, 414 aa, unidentified
MPCSPAKARLLLKEKKAIVKRRTPFTIQLTIATGETKQPVSLGVDAGYKHVGLSASTEKAELYASEVELRQDVSDLLSARRALRQSRRNRKTRYRAPRFNNRLRTKRKGWLAPSVENRINAHLSRIEAVLRLLPVTKITVETASFDTQLLKNPDIAGKEYQEGEQLGFWNVREYVLFRDGHVCQHCYGRSKDPVLNVHHLESRRTGGDSPGNLITLCETCHKALHRGDITLKAKRGQSFRAEAFMGIMRWEVLNRLKASHPELEVNNTYGYRTKHARIANDIAKSHCADAFCIAGNLGAERLGEFFFQKQTRRNNRQIHKLSILKGGIRKRNQAPFEIKGFRLFDKVVCKGEEGFIFGRRSSGYFDVRKLDGTRISAGISCKKLHLLEKRRTYLTEIRKEEALPPLPEGRDLRA

SEQ ID NO: 13968 - protein, 292 aa, unidentified
LSRIEAVLRLLPVTKITVETASFDLQLLKNPDISGKEYQEGEQLGFWNIREYVLCRDGHVCQHCYGRSKDPVLNVHHLESRRTGGDSPGNLITLCETCHKALHRGEITLKAKRGQSFRAEAFMGIMRWEVHNRLRALHPGIEVSNTYGYRTKHARIANGIAKSHCADAFCIAGNLGAERLCEFFFQKQTRRNNRQIHKLSILKGGIRKRNQAPFEVKGFRLFDKVACQGEEGFIFGRRSSGFFDVRKLDGTRISAGISYKKLHLLEKRQTYLIEIRKEEAFPPLPEGRGLRA

SEQ ID NO: 13969 - protein, 408 aa, unidentified
MVYVQDINGKPMMPTTRHGKVRRLLKDKKAVVVNLCPFTIRLTYVTSDYKQEIVLGVDAGTKHVGLSATTKSKELYSSEVILRSDIVDLLSTRRELRKTRRNRLRYRKPRFDNRVKSKRSGWIAPSVKYKIDAHIRIVDNVCSIPPISRIVIEVAQFDTQKIKNPNISGKEYQEGDQLGFWNVREYVLARDGHKCQYCKGKSKDKILNVHHIESRKTGGDSPYNLITLCETCHKEYHKGNIDLKIRRGKSLRDAAVMGIMKWRLYEELKSKYDNISMTFGYVTKYNRIKHGIEKSHVSDAFVISKNFNAIRLGYYYKVRLVRRHNRQIHKQKIPKGGVKRLNQSPFEVFGFRLFDRVMFENSYYFIFGRRKTGRFNIRDIDGKNQRDITYKKLKLSRCKCFMVQNEMN

SEQ ID NO: 13970 - protein, 414 aa, unidentified
MPCSPAKARLLLKEKKAIVVRRTPFTIQLTIATGEAKQPVSLGVDAGYKHVGLSASTEKAELYASEVELRQDVSDLLSARRALRQSRRNRKTRYRAPRFNNRLRTKRKGWLAPSVENRINAHLSRIEAVLRLLPVTKISVETASFDMQLLKNPDIAGKEYPEGEQLGFWNVREYVLFRDRHVCQHCYGRSKDPVLNVHHLESRRTGGDSPGNLITLCETCHKALHRGDITLKAKRGKSFRAEAFMGIMRWEVHNRLRALHPGIEVSNTYGYRTKHARIANGIAKSHCADAFCIAGNLGAERLCEFFFQKQTRRNNRQIHKLSILKGGIRKRNQAPFEVKGFRLFDRVACQGEESFIFGRRSSGFFDVRKLDGTRISAGISCKKLHLLEKRRTYLTEIRKEEALPPLPEGRGLRA

SEQ ID NO: 13971 - protein, 414 aa, unidentified
MVYVLNMDGQPLMPTNRCGKVRHLLKDGMAEVVKRCPFTIKLLYRSTNYTQPVTLGVDAGSKHIGLSATTEDKELFASDVELRNDIVDLLSTRRQNRRGRRSRKTRYRKPRFLNRTGNRKSGWVAPSIENKIQTHLTVVDKVCRMLPVSKIVVETASFDIQKIKNPDICGTEYQQSEQLNFWNVREYVLFRDGHKCQCCKGKSKDKILNVHHIESRKTGGDAPNNLITLCETCHTGYHKGTVKLPKTIHRGMVFRDAAFIGIMRWAFYNELKRRYPNVSHTYGYITKNIRIENNLPKYHYIDARCISGHPLAEPSEEVFYQKKVRCHNRQIHKNTIGKGGYRKRNQAEYIVKGFRLFDKVSYKGQECFIFGRRSSGSFDIRLLDGTKISAGVTYKKLRLSQTRGSFLIERRLVG

SEQ ID NO: 13972 - protein, 417 aa, unidentified
MPCSPAKARLLLKEKKAIVKRRTPFTIQLTIATGEARQPVTLGVDSGYKHIGLSATTEKAELYASEVELRQDITDLLSARLALRRSRRSRKTRYRAPRFDNRVASKREGWLAPSVENRIAAHMLRVEAVMRVLPVTAITVETAAFDTQLLQNPDIAGEAYQQGEQLGFWNVREYVLFRDGHVCQHCRGKSKDPILNVHHIESRRTGGDAPNNLITLCETCHKAFHRGEIKLKVKRGKSFKAETFMGIMRWTLFERLKKAHPELRVRNTYGYLTKHKRISHGIAKSHCADAYCIADNLGAKRLEGFFFQKQTRKHNRQIHKLSILKGGLRKKNQAPYEVKGFRLFDKVICKGEEAFIFGRRTSGSFDVRRLDGTRISAGINYKKLRLLEPRTTYLTEFRKEAALPHLHECRGFRAEFL

SEQ ID NO: 13973 - protein, 434 aa, Lactobacillus sp.; identical to SEQ ID NO: 13643

SEQ ID NO: 13974 - protein, 451 aa, unidentified; identical to SEQ ID NO: 12558

SEQ ID NO: 13975 - protein, 406 aa, unidentified; identical to SEQ ID NO: 9290

SEQ ID NO: 13976 - protein, 398 aa, unidentified
MVYVQDIDGKPMMPTTRHGKVRRLLKANKATVVNLCPFTIRLTYATSGYKQEIVLGVDAGTKHVGLSATTKSKELYSSEVILRSDIVELLSTRRELRRTRRNRLRHRKPRFGNRVKSKHHGWVAPSVRHKVDAHIRVIDNICSTLPISRIIVEIAQFDTQKIKNPDISGNEYQEGDQLGFWNVREYVLARDGHKCQHCKGKSKDPILNVHHIESRKTGGDSPSNLITLCETCHKEYHKGNIDLKVKRGKSLRDAAVMGIMKWKLYEELKSRYPNVSMTFGYITKYNRIKYGIEKYHISDAFVISKNFNALRLEYHYKVRLVRRHNRQIHKQKVLKGGAKKPNQSPFEVFGFRLFDRVMFEGNYYFIFGRRKSGSFNIRDINGGNQRNVTYKKLKLSIG

SEQ ID NO: 13977 - protein, 407 aa, unidentified; identical to SEQ ID NO: 7371

SEQ ID NO: 13978 - protein, 462 aa, Burkholderia sp.; identical to SEQ ID NO: 7523

SEQ ID NO: 13979 - protein, 310 aa, unidentified; identical to SEQ ID NO: 11637

SEQ ID NO: 13980 - protein, 431 aa, unidentified; identical to SEQ ID NO: 4306

SEQ ID NO: 13981 - protein, 431 aa, unidentified
MPNKVYVINKHGRPLMPCSPAKARHLLDEGKAKIKKRTPFTIQLVYGSSGYTQEVILGVDAGSKTIGMSVSTTKEELLSAEVKPRNDVVDLQSTRREFRRARRNRKTRYRKPRFDNRVRSKRKGWLAPSVEVKIQEHITAIRRVCGILPVSKVVVETAEFDLQLLKAIEEGKPVPQGEDYQKGEMYGYYNVRQYVLWRDNYTCQCCGAHATKKKEVRLHVHHLESRKSGGDAPGNLVTLCDSCHEKLHKGLITEDDFKKRKRKSTRDATFMGIMRKTLIQRLRAELTIPVAETRGYITKATREKLLVLPKSHTNDAQAIAQGKQGFNVGYLPGILQIDKIYTIRPVRHHNRQLHKATILKGGIRKSNQAEKYVFGYRLFDKVQFNGQDCFIWGRRTTGIFTIKTINGKMIKDGISFKKLKLVEKSTSYLIA

SEQ ID NO: 13982 - protein, 418 aa, unidentified; identical to SEQ ID NO: 7351

SEQ ID NO: 13983 - protein, 458 aa, Desulfobacter sp.
MKVYVKSQSGKWLMPTNPANARILLKKGKAKVLQRTPFVIQLLYETTEHVQTVTVGIDDGGIQVGIAAVSRGKVLFQEELTLRSDIKSKLDTRRQYRRSRRYRKTRYRKARFLNKKQSLPTCKVCGGNAPASQVICRSCLNRADGVHQKYAGIKKSMFRIPPSIRAKKDAIIRVVKQMPLPISRIVLEDLYFDFQAMENPDISGEQYQHGDLLYHKNFKQACLVRDKFRCRVCGAQTKLQCHHIRPRAKGGTDKLSNLMTLCDVCHDRHHKERLQLPKQKSSFYMSAAHVQQGKHYLQRELSKTAPLSTTFGYITGHHRNRAGIEKSHVNDAVVIADKKAIPFDGYIKTNHVQSRKRSLHESTARKGRKSPNRTQNRNNKNVFTLKGFTRWDTVQYKGCVGFISGFTGRSSCRIIDIHGEYIKNPEKKYTQVNLREVRKIHGNRSTVRYYANSSPTES

SEQ ID NO: 13984 - protein, 465 aa, unidentified; identical to SEQ ID NO: 3070

SEQ ID NO: 13985 - protein, 430 aa, unidentified
MPKVYVLNRHGRPLMPCTPAKARHLLDAGKAKVRHRTPFTIQLLYGSTGYTQEVILGVDAGSKTIGLSAATETEELFSAEVKPRNDVVELMSARRQFRRARRNRTTRYRKPRFDNRVRSKHKGWLAPSVEVKIQEHMTAIRRACAILPVSKVVVETAEFDLQLLKAVAEGKPVPQGEDYQKGEMYGHYNVRQYVLWRDSYTCRICGAHGSVRKGVPLHVHHLESRRVGGDAPDNLVTLCTACHDKLHKGIIMAADIKKRKRRSTRDATFMGIMRMTLLRRLREQLPVPVVETRGYITKATRENLLVLPKSHTNDALAIAHGPQGFRAEHLPNIRQADRLYTIRPVRHHNRQLHKATILKGGVRKANQAEKYICGFRLYDKVLYNGIECFVWGRRTSGSFLLRQLNGEKVKDGVSYKHLKLLERSQSYLVA

SEQ ID NO: 13986 - protein, 454 aa, Anoxybacillus sp.
ASVLHITSIYNMVEENMTCFMQRKGENPMVFVLDTNKRPLAPCHEAVARKLLKQGKAAIYRRFPFTIILKKSVDESEIKATYRLKIDYGSRHTGLAILRGQEVVWLGQLDHRTDIKERIDKRRAFRRARRNRKTRYRKPRFLNRKRKEGWLPSSLESRVQNIQTWVNRLKKLCPIGYISYENAKFDTQLMRNPEINGVEYQQGTLQGYEVREYLLEKFGRKCCYCGKENVPLEVEHIIPKSRGGTDRVDNLCLACHDCNQRKGSKTAEEFGYPHIQKQVKESLKDASAINSTRWKAYEVLKQTGLDVECGTGARTKMNRIRLDLPKTHYFDACCVGESTTNHLYFKTKEVLFIKAKGRGSHSRTNLDRYGFPRGYLARQKFFFGFQTGDMVKAVVPRGKYQGVWFGEVACRKTGSFDIKGKDGKRIAQGINYRYVQVIQRFDGYAYGKGVAELA

SEQ ID NO: 13987 - protein, 431 aa, unidentified
MPNKVYIINKHGRPLMPCSPAKARHLLDEGKAKVKKRTPFTIQLIYGSSGYTQEVILGVDAGSKTIGMSASTTKEELLSAEVKPRNDVVDLLSTRREFRRARRNRKTRYRKPRFDNRVRSKHKGWLAPSVEVKIQEHITAIRRVCGILPVSKVVVETAEFDLQLLKAIADGKPVPQGEDYQKGEMYGHYNVRQYVLWRDGYTCQCCGAHATKKKEVRLHVHHLESRKVGGDAPDNQVTLCESCHEKLHKGLIAEKDFKKRKRRSTRDATFMGIMRKTLMQRLCSELPIPVVETRGYITKATREKLLVLPKSHTNDALAIAQGKQGFNVGYLPEIAQIDKIYTIRPVRHHNRQLHKATILKGGIRKSNQTEKYVFGYRLFDKVQFNGQDCFIWGRRTTGIFTIKTINGKMIKDGISFKKLKLVEKSTSYLIA

SEQ ID NO: 13988 - protein, 339 aa, unidentified
LLSARRALRQSRRNRKTRYRAPRFDNRIRTKRKGWLAPSVENRINAHLSRIEAVLRLLPITKITVETASFDTQLPKNPDIAGKEYQEGEQLAFWNVREYVLFRDGHVCQHCHGRSKDPVLNVHHLESRRTGGDSPGNLITLCETCHKALHRGEIKLSAKRGQSLRAEAFMGIMRWEVLNRLKLSHPELEVNNTYGYRTKHARIANGIAKSHCADAFCIAGNLGAKRLGEFFFQKQTRRNNRQIHKFSILKDGIRKRNQAPFEVNGFRLFDKVACQGEEGFIFGRRSSGYFDVRKLDGTCISAGISYKKLHLLEKRRTYLTEIRKEKALPPLPGGSGLRA

SEQ ID NO: 13989 - protein, 493 aa, unidentified; identical to SEQ ID NO: 3154

SEQ ID NO: 13990 - protein, 427 aa, Enterococcus sp.; identical to SEQ ID NO: 2410

SEQ ID NO: 13991 - protein, 430 aa, unidentified
MPNKVYVINKHGRPLMPCSPAKARHLLDAGKAKVKKRTPFTIQLVYGSSGYTQEVILGVDAGSKTIGMSASTTKEELLSAEVKPRNDVVDLLSTRREFRRARRNRKTRYRKPRIDNRVRSEHKGWLAPSVEVKIQEHITSIKRVCRILPVSKVVIETAEFDLQLLKAIADGKPVPQGEDYQQGEMYGHYNVRQYVLWRDNYTCQCCGAHATKKKEVRLHVHHLESRKVGGDAPDNQVTLCESCHEKLHKGLITAKDFKKRKRKSTRDATFMGIMRKTLMQRLCSELPIPVIETRGYITKATREKLLVLPKSHTNDALAIAQGKQGFNVGYLPGIVQINKIYTIRPVRHHNRQLHKATILKGGIRKSNQAGKYVFGYCLFDKVQFNGQDCFIWGRTTGIFTIKTINGKMIKDGISFKKLKPVEKSTSYLIA

SEQ ID NO: 13992 - protein, 413 aa, unidentified
LKVFVLNMRGKPLMPCSPAKARHMLKAGKAFVVRRTPFTIKLTIATGETKQDVTLGVDAGARHVGISATTEKEEVFASEVALRQDITGLLADRLAFRRARRNRKTRYRAPRFNNRVRSKHKGWLAPSVENRIQAHMSRIEAVCRLLPVTKIVIETASFDIQKIRNPEVEGTGYQQGDQLGFWNVREYVLFRDGHICQHCRGRSKDPILNVHHLESRKTGGDAPNNLITLCETCHKAYHAGKIKLKVKRGQSFRAEAFMGIMRWTLLDRVRKTHPKLPVENTYGYLTKHKRIALGLPKTHCADAFCIAGNLKALRRGDFLFQQQTRKHNRQIHRCSILKGGVRKLNQAPFLVKGFRLFDKVRIGGQIGFVFGRRVRGIFNIRRLDKTVIGTDINCKKLSLLETRKTFLTELRKE

SEQ ID NO: 13993 - protein, 304 aa, unidentified
LAGAICGGQDPGAYHQYQAGFELLPIGKVVVETAEFDLQLLKSIADGMPVPQGENYQKGEMYGFYNVRQYVFFRDGYTCQCCGAHGKGIKFHTHHLESRKTGGNAPDDLVTVCDKCHKAFHAGLITDAKLKKRRRKSTRDAAFMGIMRKTLLQRLRAELPIPVVETRGYITKATRERLLKLPKSHTNDALAIAMGRHGFGIKEVTYMPQSDRIYQIKPVRHHNRQLHKAIPKKGGRRQRSQGPKYVQGFRRFDKVLYRGQECFIWGLRTRGYFQLKLLNGTKVHESAKASELILLEHRSGYLIA

SEQ ID NO: 13994 - protein, 420 aa, unidentified
MQYVYVLNKHGEPLMPCSPRKARLLLKQKKAYVIKRTPFTVKLLYGSAGYKQPVTLGVDAGSKHIGISATTEKHELYREEATPRNDVVDLLSARRAFRRSRRNRKTRYRAPRFNNRVHSKHKGWLAPSVEVKIQEHITLIKHACCILPVTLVRVETAEFDTQRLKAMLEGKPLPVGTDYQLGEMYDEYNVRQYVLKRDNYTCQCCGAHSTKTKGVKLHVHHIETRRTGGNAPNNLITLCKACHKALHAEKVTLDGKKRGKPLKDAAFMGIMRKTLMERLLKELKIPVQETYGYITKYLREKHSIPKSHTNDARCISKNPLAIPCDTCYYTKAIRHHNRQLHKATILKGGIRKANQAPYTVKGYRLWDKVAYNGTECFITGRRTSGYFALKKLDGTVASNSISYKKLRLLEAATNYIIERK

SEQ ID NO: 13995 - protein, 431 aa, unidentified; identical to SEQ ID NO: 5579

SEQ ID NO: 13996 - protein, 458 aa, Anoxybacillus sp.
MVEENMTCFMQRKGENPMVFVLDTNKRPLAPCHEAVARKLLKQGKAAIYRRFPFTIILKKSVDESEIKATYRLKIDYGSRHTGLAILRGQEVVWLGQLDHRTDIKERIDKRRAFRRARRNRKTRYRKPRFLNRKRKEGWLPSSLESRVQNIQTWVNRLKKLCPIGYISYENAKFDTQLMRNPEINGVEYQQGTLQGYEVREYLLEKFGRKCCYCEKENVPLEVEHIIPKSRGGTDRVDNLCLACHDCNQRKGSKTAEEFGYPHIQKQVKESLKDASAINSTRWKAYEVLKQTGLDVECGTGARTKMNRIRLDLPKTHYFDACCVGESTTNHLYFKTKEVLFIKAKGRGSRSRTNLDRYGFPRGYLARQKFFFGFQTGDMVKAVVPRGKYQGVWFGEVACRKTGSFDIKGKDGKRIAQGINYRYVQVIQRFDGYAYGKGGRNLRKVQFLVVPKGRGFLA

SEQ ID NO: 13997 - protein, 341 aa, unidentified
LLSTRRESRRARRNRKTRYRKPRFDNRVRSKHKGWLAPSVEVKIQEHITSIKRVCRILPVSKVVIETAEFDLQLLKAIADGKPVPQGEDYQKGEMYGHYNVRQYVLWRDNYTCQCCGAHATKKKEVRLHVHHLESRKTGGDAPGNLVTLCDSCHEKLHKGLIAEKDFKKRKRRSTRDATFMGIMRKTLMQRLCSELPIPVVETRGYITKATREKLLVLPKSHTNDAQAIAQGKQGFNVGYLPGILQIDKIYTIRPVRHHNRQLHKATILKGGIRKSNQTEKYVFGYRLFDKVQFNGQDCFIWGRRTTGIFTIKTINGKMIKDGISFKKLKILEKSTSYLIA

SEQ ID NO: 13998 - protein, 518 aa, unidentified
LANLKLIDELLEKTEYIYVLGTDGKPQMPTNRKVRVRSLFKSGLAKIVDTVPFTIRLLYENDAVLQPITIAEDPGRTNIGAAVLTQLGDLVFSAVVETRNKSIKKLMSDRKAYRQASRRGERKARQRLAKRHGSMIKAGMIMRKLPQYAADKFVTCKIIKNTEARFCNRKRMPDWLTPTVNHLVQTHINLIKKVEKYLPITDVAIEVNRFAFMQMENPDASGVDFQNGPLKGFDDVKAAICEQQHGKCLMCKNDIEHFHHIVPRSKGGSDTIQNQAGLCKKCHAKVHTDAEFQAKFKDKKEGLIKKYGALSALNQAIPFICKELLEIYSVEHVHFCTGKDTSLIRSSLGYEKTKDNQMHEVDAYCIGLAAIGADKAKRPDFNNVFKIKQFRRQDRQLVHYQKERTYYLDGKKIATNRNPRFEQKGDALSDWYKEQIKIYGQYEAEKMRSRLTVKKSKRSYNTTKRLMPGCVFYYDGQRHVMTGQSSYGRYLRAYNCGTKDFPASKCQVIQFNAGLVFV

SEQ ID NO: 13999 - protein, 464 aa, unidentified; identical to SEQ ID NO: 6574

SEQ ID NO: 14000 - protein, 544 aa, unidentified
MKQKKQKVMVYILNKKGKPLMPTTRCGHVRKLLDSKKAVVVNSNPFTIRLKYDTPNGVQDVFAGIDSGRENIGSGASNEDGDCLYLGELRTSNKSIKMKMTERVGFRRERRKHDRQNKQRKARKDHTEIQNGKDDICRATISCKSVQISYPTAEESVTHKIIRGKEGKFANRHRDGDWITPSARQLVQMHMNDLKSICKILPISHVTLERVAFDFQKLENENIKVWEYGKGKLYGYDSPEEYIHDVQDGKCLVCGKPHIDYLHHIIPRSKGGSDKVSNIAGLCYDCHYGPIGVHNCQDTQDRLPELKNEVNKQYKVSLLNSVMPVLIEEIDKFCKANSIMFSICEGHDTAKVRDMYDLQKDHCLDGFAISLVGRNVKSVDVMPDRIHQKQRYKKKSKNIIQKRNYREYYDDKKLVAINRHKGTDQKADSLEEYMNTYAETHTADECKMHFESLTVKPARRTYTFHKEGRICPLHIGDKVRYEKKNKIKGNTKVDTFICEGIYFSKDENKAKVEHNKTKSKKMKFCRAIESGCIPYIDYIKLALI

SEQ ID NO: 14001 - protein, 419 aa, unidentified
MVYVINKQGQALMPTERFGKVRRLLKNSLAHVVCRIPFTIQLDYDTTDYTQPVSLGVDAGSKHIGISATTSEKELYAADVELRNDIVDKLSTRRELRRTRRSRLRYRKARFNNRVSSKRKGWLAPSVENKIQTHLTVVEKIHKFLPITNIVVETAAFDIQKINNPSISGSEYQQGEQLDFFNVREYVLFRDNHTCQHCKGKSKDKVLNVHHIESRKTGGDSPNNLITLCETCHKAYHRGEFKLNVKRGRSFRDAAFMGIMRWSFYEKLKNIYPNVSMTFGYITKNTRITNNLPKEHYVDARCISGNPVAKPLGYYFYQKKVRCQNRQIHKANFLKGGRKKLNQAPFLVKGFRLFDLVEYQNDLYYIFGRRDSGFFDIRKLNGTKVNKGSINCKHLRLMATRKSILIEKRMQINYENTGF

SEQ ID NO: 14002 - protein, 457 aa, unidentified
MDAVAVISASGKPLMPTNPVRARKLIKKGKAVIYKYRPLFTIRLTERTDGDIQTIEYCCDTGYQHIGLSIKSRKHEYVNEQRDLLPNETERHNDSRKYRKARRRRKLRHRACRRDNRHDNQICKDGYAPSIRNKRDQHISLYRSYTEILPVERAVFEMGQFDTQVLKAIEKGEPLPQGKDYQHGERYGYATLREAVFARDDYTCICCGKNAFKDKRILCVHHLGFRIGDRTNRLANLATVCTKCHTPKNHQPKGKLYNLKPELKDFKGATFMTMVRWDMLDKLKVVSKDIQVDVTYGAATKEARRDLKIKKSHANDAYCMGSFHPSHRTDLKRYEKCRRNNRVLSKFYDATYIDIRDGKKKKANALGCNRTKRRESRRSEKNERIYRGEKVSKGRIVLRTKRAVIRPGDIVYVGKKKYIVASSKNLGKQLKLADGSLLTTSKVTKIIHCGGWKTVTL

SEQ ID NO: 14003 - protein, 425 aa, unidentified
MPCNEKRARLLLARGRARVHRVIPFVIRLVDRQIGVCSFQPLRLKLDPGSRVTGMALVRETDDAIAVLNLFELVHRGRQIGEALTARRACRRRRRTNLRYRTPRFLNRTRPSGWLPPSLMHRVHITIAWVNRMRRWAPVTALSSEQVRFDMQALANPEISGVMYQQGTLAGYEVREYLLGEWSRTCIYCDATDRPLQVEHLTARARNGSNRIGNLGLACGECNQDKGALDVREYVKDPKRLARILATASRPLNDAAAVNATRRALSSALRTTGLPLELASGGQTKFNRVTHNIPKTHALDAVCVGEVAALRGWQRPSLTIRATGRGSYQRTRLTRHGFPRGYLMRQKQVQGFQTGDHVRADVPHGKKAGVHTGRVAVRATGSFNIQTAMTVVQGISHRYCKLVQRGDGYAYSLQPNDSFRQDGGG

SEQ ID NO: 14004 - protein, 518 aa, unidentified; identical to SEQ ID NO: 7468

SEQ ID NO: 14005 - protein, 427 aa, Parasutterella sp.
  VARIANT 159: note = X can be any naturally occurring amino acid
LKVFVLNKRGKPLMPCSPAKARLLLKEKKAIVVRRTPFTIQLTIATGESKQPVSLGVDAGYKHVGLSASTEKAELYESEVELRQDVSDLLSARRALRQSRRNRKTRYRAPRFDNRIRTKRKGWLAPSVENRINAHLSRVETVIRLLPVTKITVETTSFXMQLLKNSDIAGKEYQEGEQLGFWNVREYVLFRDGHVCQHCHGRSKDPVLNVHHLESRRTGGNSPGNLITLCETCHKALHRGEIKLKAKRGHSFRAQAFMGIMRWEVLNRLKASHPELEVNNTYGYRTKHARIANDIAKSHCADAFCIAGNLGAERLGEFLFQKQTRRNNRQIHKLSILKGGIRKRNQVPFEVKGFRLFDKVAYKGEEGFIFGRRSSGYFDVRKLDGTHISAGISYKKLRLLEKRQTYLTEIRKEEALPPLPEGRGLRA

SEQ ID NO: 14006 - protein, 453 aa, unidentified
MLMAVAVVSRTGVPLMPTSPYRARKLLASGKAEKYGYDPFTIRLTERETGDTQPVELCMDTGYIHIGVSVKSEKHEYLALQIDTLTDEKKKHEKCREKRRNRRSRKRYRKPRFDNRKRDKGWLAPSLEHKKEIHVRAAERICRVVPVTDITMEMGNFDTQVLKAREEGRPLPQGTDYQQGERYGTATLREAVFSRDNYTCLCCGRTMKDGAYFHVHHIRYRSQGGTDRMANLATVCEKCHTPANHQPGGKLYNWKPEIKSFKGATFMTAVRWQMYREIKEKIPDVSVHLTYGAATKERRRALDIEKSHVNDAFVMGRFHPGHRARPELYIKKRRNNRVLESFYDARYIDSRDGKRKSGKELFNGRISRNHKKDSENLHKYRLRKVSKGKRSIRKKHYPIQPHDILVYCGRKYETAGCHNLGTGAILLPERRSIAVSKLKIYRYSGGYYKAEFN

SEQ ID NO: 14007 - protein, 423 aa, unidentified; identical to SEQ ID NO: 13653

SEQ ID NO: 14008 - protein, 427 aa, Oscillochloris sp.; identical to SEQ ID NO: 5291

SEQ ID NO: 14009 - protein, 430 aa, unidentified
MPKVYVLNRHGRPLMPCTPAKARHLLDAGKAKVRHRTPFTIQLLYGSTGYTQEVILGVDAGSKTIGLSAATETEELFSAEVKPRNDVVELMSARRQFRRARRNRTTRHRKLRFDNRVRSKHKGWLAPSVEVKIQEHMTAIRRVCVILPVSKVVVETAEFDLQLLKAVAEGKPVPQGEDYQKGEMYGHYNVRQYVLWRDGYTCQCCGAHGSVRKGVPLHVHHLESRRGGGAAPDNLVTLCTACHDKLHKGIITAADLKKRTRRSTRDATFMGIMRMTLLRRLREQLPVPVVETRGYITKATREKLLVLPKSHTNDALAIAHGPQGFHAGYLPNIRQADRLYTVRPVRHHNRQLHKATILKGGMRNANQAEKYICGFRLYDKVLYNGIECFVWGRRTSGSFLLRKLNGEKVKDGVSHRHLKLLERSQGYLVA

SEQ ID NO: 14010 - protein, 427 aa, unidentified; identical to SEQ ID NO: 13724

SEQ ID NO: 14011 - protein, 423 aa, Moorena sp.
MRVFVLNKNRQPLDPCKPARARILLSTGKAKVYRRYPFTIILTEEVKNPVIHKHQVKIDPGSKTTGLAIVQGERVIWGSELTHRGSQIRDNLISRGQLRRSRRNRKTRYRQPRFLNRTKPKGWLAPSLTSRVQNILTWVKKLIRFCPITGISQELVRFDTQKLQNPELSGIEYQQGTLYGYELREYLLEKWNRKCAYCGATGTQLEIEHIKPLSKGGSNRVSNLTIACHSCNQAKSNQDIELFLSKKPSILKRILSQSKRPLADGASVNSTRWKLYHDLKSIGLPVEVGSGGLTKFNRCRQDLPKTHWLDAANVGKVETLIIEVTKPLLITAKGHGTRQLCRTNKYGFPIRHCSRIKFHKGFQTGDIVRAVVTKGKKIGTYVGRVATRKSGSFNISTLGGLVQGISHKYCRFIHRKDGYAYTN

SEQ ID NO: 14012 - protein, 493 aa, unidentified; identical to SEQ ID NO: 2644

SEQ ID NO: 14013 - protein, 436 aa, unidentified
MTKTLTTRTTQACVLDQQGKPLMPTTRLGKVYRLLKTQKAHIVSYEPFTIQLDYEPDTHVIQPMTLGVDSGAIHSGYSLANEHREYYSAEVIARNDISNRLSDRRMYRQNRRSRKTRHRQPRFSNRKNKKKGWLPPSLEQKVAVQVNEINHLHRYFPIETIIVETAEFDIQKIKNPDISGIEYQQGTLQGYNIRNYLLEKHGRKCFYCGKAVSDFEVEHMLPKSKGGSNRIDNLTLSCHDCNEKKGTLTAEEFIKQTLSAKKAATKIKQLPNEKRLFKYMAYMNATRWALYDAIKDRYPNVKMTYGYITKYNRIQAGLPKAHHIDAKCITGFATVPSMSQTVVKVKMRRHNRQLHRATFSKGHVRKAASLPTTVFGFRLYDLVCFNNHRYYIKGRRSSGYFALVSVENLKNEERSYKKLTLLAHTNAYLTNRYVNA

SEQ ID NO: 14014 - protein, 477 aa, Blautia sp.; identical to SEQ ID NO: 2707

SEQ ID NO: 14015 - protein, 479 aa, unidentified
MNKVFVLDTTKQPLAPCHPAKARKLLRDGQAALYRAYPFTIILLRAVEEPVAPPLRLKIDPGSKVSGLAIVHDASGEIVWAAEVAHRGEPIRAALVQRASVRGNRRSRKTRYRKPRFLNRRRRAGWLPPSVASRVENIMIWVRRLCQLCPIQALALELARFDTQALQNPEISGVEYQQGELAGYEVKQYVLEKWGRQCAYCAATQVPLEIDHIVARDRGGSHRVSNLTLACVPCNQKKSNHNVRDFLAHDPARLARIVAQAKTPLKDAAVVNSTRWALYEALLALGLPLEVGTGGRTKWNRSMRGLPKTHWLDAACVGASTPEVLWTSGTLRPLQIRATGHGSRQMCAMDKYGFPRTRAKQAKRVQGFQTGDIVKAVVPSGKPTVGALGEAGHLCRARRRARFRQFQYPHRQWFGGGHQLSLLPPSPPRRWLCLFLERSSQEGWMAMLFQGRASAKPPLGFLPRMECVGFLALTSVRKK

SEQ ID NO: 14016 - protein, 442 aa, unidentified
MSTSVFVLDKKHRPLMPCRPARARRLLRAGRARVVKRFPFVIRLVDRTVEQSEVQPVLIKLDPGSRETGAAVVRDDGKKRHHALAFFVIKHRGGAIRDALKARSAFRRRRRSQNFRCRSPRFLNRVKPKGWLPPSLRHRVETTLSFVRRMCRYLPVSGIATELVKFDSQKLQNPEVSGVKYQQGTLFEYEVREYLLEKFGRKCVYCGAEGVPLNIDHVVPRAKGGSNRVSNLVLACVSCNQKKGARSLEDFLKGKPEVLARVRRELKTPLRDAAAVNATRWVLFNELKATGLPVETGSGALTKLNRHAFGVEKEHWLDALCVGRLNGAVTRKGLNVLEIRCMGRGSRQRTRLTKYGFPRGYLMRQKCVHGFATGDMVEANVPKGKKAGLWRGRVAVRVSGSFNIQTPKGVIQGVGWKHCRLISHNDGYGYAWLGHAPHSSPA

SEQ ID NO: 14017 - protein, 477 aa, unidentified
MASMDNIVEGQQRNSALGLPMRIAAGSMIAGKGGKMEYENANRVFLLNKDGKPLMPCRPRKARLLLKSGKAFVVKKYPFTIQLKYGSYGYKQKVSLGVDTGQRHIGFAVTSQDKVLYQSEVELRQDVHKNLYTRRIYRRSRRNRKTRYRQARFLNRVHGKRDCLWLPPSVKGKASHNIAWIKRYLAVLPNPDLHIEVGKFDMAKMVNPAISGKQYQEGSLHGWKNYEYYVLARDEYTCQLCHKHGEGVKLVVHHIVYRSQGGTDRVDNLITLCTNCHTTKNHQPGGKLYKWMKAKKKVTKQLKGATFMNILRKRIMTAFPEASCQYGYQTFFERKKFNLPKGHFTDAIAISGIKSVGQMPETVAMISQFRKKKRSLHEATARKGRKEANRTSKRNAKNTKYARGLWLNDYVHVIGTNLRGYVQSYLSKGAYVRLSDGLGNYVIKDGKNYISTKLCKLITHNGNWQKAEQKLLLYEFK

SEQ ID NO: 14018 - protein, 515 aa, unidentified; identical to SEQ ID NO: 3339

SEQ ID NO: 14019 - protein, 405 aa, unidentified
  REGION 1..405: note = Ga0307928_10001329
MLVYVKNCKDEPLMPCSPCVARRLLKNGEAKVVSRTPFTIKLLHGIRGYKQEVVAGMDTGSKFIGCAVKSNGKVLYQSEVQIRQDVSKKMKQRKMYRKSRRGRKLRYRKMRWQNRASMRKTGRLAPSIRSKIDSHLREKKFVESVLPITRWIVETAKFDIHKITNTDVKGTDYQEGDQKGFYNVKAYVIDRDSYTCQHCKGKSGDKKLVVHHITSRLIGTNSPDNLLTLCVTCHKKFHKGEIELNIKGKRSKTKHATEIGIVKSQLKKKWLGFEETFGYETKYKRENILNLPKSHINDAIAICCENNKIELNNDNIYLKKHVASGDYQQTKGKRSEKKIPTGKLFGLRKFDLVETVKGIGFIKGKRSSGFFAISNLDNSINISSVNVKKECKRILARKTVLTERG

SEQ ID NO: 14020 - protein, 455 aa, unidentified; identical to SEQ ID NO: 10285

SEQ ID NO: 14021 - protein, 424 aa, unidentified; identical to SEQ ID NO: 13447

SEQ ID NO: 14022 - protein, 464 aa, unidentified; identical to SEQ ID NO: 3455

SEQ ID NO: 14023 - protein, 514 aa, unidentified
MSVLVIGRNGRALMPTNPRKARLLLKKKTASVVCRHPFTIQLLYKTGCATQEGCIGIDTGSQHIGVGITCGDRVILKDEHALRSSMEKRSLLATRTVMRRGRRYRKVRYRKPKWRHHTKRMYFEKANRRGQHWRKVKTTTQSPRLKGWLPPSLQSKCDHHFRIIDRYLKYLPDPITRNLVIEAGRFDMARMNDPTIHGEMYQRGPMYDAENLRAYIFARDNYQCACCKAKAGTTRKADGTTVKLVAHHILFRSRGATDNPKYIISVCDHCHTTKAHQPGGILYSWMENNKKVARGLRDATFMNILRKRLFARYPQAAFTYGNITAADRKQLRLPKNHANDAVAISLFGKEASTVKNICQTMHYKQIRKSKRSLHEAIPRKGRKNPNTKAVRNKKNTTQVNGFKLWDSVLADGKKLFICSFTGISAYLIDKNGCYISQPGKTYKQCPLSKLKRLHPNVDILPRINPWDSLDYNNITTPYRSGYSMIFQDLATIGVPHLGWYFLAAGQMPVPISLS

SEQ ID NO: 14024 - protein, 399 aa, unidentified; identical to SEQ ID NO: 6633

SEQ ID NO: 14025 - protein, 432 aa, unidentified
MQPTKQQNWVFQINGDKQPLDMIHPGRCRELQNRGKLASFRRFPYVVIQQQTIESLQTKEYILKIDPGSQWTGFAIQCGDNILFRAELNHRGESIKFDLVKRAGFRRGRRSRNLRYRKKRLNRAKPEGWLAPSIRHRVLTVETWIKRFMRYCPIACIEIEQVRFDMQKLANPEIDGVEYQQGELQGYEVREYLLQKWGRKCAYCGTENVPLEVEHIQSKSKGGSSRIGNLTLACHVCNVKKGNLDVRDFLAKSPDILNQVLENSTKPLKDAAAVNSTRYAIVKMAKSICENVKCSSGARTKMNRVRQGLEKTHSLDAACVGESGASIRVLTDRPLLITCKGHGSRQSIRVNASGFPAVKNAKTVFTHIAAGDVVRFTIGKDRKKAQAGTYTARVKTPTPKGFEVLIDGARISLSTMSNVVFVHRSDGYGYEL

SEQ ID NO: 14026 - protein, 424 aa, unidentified; identical to SEQ ID NO: 3351

SEQ ID NO: 14027 - protein, 413 aa, unidentified
MTSYSFVLDANGKPLAPTKEQKAWFFIRKKRATLVSKYPMVIQLKKEIPEKEICQDEIRCGIDDGGLHVGIALVQKCKTKNKVVFKGTIEQRNDVKHLMEVRRGYRRYHRYHKRYRQARFDNRKSSKREGRIAPSILQKRQATIRVIHWLNKWINITNYWLEDVSVDIRALTDGYQSYRWQYQKSNRLDENIRKAAILRDDGKCMECGKSNCRLEVHHIKPRRRNGSNTLDNLITLCESCHQKTEGQEELYMDRYFSLLKSSDNKNLNDAQHVMIGKMWLRKQLSGLGVLYLTSGGDTANKRIDWNIEKSHTNDAVCITDLQPDTCDIKEWAIKPMRRQSKAKTDHVLGIHHRDLVEYTFKNGETHRGYVTALYPDQKAINFQSQTKHCKKVNARKCKLLWNYSKIYWFENAS

SEQ ID NO: 14028 - protein, 442 aa, unidentified; identical to SEQ ID NO: 11369

SEQ ID NO: 14029 - protein, 465 aa, unidentified; identical to SEQ ID NO: 3856

SEQ ID NO: 14030 - protein, 487 aa, unidentified
LYGLLLNIFGCLEVVGTEGVSHPGLPGKYKHKGGQLMSVAVISKTVERLMPTSEYRARKLLKSGKAIKHSYHPFTIQLTERETGDIQLIELCMDTGYIHIGISVKSKKHEYLAEQIDTLTDERGRHDACRMYRRQRRSRKRYRQARFNNRKRDQGWIAPSLEHKKKIHIQAISRINKVMPITDITMEMGNFDTQVLKAKEEGKPLPQGAEYQHGERYGIATLREAVFARDGYKCQCCGRTIKDGAILHVHHIKYRSQGGTNSMSNLATVCDKCHTPKNHKPGGKLYNWKPKLPSFKGATFMTTIRWQLYSEVKALFSDIDIYIAYGAATKERRRELDIDKSHVNDAFVMGQFHPKHRIKAVLYKKKRRNNRCLEKFYDAKYIDSRDGKKRSGQELFNGRINRNHKKDSENLHQYRLQKVTAGKRTVRKQHYKIQPHDIVIYENRKRETAGCHCNGTRMMLLPDKKSASIKKVKIYRYAGGYFKSAFN

SEQ ID NO: 14031 - protein, 475 aa, Ferroplasma sp.
MEKHMKEKQKLDRRDTYTPADAPQVRGNCDHALNREETLSVHGLKTPSNNPDVDLQSGMTGQDLRVPVINMRNESLMPTSPGKARRLLKWDKTRVISSNPFTIQLLYATGETKQPVTLGIDAGYKHIGFSAVTEKRELISGEAVMRTDIPKLNVEKSMYRRNRRNRLWYRQPRFMNRGNNREGWFAPSIDHKLQTHIRLIEKLKRILPVSKVIIEVASFDQQKMKNPEISGIEYQQGELQGYEIREYLLEKFHRKCVYCGKTNVPLEIEHLTPKSRGGSNTVDNLAISCHECNQKKNNLTAEEFGYPEVRKTASMPLRDAAFMNTVRWKLTQLTEAIHTFGYITKKNRISPGLDKSHANDAFVIAGGTTQARSTVFNVTQRRRNNRSLQINRKGFRPSIRRRRYPLQPGDVVEFGESRYGVVGVHSYGNYVIIRNGEKKMDVNIKKVKLVKYGKGLGFTTQFFPTLSHMVSLEGS

SEQ ID NO: 14032 - protein, 417 aa, unidentified
MFVYVISKNGQPLMPTSRFGKVRRLLKNKKAKVVSRCPFTIKLLYEPASLIVQEVVLGQDTGSKHIGTACVSNDKVLYQSEVALRDDIKKKMDSRRAFRKNRRQRKTRYRKPRFLNRANSTKEGRLSPSIRSKVQSHIDEIEFCKKVLPISKIVLEVSQFDTALMKNPSLIFEKVKHWGYQEGFDYGYSSRREAVLNRDNYTCQCCGKKHVRLEVHHIIFRSMGGTDDERNLITLCEKCHKMIHDGILVLTKKPKRTNLKYATQMSLIRSQLLKIYPDAIETFGFVTKENRNNLNLQKGHFIDACVIASGGKEFEQSNWLFKKKRIPKQNRRLCKGIRGEKKMPIGKIFGFKRFDKVKYLGKICFIKSRRNSGFFTLMDVDNNIIDFRDKGGRKTPSYKLLEKLNTRKSTLCISRII

SEQ ID NO: 14033 - protein, 425 aa, unidentified; identical to SEQ ID NO: 11531

SEQ ID NO: 14034 - protein, 443 aa, unidentified
  REGION 1..443: note = Ga0315284_10090877
MVFVLSSDKKPLNPCNPARARILLKQGKACVFKQYPFTIILKSRWSFMSETDEFRLKIDPGSKVTGIAIINETTGKVVWAGEVQHRGYRIKEKLESRSASRRSRRNRHTRYRQARWMNRVRQGQMRFSYTSRKGKGWLPPSLCSRIFNVETWIRRLMKLCPIKAFSLESVKFDTQIMENPEIEGVEYQRGTLYGYELKEYLLEKWGHSCVYCGEKDVPLQIEHIKPKSMGGTNRVSNLTIACEKCNIRKNTMTVEEFLEKDRVARNYQAQLKKEHKSGFFKLYSCREFLKDVAAVNSTRKALYQKIKIYNLPIECGSGGLTKYNRVNRGLEKTHWIDALCVGKSTPDVIDVMGITPLNIKAVGHGSRQMCSVNKYGFPASKAKAGKKFFGYQTHDIVKSGNNIGRIKGVRKTGSFTMEGKDKDLNVSYKKISLTQHADGYSYR

SEQ ID NO: 14035 - protein, 390 aa, Scytonema sp.
VSNFVFVLDTNKQPLDPVPPGQARLLLKHLKAAIYRRYPFTIILKYAVKRPKTKPYQLKIDPGSKTTGLAILQNDIGIWGAELSHRGQQIKDDLESRRAIRRNRRNRKIRHRKPRFLNRTRPPGWLPPSLQSRVENTLTWVNRIRRYVPITGISQELVRFDTQAMQNPEMSGKEYQQGELAGYEVREYLLEKWGRKCAYCNTQNVSLEIEHIHPKSKGGSDRVSNLTLACRDCNQAKGNKDIKDFLTRKPDVLNRILKQAKQPLLDAAAVNSTRWELFRRLQQTGLPVEVGTGGRTKYNRTRNGLPKTHWLDAACVGVMESLKVLTQQPLLVVAKGWGSRQMCTPNKYGFPTKHRTRCKTFFGFQTGDMVRAILPTGKFAGIHVGRLTIL

SEQ ID NO: 14036 - protein, 413 aa, unidentified; identical to SEQ ID NO: 3220

SEQ ID NO: 14037 - protein, 447 aa, unidentified; identical to SEQ ID NO: 7023

SEQ ID NO: 14038 - protein, 415 aa, unidentified; identical to SEQ ID NO: 13500

SEQ ID NO: 14039 - protein, 457 aa, unidentified
VWLHQAVYNLGEGFLPSSEERTAFYWLLIYRKEHGIMQYVYVLNKHGEPLMPCSPGKARLLLKQQKACVVKRTPFTIKLLYGSAGYKQPITLGVDAGSKHVGLSASTEKRELYREEFTPRNDVVDLLSTRRQNRRSRRNRKTRYRAPRFDNRVHSKHKGWLAPSVEVKIQEHITVIKRICRILPITLVRVETAEFDTQRLKAMLKGKPLPVGTDYQLGEMYDEYNVRQYVLKRDNYTCQCCGAHPTEKKPVRLHVHHLESRHVGGNAPNNLITLCVACHKALHEGKITLDKGKKRGKPLRDAAFMGIMRNTLLARLKDELNIPVKQTYGYITKLLREKNKIPKSHVNDARCIAKAPNAKPCDTMLYTRALRHHNRQIHKAKILNGGIRKKNQAPYLVKGFRLWDKVRYNGEECFITGRRSSGYFALKKYDGTVISNSASYKKLMLLEAATNYITERS

SEQ ID NO: 14040 - protein, 431 aa, unidentified; identical to SEQ ID NO: 5232

SEQ ID NO: 14041 - protein, 414 aa, Parasutterella sp.
MPCSPAKARLLLKEKKAIVKRRTPFTIQLTIATGETKQPVSLGVDTGYKHVGLSASTEKAELYASEVELRQDITDLLSARRALRQSRRNRKTRYRAPRFDNRIRTKRKGWLAPSVENRIDAHLSRIEAVLRLLPVTKITVETASFDLQLLKNPDISGKEYQEGEQLGFWNIREYVLCRDGHVCQHCYGRSKDPVLNVHHLESRRTGGDSPGNLITLCETCHKALHRGEITLKAKRGQSFRTEAFMGIMRWEVLNRLKASHPELEVNNTYGYRTKHARIANDIAKSHCADAFCIAGNLGAERLGEFFFQKQTRRNNRQIHKLSILKGGIRKRNQAPFEVNGFRLFDKVACQGEEGFIFGRRSSGFFDVRKLDGTRISAGISYKKLHLLEKRRTYLTEIRKEEVLPPLPEGRGLRA

SEQ ID NO: 14042 - protein, 395 aa, unidentified
FPFTIILKKSCPDSPVSPLRLKIDPGAKFTGMALVNDSTGEVVFAAELKHRGFAIRDALTSRSQLRHSRRARKTRYRQPRFLNRTRPEGWLAPSLQSRVENIKTWVERLRKLAPIRAISQELVRFDMQLMANPNIQGKEYQQGTLAGYETREYLLEKWSRQCAYCGVKDVPFQVEHIHPRAKGGSNSITNLALSCEKCNTKKGTKDIKDFLKKDPLKLEKILKQAKRSLADAAAVNTTRLALLEVLKATGLPVETGSGGLTKFNRSQQNLEKTHWIDAACVGQSTPILNIKGVKPLLITANGHGTRQSCRTDKYGFPSRYVPRFKFVNGFQTGDIVKAVVTKGKKIGTYIGRVAVRTSGSFNISTISGLIQGISYKYCKSIHKKDGYEYGKSKIC

SEQ ID NO: 14043 - protein, 434 aa, Anoxybacillus sp.; identical to SEQ ID NO: 8088

SEQ ID NO: 14044 - protein, 447 aa, Marinobacter sp.; identical to SEQ ID NO: 8246

SEQ ID NO: 14045 - protein, 457 aa, Scytonema sp.; identical to SEQ ID NO: 6260

SEQ ID NO: 14046 - protein, 532 aa, unidentified; identical to SEQ ID NO: 3169

SEQ ID NO: 14047 - protein, 437 aa, Clostridium sp.
MVYVLSKKGKPLMPTNRYAKVRVLLKFKKAVVVSSKPFTIKLLYNTKDFVQPITLGIDSGYLNIGFSAITKEKELISGEVKLLKCMSERLKEKAMYRRQRRSRLRYRKPRFDNRKRSENWLAPSIQHKYDSHIRFIDKLKKLLPITNIIIEVANFDTHKLKNPSIEGTAYQNGEQKDFFNLREYILYRDGHKCQNPNCKNKSPEPILQVHHIGFWKQDRSDRPGNLITLCNKCHTPKNHKGKGFLYGWHPKVKSFKEATFMSMIRWRLVNTLGCKHTYGYITKHNRIALNLEKTNYNDAFCIAGGSNQNRVKPLIFEQIKRNSRSLEKFYDAKVIDIRTNTKVSGAELFNGRRTRNKSFNSENLRKYRGIKISKGQRRIRTKRYFYQPGDLVKYEDKIYTVKGTQNKGKYIALKELKKVPKVELLAPYKFRKGLVCV

SEQ ID NO: 14048 - protein, 431 aa, Anabaena sp.; identical to SEQ ID NO: 8468
  source 1..431: note = isolate UBA12330

SEQ ID NO: 14049 - protein, 470 aa, unidentified; identical to SEQ ID NO: 7775

SEQ ID NO: 14050 - protein, 423 aa, Lyngbya sp.; identical to SEQ ID NO: 2845

SEQ ID NO: 14051 - protein, 424 aa, unidentified; identical to SEQ ID NO: 8578

SEQ ID NO: 14052 - protein, 413 aa, unidentified; identical to SEQ ID NO: 2636

SEQ ID NO: 14053 - protein, 426 aa, unidentified; identical to SEQ ID NO: 7828

SEQ ID NO: 14054 - protein, 512 aa, unidentified; identical to SEQ ID NO: 3769

SEQ ID NO: 14055 - protein, 427 aa, unidentified
MRVFVLDKNRKPLDPCHPAKARKLLKSGRAKVLRRYPFTIIIKDLEVSNCVTHDHQLKIDPGAKTTGLAIVQGSRVVWGAELTHRGFQIREALTSRRQLRRSRRNRKTRYRQPRFLNRTRPKGWLPPSLMSRIHNVLTWVKKLIKFCPVTGISQELVRFDTQKMLNPEISGIEYQQGTLYGYELREYLLEKWNRTCAYCGANNTRLEIEHIKPKSKGGSDRVSNLAIACHDCNQAKGNLEIEVFLSSKPSILKRILSQAKKPLADAAAVNAARWKLYDELKLIGLPVEVGSGGLTKYNRCRQNLPKTHWLDAANVGKVDTLYIEDYQPLLITAKGHGTRQTCRTDKFGFPRLHCSQRKTHKGFQTGDIVKAVVTKGKKIGTYMGRIATRKTGSFDITTAQGKVSGISYKYCQAIHRKDGYSYQFHGG

SEQ ID NO: 14056 - protein, 430 aa, unidentified
MVYVLDISGNPLTPTKRHGKVRHLLKTGKAVCVKRCPFTIRLTYQNAGPEPKGLSLGVDCGSKHIGLSVSSEEQEYYSSEVELRQDIPANLSTRREFRRARRHRKTRYRKPRFLNRTASKKKGWLAPSVMQRVESHLNRIDKAVKMLPIREIKVEVAAFDLQKLQADLKGLKRPKGEEYQQGPQLDFWNVREYVLFRDHHECQCCHGKSGDKVLNVHHLRSRKVGGDAPDNLITLCGYCHVQYHKGELELPESAKKPKPLRDAVFMGIMRWMLYNRLKEIYEPQGIKVKLTYGYITKHTRIENGLEEKSHRLDALCIAGHPKAKRCEEWFLQKKVRCHNRQLHKATIQKGGVRKANQLPTVIKGFRLYDKVLFQNRECFIWGRRKTGYFTLKTLDGIMICDGVSSKKLTLLEKRKSYLTERRKQELCNSF

SEQ ID NO: 14057 - protein, 452 aa, unidentified
MVFVLSSTNKKLMPTNEYRARKLLKSGKAAVYKHRPFTIILTKRKDGYTQPIEYCCDTGYQHIGISIKSQKHEYVNEERILLKDETERHNDCRKYRRTRRNKLRYRKARWSNRHNNLICKDGFAPSIRNKRDVHINLFKMYHEVCPITSATFEMGQFDTQLLKTVENGDNVPQGTDYQHGERYGYSTLREAVFARDNYKCVCCRKSTIKSGLILKMHHLGYRIGDRSNRMSNLATVCSNCHTSKNHQKGGKLYDLKPKLKTFKGATFMTMVRYDMFSKLKESAPDIKFNMTYGALTKLKRKDYSIKKSHSNDAYCMGVFHPKHRTDFKCYQKLRRNNRILSKFYDAKYIDLRDGTVKSGKQLSCNRTNRRELRNSNKNERIYRGPKISKGKTVVRKQHYQYRPYDFVWYKNVKYAVKGVQDKGKRIALQNHLPVSISKIKRSVHVNGWKLVI

SEQ ID NO: 14058 - protein, 415 aa, Parasutterella sp.
LMPCSPAKARLLLKEKKAIVKRRTPFTIQLTIATGETKQPGSLGVDTGYEHVGLSASTEKAELYASEVELRQDITDLLSARRALRQSRRNRKTRYRAPRFNNRLCTKRKGWLAPSVENRINAHLSRIKAVLRLLPVTKITVETASFDLQLLKNPDISGKEYQEGEQLGFWNIREYVLCRDGHVCQHCYGRSKDPVLNVHHLKSRRMGGDSPGNLITLCETCHKALHRGEITLKAKRGQSFRAEAFMGIMRWEVHNRLRALHPGIEVSNTYGYRTKHARIANGIAKSHCADAFCIAGNLGAERLCEFFFQKQTRRNNRQIHKLSILKGGIRKRNQAPFEVKGFRLFDKVACQGEEGFIFGRRSSGFFDVRKLDGTRISAGISCKKLHLLEKRRTYLTEIRKEEALPPLPEGRGLRA

SEQ ID NO: 14059 - protein, 412 aa, unidentified; identical to SEQ ID NO: 6913

SEQ ID NO: 14060 - protein, 414 aa, unidentified
MPCSPAKARLLLKEKKAIVKRRTPFTIQLTIATGETKQPVGLGVDAGYKHVGLSASTDKAELYASQVELRQDITDLLSARRALRRARRNRKTRYRAPRFNNRIRTKRKGWLAPSVENRINAHLSRIEAVLRLLPVTKITVETASFDMLLLKNPDIAGKEYQEGEQLGFWNVREYVLFRDGHVCQHCYGRSKDPVLNVHHLESRRTGGDSPGNLITLCETCHEALHRGEIALKTKRGHSFRAEAFMGMMRWEVLNRLKASHSELEVNNTYGYRTKHARIVNGIDKSHCADAFCIAGTLGAERLCEFFFQKQTRRNNRQIHKLSILKGGIRKRNQAPFEIKGFRLFDKVACKGEESFIFGRRSSGYFDVRKLDGTRISAGISYKKLRLLEKRRTYLTEIRKEEALPPLPEGRGLRA

SEQ ID NO: 14061 - protein, 406 aa, unidentified; identical to SEQ ID NO: 2874

SEQ ID NO: 14062 - protein, 411 aa, unidentified; identical to SEQ ID NO: 3731

SEQ ID NO: 14063 - protein, 410 aa, unidentified
MFVDMVYVQDIDGKPMMPTTRHGKVRRLLKDKKAVVVNLCPFTIRLTYVTSDYKQEIVLGVDAGTKHVGLSATTKSKELYSSEVILRNDIVDLLSTRRELRRTRRNRLRYRKHRFNNRIKSRRPGWVAPSVRYKIDAHIRVIDNVCSILPISRIVIEVAQFDTQKINNPNISGKEYQEGNKLGFWNVREYVLARDGHKCQYCKGKSKSKILNVHHLESRKTGGDSPSNLITLCETCHKEYHKGNIDLKIKRGSSLRDAAVMGIMKWKLYEELRSRYDRVSMTFGYITKHNRIKYGIEKSHTSDAFVISKNINAKRIGCQYLKRLIRRHNRQIHKMKILKGGKKKNNQAPFEVFGFRLFDKVLYNNKICFVYGRRKSGSFNIRDFNGENSKDVSRKKFKLIRGKRHPIILK

SEQ ID NO: 14064 - protein, 423 aa, unidentified; identical to SEQ ID NO: 6991
  source 1..423: note = Microcoleaceae bacterium UBA9251

SEQ ID NO: 14065 - protein, 477 aa, unidentified
MKSHKSVLVIGMNGIGLMPTTACKARKLLEAKKAKVYSKMPFTIKLLYKTGCAVQNISLGIDTGSQHIGVAVTTDNCVQLKDEHELRSTMEKRKLIETRAEARRSRRYRKTRYRKPKFKPHCKHVYMNSMTKRHGHKTHWHNVKNEYGTNRQPGWVPPSIQQKIDHHIQIINRYLEALPKKTKVNIEVGRFDTQKVKNPDIKGKQYQLGRMYDYENKKAYILAKYDYKCPICGRKFGSVRENGSIVKFRKHHLHFVSNGATDNPDSYMAICDCCHTAEAHGDGGILNKIMKESKKTSRGLRDMPFMNILRRRLWNAFPEACFTYGNITNADRKWISLPKTHANDAVAIAMHEYLQQAKSYDVKDVPYTKIYKEVRKKKRSLHEMNPRKGRRIPNMSATRNSKNTKSVINKHRTFSLYDKVRYAGQIGWITGFSGTNTAYLKNKEGKYITIQGKNYKNIPLSNVQILERNNTWITYTK

SEQ ID NO: 14066 - protein, 458 aa, unidentified
MQVFVLDQRKQPLMPCPPARARELLRCGRATVYRRYPFTIRLTGRRDGDVQPLRLKLDPGSHMTGVALVREEGKNQHVLFLAEITHRGQQIRQALLKRRAFRRRRRHANLRYRAKRFDNRMRHEGWLPPSLQHRVDTVLSWVDRLRRLSPLVSISTELVRFDMQQIENPEVAGMEYQQGELAGYEVREYLLEKWGRACAYCGVENTPLQVEHIHPRVRGGSDRVSNLTLACEPCNTRKGAMPVEAFLAKKPEALARILAQAKRPLKDAAAVNATRWALFHTLKATGLPVEVASGGRTKWNRTRLGIPKTHALDAACVGAVEAITGWQRPMLAIKATGRGSYQRTRLDKYGFPRGYLTRSKRVHGFQTGDLVVATVTAGKKAGVHVGRVAIRATGRFNIQTAQGLIQGLSYRVCCLLQRADGYGYVLLAHTRKESENWGRAVHAALPLPGLNPKVSRAN

SEQ ID NO: 14067 - protein, 470 aa, unidentified; identical to SEQ ID NO: 2825

SEQ ID NO: 14068 - protein, 424 aa, unidentified
MLVYVLKQNGQPFMPTERFGKVRRLLKEGKAKVVRREPFTIKLLYEPETDVVQECYCGVDTGSKHIGVAVVGNDKVLYQSQTKLRSDIKRKMDIRRMYRRNRRFRKIRYRKPRFLNRRNSIKKDRLPPSVKHKVQAHIDEIEFCKKILPVSDLILEVSQFDTALMKNPSLMNEKIRKWGYQKGFNYGYSSRRSAILHRDNYTCQCCGKKNCRLEVHHIKFKSNGGTDDEENLITLCEDCHKGVHTGTITLSKKPKKRKNLKHATHMSIIRSYLLKKYQDAIETFGFVTSENRNHLKLEKDHFIDACVVASGGLEFKELEVIFYKRRVSKGDYQLTKGIRGEQKLPTGKIYGFRKFDKVEYLGEKYFIKGRMSSGFAILMNIFGEKVDFSSMPKGLKTPKLSNCNRISTRRSRLCIREKITLNIV

SEQ ID NO: 14069 - protein, 425 aa, Mastigocladopsis sp.; identical to SEQ ID NO: 12179

SEQ ID NO: 14070 - protein, 452 aa, unidentified; identical to SEQ ID NO: 14057

SEQ ID NO: 14071 - protein, 457 aa, unidentified; identical to SEQ ID NO: 3236

SEQ ID NO: 14072 - protein, 424 aa, unidentified; identical to SEQ ID NO: 4126

SEQ ID NO: 14073 - protein, 537 aa, unidentified
MQYVYVVDKHGKALMPTTRYRHVRKLLKSGKAVAICNKPFTIRLKYESSTYTQDLWEGIDTGRQNIGDAVSNEKGENVYLADVRTNNKSIKSNMQDRAGFRRERRRHDRQSKQRKAKHDGTEIQNGDDDTVRTKHSCKSIKISYPTANEPVIHKVIRGKEGKFANRKRPEGWITPSARQVIQITMNEIRQTARILPVNHINLERVSFDFQKLENQDIRRWEYGKGALYGYKTYKDYIWDEQHGKCACCGKPITQYHHIIHRAEGGIDSVKNIIGLCNGCHNKIHASKDAEDKLKELKEGVRQRYYVGLLNSVIPALIEEVSAYCDEHGIEFTVTDGKTTAETREKYGLFKDHCTDAYAISLADRDVKSVSVSDRIYEKRRFKKKSGNIIAKRNQRVYKFDGKIIAYNRHKATNQKDDSFEEYMTKYAETHTDKECRQHVAQIEIIPAKRTYTYHKQGLVAPCHAGDIVRYEKHNKIKGNTKKDTFVATSVEMNGEGHIKYGDACGSRKIKFCRPIDSGCLQAVHNYQADEYLRKIAE

SEQ ID NO: 14074 - protein, 420 aa, unidentified
MQYVYVLNKHGEPLMPCSPGKARILLKQQKACVVKRTPFTIKLLYGSAGYKQPITLGVDAGSKHVGLSASTEKRELYSEEFTPRNDVVELLSTRRQNRRSRRNRKTRYRAPRFNNRIHSKHKGWLAPSVEVKIQEHITVIKRICRILPITLVRVETAEFDTQRLKAMLAGKPLPVGTDYQLGEMYDEYNARQYVLKRDHYTCQCCGAHTTTMKSVKLHVHHLESRKVGGNAPSNLITLCTTCHDNLHKRKVTLDGKKRGKTLRDAAFMGIMRKALMARLKEELSIPVQETYGYITKMRREQNDIKKSHVNDARCISKHPLAEPCSVCYRTKAIRHHNRQIHKANFSKGGYRKRSQMSYIVEGYRLWDKVLYKGQECFISGRRASGRFALKKLDGTSISKSVTFKKLRLLEPATNYLIERM

SEQ ID NO: 14075 - protein, 456 aa, unidentified; identical to SEQ ID NO: 4979

SEQ ID NO: 14076 - protein, 512 aa, unidentified
MSTVYVLNKDGKPLMPTTRCGHVRYLLKEKKARVVASKPFTIQLLYETDDVVQPLYLGIDPGRSNIGVAVVKTDGMAVFTAHLETRNKEIPKLMKKRKDSRRARRTNGRRCRRQRRAKANGTISKKCVKQTTAQNGSVSKRAKEIGVIKRHLPGCEKDVLCIGIKNKEAKFNNRTRPTGWLTPTANQLLQTHINLVKKIQKFLPISDVVLEVNKFAFMQLDNPNIQKWQYQKGPLYQKESLKSAVSEMQEHHCLFCKKKIDHYHHVVPQHKNGSNTIDNIVGLCTQHHDLVHKDATWQKRLAKKKTGLNKKYGALSVLNQIIPALTKELSSLFPKHFFVTNGKSTYDYRAAHGVSKDHWLDAYCIACSVLPNDTCDKTINSCVPYELKQFRRHDRRALNNENMSRVYTFNGKMVATNRHKATEQTTDSLEEFRQRQPNDVCNLKVKEHHPTYRNMSRNYPGSIFLVEKQVHIMQGIAGSKDGKATTYKDTNANSIAAGKCKFVAKNSGILFV

SEQ ID NO: 14077 - protein, 502 aa, unidentified; identical to SEQ ID NO: 11560

SEQ ID NO: 14078 - protein, 421 aa, unidentified; identical to SEQ ID NO: 5759

SEQ ID NO: 14079 - protein, 426 aa, unidentified
LAKDHYRSIDREETNLRVYVLNKRGEPLMPCSAAKARILLKEKKAKVKRRTPFTIQLTIATGETTQPVNLGVDAGYEHIGLSASTEKAELYASEIELRQDISELLAARRALRGARRSRKTRYRAPRFDNRKRDKGWLAPSVENRIGAHVSRVEAVLRILPVTKIIVETASFDVQRIKNPDVQGVEYQEGEQLGFWNVREYVLFRDGHECQHCHGKSKDKVLNVHHIESRRTGGDAPNNLITLCETCHKAFHRGEIELKVKRGRSFQAETFMGVMRWTFFERLRARHPEIEVRNTYGYLTKDTRIANKIEKSHCADAFCIAGNLKAKRLGYYFFQKQTRRHNRQIHKLTILKGGVRKRHQTPYEIKGFRLYDKVLYRGKTAFIFGRRSSGYFDIRTLDGERISAAVNSKKLRLLEKRRTFLIELRRN

SEQ ID NO: 14080 - protein, 442 aa, unidentified; identical to SEQ ID NO: 3658

SEQ ID NO: 14081 - protein, 414 aa, unidentified; identical to SEQ ID NO: 2588

SEQ ID NO: 14082 - protein, 428 aa, unidentified
MQNQVFVIDSDKQPLTPTSPAQARKLLDSGKAAVFRHYPFTIALKRKVEEAKPAELQLKIDPGSKTTGLAILNGALVIWAAELTHRGQQIKNDLESRRAIRSGRRNRKTRYRKPRFLNRVRPEGWLAPSLNHRVETVMTWVYRLSRYSPIKSVAQELVRFDLQKMQNPEISGVEYQQGELQGYEVREYLLEKWGRQCAYCGAKDTPLEVEHIHPKSKGGSNRISNLSMACHDCNQTKGNSDIRDFLSQKPSVLARILKQAKAPLKDAAAVNSTRWALFNMLKATGMNVSTGSGGRTKFNRCSQDIPKHHWTDAACVGDTPQLSFKTAQPLLIRATGHGNRQMCGTDKFGFPKRHRTNQKVHFGFQTGDMIRADVPKGKKAGIHTGRVLCRKTGSFDISVHGGRVAGINHKYCKPIHKADGYQYSHCGF

SEQ ID NO: 14083 - protein, 458 aa, Lactobacillus sp.; identical to SEQ ID NO: 4474

SEQ ID NO: 14084 - protein, 430 aa, unidentified; identical to SEQ ID NO: 11856
  source 1..430: note = Cyanobacteria bacterium UBA9226

SEQ ID NO: 14085 - protein, 380 aa, Arthrospira sp.; identical to SEQ ID NO: 3156

SEQ ID NO: 14086 - protein, 406 aa, unidentified
MRGKPLMPCSPAKARHMLKAGKAFVVRRTPFTIKLTIATGETKQDVTLGVDAGARHVGISATTEKEEVFASEVKFRQDITGLLADRLAFRRARRNRKTRYRAPRFNNRVRSKHKGWLAPSVENRIQAHISRIEAVCRLLPVTKIVIETASFDIQKIRNPEVEGTGYQQGDQLGFWNVREYVLFRDGHVCQHCHGRSRDKILNVHHLESRKTGGDAPNNLITLCETCHKAYHAGKIKLKVKRGQSFRAEAFMGIMRWTLLDRVRKTHPKLPVENTYGYLTKHKRIALGLPKTHCADAFCIAGNLKALRRGDFLFQQQTRKHNRQIHKCSILKGGVRKLNQAPFLVKGFRLFDKVRIGGQIGFVFGRRVRGTFNIRRLDKTVIGTDINCKKLSLLETRKTFLTELRKE

SEQ ID NO: 14087 - protein, 512 aa, unidentified; identical to SEQ ID NO: 12069

SEQ ID NO: 14088 - protein, 512 aa, unidentified; identical to SEQ ID NO: 6308

SEQ ID NO: 14089 - protein, 427 aa, Enterococcus sp.; identical to SEQ ID NO: 5630

SEQ ID NO: 14090 - protein, 536 aa, unidentified
VLRPRYQYPTRWYPSREQGSGNGCLSGEENTDLEQEVSGTLSKGDHSHPGEQDFCVPAITIQGGPAMSVFVVGLNGCRLMPTSERKARLLLKHGKASVYRKVPFTIKLNYKTGSTTQSGYLGIDTGSQHIGVSVVREDGTVLHKEEIGLRDSMSKRKLMQSRASSRRGRRHRKTRYRHPKWRPKAKRVYCEIPDRKGRHWKKKEITFASKRPKGWLPPSLQSKTDHHIRWIKKLQDLLPEGYRLSIELGRFDPARLKDPEIHGELYQKGPQYDYENVRAYVLNRDRYTCQVCGKKGGKLHVHHILYRSYGATDDPQYMATVCSDCHNTENHQQGGILYQWMQKQKKFTRGLRDATFMNILRKRLIEAFPGATFTYGNITKADRERLKLPKSHGNDATAIAIVKTGIMTVKDKEPVIYIQQVRRKKRSLHEETPRKGRKEPNRKASRYDKNTKAVTVTKRKNKKKISITGCLFDRVELNGKKGWISGFTDKSCYVKDENDQYIRTSPKYKQVSLSKLKILHHCGNWAIGARRSLGKG

SEQ ID NO: 14091 - protein, 436 aa, unidentified
MTKTLTTHTTQACVLDRQGKPLMPTTRLGKVYRLLKAQKAHIVSYEPFTIQLDYEPDTHVIQPMTLGVDSGAIHSGYSVANEHREYYSAEVIARNDISNRISDRRMYRQNRRSRKTRYRKPRFNNRKNKKKGWLPPSLEQKVVVQVNEIDHIHRYFPIETIIVETAEFDIQKIKNPDISGIEYQQGTLQGYNIRNYLLEKHGRKCFYCGKTVSGFEVEHMLPKSRGGSSRIDNLTLSCHDCNEKKGTLTAEEFIQQTLPVKKAASKLKQLPNEKRLFKYMAYMNATRWALYDAIKEKYPNVKMTYGYITKYNRIQAGLPKAHYIDAKCITGFATVPPMNQTVVKVKMRRHNRQLHRATFSKGHVRKAASLPTITFGFQLYDIVCFNNHRYYIKSRRSSGYFALVSVENLKNEERSYKKLTLLAHTNAYLTNHYINL

SEQ ID NO: 14092 - protein, 443 aa, Anoxybacillus sp.; identical to SEQ ID NO: 4313

SEQ ID NO: 14093 - protein, 420 aa, unidentified
MQYVYVLNKHGEPLMPCSPGKARLLLKQQKACVVKRTPFTIKLLFGSAGYKQPITLGVDAGSKHVGLSASTEKRELYSEEFTPRSDVVELLSTRRQNRRSRRNRKTRYRVPRFDNRVHSKHKGWLAPSVEVKIQEHITVIKHICKILPISLVRVETAEFDTQRLKAMLAGKPLPVGTDYQLGEMYDEYNVRQYVLKRDHYTCQCCGTHNTAKKVVKLHVHHLESRKTGGNAPSNLVTLCTTCHKNLHKGRVTLDGKERGKPLRDAAFMGIMRKTLMIRLKEELPIPVQGTYGYITKMRREQNDIKKSHTNDARCISKHPLAEPCSVCYRTKAIRHHNRQTHKANFSKKGIRKRSQMPYLVEGFRLWDKVLYKGQECFVSGRRSSGSFALKKLDGTSISKGVTFKKLRLLEPATNYLIERM

SEQ ID NO: 14094 - protein, 627 aa, unidentified
  source 1..627: note = Lachnospiraceae bacterium
MQELEACICAVGDTMNAPTALVQVVALLQFMVKFRVHGIRNTVTLLPQKVPHWMHSNAVYDSELSFQKDVTVYMYVRVIAKDGTPLMPTRRCGNVRHLLETGMAVAIRTKPFTIRLKYETSKYVQALYAGIDTGRENIGSAVSKENGENVYLADTRSNNGTVHSKMYDRAGFRRKRCRHDRQNKQRKAKFDGTEMKKGDADKVRTTHDCISRKVSYPVAEKSVTHKVIQGKEGKFNNRKHPDGWITPSAKQLVQITMNEVKFMCDTMPIRQLSVERVSFDFQKLANVNIRAWEYGKGPLYGYRSYKDYICDEQKGKCPFCGEDIAHYHHIMPRHRRGTDTVRNIIGVCESCHEKIHSGQITDEMLHEVKDGVAESFEVGLLNSVMPALIDAMKQFCDARNIRLVVMDGRTTSETRNRYHIRKDHCTDAYCISLAGRNIDPADVKLDDFIFMKRRFKKKSKNIINTLNQRVYYDGKKPVAYNRHRAMDQKTDSLEEYMTKYRRTHTGAETDKHFRSLTVRPAKRTYTFHKNGTIAAVHAGDVVRYVKYNKTYGNTKIDTFVALSCEMFGEGHVKYGNGTQGRKLKFCKTIASGALQCVGIEKTDTYLREVALEEAKRRAARVRRKRTG

SEQ ID NO: 14095 - protein, 416 aa, unidentified; identical to SEQ ID NO: 8117

SEQ ID NO: 14096 - protein, 413 aa, unidentified; identical to SEQ ID NO: 2636

SEQ ID NO: 14097 - protein, 413 aa, unidentified; identical to SEQ ID NO: 12039

SEQ ID NO: 14098 - protein, 420 aa, unidentified; identical to SEQ ID NO: 2681

SEQ ID NO: 14099 - protein, 405 aa, unidentified
VPFTIILKYVPEGEPTPVQIKLDPGSRTTGIALTMKRKGKDEVIWAAELKHKGLEVKTKLDKRRAVRRSRRSRKTRYRPARFLNRRRKEGWLPPSLESRVGNVVSWMWWLCRWAHVDSIVMELVRFDTQRLQNQEISGTEYQQGTLFGYEVREYLLEKWKRRCAYCGAENVPLEVDHIVPRSHGGSNRVSNLTLACHACNQKKGVRPIEEFLSRKPEVLEKVLEQAKTPLRDTAAVNMSRFALLNRLRATDLPVKCGSGARTKYNRTAQGYPKVHWIDAACVGESGNNVQLDPEMHILSIKAMGRGSWQMCCMDRFGFPRTRPKGARFVYGFRTGDFVRADVPKGRHAGIHTGYVAVRATGSFRIGNADGISWQHCHLLQHGDGYQYNGILQSKGLVGTSNSFNV

SEQ ID NO: 14100 - protein, 512 aa, unidentified
MSTVYVLNKDGKPLMPTTRGGHVRHLLKEQKARVVRTNPFTIQLLYETDNLVQPLYLGIDPGRTNIGVAVVKTDGTAVFTAHLETRNKEIPKLMQGRKKARRARRTNGRRCRRQRRAKANGTISKKCVKQTTAQNGSVSKRAKEIGVIKRHLPGCEKEVLCIGIKNKEAKFSNRVRPEGWLTPTANQLLQTHINLVKKIQKFLPISDVVLEVNKFAFMQLDNPNIQKWQYQQGPLYQKASFEEAVSEMQEHHCLFCKKPIDHYHHVVPQHKNGSNTIGNIVGLCAKHHDLVHKDTTWQKKLAKKKTGLNKRYGALSVLNQIIPALTKELSSLFPKHFFATNGKSTYDYRAAHGVSKDHWLDAYCIASSVLPNDACDNNINNHVPYELKQFRRHDRRALHKENMGRVYTLNGKSVATNRHKATEQTTDSLEEFRQCQPDDVCKLKVKEHHPEYRNPKRNFPGCVFLVGKHTHVIQGTSGSHNGKADGYYDTNGNSYSSGKCKFVAKNEGIVFT

SEQ ID NO: 14101 - protein, 512 aa, unidentified
MSTVYVLNKDGKPLMPTTRGGHVRHLLKEQKARVVRAKPFTIQLLYETNDVVQPLYLGIDPGRTNIGVAVVKANGTAVFTAHLETRNKEIPKLMQDRKKARRARRTNGRRCRRQRRAKANGTISKKCVKQTTAQNGSVSKRAKDIGVIKRRLPGCEKDVLCIGIKNKETKFTNRTRPEGWLTPTANQLLQTHINLVKKIQKFLPISDVVLEVNKFAFMRLDNPNIQKWQYQQGPLYKKESLGSAVSEIQEHHCLFCKKPIDHYHHVVPQHKNGSNTIGNIVGLCAKHHDLVHKDSAWEKKLAKKSTGLYKKYGALGVLNQIIPTLTNELSSLFPKHSFVTNGKSTYDYRAAHGVSKDHWLDAYCIACSVLPSNVCDSNINNHMPYELKQFRRHDRRVLNNENMNRVYTLNNKAVAINRHKAKDQKTVSLEEFRKEHPDDVCKLKVKEHHPTYRNMNRNFPGSVFLVGKQIHVMQGIASSKDGKATKYNDTSATAIAAGKCKFVAKNTGILFV

SEQ ID NO: 14102 - protein, 472 aa, unidentified; identical to SEQ ID NO: 8142

SEQ ID NO: 14103 - protein, 421 aa, unidentified
MVYVISISGRPLMPTAHCGKVKHLLKDGKAKVVHREPFTIQLLYETTEYTQTTTLGVDTGSGTFGAAVVTDDSHKVLYMSEVEVRNDISKKMKQRSKYRRNRRYRKTRYRKARFDNRKNSIKDNRFSPTMQSKINAHEREIKFIKSILPVTHLVLETGTFDVALMNNPTLANPKIARWGYQKGPNYGFANTKAMVKARDGYTCAICKGKHKDRRLDVHHIIFRSQGGSDEAKNLITLCHTCHKKLHDGEIIYSGKGKRKGSLSFATQMNSIRKQLLARHPEAIETFGYITSENCQLYGLPKTHCIDAVVIASDVYKPIFATQDVFYKRCIAKGTYQCTKGVRSEKSMPKTKIAGFKQFDKVKYQNNLYFIKGRMSVGYAVLSDIYGTKIDFPHVPKLKEMQRIAARKSIIYITAKIDLKVS

SEQ ID NO: 14104 - protein, 427 aa, Enterococcus sp.; identical to SEQ ID NO: 2410

SEQ ID NO: 14105 - protein, 393 aa, unidentified
LLKAGKAKVIKRTPFTIKLLWDCEENTQEVVAGMDTGSKTIGCAATANGKVIYQSEVQIRQDVSKKMEQRRMYRRIRRSRKTRYRKARWQNRASMRKEGRLAPSITSKVDSHLREKKFVESILPVSCWKVEIASFDIHKISNPDVKRWDYQKGNQKGFYNVKAYVLHRDGYQCQKCKTKKGKLHVHHVVFRSNGGTDSPENLIVLCSDCHEKLHNGEFEIKGARSKTKHATEIGIVKSQLRKRFGDFEETFGYETKFKREQILQLPKSHHFDAVAICCEEGEIVELSDNIYFKKHVSNGDYQQTKGSRSEKRIPTGKLFGLRKFDYIQTPKVTGFIKGKRSTGFFTISDLEGKVINPSVNVKKNCTRLTARTTTLIERRGTFLHGACPVVSCA

SEQ ID NO: 14106 - protein, 408 aa, unidentified
MVYVQDINGKPLMPTTRRGKVRRLLKDKKAVVVNLCPFTIKLTYVTSDYKQEIVLGVDAGTKHVGLSATTKSKELYSSEVILRNDIVDLLSTRRELRRSRRNRLRYRKPRFDNRIKSKRPGWVAPSVKYKVDAHIRVIDNVCSILPISRIVIEVAQFDTQKINNPNISGKEYQEGDQLGFWNVREYVLARDGHKCQHCKGKSKDPVLNVHHIESRKTGGDSPSNLITLCETCHKEYHKGNIDLKIRRGKSLRDAAVMGIMKWRLYEELKSKYDNISMTFGYVTKYNRIKHGIEKSHVFDAFVISKNFDAIRLGYYYKVRLVRRHNRQIHKQKIPKGGIKRPNQSPFEVFGFRLFDRVMFENSYYFIFARRKTGSFNIRDIDGKNQRDITYKKLKLSRCKRFMVQKEMD

SEQ ID NO: 14107 - protein, 512 aa, unidentified; identical to SEQ ID NO: 6489

SEQ ID NO: 14108 - protein, 427 aa, Nostoc sp.; identical to SEQ ID NO: 2670

SEQ ID NO: 14109 - protein, 453 aa, unidentified; identical to SEQ ID NO: 9775

SEQ ID NO: 14110 - protein, 451 aa, Blautia sp.; identical to SEQ ID NO: 11030

SEQ ID NO: 14111 - protein, 406 aa, unidentified; identical to SEQ ID NO: 3157

SEQ ID NO: 14112 - protein, 424 aa, unidentified
MRVFVLNMRGEPLMPCSQRKARLLLKSNKAVIYKYNPFTIQLTYATGETKQDCHIGIDTGSKHIGAAITSEDKVLWKSEIELRQDVKSNIDAKRIYRRSRRNRKTRYRKPRFLNRKRNDEWLPPSLQNRINHTFHWIDTLNSLVPKPILHIEVGKFDTAKMINPEIHGVDYQYGQTYGFFDERYYVFARDNYTCQCCGKSKNKILNTHHIIYRSNGGTDRVDNLITVCTDCHTSQNHKKGGIFYKWQEQHKKVKQYKEPPFMNTLRKRIFVAYPNAEITYGVETTSKRKAMKLDKTHYNDAIVISGINEISENHEEWLLIKQFRKKKRSLHEATARKGRKILNRNQVRNCKNVPYYKGFYLNDKVSIFGKSGHVTGFTTNGAYVKDDNGNYITLPTKSYKQVSINKMRLKYHNNNWQYMAKRAV

SEQ ID NO: 14113 - protein, 465 aa, unidentified; identical to SEQ ID NO: 3603

SEQ ID NO: 14114 - protein, 474 aa, unidentified
VAVFVVDKRKNPLMPCSEKRATKLLGSGRARVHRLIPFSIRVLDREVAGCVLQPVKIKIDPGSKFTGIAVVRETKSIDVATGETGIAVHVLNLFELVHRGRQISEALTARRQMRRRRRGNLRYREPRFLNRGNKDKGWLAPSLQHRVDTTAAWASRLCRLAPVRGISQELVRFDMQKIENPEISGVEYQQGTLAGFEVREYLLNKWDRKCAYCDAKEVPLQIEHIHSKACGGSNRVSNLTLACEPCNQRKGAQDVRVFLAKDTKRLERILAQAKRPLKDAAAVNATRWALFNSLKTTGLPVTTGSGGLTKYNRTQLGIPKTHALDAVCVGAVSAATSWQKPTLTIKATGRGSYQRTRLDAFGFPRGYLTRKKRINGFQTGDMVSADITKGKNIGFYVGRVAVRATGSFNIQTAQGVVQGVSHRHCRLVQRADGYGYSQVAERKEMRNQVSRKARNASRSALYLTSLKDSVSRAQ

SEQ ID NO: 14115 - protein, 504 aa, unidentified; identical to SEQ ID NO: 3854

SEQ ID NO: 14116 - protein, 279 aa, unidentified
VVVETAEFDLQLLKAIADGKPVPQGEDYQKGEMYGHYNVRQYVLWRDNYTCQCCGTHPSKKKEVRLHVHHLESRKVGGDAPDNQVTLCESCHEKLHKGLIAEKDFKKRKRKSTRDATFMGIMRKTLMQRLCSELPIPVVKTRGYITKATREKLLVLPKSHTNDALAIAQGKRGFNVGYLPEIAQIDKIYTIRPVRHHNRQLHKATILKGGIRKSNQTGKYVFGYRLFDKVQFNGQDCFIWGRRTTGIFTIKTINGKMIKDGISFKKLKPVEKSTGYLIA

SEQ ID NO: 14117 - protein, 465 aa, unidentified; identical to SEQ ID NO: 12395

SEQ ID NO: 14118 - protein, 512 aa, unidentified
MSTIYVLNKDGKPLMPTTRGGHVRHLLKEQKARVVQSNPFTIQLLYETDDAVQPLYLGIDPGRTNIGVAVVKTDGTAVFTAHLGTRNKEIPKLMQGRKKARRARRTNGRRCRRQRRAKANGTISKKCVKQDTAQNGSVSKRAKKIGVIKRHLPGCEKEVLCIGIKNKEAKFNNRTRPEGWLTPTANQLLQTHVNLVKKIQKFLPISDVVLEVNKFAFMQLDNPNIQKWQYQQGPLYQKANLEEAVSEMQEHHCLFCKKKIDHYHHVVPQHKNGSNTIGNIVGLCTKHHDLVHKDSAWEKKLAKKSTGLYKKYAALGVLNQIIPALTNKLSVLFPKHFFVTTGKSTHDYRESHGVSKDHWLDAYCIACSALPGSVCDSDINNHVPYELKQFRRHDRRALHKENMSRVYTLNGKKVATNRHKAVEQTTDSLEEFRQCQPNDVCKLKVKEHHPTYRNMNRNYPGSVFLVDGQIHVMQGVGGSHNGKADGYYDTNSNAYPYYKCKFVAKNEGIVFA

SEQ ID NO: 14119 - protein, 424 aa, unidentified; identical to SEQ ID NO: 6692

SEQ ID NO: 14120 - protein, 509 aa, unidentified; identical to SEQ ID NO: 4404

SEQ ID NO: 14121 - protein, 420 aa, unidentified
MQYVYVLNKHGEPLMPCSPGKARLLLKQQKACVVKRTPFTIKLLFGSAGYKQPITLGVDAGSKHVGLSASTEKRELYSEEFTPRSDVVELLSTRRQNRRSRRNRKTRYRVPRFDNRVHNKHKGWLAPSVEVKIQEHITVIKHICKILPISLVRVETAEFDTQRLKAMLAGKPLPVGTDYQLGEMYDEYNVRQYVLKRDHYTCQCCGTHNTAKKVVKLHVHHLESRKTGGNAPSNLVTLCTTCHKNLHKGRVTLDGKERGKPLRDAAFMGIMRKTLMVRLKEELPIPVQGTYGYITKMRREQNDIKKSHTNDARCISKHPLAEPCSVCYRTKAIRHHNRQTHKANFSKKGIRKRSQMPYLVEGFRLWDKVLYKGQECFVSGRRSSGSFALKKLDGTSISKGVTFKKLRLLEPATNYLIERM

SEQ ID NO: 14122 - protein, 419 aa, Geobacillus sp.; identical to SEQ ID NO: 9987

SEQ ID NO: 14123 - protein, 427 aa, unidentified
MVYVLAIDGEPLMPTERHGKVRRLLKENKAKVVKRCPFTIQLLYDSTRYVQEINLGIDAGSKHIGVSATTKEKVLYEADVELRNDIVDLISTRRELRHLRRIRKTRYRKARFNNRVSTKKTGWLAPSVKQKIHTHLTVINNVYKILPIKNLIVETASFDIQKIKNPDISGEEYQQGEQKDFWNVREYVLFRDNHTCQCCKGKSKDKVLNVHHIESRKIGGNAPNNLITLCETCHKGYHNGSVKLPKSIHRGMSFRDAAFMGIMRKTLLSELRKIYPNVKETYGYITKNTRITYNLPKDHYIDARCISGNPDAKPLGYYFYQKKARCHNRQIQKMSILRGGLRKNNQAEYLVKGFRLFDKVKHNSKEYFIFGRRKTGYFDIRNFFGEKVNKGSVSYKKLKFLETRHNMLTERRKTIPYPAIKAEGLLA

SEQ ID NO: 14124 - protein, 415 aa, Bacillus sp.; identical to SEQ ID NO: 2671

SEQ ID NO: 14125 - protein, 442 aa, unidentified; identical to SEQ ID NO: 4653

SEQ ID NO: 14126 - protein, 415 aa, unidentified; identical to SEQ ID NO: 3582

SEQ ID NO: 14127 - protein, 442 aa, unidentified
MVTVQQSTHHLPFGRVFIRRNLFMVYVISQDGKPLMPCSDPIARLLLKQGKAKVKKREPFTIKLTYETTNHTQGLTLGVDTGSGTIGTAVSKDNGDIVYMSEVVVRNDITDKMTQRAKYRRNRRNRKTRYRKARWLNRASSIKKDRFSPTMQSKLHSHVREIEYIQSILPVTEMVFETGQFDMQLMKNPSLANPKVRPWGYQKGANYGFENTKAMVLNRDNYTCQCCKGKHKDSKLEVHHIVFRSQGGSDEESNLLTLCHTCHKDLHSGKINPKLSGKVKGNLKYATQMNSIRKQLFRFYPNAIETFGYVTKANRLHLGVDKEHYYDACTIATQGNAFNVKSNLYKKKCVSDGDFQKTKGIRSEQPIVTDKICGFRKFDKVRYFGNDYFIKGRMSTGYAILMDIYGNKIDFSTMPRGYKTPKLSNCKRITARSTVMTQVKVV

SEQ ID NO: 14128 - protein, 458 aa, Lactobacillus sp.; identical to SEQ ID NO: 3968

SEQ ID NO: 14129 - protein, 408 aa, unidentified; identical to SEQ ID NO: 5302

SEQ ID NO: 14130 - protein, 465 aa, unidentified; identical to SEQ ID NO: 5709

SEQ ID NO: 14131 - protein, 279 aa, unidentified
VVVETAEFDLQLLKAIADGKPVPQGEDYQKGEMYGHYNVRQYVLWRDNYTCQCCGAHATKKKEVRLHVHHLESRKVGGDAPDNQVTLCESCHEKLHKGLIAEKDFKKRKRRSTRDATFMGIMRKTLMQRLCSELPIPVIETRGYITKATREKLLVLPKSHTNDALAIAQGKRGFNVGYLPEIAQIDKIYTIRPVRHHNRQLHKAAILKGGIRKSNQAGKYVFGYRLFDKVQFNGQDCFIWGRRTTGIFTIKTINGKMIKDGISFKKLKPVEKSTSYLIA

SEQ ID NO: 14132 - protein, 435 aa, unidentified
MTKTLTTQTIQACVLDRQGKPLMPTTRLGKVYRLLKAKKAHIVSYEPFTIQLDYEPDTQVIQPMTLGVDSGAIHSGYSVANEHREYYSAEVIARNDISNRLSDRRMYRQNRRSRKTRYRKPRFNNRKNKKKGWLPPSLEQKVAVQVNEIDHIHRYFPIETIIVETAEFDIQKIKNPDISGIEYQQGTLQGYNIRNYLLEKHKRKCFYCGKTVSGFEVEHMLPKSKGGSNRIDNLTLSCHGCNQEKDTLTAEEFIQQTLPAKQAATKLKQLPNEKRLFKYMAYMNATRWALYDAIKERYPNVKMTYGYITKYNRIQAGLPKAHHIDAKCITGFSTVPSMSQTVVKVKMRRHNRQLHRATFSKGHVRKAASLPTTVFGFQLYDLVCFDNHRYYIKGRRSSGAFALVSIEGLKDENRNYKKLTLLAHTNAYLTNHYVN

SEQ ID NO: 14133 - protein, 447 aa, unidentified; identical to SEQ ID NO: 3915

SEQ ID NO: 14134 - protein, 489 aa, Streptomyces sp.
LALEFESADNPGIRDETGLGRRKAPGVGHVRGETTSSTPAAGGVTADQQVREPGREADPAVFVLDKHGTPLQPTTPARARKLLASGRAVVARHTPFVIRLKDRTANHSEVAGVEIGIDPGSKHTGIAVFTTVTGERRGRYSIQLDHRGATIRKKLEQRAAYRRGRRSRNLRYRAPRFLNRTRPKGWLPPSLQHRVDTTTSWVDRLARWVRVTAVHVERVAFDTNAISAGRPLEGAEYQHGTLHGMEVREYLLAKFGRACVYCGAMGVPLNIDHIRPRSRGGSDRVANLTLACIPCNQTKGNRPVEEFAPKRAAEILKRAKAPLRDATAVNATRWALWRALDARMPTRTASGGRTKWNRTRCALPKTHTLDALAVGTLDTVTVWPRTVLVIGATGRGQYARTRTDKHGFPRLRLPRVKQFFGFATGDLVRAVVPSGKNTGTHTGRVAVRSSGSFAVRTASGLYTARHKHFRLLQRADGYAYTRQPEGTTP

SEQ ID NO: 14135 - protein, 415 aa, unidentified; identical to SEQ ID NO: 13870

SEQ ID NO: 14136 - protein, 438 aa, unidentified
MNSHGHWREGQFSERKAAEMLNNQKEYAFVLDAEGKKLDPTIIQNAWRLVRQKKATLIAKRPMTIQLKKVVDTPNNDEIRMGIDDGAKYVGLALVQKCKTKNKVIFVATMEHRIDVHKKIVQRHEYRRYRRYLKRYRKDKSLNRANSRKQGWISPTIKQKRHAVIRIVDVLSKYICIDSIYLEDVAIDIRVLTEGHQIYGEQYQISNRLDENLRKATVLRDNCKCQLCGKKNCRLEVHHITPRRMNGSNTIGNLITLCSDCHSKVTGREMEFADQFYSKIGKKRNNYGLIYASHVMIGKTWLREELAKRAQLTLTTGGDTANKRINWNLEKSHEVDAVCITSLRPEFVNVKKWRIKPLRHQIKKRKTIEVLRFRHRDIVSYVYRNGEYHEGYVTAIFPLSKRRKENLSFQSQTKHCCRVAINKCKFICRPNKFYWLSS

SEQ ID NO: 14137 - protein, 442 aa, unidentified; identical to SEQ ID NO: 7213

SEQ ID NO: 14138 - protein, 423 aa, Moorena sp.; identical to SEQ ID NO: 11977

SEQ ID NO: 14139 - protein, 425 aa, unidentified; identical to SEQ ID NO: 3714

SEQ ID NO: 14140 - protein, 450 aa, unidentified; identical to SEQ ID NO: 4205

SEQ ID NO: 14141 - protein, 413 aa, unidentified
MTSYSFVLDANGKQLAPTKEQKAWFLIRKKRAALVSKYPMVIQLMKEIPEKEICQDEIRCGIDDGGLHVGIALVQKCKTKNKVVFKGTMEQRNDVKHLMEVRRGYRRYHRYHKRYRQARFDNRKSSKREGRIAPSILQKRQATIRVIHWLNKWINITNYWLEDVSVDIRALTDGYQSYRWQYQKSNRLDENIRKAAILRDGGKCMECGKSNCRLEVHHIKPRRRNGSNTLDNLITLCESCHQKTEGQEELYMDRYFSLLKSSDNKNLNYAQHVMIGKMWLRKQLSGLGVLYLTSGGDTANKRIDWNIEKSHANDAVCITDLQPDTCDVKEWTMKPMRRQSKAKTDHVLGIHHRDLVEYTFKNGETHRGYVTALYPEQKAINFQSPTKHCKKVNARKCKLLWKYSKIYWFENAS

SEQ ID NO: 14142 - protein, 431 aa, unidentified
MPNKVYVINKHGRPLMPCSPAKARHLLDAGKAKVKKRTPFTIQLVYGSSGYTQEVILGVDAGSKTIGMSASTTKEELLSAEVKPRNDVVDLLSTRREFRRARRNRKTRYRKPRFDNRVRSKHKGWLAPSVEVKIQEHITSIKRVCRILPVSKVVIETAEFDLQLLKAIEEGKPVPQGEDYQQGEMYGHYNVRQYVLWRDGYTCQCCGAHATKKKEVRLHVHHLESRKVGGDAPDNQVTLCESCHEKLHKGLIAEKDFKKRKRKSTRDATFMGIMRKTLMQRLCSELPIPVVKTRGYITKATREKLLVLPKSHTNDALAIAQGKQGFNVGYLPGIVQINKIYTIRPVRHHNRQLHKATILKGGIRKSNQTEKYVFGYRLFDKVQFNGQDCFIWGRRTTGIFTIKTINGKMIKDGISFKKLKLVEKSTSYLIA

SEQ ID NO: 14143 - protein, 419 aa, unidentified
MVYVISQDGKPLMPCSDPIARLLLKQGKAKVKRREPFTIKLTYETTNHTQGLTLGVDTGSGTIGTAVSKDNGDIVYMSEVVVRNDITDKMTQRAKYRRNRRNRKTRYRKARWLNRASSIKKDRFSPTMQSKLHSHVREIEYIQSILPVTEMVFETGQFDMQLMKNPSLANPKVRPWGYQKGANYGFENTKAMVLNRDNYTCQCCKGKHKDSKLEVHHIVFRSQGGSDEESNLLTLCHTCHKDLHSGKINPKLSGKVKGNLKYATQMNSIRKQLFRFYPNAIETFGYVTKANRLHLGVDKEHYYDACTIATQGNAFNVKSNLYKKKCVSDGDFQKTKGIRSEQPIVTDKICGFRKFDKVRYFGNDYFIKGRMSTGYAILMDIDGNKIDFSTMPRGYKTPKLSNCKRITARSTVMTQVKVV

SEQ ID NO: 14144 - protein, 521 aa, unidentified
MNYIDFVFVTDKDSLPCNPINEGYAGKLLRTGKAKIVNHDPLVIKRLDDYSSKNENRHTITLKVDTGFGNIGFSASDDKHEYIAGQVELLSGISDRLVTKKGYRTQRRSRLRYRRNKNIDYKTVNNPTYKNGNKDGWLAPSVIHKIESHVRVIDRIASWIPIDKVIIETANFDIQKIKATLNGTAINGIDYQKGEMYGFENAKQYVRERDNYTCQICKEKLTDKRHVVIEVHHIIPKSKGGSNKPDNMISLCHCCHKKVHENNNDNKLFRELRQRKIINTYKDATFMNTMRWELYNRLKENYDVSMSFGYITRMNRKNAGLEKYHYTDAVCISEYHKITLTKNIYLVEQKRCNDRCMESFFDAKYIDSRDGKVKKGSELCKSRVATASSKRSTKKEDIDNKRIYRQEKVSKGKRRYENHSYCLKPGDLIYINYGNHKGNIAEVTTMQKNPNGTYKIVFSYANPKCKIPSINIKEKEYVELTHNQCEKIKIVRTRRGMIWRKVNRLEFEENTTEQIDRKVKK

SEQ ID NO: 14145 - protein, 492 aa, unidentified; identical to SEQ ID NO: 4486

SEQ ID NO: 14146 - protein, 420 aa, unidentified; identical to SEQ ID NO: 11172

SEQ ID NO: 14147 - protein, 424 aa, unidentified; identical to SEQ ID NO: 3351

SEQ ID NO: 14148 - protein, 419 aa, unidentified; identical to SEQ ID NO: 6987

SEQ ID NO: 14149 - protein, 442 aa, unidentified; identical to SEQ ID NO: 3161

SEQ ID NO: 14150 - protein, 369 aa, unidentified
VDTGSGTIGTAVSNDNSDIVYMSEVIVRNDIMDKMTQRRKYRKNRRGRKTRYRKARWLNRANSTKTDRFSPTMQSKLHSHVKEIEYIKSILPITTMVFETGQFDTHLMKNPNLANPKVKHWGYQKGGNYGFENTKAMVLNRDNYTCQCCKGKHKDSKLEVHHIIFRSQGGSDEESNLITLCHTCHKDLHSGTINFKLKGKLKGNLKYATQMNSIRKQLFRIYPDAIETFGYVTKANRLVLGIDKEHYYDACTIATQGNIFTVKSNLYKKKCVSDGDFQKTKGIRSEQPIVTDKICGFRKFDKVRYFGNDYFIKGRMSTGYAILMDIDGNKADFSAMPKGYKTPKMVKLKRIEARTTWMITTVEVTPNIA

SEQ ID NO: 14151 - protein, 465 aa, unidentified
MSTCVCVLSNSGERLMPTFRLGKVRHLLKDGKAKIVKHHPFTIQLLYDSKTNTQPIEICEDVGYNYIGISVKSESHEYVSAQYDTLQDEKKHHDDCRKYRRTRRNRLRYRKPRFDNRKRSEGWFAPSLRHKKELNVNVVKMYCAVMPITHATVEVGSFDTMLVKAIQEGKAIPEGADYQKGPRYNLATLREAVFYRDNYVCKVCGRKATEGAILHVHHMFYWKGRHGNSLSELITVCEKCHTPANHQKGGKLYGFGENVKFADLSGAAFMNTVRWQIVNELYAAFGKDFVTVTYGAMTKEKRIALRLEKSHNNDAYAMGEFHPNCRCTFEHYEKVRRNNRILEKFYDSRYIDIRTGEIATGKELFNGRINRNHKKDSENLHRYRGKRTYAGHRALLRKKVNLNPGDLVSLNGEVLVVHSTHTNKKGAVNVEFKTPGKSGQKSASLKKLKIVKAADSMHSAWEKIS

SEQ ID NO: 14152 - protein, 416 aa, unidentified
MTNVKEYVFVLDAEGKQLSPMRIEKAWYKIRHNQAKLVNKYPMVVQLYKVVPEDEICKDEVRCGIDDGGLHVGIALVQKCQTKNKVFLKGTIEQRNDVKKLMSERKMYRKYRRKFKRYREERFSNRASAKRKGRIAPSILQKRQATMRVINQLNKWINISGYWLEDVAIDIRAMTDGYKSYGWQYQKSNRLDENIRKAVILRDGCKCMECGKSNCRLEVHHIKPRRNNGSNTMSNMITLCSKCHNKTEGKEGQFMDRYFSMINGYDNKHLNYASHVMIGKTWLREQLSNLAPLHLTTGGDTANKRIDWSIEKSHSNDAICITGLMPDTVNVKDWVLKPIRRKCKGKTDNVNGFKYKDYVQYTYQNGATYRGYVTVLCPKSNAISFQSNYKKCAKVNAHKCKLLWRFNSIYWLSERR

SEQ ID NO: 14153 - protein, 429 aa, Parasutterella sp.; identical to SEQ ID NO: 4241

SEQ ID NO: 14154 - protein, 524 aa, unidentified
MEILRIDWKDICPTGRSGLPQKELFMRPVYVLDMNGKPLMPTCRFGKVRRMLKSGEAKVVDTLPFTIQLDRPTKTHVVQSVTLGCDPGRTNIGLAAVRSDGTDLYRSHCETRNKEIVDLMDARRAARRASRRGERLARKRLAAKHETATTFPDGRKHPGCEKPIMLKDIINTEARFNNRVRPAGWLTPTATQLLWTHLNLIKRISRILPVSDIALEINKFAFMQLDEPDKNKWNIDFQHGPLYGTGGLKAAVRQLQNNTCLLCQENVIEHFHHLIPRSKRGDNTINNIAGLCQKCHEAVHKSADTAEKLSTLKKGQTKRYGGTSVLNQIIPKLVEELGKTYHEHLHLTYGWQTKEFRTKHKLEKTHDTDAYCIAAGTMQTVKPNIRTDVYEIKQFRRHNRANIHHQTERTYKLNGQTVARNRRKRTDQKTDSLAEWFENTVKQYGQQKAEHLRAGLKVRKSTRYYNFKDRVMPGAVFQYEGNRYVVTGQPSGGQYYRAYGKGNQNFPAKKIRIISLNRGLVYVA

SEQ ID NO: 14155 - protein, 418 aa, unidentified; identical to SEQ ID NO: 6419

SEQ ID NO: 14156 - protein, 438 aa, unidentified
LTTGKYITSAQPWQEEKFSERKVSEMTSYAFVLDADGKQLAPTKEQKAWFLIRKKRAALVSKYPMVIQLNKEIPDEEICKDEIRCGIDDGGLHVGIALVQKCQTQNKVVFKGTIEQRNDVKHLMDIRRGYRRYHRYHKRYRQARFNNRSSSKQKGRIAPSILQKRQATVRVINQLNKWINITDYWLEDVAIDIRAMTDGYKSYKWEYQKSNRLDENIRKAVILRDGCKCMECGESNCKLEVHHIKPRRLKGSNTLGNLITLCTKCHQKTKGVEELYMDRYFALLNSSDDKNLNYAQHVMIGKKWLREQLSSLGILHLTNGGDTANKRIDWDITKSHSNDAICITNLRPNKCEIKEWTIKPMRRQSKAKTDNVLGIKHRDFVEYTFRNSETHRGYVTALYPEQNALNFQSPTKHCKKVNARKCKVIWKYSKIYWLDNVS

SEQ ID NO: 14157 - protein, 436 aa, unidentified
MTKTLTTQTTQACVLDQNGKPLMPTTRLGKVYRLLKTKKAHIVSYEPFTIQLDYEPNTHIIQPMTLGVDSGAIHSGYSVTNEHREYYNAEVIARNDISRNLSNRHMYRRTRRTRKTRYRKPRFNNRKNKKKGWLPPSLEQKVATQLNEIDHLHRYFPIETIIVEVAEFDIQKIKNPDISGIEYQQGTLQGYNIRNYLLEKHGHKCFYCGKTVSDFEVEHMLPKSRGGSNRIDNLTLSCHDCNEKKGTLTAEEFIQQTLSAKKAVSKLKQLPNEKRLFKYMAYMNATRWALYDAIKGTYRNVKMTYGYITKYNRIHAGLPKAHHIDAKCITGFLTVPSMSQTVVKVKMRRHNRQLHRASFSKGHIRKIACLPTTVFGFQLYDLVCFNNHRYYIKSRRSSGAFTLASVEGLKNEKRTYKKLTLLAHTNAYLTNRYVNA

SEQ ID NO: 14158 - protein, 512 aa, unidentified
MSTVYVLNKDGKPLMPTTRGGHVRHLLKEQKARVVRTKPFTIQLLYKTDDVVQLLYLGIDPGRTNIGVAVVKADGTAVFTAHLETRNKEIPKLMKKRKDSRRARRTNGRRCRRQRRAKANGTISKKCVKQATAQNGSASKRAKKIGVIKRHLPGCEKDILCIGIKNKEAKFNNRTRPAGWLTPTANQLLQTHINLIKKIQKLLPISDVVLEINKFAFMQLDNPNIQKWQYQQGPLYQKANLEEAVSEMQEHHCLFCKKKIDHYHHVVPQHKNGSNTIDNIVGLCTKHHDLVHKDTAWHEKLTKKKTGLNKKYGALSVLNQIIPALTKELSSIFPKHFFVTTGKSTYDYRAAHGVSKDHWLDAYCIACSVLPNDVCNSSINNRVPYELKQFRRHDRRALNNENMSRVYTLNDNVVATNRHKATKQTTDSLEEFRQNHPDDVCKLKVKEHHPTYRNMNRNYPGSVFLIGKQVHVMQGIAGSKDGEATTYKNTNANSIAAGKCKFVAKNSGILFV

SEQ ID NO: 14159 - protein, 507 aa, unidentified
MPEYIYVLGMDGKPQMPTTRRRHVQKLLDTGKARIAESVPFTIQLLYDNDPVLQPVTLAEDPGRTNIGLAILDLKGELLLSAVVETRNKEIAKLMEKRRQCRRASRNGERKARQRLAKKYGTMIKAGMVMRKLPLYKADKFITCKFIRNTEARFCNRKRKDGWLTPSARHLVQTHVNLIHKIQKYLPVTDVALEVNRFAFMQLEDPSVCGVDFQNGPLKGYDDRDAAVYDLQDGKCLMCRHGITQYHHIVARSRNGSNTLENIAGLCDACHDRVHKDVKFAKQLKDKKEGLDKKYGALSVLNQAIPFICQKLEAEFGKEHVHYCTGRETSLVRRSIGYHKTKKNQLHEVDAWCIGFLSLNQIPERIPDFTEVHLIRQFRRQDRSLIKAQTERTYKLDGKTVAKNRKKRTGQETDSLEDWYNKQMKSYGKQKADRMRSRLTAEKSLRRYNDPSRVLPGTVFLYEGKRYVLSGQLTGGKYFRAVGDTKTNYPAAKCRILRQNEGLVFIR

SEQ ID NO: 14160 - protein, 407 aa, unidentified
VPPGFPERGAQGKAAAGEEVRDDDQGRYDDAEVPQYAAEKFITCKIIRNTESRFCNRKRKDGWLTPSARHLVQTHVNLVHKIQKYLPVTDVALEVNRFAFMLLEDPSVCGVDFQNGPLKGYDDRDAVVYDLQDGKCLMCKNEITQYHHIVPRSRNGSNTINNIAGLCDKCHDRVHKDADFAKQLKDKKAGLDKKYGALSVLNQAIPFICQKLEAEFGKEHVHYCTGRETSLVRRSIGYHKTKKNQVHEVDAWCIGALSLKQIPEDVPDFKDVHLIKQFRRQDRSLIKAQTERVYKLDGKTVAKNRKKRTGQETDSLEDWYNRQVETYGKQAADRMRSQLKVTESRRRYNNPDRMMPGAVFLYQGVRYVMRGQHCKGAYLQAVGMGNKDFSAKECKIVTQNTGLVFVS

SEQ ID NO: 14161 - protein, 413 aa, unidentified; identical to SEQ ID NO: 2636

SEQ ID NO: 14162 - protein, 470 aa, unidentified; identical to SEQ ID NO: 2825

SEQ ID NO: 14163 - protein, 433 aa, unidentified; identical to SEQ ID NO: 6602
  source 1..433: note = Microcoleaceae bacterium UBA9251

SEQ ID NO: 14164 - protein, 428 aa, unidentified
LKVFVLNMRGQPLMPCSPAKARHLLKAGKAVVKRRTPFTIQLRIATGETKQNVTLGVDAGAKHVGLSATTEKEEVFASEVELRQDITGLLAARLSLRRDRRHRKTRYRAPRFLNRVRSKHKGWLAPSVENRIQAHMSRIDAVCRLLPVTKIVIETASFDIQKIKDPSVEGTDYQQGDQLGFWNVREYVLFRDGHVCQHCHGRSKDKILNVHHLESRQTGGDAPNNLITLCETCHKAYHAGKIKLKVKRGQSFRAEAFMGIMRWTLLDRVRKAHPGLPVENTYGYLTKHTRITHGLPKTHCVDAYCIAGNLKAVRRGVHLYQRQVRKHNRQIHKCTVLSKTLKDGTKIGYRKLNQTPHLVKNFRLFDKVRCLGQTGFIFGRRSSGYFDVRRLDGVKLSSGISYRKLTLLEKRSTYLTELRKEDGASSPV

SEQ ID NO: 14165 - protein, 425 aa, unidentified; identical to SEQ ID NO: 3655

SEQ ID NO: 14166 - protein, 426 aa, unidentified; identical to SEQ ID NO: 3614

SEQ ID NO: 14167 - protein, 468 aa, unidentified; identical to SEQ ID NO: 5996

SEQ ID NO: 14168 - protein, 420 aa, unidentified
VYVKNEDGTPLMPCTPAKARKLLRDGRARIVRYRPFTIQLSWACETHVQEVTLGIDKGSSVTGFSAVGNGRVLLSGDIHHRRDVKEKMDTRRGHRRQRRNCLRYRQPRFLNRGSSKRSGRLPPSIRTNVEEVVRVVERIPLPISAIVVEDVQVDIARLNNPTLRGRHYQDPTRLDENLRIACLMRDRYQCQHCGTRTGKRLEAHHIVHREHGGKDTLTNLITLCSSCHRKVHAGTVTLNQTGMSGHLDQIAQRTQQGKTHLYDQVRRIAPVSLVYGYETAAFRKALGVEKAHDGDALCIATLQTGDVVPFHRDCFWSVSFRSRRTRRQYHSLPIKGKGRVRYQVNEELDGFRKGDLVLVKGQWFKQVNSIYSTGRLAFHRVAGEPSSALPRDCRLLEKQRTIIWKKETENATKCHISKER

SEQ ID NO: 14169 - protein, 485 aa, unidentified
MTYVLGKRGNPLMPTRRNAHVCYLLNHKLAVVVSYNPFTIRLKYETPEITQPLMLGIDPGRTNIGAAVVIEDGECVFSAHGTTNNKDVPKRTKKRKAHRQASRRGERKRRQRRAKKNGTCFTEKQRTLPGCEEPITCKTIKNSEARFNNRKRPKGWLTPTANHLLLCHLNKIDKIAKILPVTGVTLEVSKFAFMATENPNTQRWEYQRGPLYDKGSVEEAVYVQQGGKCLLCDKDIDHYHHLEPSHKNGSEGIENRAGLCNEHHDLVHKDKEWRKKLAETKAGLNKKYHALSVLNQVTPFLADELAKRFPGSFFVTDGKSTAAFRDVNLIPKDHHLDAYCIACSTLGLVTPKPPTQHYELRRFRRHDRAATSRVEERKYYLDKELVAKNRNKRTEQFDDSLAEFRNKQPEDVARLTVKKGGPRYTDTKRVLPGAIFLVDGKRLVLQGRQGRTKNGESISFDFVGYGKTPPKNCIFVNNGGGWQYV

SEQ ID NO: 14170 - protein, 416 aa, unidentified
LVYILSKNGNPLMPTNRHGKVKHLLKDGKAKVVRRTPFTIQLLYDSPEYTQPITLGVDAGSKVVGLSATTEKKELFVSEATLRDDITELLSTRRQNRRTRRNHLRYRMARFLNRTASKKEGWLAPSVKHKVDSHLKVIGNVHRILPISRIVIETASLDIQKIRNPEISGREYQQGEQLGFWNTREYVLWRDNHECQHCHGKSKDRILNVHHKESRKTGGDSPGNLVTLCETCHKSHHAGRIKLKLTPNKSYRDASFMGIMRWYVFNSLNELYPEVSITYGYITKNNRIRNNIEKTHSADAYCISGNLNAMRIDEIYYQVFKRKHNRQIHKANFLKGGKKELDQSAYEVKGFRLFDHVRYRDEDCFIFGRRISGYFDLRKLDGSVVHRSASFKELTLLKRQNTILIERKECKGVLLS

SEQ ID NO: 14171 - protein, 418 aa, unidentified; identical to SEQ ID NO: 4424

SEQ ID NO: 14172 - protein, 408 aa, unidentified; identical to SEQ ID NO: 6729

SEQ ID NO: 14173 - protein, 423 aa, unidentified
MVFVLDKSKKPLDMISNAEARILLRKKLAIIHKIYPFTIRLRDNSCGSDDKTYTVKIDPGSKTTRIAIVDNKDSVVMLAEIEHRGHLIKRNLGKRRAVRNSRRQRKTRYRAARFLNRTRPQGWLAPSIRSRANNVINFIKKYKKLININKVMIENVSFDVAQMSFNTKLWGNAYQQGPLYQNKLRSFIFNRSNNKCVYCGAKATEIDHIIPRAKGGTNSTYNLVASCRACNQMKSNLTLKAFGKMMNKDYSRLEPKKLPKDAAIVQSSRNYMVREITKLVSDTTTHDAWMTQYNRDQLGLPKQHYYDALSVGEVPNKFNFLTDKILLISAKGRGSRQMCRMDKYGFPRTSAKVSKSVRGFQTGDIVRAIVTEGLKKGEYLGKVAVRSSGYFDIQTKTQVIEGIGYKYCRIIQRGDGYLYSYKE

SEQ ID NO: 14174 - protein, 413 aa, unidentified
MVYVLNINGHSLMPTERFSKVRRMLRDGKAKVIKRCPFTIQLLYQTTNNVQPVNLGVDAGSKHIGLSATTKNKVLYEADVELRNDIVTLLATRAELRRTRRNRKTRYRKPRFNNRIATKKEGWLAPSIKNKIQTHLSVVDKVYKILPVSKIIVETASFDIQKIKNPDINNEDYQQGEQLGFWNVREYVLFRDNHQCQCCKGKSKDKILNVHHLESRKTGGDAPNNLITLCEYCHKQYHLGKLNLPKNIHRGMKFNDAAFMGIMRWNFYDNLKKKYESSGVPVSLTYGYITKHTRIQYNLPKEHYIDARCISGNPTADSNGEYFYQKKVRCHNRQIHKMKILKGGKKKNNQAPFEVFGFRLFDKVLYNNEINFIYGRRKSGNFNIRDFNGENPKDVSYKKLKLIRGKRHPIILK

SEQ ID NO: 14175 - protein, 442 aa, unidentified; identical to SEQ ID NO: 2903

SEQ ID NO: 14176 - protein, 417 aa, unidentified
MPCSPAKARLLLKEKKAIVKRRTPFTIQLTIATGESKQPVTLGVDSGYKHIGLSATTERAELYASQVELRQDITDLLSARLALRRSRRSRKTRYRAPRFNNRVASKHKGWLAPSVENRIAAHLSRVEAVMRVLPVTAITVETAAFDTQLLKDPDIAGGAYQQGEQLGFWNVREYVLFRDGHVCQHCRGKSKDPVLNVHHIESRRTGGDAPNNLITLCETCHKAFHRGEIELKVKRGKSFKAETFMGIMRWTLFERLKKAHPELSVRNTYGYLTKHKRISHGIAKSHCADAYCIADNLGAKRLEGFFFQKQTRKHNRQIHKLSILKGGLRKKNQAPYEVKDFRLFDKVICKSEEAFIFGRRTSGSFDVRRLDGTRISAGISYKKLRLLEPRTTYLTEFRKEAALPPLHKCRGFRAEFL

SEQ ID NO: 14177 - protein, 449 aa, unidentified
MTIFVISAEGERLMPTMNIRKIRKLLRSGRAKIVKHQPFTVQLLYDTTSGVQPVELSVDTGYQHIGVSLKSEKQEYVSAEYTLLKDEKQHHDDQRREVRRPRRNRKRYRKVRFDNRNKPEGWLAPSLRNKADRHIDIFRMYDEVCPITKVTLEMGQFDPAVLTVVEQGKPIPVGTDYQHGPRYGYDTLREAVFARDGYRCLCCGKSAIHDGVILRIHHVGFRAGDRSNRLSNLATVCEKCHSPKNHKPGGKLWDLKPPKGMASASFMNTVKWHIYEDVKSFGVEASITYGAVTKRTRIDLNIGKSHANDAYCIGSLRPKHRTRTLYFEKRRRNNRILEKFYDAKYVDIRDGKTKKAAELGCNRTSRSIPRSNSQNERIFRGKKVSKGRRSIRTQRYLYQPGDIVIFEGRNRTVKGTHNKGASVQLIGGGDISPRKIRLLHHVGGWRQVM

SEQ ID NO: 14178 - protein, 415 aa, unidentified; identical to SEQ ID NO: 6534

SEQ ID NO: 14179 - protein, 409 aa, unidentified
MKVFVRNQDGTPLMPCTPAKARKLLRAGKARVVAHTPFTIQLGWQCEGQVQAVVVGIDKGSSVTGISCVGNGAVLLAAEIHHRRDVKDKLDTRRAHRRSRRLRKWYRPARFLNRASSKRSGRLPSSIKTNVEEVIRVVRQLPLPISQIVAEDVQVDIARLNDSTLRGSRYQDPNRLDENLRIACLMRDRYTCRHCGTRNCRLEAHHIVYREHGGKDTLANLLTLCERCHEKVHASTITLKVTGVSGQFDQIAQRSMQGKTYLYTTLGATVPLTTVFGYETSAFRKRRGLAKTHTADALCVATLGSGEIVTPDCPNTYRIAFRPRQTRRQFHDLPRKGLGRVRYQVHEELAGFRKGDIVRVKGRWVKQINSIYSNGLVAFKRVPGEPATARPRNCRLLERGRTIVWEQVV

SEQ ID NO: 14180 - protein, 419 aa, Moorena sp.; identical to SEQ ID NO: 6711

SEQ ID NO: 14181 - protein, 489 aa, unidentified
MTMVYVQNKDGKPLMPTTRYCYVRLLLKEKKARVVCTTPFTIQLNYDTPDITQDLILGIDPGRTNIGVAVVKEDGQCVFSAHLETRNKDVPLLMKKRAAFRRNHRTLDRRRKRQRRAKAAGTTIAEGSVERLLPGYEKPIVCNHIRNKEARFNNRSRPAGWLTPTANHLLQTHINLIAKVAKFLPITKVVIELNRFAFMAMDNPNIRRWEYQQGPLYGLGSVEDAVYAQQDGHCLFCEKPIDHYHHVVPRHKGGSETLANRCGLCARHHDLVHTDKSWAEKLVTRKGGMNKKYHALSVLNQIIPHLIEHLGSETPYEAYATDGKSTKGFRIAKNVPKEHYTDAYCIACSILDTDIEVSAPTSPFELKQFRRHDRQACIRQMVDRKYLLDGKVVATNRHKAIEQKSDSLQEFREAYGSAAVSQLTVKPHPPQYKDMTRIMPGAVMDFNGTIGVMQSSIVGRFYKSTKGYKAAPRRCVLLAQNAGMVFLPA

SEQ ID NO: 14182 - protein, 456 aa, unidentified
MNHYVYVLDHTGNPLMPTKRHGWVRRALRDGKATVVKRSPFTIKLTYESETITQDVSLHLDSGYANIGFSAQANSRELLGGVLELLKGMSERIKERAMYRNNRRSRLRYRKPKFKKGGDFVSNRTDGWLAPSIQHKLDSHLNLIRKIQQILPITSIQIETASFDIQKINNPDIESTRYQQGEQLGFWNLREYILHRDNHTCQNPDCKNKGKEKILQVHHLGYWKQDRSDRPANLITLCTKCHTPKNHQKNGFLHGWEPRLKSFKPETFMTTVRRRLVNQAREIFDLPVTETFGYLTKASRIQKELPKSHHYDAFAMGNAITLSRPYTINQTRRNNRSLENFNDAKYLHKETKEKVSGQKLSSGRRTRNKESHLNEPNLRHLRGHKISKGYRAIRRRRYPLQPNDTIRYEGKICKVIGTHSLGRMVKFKLSCGKIANKSVNKVKQIASCKGLAFELC

SEQ ID NO: 14183 - protein, 415 aa, unidentified; identical to SEQ ID NO: 10558

SEQ ID NO: 14184 - protein, 413 aa, unidentified
MTSYAFVLDANGKQLAPTKEQKAWFLIRKKRAALVSKYPMVIQLKKEIQENEICKDEIRCGIDDGGLHVGIALVQKCKTKNKVVFKGTIEQRNDVKHLMEVRRGYRRYHRYHKRYRQARFNNRKSSKREGRIAPSILQKRQATIRVINQLNKWINITNYWLEDVSIDIRVLTDGYKSYRWQYQKSNRLDENIRKATILRDGGKCMECGKSNCRLEVHHIKPKRRNGSNTLDNLITLCESCHQKTEGQEELYMDRYFSLLKSSDNKNLNYAQHVMIGKMWLRKQLSGLGVLYLTSGGDTANKRIDWNIEKSHANDAVCITDLQPDTYDMKEWTMKPMRRQSKAKTDHVLGIHHRDLVEYTFKNGETHRGYVTALYPEQKAINFQSPTKHCKKVNARKCKLLWKYSKIYWFENAS

SEQ ID NO: 14185 - protein, 419 aa, unidentified; identical to SEQ ID NO: 4877

SEQ ID NO: 14186 - protein, 419 aa, unidentified; identical to SEQ ID NO: 6355

SEQ ID NO: 14187 - protein, 420 aa, unidentified; identical to SEQ ID NO: 6507

SEQ ID NO: 14188 - protein, 420 aa, unidentified; identical to SEQ ID NO: 6017

SEQ ID NO: 14189 - protein, 425 aa, unidentified; identical to SEQ ID NO: 10997

SEQ ID NO: 14190 - protein, 424 aa, unidentified; identical to SEQ ID NO: 3351

SEQ ID NO: 14191 - protein, 421 aa, unidentified
MRGQPLMPCSPAKARHLLKAGKAVVKRRTPFTIQLRIATGETKQNVTLGVDAGAKHVGLSATTEKEEVFASEVELRQDITGLLAARLSLRRDRRHRKTRYRAPRFLNRVRSKHKGWLAPSVENRIQAHMSRIDAVCRLLPVTKIVIETASFDIQKIKDPSVEGTDYQQGDQLGFWNVREYVLFRDGHVCQHCHGRSKDKILNVHHLESRQTGGDAPNNLITLCETCHKAYHAGKIKLKGKRGQSFRAEAFMGIMRWTLLDRVRKAHPGLPVENTYGYLTKHTRITHGLPKTHCVDAYCIAGNLKAVRRGVYLHQRQMRKHNRQIHKFTVLSKRLEDGTKIGYRKLNQSPYLVHGFRLFDKVRCLGQIGFIFGRRSSGYFDVRRLDGVKLSPSISWRKLTLLEKRSTYLTELRKQDGASSPV

SEQ ID NO: 14192 - protein, 414 aa, unidentified
MPCSPAKARLLLKEKKAIVKRRTPFTIQLTIATGETKQPVGLGVDAGYKHVGLSASTDKAELYASQVELRQDITDLLSARRALRRARRNRKTRYRAPRFNNRIRTKRKGWLAPSVENRINAHLSRIEAVLRLLPVTKITVETASFDMLLLKNPDIAGKEYQEGEQLGFWNVREYVLFRDGHVCQHCYGRSKDPVLNVHHLESRRTGGDSPGNLITLCETCHEALHRGEIALKTKRGHSFRAEAFMGMMRWEVLNRLKASHSELEVNNTYGYRTKHARIVNGIDKSHCADAFCIAGNLGAERLCEFFFQKQTRRNNRQIHKLSILKGGIRKRNQAPFEIKGFRLFDKVACKGEEGFIFGRRSSGYFDVRKLDGTRISAGISYKKLRLLEKRRTYLTEIRKEEALPPLPEGRGLRA

SEQ ID NO: 14193 - protein, 490 aa, unidentified; identical to SEQ ID NO: 3566

SEQ ID NO: 14194 - protein, 431 aa, unidentified; identical to SEQ ID NO: 7543

SEQ ID NO: 14195 - protein, 528 aa, Glycomyces sp.; identical to SEQ ID NO: 9621

SEQ ID NO: 14196 - protein, 427 aa, Enterococcus sp.; identical to SEQ ID NO: 2410

SEQ ID NO: 14197 - protein, 414 aa, unidentified; identical to SEQ ID NO: 4779

SEQ ID NO: 14198 - protein, 436 aa, unidentified
MQRVFVLDLEKKPLMPCHPARARELLNKGRAAVYKRYPFTLILKDKIGGDVQPVELKFDPGSKTTGIALVGHFERGLEIVFGANLNHRGQKIKKDLESRRANRRGRRNRKTRYRPARFNNRRRTEGWLPPSLMSRVFNVETWAKRLQGLIPITSIAVETVRFDTQKMQNPEVSDVEYQQGELAGYEVREYLLEKWGRQCAYCGAEKVPLEIEHIQPKSKGGSNRVFNLTIACRKCNQKKGNRSIEDFLKRKPTVLKRIKAQTKKSLKDTAAVNVTRYAIGNALKQFGLPVTFWSGGRTKFNRTQQKYPKDHWIDAACVGETGEHVLIPKTLKPLSVTAVGHGSRQMCRVDQYGFPRTTAKKQKVVKGFQTGDIVKAVVTRGKKIGTYIGRVAVRASGSFNISTKNGTTQGISWKYCQRIQAVDGYSYLTEDRQFLH

SEQ ID NO: 14199 - protein, 511 aa, Acrocarpospora sp.; identical to SEQ ID NO: 4856

SEQ ID NO: 14200 - protein, 415 aa, unidentified
MVYVLDKNGQPLMPTDRHRKVRLMLQSGQAKVIKRCPFTIQLNYDSGHQTQEISLGIDAGSKHIGVSATTKIKVLYEADVELRNDIVDLLSSRRELRRGRRNRKTRYRQAKFNNRRRGNSWLAPSIRQKIGTHLTVVENICKILPISRIMVETASFDIQKIKNTDIQGAEYQQGDQLGFWNVREYVLFRDGHTCQCCKGKSKDKILNVHHIESRKTGGNAPNNLITLCETCHTGYHKGTVQLPKAIKRGMRFKDAAFMGIMRWAFYEALKQQYEPVALVHNTYGYITKHTRIAYNLPKEHYVDARCISGNPEASSNGEYYYQKKVRCHNRQIHKLTVLKGGIRKQNQATYLVKGYRLFDKVSYQGKGYFVFGRRQSGFFDIRTLSGEKVNKGSLSCKKLKFIATRTYYLTERRAV

SEQ ID NO: 14201 - protein, 415 aa, unidentified; identical to SEQ ID NO: 5047

SEQ ID NO: 14202 - protein, 415 aa, Bacillus sp.; identical to SEQ ID NO: 5533

SEQ ID NO: 14203 - protein, 459 aa, unidentified; identical to SEQ ID NO: 9971
  source 1..459: note = uncultured beta proteobacterium

SEQ ID NO: 14204 - protein, 204 aa, unidentified
VWLYQAVYNLGEGFLPSSEERTAFYWLLIYRKEHGIMQYVYVLNKHGEPLMPCSPGKARLLLKQQKACVVKRTPFTIKLLYDSAGYKQPITLGVDAGSKHVGLSASTEKRELYREEFTPRNDVVDLLSTRRQNRRSRRNRKTRYRAPRFDNRVHSKHKGWLAPSVEVKIQEHITVIKRICRILPITLVRVETAEFDTQCLKAML

SEQ ID NO: 14205 - protein, 453 aa, Lactobacillus sp.; identical to SEQ ID NO: 4050

SEQ ID NO: 14206 - protein, 459 aa, Ammonifex sp.; identical to SEQ ID NO: 4898

SEQ ID NO: 14207 - protein, 443 aa, Anoxybacillus sp.; identical to SEQ ID NO: 12144

SEQ ID NO: 14208 - protein, 415 aa, unidentified
MVYVVANDGQPLMPTERHGKVCRMLKSGMAKVIKKCPFTIQLQYESERNVQPVSLGVDAGSKHIGISATTKTKVLYESDVELRDDIVKLLATRRQLRRSRRNRKTRYRPARFDNRKRKEGWLAPSIRQKMESHLTVVANVCKILPVSRIIVETASFDIQKIKNPDIQGVEYQQGEQMDFWNIREYVFFRDGHTCQCCKGRSKDKILNVHHIESRKTGGNAPNNLITLCETCHKGYHNGTVILPKNIKRGMKFKDAAFMGIMRWAFYNALKEQYEPAIPVSMTYGYLTKNTRIRHNLPKEHHIDARCISGNPDAVSDGTYYYQKKVRCHNRQIHKQTILKGGIRKSNQAEYLVKGYRLFDKVRYHGREYFIFGRRKTGFFDIRTLSGEKVNKGSISVKKLTFADTRKNYLTERRTV

SEQ ID NO: 14209 - protein, 512 aa, unidentified; identical to SEQ ID NO: 8121

SEQ ID NO: 14210 - protein, 423 aa, unidentified
VPIMVYVLNINGQPLMPTNRHGKVKCLLKQGKAKVIRRCPFTIKLLYQSTAYTQNLTLGVDTGSGIIGTAVSKDNGNIVYMSETIVRNDITDKMTQRAKYRRNRRNRKTRYRKTRWLNRKNSIKTDRFSPTMQSKLHSHVKEIEYIKSILPVTTMVLETGQFDTHLMKNPSLANPNVKHWGYQKGANYGFENTKAMVLNRDNYTCQCCEGKHKDSKLEVHHIVFRSQGGSDEESNLITLCHTCHKDLHSGKINPKLKGKVKGTLKYATQMNSIRKQLFRVYPDAIETFGYVTKANRLALGIDKKHYYDACTIATQGNIFIVKSNLYKKKCVSDGDFQKTKGIRSEQSIVTDKICGFRKFDKVKYFGKEYFIKGRMSTGYAILMDIDGHKINFSTMPKGYKIPKLSNCKRVTARTSQMLQAVVI

SEQ ID NO: 14211 - protein, 447 aa, unidentified
VPAYRIKHITKKEAPYMVYVLDIDGQPLMPTSRHRKVRKLLNSHLAKVVKRCPFTIQLLYQSTKETQPVSLGVDAGSRHIGLAATTEQKVVYQEELVPRNDVVKLLSARRALRSSRRSRKTRYRKPRFNNRVHSKHKGWLAPSVEVKIQEHITAIKRICQILPISKIHVEISEFDLQRLKAMEEGRTLPVGTDYQLGEQYDFYNTRQYVLHRDEYTCQCCGTHDNNVKLHVHHIESRQTGGDAPNNLITLCEHCHKLLHAGKTILPKGKKRGKSYRDATFMGIMRKTLLERLRKEVDVPASGTYGYITKYWRERAGLEKSHINDAICISKHPYARPLETYYLTKAVRHHNRQIHKTKFSKGGIRKRNQAPYLVKGFRLFDKVLYQDESYFIFGRRITGYFDIRTLDGTKVNKGSTSYKKLRIQDTAEAYLTEVRAIPHMNEFTCVLA

SEQ ID NO: 14212 - protein, 429 aa, Moorena sp.; identical to SEQ ID NO: 13847

SEQ ID NO: 14213 - protein, 446 aa, unidentified; identical to SEQ ID NO: 2419

SEQ ID NO: 14214 - protein, 420 aa, unidentified
MQYVYVLNKHGEPLMPCSPGKARLLLKQQKACVVKRTPFTIKLLFGSAGYKQPITLGVDAGSKHVGLSASTEKRELYSEEFTPRSDVVELLSTRRQNRRSRRNRKTRYRVPRFDNRVHSKHKGWMAPSVEVKIQEHITVIKHICKILPISLVRVETAEFDTQRLKAMLAGKPLPVGTDYQLGEMYDEYNVRQYVLKRDHYTCQCCGTHNTAKKVVKLHVHHLESRKVGGNAPSNLITLCTTCHDALHKGKVSLDGKERGKPLRDAAFMGIMRKALMARLREELPIPVQGTYGYITKMRREQNDIKKSHVNDARCISKHPLAEPCSVCYRTKAIRHHNRQTHKANFSKGGIRKRSQMPYVVEGYRLWDKVLYKGQECFVSGRRASGSFTLKKLDGTRISKGVTFKKLRLLEPATNYLIERM

SEQ ID NO: 14215 - protein, 414 aa, unidentified
MVYVINKQGQALMPTERFGKVRRLLKNSLAHVVCRIPFTIQLDYDTTDYTQPVSLGVDAGSKHIGISVTTSEKELYAADVELRNDIVDKLSTRREQRRTRRSRLRYRKARFNNRVSSKRKGWLAPSVENKIQTHLTVVEKIHKFLPITNIVVETASFDIQKINNPIISGSEYQQGEQLDFFNVREYVLFRDNHTCQHCKGKSKDKVLNVHHIESRKTGGDSPNNLITLCETCHKAYHRGEFKLNVKRGKSFRDSAFMGIMRWSFYDRLKNIYPNVSMTFGYITKNTRTTNNLPKDHYVDARCISGNPTAKPLGYYFYQKKVRCQNRQIHKANFLKGGRKKLNQAPFLVKGFRLFDLVEYQKELYYIFGRRSNGSFDIRKLNGTKVNKGSINCKQIRLIDTRKSILIEKRTQVNL

SEQ ID NO: 14216 - protein, 504 aa, unidentified
MVWEAIQTRRIKPHDIGEGTLRRHAAGTVSFPVLCKNRKETLMSVLVIGRNGRALMPTNPRKARLLLKKKTASVVCRHPFTIQLLYKTGCATQKGSIGIDTGSQHIGVGITCGDKVILKDEHALRSSMEKRSLLATRAVMRRGRRYRKVRYRKPKWRHHTKRMYFEKANRRGQHWRKVKTTTQSPRSKGWLPPSLQSKCDHHFRIIDRYLKYLPDPITRNLVIETGRFDMARMNDPTIHGEMYQRGPMYDAENRRAYIFARDNYQCACCKAKAGTTRKADGTTVKLVAHHILFRSRGATDNPKYMVSVCDHCHTTKAHQPGGILYSWMENNKKVTRGLRDATFMNILRKRLFARYPQAAFTYGNITAADRKQYHLPKSHVNDAVAVSLFGKEVPTVRDTCQTTYYKQVRKSKRSLHEAIPRKGRKRPNTKAVRNKKNTTQVNGFKLWDSVLANGKKLFICSFTGTSAYLIDKNGCYISQPGKTYKQWPLSKLKRLHPNGNWLMA

SEQ ID NO: 14217 - protein, 418 aa, unidentified
MFVYVISKDGQPLMPTNRFGKVRRLLKNKKAKVVSRCPFTIKLLYEPESLVVQKVVLGQDTGSKHVGTACVADDKVLYQSEVTLRDNIKKKMDNRRAFRKNRRRRKTRYRKPRFLNRANSNKKDRLPPSVKSKVQSHVDEIEFCKKILPISKIVLEVSQFDTALMKNPNLIDEKVKHWGYQKGFNYEYSSRREAVLHRDSYTCQCCGKKHVRLEVHHIIFRSLGGTDDEKNLITLCEKCHKAVHDGMLVLTKKPKKLNLKYATHMSIIRSQLLKIYPDAIETFGFVTKENRNNFDLQKDHFIDACVVASGGEKFKFNDIIYQKRRVAKGDYQLTKGVRGQQKIPVGKIQGFRKFDKVRYLKQEYFIKGRMSVGLSILMNIFNEKIDFSYLPRGWKIPKLSNLKRISARSSCLCISQRV

SEQ ID NO: 14218 - protein, 419 aa, unidentified; identical to SEQ ID NO: 4877

SEQ ID NO: 14219 - protein, 451 aa, unidentified
MSVAVINKTGERLMPTSEHRARKLLKSGKAIKHNYHPFTIQLTERESGDVQPIELCMDTGYIHVGTSVKSEKHEYLAEQIDTLTDEKARHDACRMYRRQRRSRKRYRHPRFNNRKRNDRWIAPSLEHKKSIHIQAILRICKVMPVTDITLEMGNFDTQVLKAREEGKPLPHGADYQHGERYGIATLREAVFTRDDYKCQCCGRTIKDGAILHVHHIKYRSQGGTNRMSNLITVCDKCHTPANHKQGGKLYNWKPKIASFKGATYMTTIRWKLYNEVKALFPDIDIHITYGAETKERRRALDIDKSHVNDAFVMGQFHPKHRSKPICYKKKRRNNRCLEKFYDAKYIDSRDGKKRSGQELFNGRISRNHKKDSENLHQYRLQKVTPGRRAIRRQHYPIQPHDIIVYNGNKIEVSGCQHKGTRVVFSKTKKSVQISKIKLFKYAGGYSKSVFN

SEQ ID NO: 14220 - protein, 442 aa, unidentified
MVYVLNKDGQPLMPTNRHGKARRLLKTKKARVIKRCPFTIQLLYDTTNHTQDITLGVDAGSKHIGLSATTEDKVLFEADVELRNDISKLLEARYTFRRSRRNRKTRYRKKRFDNRVSSKHKGWLAPSIEHKIQSHFAMVEKVHRILPVTKIVVETASFDTQLLKAQLESKPIPEGTDYQNGELAGWNIREYIFHRDNYTCQWCKGKSKDSILVTHHHAYWKGDHTNKPSSLITLCNTCNDSKYHKKEANRLWGWEPKITNSYKHAAFMGVMRWTFYNRLKEIYPNVSMTYGYITKNTRIENNLPKAHYVDARCISGHPKAKSNGEYFYYKKVRCHNRQLHKANTLKGGIRKRNQAEYTVKGFRLFDRVEYKNNEYFIFGRRASGFFDIRTLDGQKVNKGSISFKKLKLKETSKTYLIERRMADTGVSLAPLTTEVTSLRQTG

SEQ ID NO: 14221 - protein, 359 aa, unidentified
VKEELFAAEVMPRNDVVENLSTRREFRRARRNRTTRYRKPRSDNRVRSNHERWLAPSVKVKIQEHITSIKRVCTILPISKVVIETAEFDLQLLKAIQEGKPIPEGEDYQKGEMYGSYNVCQYVLWRDNYTCICCGVRGTPKNPVRLHVHHFESRKHGGNAPDNYGTLCEDCHKKLHLGIITDISLKTRKRPSTRGAAFMGIMRKTLMQRLITGLSIPVAETKGYITKAAREEILKLPKTHTNDALAIAQGRHGFGIREQAYVKPTNRIYTVRPVRHHNRQLHKATMLKGGIRKLNQASKYIFGFRLYDKVLYQGGECFVWGRRRSGSFLLRTIDGTKVKDGVGYRNLTLLERSTNYLIA

SEQ ID NO: 14222 - protein, 431 aa, unidentified; identical to SEQ ID NO: 6230

SEQ ID NO: 14223 - protein, 383 aa, unidentified
MVYVQDIDGRPLMPTTRHGKVRRLLKSKKATVVNLCPFTIRLLYDTTGYKQEITLGVDTGTKHVGLSATTKSKELYASEVILRSDVVDLLSTRRELRKIRRYRLRYRKPRFMNRIKSKKRGWIAPSLIIEVAQFDTQKIKNPEISGKEYQEGEQLGFWNVREYVLARDGHKCQHCKGKSKDPVLNVHHIESRKTGGDSPSNLITLCKTCHKEFHKGNIKLKVNRGESLRDAAVMGIMKWKLYEELKSLYPNVKMTFGYITKYNRINHGIEKSHVSDAFVISRNFDSERLGYYYKRKLVRRHNRQIHKMKAPKGGNKRMNQSPFKVFGFRLFDKVMFQGKERFIYARRLRGIFNIRDINGENKKDISYKKLEYVSHGLISIVVG

SEQ ID NO: 14224 - protein, 413 aa, unidentified; identical to SEQ ID NO: 3587

SEQ ID NO: 14225 - protein, 427 aa, Enterococcus sp.; identical to SEQ ID NO: 2410

SEQ ID NO: 14226 - protein, 424 aa, unidentified; identical to SEQ ID NO: 3434

SEQ ID NO: 14227 - protein, 502 aa, unidentified; identical to SEQ ID NO: 2616

SEQ ID NO: 14228 - protein, 420 aa, unidentified; identical to SEQ ID NO: 8162

SEQ ID NO: 14229 - protein, 518 aa, unidentified; identical to SEQ ID NO: 8622

SEQ ID NO: 14230 - protein, 442 aa, unidentified; identical to SEQ ID NO: 4522

SEQ ID NO: 14231 - protein, 431 aa, Moorena sp.
MRVFVLDKNLKPLDPCRPARARLLLKQGRAKVLRRYPFTIILSDLEVENCRTHNYQLKIDPGAKTTGLAIRQDNTVIWGAEITHRGFQIRDALTSRRQLRRSRRSRKTRYIKPRFLNRKRPSGWLAPSLMSRVHNILTWVKKLIRFCPIAGISQELVRFDTQKMENPEISGTEYQQGTLCGYEIREYLLEKWNRKCAYCGATDARLEVEHIKPKSLGGSDRVSNLAIACHDCNQAKGSQEIEQFLSGKPDVLKQVLSQAKRSLADAAAVNATRWKLYNELKFTGLPVETGSGGQTKYNRRRFNLVKTHWIDAACVGNVQNIYVEDYQFLSIMAKGHGTRQICRTDKFGFPKRYCSRTKIHKGFQTGDIVKAIVTKGKKIGTYVGRVATRKTGSFNISTSNGLIQGISHKYCTLIHKKDGYAYQINTLSSLS

SEQ ID NO: 14232 - protein, 529 aa, unidentified; identical to SEQ ID NO: 8434

SEQ ID NO: 14233 - protein, 536 aa, unidentified
VMYRLTTEAGVPLIPERLYDTKKRKETSRMSEYIYVIGMDGDPQMPTKRKRHVEKLLQTGRARVFRQVPYTIQLTYKNQPVLQPVTIAEDPGRSNIGMAVVSLSGELLSAAVVQTRNKEIVKLMEKRKLHRRASRNGERKARQRLAKRCHTMLKAGFLMRKLPMYRKDKRVKCLVIRNTEARFCNRKREDGWLTPSAEHLVRTHINLIHKMQKFLPITDVAIEINRFAFLSLEDPSISGVDFQKGPLKGYDDLNAAVEDLQDGHCLMCDSPIEHRHHIVPRSMQGSNTIGNIAGLCCKCHERVHKDARFEDRLKKKKAGLDKRYAAVSALNQAIPFICKRLEQEFGKEHVHYCSGRDTAMVRRSFGYYKTKEEQLHEVDAWCIAVLSLQQVPEKAPEFDHVHEILQFRRQDRSIINAQTSRRYYHEGKKIAKNRKKAEGQREDSLQEWRKRQVERYGEEQTRKMISQLKVKKSIRRYNRLNRLMPGAVFYYQGVRYVMRGQHCEGTYLQAVGMGSKDFPAKKCKIVANNEGLVFAS

SEQ ID NO: 14234 - protein, 348 aa, Enterococcus sp.; identical to SEQ ID NO: 9214

SEQ ID NO: 14235 - protein, 423 aa, Microcoleus sp.
MSNFIFVLDANKKPLTPCKPSMARKLLIAGKAAVFRRFPCTIILKKAVTGTVESISLKLDPGSKTTGIALLQGEKVIFGAELTHRGQAIKASLDSRRSLRRGRRNRHTRYRQARFLNRTRKKGWLAPSLQHRVETTLTWVNKLRRLVPIDLIVQELVRFDLQQLENPEISGIEYQQGELQGYEVRQYLLDKWNRKCAYCGTENVPLQVEHIHPKAKGGSNRISNLCLACEKCNLKKGTQNIEQFLAKKPDILKQIIAQAKRPLKDAAAVNSTRWVLFSRLRETGLPVVTGSGGLTKFNRTRLQLPKTHWLDAACVGQIESLEVLTNKPLLIKATGHGTRQMCRTDRFGFPSRYVPQNKFVKGFQTGDIVKSVVTSGKKIGEYVGRVAVRTTGSFNISASGLVQGISHKYCKIVHRKDGYSYAF

SEQ ID NO: 14236 - protein, 381 aa, unidentified
LYKFLPQLLYGSSGYKQSVILGVDAGSKTIGLSASTEKQELFAAEVKPRNDVVKLLSTRREFRQARRNRKTRYRTPRFDNRVKSKHKGWLAPSVEVKIQEHITAIARVCALLPIANVIVETAEFDTHRLKAMLEGHPLPVGTDYQLGEMYDEYNVRQYVLKRDNYTCQCCGAHPSAKKGVKLHVHHLESRKTGGNSPNNLITLCEHCHKLLHKGKITLDKKKRGHSMRDAAFMGIMRKTLILRLRSELAIPVVETYGYITKLVRETHHMDKSHTVDALCIAGHPLADASDVIYLIKPVRRHNRQLHKATILKGGVRKANQAPRSVFGFRLFDRVRYQGQECFIWGRRSSGSFLLKKLDGTKVKDGISYKKLTLLERETNYL

SEQ ID NO: 14237 - protein, 413 aa, unidentified
MTSYSFVLDVNGKPLAPTKEQKAWFLIRKKRAALVSKYPMVIQLMKEIPENEICQDEIRCGIDDGGLHVGIALVQKCKTKNKVVFKGTMEQRNDVKHLMEVRRGYRRYHRYHKRYRQARFDNRKSSKREGRIAPSILQKRQATIRVIHWLNKWINITNYWLEDVSVDIRALTDGYQSYRWQYQRSNRLDENIRKAAILRDGGKCMECGKSNCRLEVHHIKPRRRNGSNTLDNLITLCESCHQKTEGQEELYMDRYFSLLKSSNNKNLNYAQHVMIGKRWLRKQLSGLGVLYLTSGGDTANKRIDWNIEKSHANDAVCITDLQPDTCDMKEWTMKPMRRQSKAKTDHVLGIHHRDLVEYTFKNGETHRGYVTALYPDQKAINFQSQTKHCKKVNARKCKLLWNYSKIYWFENAS

SEQ ID NO: 14238 - protein, 451 aa, unidentified; identical to SEQ ID NO: 3061

SEQ ID NO: 14239 - protein, 493 aa, unidentified; identical to SEQ ID NO: 3781

SEQ ID NO: 14240 - protein, 491 aa, Pseudomonas sp.; identical to SEQ ID NO: 6873

SEQ ID NO: 14241 - protein, 362 aa, Butyrivibrio sp.
MVYILNKHNEPMMPCSERKARLLLKQGRAVIYRKDVFTIKLINGSYGYKQHITMGIDCGSKHIGISATTNKKELFSANAELRNDIVKLLSDRKSLRRNRRYRKTRYRKPRFDNRRIKEGWLAPSIRQKIDSHVRIVSLIHKLLPVKQVNVEVAAFDIQKIKNPYIKSSEYQMGEQLDSYNVREYVLFRDNHICQHCKGKSKDDVLQVHHIESRKTGGNAPNNLVTLCKTCHEKYHSGEITLNVNRGKSFRDASVMSTMRWFLYEELKSRFSNVNITYGYITKYKRIKLGLSKEHYNDAYCITGNLNTSRLCNHHLIRFIPRHSRILHVQTFSKGGNRRSASAPYWLNGGKSSKVGIKFTMFY

SEQ ID NO: 14242 - protein, 535 aa, Anaerostipes sp.
MYRLTTEAGIPLIPERLHDTKKRKEASRMSEYIYVLGVDGDPQMPTKRKRHVEQLLQTGRARVFRQIPFTIQLTYENKPVLQPITIAEDPGRSNIGMAVVSLSGELLSAAVVQTRNKEIVKLMDKRKQHRRASRNGERKARQRLAKKCHTMIKAGFLMRKLPMYGKDKRVKCLVIKNTESRFCNRKREDGWLTPSAEHLVQTHINLIHKMQKFLPITDVAIEINRFAFLSLEDPSISGVDFQKGPLKGYDDLNAAVEDLQDGHCLMCNSPIEHRHHIVPRSMQGSNTIGNIAGLCCKCHEKVHKDSAFEDSLKKKKAGLNKRYAAISTLNQAIPFICKRLEQEFGKEHVHYCSGRDSSMVRRSLGYHKTKEEQLHEVDAWCIAVLSLQQIPEKAPEFDHMHEILQFRRQDRSRIKAQTSRAYYHERKKIAKNRKKTEGQREDSLQEWRKRQVERYGEEQTRKMISQLKVKKSIRRYNRLDRLMPGAVFYYQGVRYVMRGQHCEGTYLQAVGMGSKDFPAKKCKIVANNEGLVFVS

SEQ ID NO: 14243 - protein, 451 aa, unidentified; identical to SEQ ID NO: 4938

SEQ ID NO: 14244 - protein, 420 aa, unidentified; identical to SEQ ID NO: 5866

SEQ ID NO: 14245 - protein, 423 aa, Arthrospira sp.; identical to SEQ ID NO: 2900

SEQ ID NO: 14246 - protein, 480 aa, unidentified; identical to SEQ ID NO: 2726

SEQ ID NO: 14247 - protein, 414 aa, Parasutterella sp.; identical to SEQ ID NO: 12593

SEQ ID NO: 14248 - protein, 424 aa, unidentified
MRVFVFNMRGRPLMPCSQRKARLLLRENKAMIYKYHPFTIQLTYTTGETKQDCHIGIDTGSKYIGAAVRSEDKVFWKGEIELRQDIRSNLDTKRIYRRSRRNRKTRYRKPRFLNRKRRDEWLPPSLQSRINHTFHWIDTLSSLVPNPILHIEVGKFDVAKMINPEIHGVDYQHGQTYGFFDERYFVFARDNYTCQCCGKSKNKILNTHHIIYRSNGGTNRVDNLITVCTDCHTSQNHRKGGIFYQWQEQHKKVKQYKEPPFMNTLRKRIFVAYPDAEITYGYATTPKRKAMKLDKAHYNDAIVISGINEIKENPEEWLLIKQFRKKKRSLHEATARKGRKKPNRNQTRNSKNTPYYKGFYLNDKVSVFGKSGYITGFTSNAAYIKDENNDYITLPNKTYKQVSINKMKLECHNNNWQYIIKNAV

SEQ ID NO: 14249 - protein, 242 aa, unidentified
MPNKVYVINKHGRPLMPCSPAKARHLLDAGKAKIKKRTPFTIQLVYGSSGYTQEVILGVDAGSKTIGMSVSTTKEELLSAEVKPRNDVVDLLSTRRESRRARRNRKTRYRKPRFDNRVRSKHKGWLAPSVEVKIQEHITSIKRVCRILPVSKVVIETAEFDLQLLKAIADGKPVPQGEDYQKGEMYGHYNVRQYVLWRDNYTCQCCGAHATKKKEVRLHVHHLESRKTGGDAPGNLVTLWRC

SEQ ID NO: 14250 - protein, 424 aa, unidentified
LVWNKRGKPLMPCSPAKARLLLKEKKAIVVRRTPFTIQLTIATGETKQPVSLGVDAGYKHVGLSASTEKAELYASEVELRQDITDLLSARRALRQSRRNRKTRYRAPRFDNRIRTKRKGWLAPSVENRIDAHLSRIEAVLRLLPVTKITVETASFDLQLLKNPDISGKEYQEGEQLGFWNIREYVLCRDGHVCQHCYGRSKDPVLNVHHLESRRTGGDSPDNLLTLCETCHKALHRGEITLKAKRGQSFRAETFMGIMRWEVLNRLKASHSELKVHNTYGYLTKHARIENGIAKSHGADAFCIAGNLGAERLGEFFFQKQTRRNNRQIHKLSILKGGIRKRNQAPFEVKGFRLFDKVACQGEEGFIFGRRSSGFFDVRKLDGTRISAGISCKKLHLLEKRRTYLTEIRKEEALPPLPEGRGLRA

SEQ ID NO: 14251 - protein, 492 aa, unidentified; identical to SEQ ID NO: 4486

SEQ ID NO: 14252 - protein, 470 aa, unidentified; identical to SEQ ID NO: 2825

SEQ ID NO: 14253 - protein, 294 aa, Bacteroides sp.
PSVEVKIQEHITVIKHICKILPISLVRVETAEFDTQRLKAMLAGKPLPVGTDYQLGEMYDEYNVRQYVLKRDHYTCQCCGAHNTAKKVVKLHVHHLESRKTGGNAPSNLVTLCTTCHKNLHKGKVTLDGKERGKPLRDAAFMGIMRKTLMARLKKELPIPVQGTYGYITKMRREQNDIKKSHTNDARCISKHPLAEPCSVCYRTKAIRHHNRQTHKANFSKKGIRKRSQMPYLVEGYRLWDKVLYKEQKCFVSGRRSSGSFTLKKLDGTSVSKGVTFKKLRLLEPATNYLIERM

SEQ ID NO: 14254 - protein, 320 aa, unidentified
LWGWLQVISHKITKRGGHQEMSVFVLAKDGRPLMPCSPAKAKHLLKKGLAKVRRRTPFTIQMLVVTKHCTQEVILGVDAGSKTVGLSCGTAAKELFAGEMIPRNDVVEKLSARREFRRARRNRKTRYRQPRFNNRVKSKHKGWLAPSVEVKIQEHITVIRRICRLLPVSKVIIEGAEFDLQLIKAVAEGKPVPQGEDYQKGEMLGYYNVRQYVLWRDGYKCRNCGAHKDVKLRTHHLESRKIGGDAPNNLVTLCGRCHDLFHKGTIQLKARRGSSYRDAAFMGIMRKALISRLRVELNIPAYETRGYITKHTREYQMHLT

SEQ ID NO: 14255 - protein, 413 aa, unidentified; identical to SEQ ID NO: 2636

SEQ ID NO: 14256 - protein, 502 aa, unidentified; identical to SEQ ID NO: 2616

SEQ ID NO: 14257 - protein, 422 aa, unidentified; identical to SEQ ID NO: 5333

SEQ ID NO: 14258 - protein, 434 aa, Mitsuokella sp.; identical to SEQ ID NO: 9304

SEQ ID NO: 14259 - protein, 472 aa, unidentified
VVDNRLLSIKPLINIGEGVIYSSICTGLLLQTYQKRKEVPCMVYVLDINGQPLMPTTRHGKVRRLLNSHLAKVVKRCPFTIQLLYQSTKEIQPVSLGVDAGSKHIGMAATTEKKVVYQEELSPRNDVVKLLSLRRASRSSRRSRKTRYRKPKFNNRVHSKHKGWLAPSVEVKIQEHITAIKRICQILPISEIQVETAEFDFQRLKAMKEWKPLPVGTDYQLGEQYDFYNTRQYVLHRDGYTCQCCGTHDNNIKLHVHHIESRQTGGDAPSNLITLCEHCHKALHKGKLELPKGKKRGKTYRDATFMGIMRKTLLERLRKEVDVPVSGTYGYITKYLREKTDLEKSHINDAICISKYPYAKPLDTYYLTKVVRNHNRQIHKSNFSKGGIRKRNQAPYLIKGFRLFDKVLYQGKEYFIFGRRATGYFDIRTLDGTKVNKGSISYKKLRIQDTAKAYLKEARAIPHMNKFTCVLA

SEQ ID NO: 14260 - protein, 477 aa, Azohydromonas sp.; identical to SEQ ID NO: 2409

SEQ ID NO: 14261 - protein, 512 aa, Selenomonas sp.; identical to SEQ ID NO: 5832

SEQ ID NO: 14262 - protein, 465 aa, unidentified; identical to SEQ ID NO: 6446

SEQ ID NO: 14263 - protein, 406 aa, unidentified
MVYVQDINGKPLMPTTRHGKVRRLLKDKKAVVVNLCPFTIKLTYVTSDYKQEIVLGVDAGTKHVGLSATTKSKELYSSEVILRNDIVDLLSTRRELRRARRNRLRYRKPRFNNRIKSKRPGWTAPSVKYKIDAHIRVIDNVCSILPIFRIVIEVAQFDTQKIKNPNISGKEYQEGDQLEFWNTREYVLARDGHKCQYCKGKSKDSILNVHHIESRKTGGDSPSNLITLCETCHKEYHKGNIDLKIRRGKSLRDAAVMGIMKWRLYEELKSRYDRVFMTFGYITKHNRIKYGIEKSHTSDAFVISKNINAKRIERQYLKRLIRRHNRQIHKMKILKGGKKKNNQAPFEVFGFRLFDKVLYNNKICFVYGRRKSGSFNIRDFNGENSKDVSRKKFKLIRGKRHPIILK

SEQ ID NO: 14264 - protein, 457 aa, Scytonema sp.; identical to SEQ ID NO: 2735

SEQ ID NO: 14265 - protein, 411 aa, unidentified; identical to SEQ ID NO: 6901

SEQ ID NO: 14266 - protein, 431 aa, unidentified; identical to SEQ ID NO: 3235

SEQ ID NO: 14267 - protein, 414 aa, unidentified
MPCSPAKARLLLKEKKAIVKRRTPFTIQLTIATGEAKQPVSLGIDAGYKHVGLSASTEKAELYASEVELRQDITDLLSARRALRQSRRNRKTRYRAPRFDNRISTKRKGWLAPSVENRINAHLSRIEAVLRLLPVTKITVETASFDLQLLKNPDISGKEYQEGEQLGFGNIREYVLCRDGHVCQHCYGGSKDPVLNVHHLESRRTGGDSPDNLLTLCETCHKALHRGEITLKTKRGQSFRAETFMGIMRWEVLNRLKASHSELKVHNTYGYLTKHARIENGIAKSHGADAFCIAGNLGAERLGEFFFQKQTRRNNRQIHKLSILKGALRKRNQAPFEVKGFRLFDKVACKGEEGFIFGRRSSGFFDVRKLDGTRISAGISYKKLHLLEKRQTYLMEIRKEEAFPPLPEGRGLRA

SEQ ID NO: 14268 - protein, 480 aa, unidentified
LYTKPLDNIGEGSLLPSGEINLKGMTFMVYVKSIDGKALMPTSNAKARKLLKQKKAKVVSLRPFVIKLTYKTKTEYTQKLNLGVDSGYSNIGFSVIDAKQEYIAGEVKLLEGMKKRLLEKASYRRIRRSRLRYRKARWNNRVKSKKKGWLAPSLKHKLDTHIKFIDYLKNILPIGKITIEVANFDIQKMKDDLISGVDYQNGDMFSFWNVREFVLHRDGHKCQNPNCKHKDKKEQILKIHHIRYRSKGGSDRPENLITLCSKCHTPANHKKGKFLYDWCVNGKKVRGFKDATFMSMIRWYLVNDLKSKHNNVSITYGYITKNHRIQNGIEKSHLNDAFAIAKGTNQARTKDRFLVIQDRLKNRSLEKFYDSKIIDIRTGKKVSGGELSCGRSTRNKNLNTENLRKYRGDKISKGQRRIRKQKYFYQPNDLVKYDGKVYTVKGTQNEGKYIALKEIKKVPKVELLIPYVFKKGLNWSYGLC

SEQ ID NO: 14269 - protein, 470 aa, Thermoanaerobacterium sp.; identical to SEQ ID NO: 4433

SEQ ID NO: 14270 - protein, 437 aa, unidentified
VGGVKAHLKSRNKEIPKLMQDRKRARRARRTNGRRHRRQRRAKANGTISKKCVKQTTAQNGSVSKRAKDIGVIKRRLPGCEKDVLCIGIKNKETKFTNRTRPEGWLTPTANQLLQTHINLVKKIQKFLPISDVVLEVNKFAFMRLDNPNIQKWQYQQGPLYKKESLESAVSEIQEHHCLFCKKPIDHYHHVVPQHKNGSNTIGNIVGLCAKHHDLVHKDSAWEKKLAKKSTGLYKKYGALGVLNQIIPTLTNELSSLFPKHSFVTNGKSTYDYRAAHGVSKDHWLDAYCIACSVLPSNVCDSNINNHMPYVLKQFRRHDRRVLNNENMNRVYTLDNKAVAINRHKATEQEAASLEEFRKEHPNDVCKLKVKEHHPTYRNMNRNYPGSIFLVGKHVHIMQGIAGSKDGKATTYKDSNANSITASKCKFVAKNSGILFV

SEQ ID NO: 14271 - protein, 456 aa, Halomonas sp.
MAVFVLGKNKQPLMPCSEKRARLLLERGRAAVVNLTPFVIRLRDRCLSDCTLQPTLLAADPGSKETGLALMRLGNNATEEKAPATRHVLCLFQLVHRGFQIRQALEQRAGFRRRRRSKNLRHRKPRFDNRTRKKGWLPPSLQHRVDTTMAWVDKLCRWAPVTHLNMELVRFDLQKMENPEISGVEYQQGTLLGYEVREYLLEKWGRECAYCGTGDTPLEIEHVVAKSRNGSSRVSNLTVACHDCNIAKDNQSLADFFATDKGLKRRLKANGLSAEMRLARVQRQLKLPLRDATAVNATRWALFGAMKSTGLPVAVGSGGRTKYNRQRLGIPKTHALDAACVGKFDTLKGWRVPTQVIKAMGRGSYKRTRLDKYGFPRGYLMRQKQVQGFQTGDRVRAIVPTGKKAGTHTGRVAIRKTGSFNIQTEQGAVQGISWPYCTLLQRGDGYGYHQIPTTQH

SEQ ID NO: 14272 - protein, 469 aa, unidentified; identical to SEQ ID NO: 6998

SEQ ID NO: 14273 - protein, 337 aa, unidentified
SARRALRQSRRNRKTRYRAPRFNNRLCTKRKGWLAPSVENRINAHLSRIEAVLRLLPVTKITVETASFDMQLLKNPDISGKEYQEGEQLGFWNIREYVLCRDGHVCQHCYGRSKDPVLNVHHLESRGTGGDSPGNLITLCETCHKALHRGEITLKAKRGQSFRAEAFMGIMRWEVHNRLRALHPGIEVSNTYGYRTKHARIANGIAKSHCADAFCIAGNLGAERLGEFFFQKQTRRNNRQIHKLSILKGGIRKRNQAPFEVKGFRLFDKVACQGEEGFIFGRRSSGFFDVRKLDGTRISAGISCKKLHLLEKRRTYLTEIRKEEALPPLPEGRGLRA

SEQ ID NO: 14274 - protein, 412 aa, unidentified
MVYVQDIDGKPLMPTTRHGKVRRLLKDKKAVVVNLCPFTIKLMYVTSDYKQEIVLGVDAGTKHVGLSATTKSKELYASEVILRNDIINLLSTRRELRKARRNRIRYRKPRFNNRIKSKRQGWIAPSVCQKIDSHIKVVSFIHSILPVSRLIIETSQFDTQKIKNPDILGKEYQQGEQLGFWNVREYILFRDGHKCQHCKGKSKNPILNIHHIESRKTGGDSPSNLITLCETCHKEYHKGNIKLKVKRGTSLRDAAAMGIMKWKLFDKLKSLYPNVSMTFGYITKHNRIKHRIEKSHVSDAFVISENFKAKRLGYHFKMKLTRRHNRQIHKMKMQKGGIKRMNQSPFRVFGFRLFDKVMFYGEKRFIYARRLSGSFKIKDIDGENEKNISYKKLKYIGHGLTSIEVDQSYGYK

SEQ ID NO: 14275 - protein, 425 aa, unidentified
MVYVLNKNGQSLMPTNRHGKVKHLLKDGKAKVVKRCPFTIKLTYETTNYTQDLTLGVDTGSGTIGTAVSKDSGDIIYMSEIVVRNDITDKMSQRAKYRRNRRNRKTRYRQARWLNRRNSIRKDRFSPTMQSKLHSHVKEIEYIKSILPITTMVFETGQFDMHLMKNPMLANPKVKHWGYQKGTNYGFENTKAMVLNRDNYTCQYCKGKHKDSKLEVHHIIFRSQGGSDEDSNLITLCHTCHKNLHDGKIAPNFKGKAKGTLKYATQMNSIRKQLFRLYPEAIETFGYVTKANRVAIGIEKEHYYDACTIATQGKPFIVKTNLYKKKCVSDGDFQKTKGIRSEQPIVTDKIYGFRKFDKVKYFGKEYFIKGRMSTGYAILMDIEGNKVDFLTMPKGFKTPKMINLKRLEARSSWMVTTVEVTPNIV

SEQ ID NO: 14276 - protein, 428 aa, Enterococcus sp.
MVYVLSIDNEPLMPCSNVIARLLLKQGKAKVKYREPFTIKLTYETTTYTQPLTLGVDTGSQTFATAVTNGKGNILYTSEVVLREDKNHSIKKKMDQRRMYRRNRRNRKTRYRKARFNNRKNSKRKNRFSPTMTSKLHSHQKEIEFIKSILPIAKLILETGTFDPHLMKNPSLANLKVKPWGYQQGPNYGFENMKARILARDNHTCQICKKKPKNERLEVHHIIFRSQGGSDEENNLVTVCHSCHVELHKGLIHPNFEGSLKNALKYATQMNSIRVQLLKLYPDAIETFGYVTKANRLNLGLPKEHYVDAAVIATAGNQVNFACNLMIKRCIPKGDFQRTKGIRSEKIIPKGKIDGFKKYDKVRYFGNEYFVKGRMTTGYIQLMNIYGEKISFNHMPKGFKTPKTKNCQRISARKTWITTTEPLIKNIA

SEQ ID NO: 14277 - protein, 417 aa, unidentified; identical to SEQ ID NO: 5720

SEQ ID NO: 14278 - protein, 437 aa, unidentified
MPCSEKRARLLLARGRACVHRLVPFVIRLTDRQLDTCTLQPLRIKLDPGSKTTGLALVRDTEHLNTDTGEIQRGVAVLSLIELVHRGRQISEALTARRQMRRRRRGCLRYRAPRFLNRGNKQRGWLAPSLQHRINTTMAWVARIRRWSPVTALSAELVRFDMQRLQNPEISGVEYQQGTLAGYEVREYLLAKWSRKCAYCGVENVPLQIDHVHPKAKGGTNRVSNLTLACGPCNARKSAQSVDAFLAKDPKRLTALLAQAKRPLKDAAAVNATRWALVGALKATGLPVETASGGCTKFNRSRLAIPKTHALDAVCVGAVSVVTNWQKPSLTIKCTGRGSYQRTRLDKYGFPRGYLMREKSVKGFKTGDLVRAIVPTGKKAGRHTGRVAIRKSGSFNIQTLAGVVQGIGYRHCRLLQRADGYGYFFNKAACDTAQKRE

SEQ ID NO: 14279 - protein, 416 aa, unidentified
LRVFVLNKRGKPLMPCSPAKARLLLKEKKAIVKRRTPFTIQLTIATGETKQPVGLGVDAGYKHVGLSASTDKAELYASQVELRQDITDLLSARRALRRARRNRKTRYRAPRFNNRIRTKRKGWLAPSVENRINAHLSRIEAVLRLLPVTKITVETASFDMLLLKNPDIAGKEYQEGEQLGFWNVREYVLFRDGHVCQHCYGRSKDPVLNVHHLESRRTGGDSPGNLITLCETCHEALHRGEIALKTKRGHSFRAEAFMGMMRWEVLNRLKASHSELEVNNTYGYRTKHARIVNGIDKSHCADAFCIAGNLGAERLCEFFFQKQTRRNNRQIHKLSILKGGIRKRNQAPFEIKGFRLFDKVACKGEESFIFGRRSSGYFDVRKLDGTRISAGISYKKLRLLEKRRTYLTEIRKEEAL

SEQ ID NO: 14280 - protein, 418 aa, unidentified
MPNYVFVIDTNKQPLNPISPKKARRLLDKGKAAVFRMYPFTIILKTAIANPTISPCQIKIDPGSKTTGFALVQNDQVIWAMELEHKGSLIKKKLESRSAVRRGRRNRNTRYRKPRFLNRRRPEGWIAPSLEHRVLTTETWVKRLIKFCPVNEIGIELVKFDTQKMQNPEVNGVEYQQGDLAGYEVREYLLEKWGRECAYCSKQNTPLQIEHIHPKSKGGSDRVSNLCLACEKCNQKKGNKPIEEFLKKKPDLLRKILAKAKQPLTDAAAVNTTRNKIVKVLKAIKPVVTGTGAQTKYNRTRLGLPKQHWIDAACVGDIKDLVLKTSQPLLVTCKGQGGRQKAALNKYGYPIRHNPLRPIKGWSTGDIARHQKLGIGKVTPRSKGSFGFTPLGAKGYKSCKPQDIFAVHRKDGYIYSFS

SEQ ID NO: 14281 - protein, 381 aa, unidentified
MVYVINKQGQALMPTERFGKVRRLLKNSLAHVVCRIPFTIQLDYDTTDYTQPVSLGIDAGSKHIGISATTSEKEMYAADVELRNDIVDKLSTRREQRRTRRSRLRYRKARFNNRISSKRKGWLAPSVENKIQTHLTVVEKIHKFLPITNIVVETASFDIQKINNPSISGSEYQQGEQLDFFNVREYVLFRDNHICQHCKGKSKDKVLNVHHIESRKTGGDSPKNLITLCETCHKAYHRGDFELNVKRGKSFRDSAFMGIMRWKLYDRLKNIYPNVSMTFGYITKNTRITNNLPKDHYIDARCISGNPVAKPLGYYFYQKKVRCQNRQIHKSNFLKGGRKKLNQAPFLVKGFRLFDLVEYQKDLYYIFGRRDSGFFDIRKLD

SEQ ID NO: 14282 - protein, 413 aa, unidentified; identical to SEQ ID NO: 8345

SEQ ID NO: 14283 - protein, 436 aa, unidentified
MTKTLTKQTTQACVLDQQGKPLMPTTRLGKVYRLLKTQKAHIVSYEPFTIQLDYEPDTHVIQPMTLGVDSGAIHSGYSLANEHREYYNAEVIARDDISKRLSDRRMYRQNRRSRKTRYRKPRFKNRKNKKKRWLPPSLEQKVAVQVNEIDHLHRYFPIETIIVEVAEFDIQKIKDPNISGIDYQQGTLQGYNIRNYLLEKHGRKCFYCGKSVSKFEVEHMLPKSRGGSNRIDNLTLSCHDCNQKKDTMTAKEFIKQTLPAKKAATKLKQLPNEKRLFKYMTYMNATRWALYNAINEKYPNVEMTYGYITKYNRIKAGLQKTHHIDAKCITGFATVPSIDQTVVKVKMRRHNRQLHRATFNKGHVRNAACLPTVVFGFQLYDLVLFNNHRYYIKGRRSSGSFALASVEGLKDEKRTYKKLTILAHTNAYLTNRYVDL

SEQ ID NO: 14284 - protein, 419 aa, Moorena sp.; identical to SEQ ID NO: 6711

SEQ ID NO: 14285 - protein, 413 aa, unidentified
LKVFVLNMRGKPLMPCSPAKARHMLKAGKAFVVRRTPFTIKLTIATGETKQDVTLGVDAGARHVGISATTEKEEVFASEVALRQDITGLLADRLAFRRARRNRKTRYRAPRFNNRVRSKHKGWLAPSVENRIQAHISRIEAVCRLLPVTKIVIETASFDIQKIRNPEVEGTGYQQGDLLGFWNVREYVLFRDGHICQHCRGRSKDPILNVHHLESRKTGGDAPNNLITLCETCHKAYHAGKIKLKVKRGQSFRAEAFMGIMRWTLLDRVRKTHPKLPVENTYGYLTKHKRIALGLPKTHCADAFCIAGNLKALRRGDFLFQQQTRKHNRQIHKCSILKGGVRKLNQAPFLVKGFRLFDKVRIGGQIGFVFGRRVRGTFNIRRLDKTVIGTDINCKKLSLLETRKTFLTELRKE

SEQ ID NO: 14286 - protein, 413 aa, unidentified
LKVFVLNMRGKPLMPCSPAKARHMLKAGKAVVVRRTPFTIKLTIATGETKQDVTLGVDAGARHVGISATTEKEEVFASEVALRQDITGLLADRLAFRRARRNRKTRYRAPRFNNRVRSKHKGWLASSVENRIQAHMSRIDAVCRLLPVTKIVIEAASFDVQKIKNPTIEGTDYQQGDQLGFWNVREYVLFRDGHVCQHCHGRSRDKILNVHHLESRKTGGDAPNNLITLCETCHKAYHAGKIKLKVKRGQSFRAEAFMGIMRWTLLDRVRKTHPKLPVENTYGYLTKHKRIALGLPKTHCADAFCIAGNLKALRRGDFLFQQQTRKHNRQIHKCSILKGGVRTLNQAPFLVKGFRLFDKVRIGGQIGFVFGRRVRGTFNIRRLDKTVIGKDINCKKLRLLETRKTFLTELRKE

SEQ ID NO: 14287 - protein, 553 aa, unidentified
MNVLQSGYPPQKGDSMKQKTFVYVLNKKGKPLMPTTRCGHIRKLLKEKKAVPVCNNPFTIRLKYETPDVVQSLYLGIDTGRENIGIAVSEENGNCVYLAELKTHNKSIKKKMTERREFRSERRRHKRISKQRKAIKNGTIIQNGEDTILRSKKECKSKTVIYPGMKEGITHKVIQGAEAQFNNRKRKENWITPSGRQLIQMHMNAIKSVQKILPISHIIIERVSFDFQKLANQNIYTWQYGKGPLYGFKDYKDYIDSEQNGICLLCGKNHIEYYHHIVSKSNGGSDNINNIAGLCYNCHYGNDGVHKNPEASRQLQTLKEGLKQKYKISLLNSVTPVLIEEISEFCINNNYKFSVTDGYSTSLTRKQMNLPKTHCIDAYCIGIANRLIQCKILPFVIYEQRRFKKKSNNLIHKRNNREYYIKEGDKLVLVAKNRHKATEQSFPSLEEYLSEYALTHTEYECIKQARSLIIKPCRRTYTYHKEKKVVLIHPGDIVKYEKHNKINGNIKTEIFVADGLDISNNKVCYGTKNKKFKYCKRILSTSIPYISKRLLQI

SEQ ID NO: 14288 - protein, 434 aa, Erysipelotrichaceae sp.
MKVFVLNKHGNPLMPCNPRKARLLLKQQKAVVAKQMPFTIRLLYGSSGYKQPVSLGVDAGSKHIGIAATTEKEVLFAEELTPRNDVVNLLSSRRQNRRSRRNRKTRYRKVRFDNRVRSKHKGWLAPSVEVKIQEHVTAIKHVQQILPITEVHVETAEFDTQRMKAAEEGRPLPVGTDYQLGEMYDSYNVRQYVLKRDNYTCQCCGKHGDGVKFHVHHLETRKTGGNAPDNLITLCEDCHKAIHAGTKTLPARKAKRSTKSLRDAAFMGIMRKTLLERLRAELAIPVTGTYGFITKLCRDLYHIEKSHINDAIVISKHFTAVPDDVWYFAKAVRRHNRQIHRSKILKGGIRKRNQATHVVKGCRLFDSVKYADHSYFVFARRTSGQMDLRTLAGVKANSGSLSFKKFSIQHCNAGALLERRKAISPTDKSVGFLA

SEQ ID NO: 14289 - protein, 413 aa, unidentified; identical to SEQ ID NO: 3620

SEQ ID NO: 14290 - protein, 424 aa, Moorena sp.
MRVFVLDKNRKPLDPCQPARARILLKQGRAKVIRRYPFTIIMLDLEAENCLTHKHQLKIDPGSKTTGLAIVQNDKIIWGAELTHRGFQIKDALTSRRQLRRFRRNRKTRYRKPRFLNRKPPEGWLAPSLMSRVHNILTWTKKLMKFCPITGISQELVRFDTQKMENPEISGVEYQQGTLYGYELREYLLEKWNRQCAYCGAADTPLEIEHIKPLAKRGSNRASNLAIACHKCNQAKGAQEIEQFLSSKPSVLKRVLAQTKKPLADAAAVNSTRVRLYNELKFTGLQIETGSGGLTKYNRCRQKLPKTHWLDAANVGQVDNLRIEDYQPLLITAKGHGTRQMCRTNKFGFPSRYVTRLKFVKGFQTGDIVNAIVTKGKKIGTYTGRVAIRKSGSFNISTKNGLIQGISHKYCTIVHRKDGYSYSF

SEQ ID NO: 14291 - protein, 494 aa, unidentified
MTMVYVQNKDGKPLMPTTRYCYVRLLLKEKKARVVCTTPFTIQLHYDTPDITQDLILGIDPGRTNIGVAVVKEDGSCVFSAHLETRNKEVPLLMKKRAAFRRNHRTLDRRRKRQRRAIAAGTTVESNTIERLLPGYEKPVVCHHIRNKEARFNNRKRPQGWLTPTANHLLQTHINLIAKIAKVLPITKVVVELNRFAFMAMDNPNIRRWEYQQGPLYGLGSVEDAVYAQQDGHCLFCKKPIDHYHHVVPRHKGGSETLANRCGLCAKHHDLVHKDKAWAEKLVTRKGGMNKKYHALSVLNQIIPHLIEHLGSETPYDVYATDGRSTKGFRIAKNVPKEHYTDAYCVACSILDTDIDVSAPAEPFELKQFRRHDRQACIRQMVDRKYLLDGKVVAANRHKAIEQKSDSLEEFREAYGDAAVSQLTVRPHLPQYKDMTRIMPGAAMDFDGTVGVFQGSSGRNNGTPNYYNSTKGARVLTNRCALLAKNVGMVFIPA

SEQ ID NO: 14292 - protein, 465 aa, unidentified
MNTCVCVLSNNGERLMPTIRLGRVRHLLKDGKAKIIKHHPFTIQLLYDSKTNTQPIEICEDVGYNYIGISVKSQSHEYVSAQYDTLQDEKACHDSCRKLRRTRRNRLRYRKPRFDNRKRGEGWLAPSLKHKKELNVNVVKMYCTVMPITHATVEVGSFDTMLVKAIQEGKVIPEGADYQKGPRYNLATLREAVFYRDNYVCKICGRKATEGAILHMHHMFYWKGRHGNSLNELLTVCEKCHTPANHQKSGKLYGFGEKIKFADLSGAAFMNTVRWQIVNELYVAFGKPFVTITYGAMTKEKRIALQLEKSHNNDAYAMGEFHPNLRCMFEHYEKARRNNRILEKFYDSRYIDIRTGEIATGKELFNGRINRNHKKDSENLHKYRGKRTYAGHRALLRKKVNLNPGDLVSLNGENLIVHSTHTKKNGAVNVEFETPAKSGQKSASLKKLKIVKAANSIHPAWKKIS

SEQ ID NO: 14293 - protein, 408 aa, unidentified; identical to SEQ ID NO: 5560

SEQ ID NO: 14294 - protein, 425 aa, unidentified
MENTLKVFVLNMRGQPLMPCSPPKARKLLRAGKAVPVRRTPFVIQLTVPTGETKQPITLGVDAGYKHVGLSATTAKEELLASEVELRQDVTGLLSNRLALRRARRNRKTRYRAPRFDNRVRSKHKGWLAPSVENRIQAHISRIEAVCRVLPITKIVIETASFDIQKIKNPEIEGEGYQQGEQLGFWNVREYVLFRDGHVCQACKGRSKDLILNVHHIESRKTGGDAPGNLITLCEACHKAYHAGKLKQFSPRRGASFRAETFMGIMRWTVLNRLRERHPELPVTNTYGYLTKHKRIVAGLPKTHCADAFCIAGVLDAKRRGEYLFQKQTRRHNRQIHKLTILKGGVRKRHQAPYLVHGFRLFDKVLCKGEVGFIFGRRSSGAFDVRRLDGTKISAGISYKKLSLLEKRKMFLTELRKEGRDSSRV

SEQ ID NO: 14295 - protein, 415 aa, Bacillus sp.; identical to SEQ ID NO: 4797

SEQ ID NO: 14296 - protein, 485 aa, unidentified
DVFAGIDSGRENIGSGASNEDGDCLYLGELKTSNKSIKIKMAERTGFRRERRRHDRQSKQRKAKKDHTEIQNGNDDICRTTISCKSVQISYPVAEESVTHKIIRGKEGKFANRHRDEGWITPSARQLVQMHMNDLKSMCKILPISHVTLERVAFDFQKLENENIKVWEYGKGKLYGYDSPEEYIHDVQDGKCLVCGKPHIDYLHHIIPRSKGGSDKVSNIAGLCYDCHYGPIGVHNCQDTQDRLPELKNEVNKQYKVSLLNSVMPVLIEEIDKFCKANSIMFSICEGHDTAKVRDMYDLQKDHCLDGFAISLVGRNVKSVDVMPDRIHQKQRYKKKSKNIIQKRNYREYYDDKKLVAINRHKGTDQKADSLEEYMNTYAETHTADECKNQFESLTVKPARRTYTFHKEGRICPFHIGDKVRYEKKNKIKGNTKVDTFICEGIYFSKDENKAEVEHNKTKSKKMKFCRTIESGCIPYIDYRKLALI

SEQ ID NO: 14297 - protein, 415 aa, unidentified; identical to SEQ ID NO: 2674

SEQ ID NO: 14298 - protein, 418 aa, Moorena sp.; identical to SEQ ID NO: 6948

SEQ ID NO: 14299 - protein, 414 aa, unidentified
MVYVINKQGQALMPTERFGKVRRLLKNSLAHVVCRIPFTIQLDYDTTDYTQPVSLGIDAGSKHIGISATTSEKELYAADVELRNDIVDKLSTRREQRRTRRSRFRYRKARFNNRVSSKRKGWLAPSVENKIQTHLTVVEKIHKFLPITNIVVETASFDIQKINNPIISGSEYQQGEQLDFFNVREYVLFRDNHTCQHCKGKSKDKVLNVHHIESRKTGGDSPNNLIILCETCHKAYHRGEFELNVKRGKSFRDAAFMGIMRWSFYDRIKNIYPNVSMTFGYITKNARITNNLPKDHYVDARCISGNPVAKPLGYYFYQKKVRCQNRQIHKANFLKGGRKKLNQAPFLVKGFRLFDLVEYQKDLYYIFGRRDSGFFDIRKLDGTKVNKGSINCKYLRLVDKRKSILIEKRMQVNL

SEQ ID NO: 14300 - protein, 413 aa, unidentified
LKVFVLNMRGKPLMPCSPAKARHMLKAGKAFVVRRTPFTIKLTIATGETKQDVTLGVDAGARHVGISATTEKEEVFASEVALRQDITGLLADRLAFRRARRNRKTRYRAPRFNNRVRSKHKGWLAPSVENRIQAHISRIEAVCRLLPVTKIVIETASFDIQKIRNPEVEGTGYQQGDQLGFWNVREYVLFRDGHICQHCRGRSKDPILNVHHLESRKTGGDAPNNLITLCETCHKAYHAGKIKLKVKRGHSFRAEAFMGIMRWTLLNRMRKAHPSLPVENTYGYLTKHKRIALGLPKTHCADAFCIAGNLKALRRGDFLFQQQTRKHNRQIHKCSILKGGVRKLNQAPFLVKGFRLFDKVRIGGQIGFVFGRRVRGTFNIRRLDKTVIGTDINCKKLSLLETRKTFLTELRKE

SEQ ID NO: 14301 - protein, 420 aa, unidentified
MQYVYVLNKHGEPLMPCSPRKARLLLKQKKACVIKRTPFTIKLLYGSTGYKQPVTLGVDAGSKHIGISATTEKHELYREEATPRNDVVDLLSARRAFRRSRRNRKTRYRAPRFDNRVHSKHKGWLAPSVEVKIQEHITLIEHVCRILPVTLVRVETAEFDTQRLKAMLEGKPLPVGTDYQLGEMYDEYNVRQYVLKRDNYTCQCCGAHSTKTKGVKLHVHHIETRRTGGNAPNNLITLCKACHKALHAEKVTLDGKKRGKPLKDAAFMGIMRKTLMERMRKELKIPVQGTYGYITKYLREKNGIPKSHTNDARCISKNPLAIPCDTCYYTKAVRHHNRQLHKATILKGDIRKANQAPYIVKGYRLWDKVAYNGTECFITGRRTSGYFALKKLDGTVASNSISYKKLRLLEAATNYIIERK

SEQ ID NO: 14302 - protein, 442 aa, unidentified; identical to SEQ ID NO: 3218

SEQ ID NO: 14303 - protein, 283 aa, Parasutterella sp.
LLPVTKITVETASFDLQLLKNPDISGKEYQEGEQLGFWNIREYVLCRDGHVCQHCYGRSKDPVLNVHHLESRRTGGDSPGNLITLCETCHKALHRGEITLKAKRGQSFRAEAFVGIMRWEVHNRLRALHPGIEVSNTYGYRTKHARIANGIAKSHCADAFCIAGNLGAERLCEFFFQKQTRRNNRQIHKLSILKGGIRKRNQAPFEVKGFRLFDKVACQGEEGFIFGRRSSGFFDVRKLDGTRISAGISCKKLHLLEKRRTYLTEIRKEEALPPLPEGRGLRA

SEQ ID NO: 14304 - protein, 518 aa, unidentified
LLNLKLIDALLEKTEYIYVLGIDGKPQMPTNRKVRIRSLFKSGRAKIVDTVPFTIRLLYENDAVLQSITIAEDPGRTNIGTAVLTQLGDLVFSTVVETRNKSIKKLMTDRKAHRQASRRGERKARQRLAKKHGSMIKAGMMMRKLPQYAADKFVTCKIIKNTEARFCNRKRMPDWLTPTVNHLVQTHINLIKKIEKYLPITDVAIEVNRFAFMQMENPNINGLDFQNGPLNGFDDVKAAIREQQHGKCLMCKNDIEHFHHIVPRSKGGSDTIQNQAGLCKKCHAKVHTDSEFLAKFKDKKEGLIKKYGALSALNQAVPFICKELIKIYGVEHVHFCTGKDTSLIRSSLGYEKTKENQMHEVDAYCIGLAAIGADKVKRPSFNNVFKIKQFRRQDRQRVHYQKERTYYLDGKKIATNRKPRFEQKGNALSDWYKEQIEAYGQHEAGKMRSRLTVKKSKRSYNTAKRLMPGCIFYYDGQRHVMTGQSSYGRYLRAYNCGTKDFHASKCQIIRFNTGLVFV

SEQ ID NO: 14305 - protein, 456 aa, Halomonas sp.
MAVFVLGKNKQPLMPCSEIRARLLLERGRAVVVNLTPFMIRLRDRCLSDCTLQPTLLAADPGSKETGLALMRLENNATEEKAPATRHVLCLFQLVHRGFQIRQALEQRAGFRRRRRSKNLRYRQPRFDNRTRKKGWLAPSLQHRVDTTMAWVDKLCRWAPVTHLSMELVRFDLQKMENPEISGVEYQQGTLLGYEVREYLLEKWGRECAYCGTGDTPLEIEHVVAKSRDGSGRVANLTIACHDCNQAKDSQWLADFFATNKGLKKRLKANGLSAEVRLERVQRQHKLPLRDATAVNATRWALFGAMKSTGLSVAVGSGGRTKYNRQRLGIPKPHALDAACVGKFDTLKGWRVPTQVIKAMRRGSYQRTRLDKFGCPRGYLMRQKQVKGFQTGDRVRAIVPAGKKTGSHTGRVAIRKTGSFNIQTEQGAVQGISWRHCTLLQRGDGYGYHQIPTTQH

SEQ ID NO: 14306 - protein, 436 aa, unidentified
MVFVLSSTNKKLMPTNEYRARKLLKSGKAAVYKYHPFTIILVERKDGYTQSIEYCCDTGYQHIGISIKSQKHEYVNEERILLKEETERHNDCRKYRRARRNKLRYRKARWNNRHDNLICKDGFAPSIRNKRDVHISLFKMYYEVCPITSAIFEMGQFDTQLLKAVENGDNVPQGTDYQHGERYGYSTLREAVFARDNYKCVCCGKSAIKNGLILKIHHLGYRVGDRSNRMSNLATVCSNCHTSKNHQKGGKLYDLKPKLKTFKGATFMTMVRYNMFSKLKKSALDVKFNMTYGALTKLKRKDCNIKKSHSNDAYCMGNFHPKHRTDFKCYQKLRRNNRILSKFYDAKYIDLRDGTVKSGKQLSCNRVNRRELRSSNKNERVYRGTKISKGKTVVRKQHYQYRPYDFVWYENIKYAVKGVQDKGKRIALQNHLPIPI

SEQ ID NO: 14307 - protein, 451 aa, Ruminococcus sp.; identical to SEQ ID NO: 2436

SEQ ID NO: 14308 - protein, 419 aa, unidentified; identical to SEQ ID NO: 6954

SEQ ID NO: 14309 - protein, 427 aa, Nostoc sp.
MSKVFVLDTEKRPLDPIHSAQARQLLRNKKAAVFRRFPFTIILKESRPDASVSDLRIKLDPGAKITGIALVNDSTGEVVFAAELKHRGFAIRDALISRRQLRCSRRNRKTRYRKPRFLNRTRPEGWLAPSLMSRVHNVETWVNRLRKFAPITAISTELVKFDMQLMRNPEIEGKEYQQGTLAGYETREFLLEKWNRQCAYCGIKDIPLQIEHIHPRSKGGSNSITNLTLSCEKCNVKKGTKDIKDFLKKDPTRLQKILAQAKKPLADTAAVNATRYKLLEVLKSTDLPVECGSGGLTKFNRTNQQLQKTHWLDAACVGQSTPILIIKGIKPLLITANGHGTRQMCRTDKFGFPNRYVPKLKFIKGFQTGDIVKAVVTNGKKIGEYIGRVAVRSTGSFNISAQRGLIQGINYKFCKSIHKKDGYSYSS

SEQ ID NO: 14310 - protein, 420 aa, unidentified; identical to SEQ ID NO: 3546

SEQ ID NO: 14311 - protein, 428 aa, Pelotomaculum sp.
VVFVLDKHKKPLMPCKEKRARLLLLKGHAVVHKMAPFTIRLKDRVVEESELQPLRLKIKPGAKETGMAVLREDLPDKSEVVMMLEIRHKPGIKAGLDSRRSLRRSRRNRKTRYRKPRFNNRKRKKGWLPPSLEARVNQTMTTVNKLTSFLPALAISTEHAKFDTQLLQNPEISSIEYQQGELFGYEVREYLLEKWGRKCAYCGKTDIPLEIEHIIPKSRGSSGRVSNLTLACHDCNQEKGTLTAEEFGHPEVQAIAKRPMKEEAIINATRWKLFNKLISIGLSLECGTVARTKKQRIEHSFPRTKYHEACCVGASTPERIIVKQNYVSVWSAKGRGTRKMCNTDKFGFPKNNRSNKKVYFGFQTGDLVVANIPKGKYTGRWIGRVIVRSSGYFDVKDGAGKWLCQGASHKHFRLLQRNNGWQYHKINT

SEQ ID NO: 14312 - protein, 423 aa, Arthrospira sp.; identical to SEQ ID NO: 3735

SEQ ID NO: 14313 - protein, 520 aa, unidentified
MNYLDFVLMVDKNKVPCIPIKESTAAYLLRHNKAKIINHDPTVIQRLDEYSADYEIRNIFELKIDSGYLNIGFSVSDSEHEYLAGQVNLLQGMSERLTVRASNRRFKRARLRYRKNKNVDYKTVHNPTYKNGNQDGWIAPSIQHKIDSHIRLIKKIAQWVPIDRIIIEVAKFDIQKMIADLDGRIISGKDYQNGEMKGYENVTAYVRDRDKHTCQMCLSSGKVKNKNNDTIEVHHIIPRAAGGTNRPSNLICLCHHHHRLVHSNNNNNKYFKELQNKKMPDTYKDSTFMNIVRYKIYNALCADFKDVELAYGYETKINRRLIGLPKFHYTDAVCLKEWKNISLTKFIYIVDQKRCNDRKMESFFDAKYIDIRDGKTKSGTELCYTRLDNASSWRTTCKNEVDNLRQYREKKITKGRKQRECHFYCLKPGDLIFINLGNHKGNLAEVKTMQIHKGKYKIFFTYKNQKVDNPTISLSPEEYGQLKKNECSKVKIVRTRRGMIWRKYNRLEYENTYKDQYDKN

SEQ ID NO: 14314 - protein, 423 aa, unidentified; identical to SEQ ID NO: 3951

SEQ ID NO: 14315 - protein, 443 aa, Anoxybacillus sp.; identical to SEQ ID NO: 4041

SEQ ID NO: 14316 - protein, 415 aa, unidentified
MENEMAYCFVVDKNNRPLAPTKVNKGWYLVRKGRAKIKSRYPMVIQLEKEVEPDKYDESRMVVGIDDGSAHVGLAIVQKCPTKNKVVFKGTIEQRQNVKHLMDVRRGYRRYRRHHKRYRQARFNNRHSSKRSGRLAPSIKQKKDAILRVLYQLNRWIDIQEYCLEDVCIDIRAMTDGHNPYKWKYQKSNRLDENLRKAAIIRDGCKCQECGKSNCVLEVHHIRARKYGGADTIGNLIALCSGCHQKTEGREREFEDRYFKIIGSKPKRFDYAMHVMQGKNYLREKISELGPLHLTNGGETANKRIDWNIEKSHSNDAICITNCNPDTCDVKEWIIKPMRRKSKAKTDNVLGIRHRDLVSYTYKNGEIHTGYVTALYPELLALNFQSKTKHCKKVNARKCRLLWKFDKIYWLEQRV

SEQ ID NO: 14317 - protein, 443 aa, Anoxybacillus sp.; identical to SEQ ID NO: 4769

SEQ ID NO: 14318 - protein, 431 aa, unidentified
MDAWDIIVVLNKRGKPLMPCSPAKARLLLKEKKAIVKRRTPFTIQLTIATGESKQPVSLGVDAGYKHVGLSASTEKAELYASEVELRQDITDLLSARRALRQSRRNRKTRYRAPRFDNRIRTKRKGWLAPSVENRINAHLSRIEAVLRLLPVTKITVETASFDTQLLKNPDIAGKEYQEGEQLGFWNVREYVLFRDGHVCQHCHGRSKDPVLNVHHLESRRTGGDSPGNLITLCETCHKALHRGEITLKAKRGQSFRAEAFMGIMRWEVLNRLKASHPELEVNNTYGYWTKHARIANGIAKSHCADAFCIAGNLGAERLGEFFFQKQTRRNNRQIHKLSILKGGIRKRNQAPFEVKGFRLFDKVACQGEEGFIFGRRSSGFFDVRKLDGTRISAGISYKKLHLLEKRRTYLTEIRKEEALPPLPEGRGLRA

SEQ ID NO: 14319 - protein, 414 aa, unidentified
MPCSPAKARLLLKEKKAIVVRRTPFTIQLTIATGESKQPVSLGVDAGYKHVGLSASTEKAELYASEVELRKDITDLLSARRALRQSRRNRKTRYRAPRFDNRIRTKRKGWLAPSVENRINAHLSRIEAVLRLLPITKITVETASFDMQRLKNPDISGKEYQEGEQLGFWNVREYVLFRDGHVCRHCHGRSKDPVLNVHHLESRRTGSDSPDNLITLCETCHKALHRGEITLKAKRGQSFRAQAFMGIMRREVLNRLKASYPELKVHETYGYLTKHARIANGIVKSHGADAFCIAGNLGAERLGEFFFQKQTRRNNRQIRKLSILKGGIRKRNQAPFEAKGFRLFDKVACQGEEGFIFGRRSSGSFDVRKLDGTRISAGISCKKLRLLERRRTYLTEIRKEEALPPLPEGRGLRA

SEQ ID NO: 14320 - protein, 428 aa, Vibrio sp.; identical to SEQ ID NO: 4673

SEQ ID NO: 14321 - protein, 419 aa, unidentified; identical to SEQ ID NO: 4877

SEQ ID NO: 14322 - protein, 426 aa, unidentified
MVVYVLDLNGQPLMPTVRFGKVRRLLRDKKAKVVRRCPFTIRLLYETETNVVQDCYCGVDTGSKHIGVAVVGNDKVLYQSQTELRNNIKKKIDARRAYRRNRRSRKTRYRKPRFLNRKNSMKLNRLPPSVKHKVQTHIDEIEFCKKILPVSDLILEVSQFDTALMKNPSLIDEIVRHWCYQKGFDYGYSSRREAVLHRDNYTCQCCGKKNCRLEVHHIKFKSQGGTDDEENLITLCEDCHKAIHVGTIVLNKEPKKMNLKYATHMSIIRSQLLKIYPQAVETFGFVTSENRNRLGLEKSHFIDACVIAGGGEKFECNDEIFYKRRVAYNDRKLTKGIRGEQSIPVGKVQGFRKFDKVKYFGKEYFINSRISRGGYAVLMDIFNNKIDFSYMPNGFKIPKLLNCKRISARRSTICTEIEVKAIHLQI

SEQ ID NO: 14323 - protein, 416 aa, unidentified
MVYVLDKNGQPLMPTDRHRKVRLMLQSGQAKVIKRCPFTIQLNYDSGHQTQEISLGIDAGSKHIGVSATTKIKVLYEADVELRNDIVDLLSSRRELRRGRRNRKTRYRQAKFNNRRRGNGWLAPSIRQKIGTHLTVVENICKILPISRIMVETASFDIQKIKNPDIQGAEYQQGDQLGFWNVREYVLFRDGHTCQCCKGKSKDKILNVHHIGSRKTGGNAPNNLITLCETCHTGYHKGTVQLPKAIKRGMRFKDAAFMGIMRWAFYEALKQQYEPVGTPVHNTYGYITKHTRIAYNLPKEHYVDARCISGNPEASSNGEYYYQKKVRCHNRQIHKLTVLKGGIRKQNQATYLVKGYRLFDKVSYQGKGYFVFGRRQSGFFDIRTLSGEKVNKGSLSCKKLKFIATRTYYLTERRAV

SEQ ID NO: 14324 - protein, 536 aa, unidentified
VIEQKHDACVPSGMALRDFSSPATLQSRHLMPYIYVLGMDGKPQMPTTRRRHVQRLLDTGRARIASHVPFTIQLLYKNDPILQPVTLAEDPGRTNIGLAALSLKGDLLFSAKVETRNKEISKLMDKRRQSRRASRNGERKARQRLAKKFGTMLKAGMLMRKLPQYAADKYITCHVIRNTQARFSNRKRPDGWLTPSARHLIQTHINLVHKMMKYLPVTDVVLEVNRFAFMQLEDPSISGVDFQNGPLKGFDDLHAAVRDLQDGKCMLCKNEIQDFHHIVPRSRHGSNTIGNIAGLCTKCHEKVHKDEKAEKRLKDKKKGLDKKYGALSILNQAIPFICKELETEFGKEHVHYCTGRETALVRRSLRYHKTKEEQYHEVDAWCIGALSLDRIPEKAPAFEEVHTIMQFRRQDRASIKAQTSRTYKLDGETVAWNRKKRTDQKNDSLEDWYQKQVQIHGQKEADRMRSRLTVKISQRRYNNLERMLPGAVFLYKGKRYVMKGQLSNGKYLRAVGDGKTNYPVKECRIGKRNQGLVFID

SEQ ID NO: 14325 - protein, 237 aa, unidentified; identical to SEQ ID NO: 5189

SEQ ID NO: 14326 - protein, 397 aa, unidentified; identical to SEQ ID NO: 4965

SEQ ID NO: 14327 - protein, 476 aa, unidentified; identical to SEQ ID NO: 8081

SEQ ID NO: 14328 - protein, 520 aa, Micromonospora sp.; identical to SEQ ID NO: 13703

SEQ ID NO: 14329 - protein, 524 aa, Butyricicoccus sp.; identical to SEQ ID NO: 8949

SEQ ID NO: 14330 - protein, 416 aa, unidentified
VPEMANYAFVLDANGKQLAPTKETKAWYLIRKKRATLVSKYPMVIQLNKKIPDDKICKDEIRCGIDDGGLHVGIALVQKCQTKNKVLFKGTIEQRSDVKHLMEVRRGHRYYHRYHKRYRQARFNNRSSSKRRGRVAPSILQKRQSILRIINQLSKWIDITSYWLEDVYIDIRALTDGYKPYRWQYQKSNRLDENIRKAVILRDGYKCMECGKSNTRLEVHHIKPRRLNGSNTLNNLISLCEKCHQKTEGKEELFMIKYFSLLNSSDNKHLNYASHVMIGKMWLREHLSSIGELNLTTGGDTANKRIDWDIDKSHSNDAICITDLKPDTCNIKEWIIKPMRRQSKAKTDNVLGIKHRDLVEYTYKNGETHRGYVTALYPELNALNFQSSTKHCKKVNAKKCRLLWKFNKIYWLDNAS

SEQ ID NO: 14331 - protein, 512 aa, unidentified
MSTVYVLNKDGKPLMPTTRGGHVRHLLKEQKARVVRTKPFTIQLLYETDDVVQLLYLGIDPGRTNIGVAVVKTDGTAVFTAHLETRNKEIPKLMKKRKNSRRARRTNGRRCRRQRRAKANGTISKKCVKQDTAQNGSVSKRAKKIGVIKRHLPGCEKEVLCIGIKNKEAKFSNRVRPEGWLTPTANQLLQTHINLVKKIQKFLPISDVVLEVNKFAFMQLDNPNIQKWQYQQGPLYQKANLEEAVSEMQEHHCLFCKKPIDHYHHVVPQHKNGSNTIGNIVGLCTKHHDLVHKEAAWQEKLAKKKTGLNKKYGALSVLNQIIPALTKELSSLFPKHFFATNGKSTYDYRAAHGVSKDHWLDAYCIACSVLADDVCDNNINSHVPYELKQFRRHDRRALHKENMSRVFTLNGKSVATNRHKATEQTTDSLEEFRQCQPDDVCKLKVKEHYPEYRNPKRNFPGCVFLVGKHTHVMQGTSGSHNGKADGYYDTNGNSYSSGECKFVAKNEGIVFA

SEQ ID NO: 14332 - protein, 456 aa, Halomonas sp.; identical to SEQ ID NO: 14305

SEQ ID NO: 14333 - protein, 455 aa, unidentified
VSVFVLSKNKKPLMPCSEKRARLLLSRGRAVVHLMAPFTIRLKDRKDGTLQPVHVKIDPGSKQTGLGLVFESRQDLKVLWLAVLHHRSHQISEQLTARRAMRRRRRNQLWHRPARLDNRTRKADWLPPSLQHRVDTTLAWVKKLSKLVPVSDIGLERVKFDMQKMLNGDISGVEYQQGTLFGFEVKEYLLDKHNHTCAYCGGVSGDNRLEVEHVHPRSKGGSNSVKNLVMACRTCNEAKSNILLADWKRMLGRSKLDKARAVGIEKTLKGKWVGLKDAAAVNATRNALLSQILFFAKDEKSVCTGTGAMTKFNRKQQGMPKHHTLDAVCVGEVNHPIVNWQQPVLDIQCTGRGSYQRTRLDKYGFPRGYLMRQKAVYGFQTGDQVKAIVPSGKKQGNYTGRVAVRASGSFNIQTSDGLVQGISHKHCTLIQRGSGYGFNLTTIAIINGGSEKQAA

SEQ ID NO: 14334 - protein, 470 aa, unidentified; identical to SEQ ID NO: 5320

SEQ ID NO: 14335 - protein, 446 aa, unidentified; identical to SEQ ID NO: 11087
  REGION 1..446: note = Ga0373629_0001011

SEQ ID NO: 14336 - protein, 451 aa, unidentified
MSVAVISKTGIVLMPTSEYRARKLLDSGKAIIYGYRPFTIQLTERETGDVQPVELCVDTGYIHIGVSVKSEKHEYLGLQVDTLTDEKAKHDDRRMYRRQRRNRKRYRKSRFDNRKRKSGWLAPSLEHKKEIHLQIITAICGVYPIADITLEMGNFDTQVLKAKEEGKQIPQGTDYQHGERYGIATLREAVFTRDGYKCQCCDRGIKDGAILHAHHIQYRSQGGTNRMSNLITVCEKCHTPANHKPGGKLYGWKPKIASLKDATYMTAVRWQLYRKVKEMFPGIHVKITYGAETKERRRILDIKKSHVNDAFVMGQFHPKHRSLPVLYKKKRRNNRCLEKFYDAKYIDSRNGKTRSGQELFNGRISRNHKKDSENLHRYRKKKVSRGKRNIRVQRYKIQPHDIVLFDGKKYETTGCHNKGTRAILLPEKKSKSVEKLTIYKYAGGYYPSKFA

SEQ ID NO: 14337 - protein, 470 aa, unidentified; identical to SEQ ID NO: 2949

SEQ ID NO: 14338 - protein, 431 aa, unidentified; identical to SEQ ID NO: 4306

SEQ ID NO: 14339 - protein, 442 aa, unidentified; identical to SEQ ID NO: 7529

SEQ ID NO: 14340 - protein, 561 aa, Xylanimicrobium sp.
LSPGELQGLIDQTTSPRDKEMEVTALTARQQIDRRVLPQPAALEPVPADTDGVSTKRGTGATAMPGHRSGQQGRGETGSSSPAAVGVTPAPAGSPVGAGAGTGDRPLLVGRVFVLDRHGRPLMPTRPARARELLRKGRARVHRVVPFIIRLVDVDATTPGIDVDGVELGIDPGSKHSGLALFTTTRDGERTAVTLIDLVHRGLTIKNAMTSRAQLRRGRRSRNLRYRAPRFDNRRRHPVDGLNTWLAPSTRHRVVTTLSWVDRLTRWAPITGVHVEAVRFDTQAMENPEIGGVEYQQGTLAGFEAREYLLTKYRHTCVYCDATGVPLNIDHVRPRSKGGSNRVSNLVLACVTCNQAKDAQPVEVFLACDPARLARVKAGLKRPLRDAAAVNSTRWALTHAIEARGFPVKTSTGGRTKYNRTVHAVPKTHALDALCVGDVTGVTGWPATTLVVTCAGRGRYRRVNVDKYGFPRTTKDGTPAKVNRTKIHHGYATGDLVRAVVPTGKKQGTHVGRVAVRATGSFNITTAHTTIQGINHKHVRLLQRGDGYTYQTTPTLTGDEK

SEQ ID NO: 14341 - protein, 544 aa, unidentified
MKQKKQKVMVYILNKKGKPLMPTTRCGHVRKLLDSKKAVVVSSNPFTIRLKYDTPNGVQDVFAGIDSGRENIGSGASNEDGDCLYLGELKTSNKSIKMKITERAGFRKERRRHDRQNKQRKARKDHTEIQNGNADICRTTISCKSVQISYPAAEKSVTHKIIRGKEGKFANRHRDEGWITPSARQLVQMHMNDLKSMCKILPISHVTLERVAFDFQKLENENIKAWEYGKGKLYGYDSPEEYIHDVQGGKCLICGKPHIDYLHHIIPRSKGGSNKVSNLAGLCYDCHYGPMGVHNCQDTQDRLPELKNEANKQYKVSLLNSVMPVLIEEMDKFCKANSIIFSICEGHDTAKVRDIYDLQKDHCVDGFAISLVGRNVKSVDVMPDRIHQKQRYKKKSKNIIKKRNCREYYDGKKLVAVNRHKGTDQKADSLEEYMNTYAETHTADECKKHFESLTVKPARRTYTFHKEGRICPFHIGDKVRYEKKNKIKGNTKVETFICEGIRFPKDENKAKVEHNKTKSKKMKFCRVLEPGCTPYIDYRKLVLI

SEQ ID NO: 14342 - protein, 419 aa, unidentified
MPTKRKRHILKLLNTGKARIAEKVPFTIQLKYENIPVLQPVTLAEDPGRTNIGVAVLSPLGNLMFAAVIETRNKEIKKLMADRKAHRQASRRGERRARQRLAKKYGTIIKAGMAMRKLPQYAADKFVACKFIRNTEARFCNRKRRTDWLTPTVNHLVQTHLNVIKKISRYLPVTDIAIEVNRFAFMQMENPNASGVDFQNGPLKGFNDVKAAIREQQHGKCLMCKNDIEHFHHMVPRSKGGSDTIQNQVGLCPKCHAKVHTDTSFRKKLGDKKSGLLKKYGALSALNQAIPFICKGLLEEYGEKHVRFCTGKETSLIRTSLGYEKTNENQMHEVDAYCIGLAMLGVKNIKFQQFDNTKSSSFAVRTGVSSITRQKGLIISVSRRLLQTANQGLSKQEMPFLIGMKNSLRPAKMVKLASC

SEQ ID NO: 14343 - protein, 442 aa, unidentified; identical to SEQ ID NO: 11369

SEQ ID NO: 14344 - protein, 436 aa, unidentified
MFVFVLDKKHEPLMPCHPARARKLLKAGRARVVKTYPFTIRLVDRLLENSAVQPVAVKVDPGSEQSGMAVVRDDGKAHHHALFFINLVHRGQVIQERMTARSAFRRRRRGANLRYRAPRFNNRKRPEGWLPPSLQHRVDTTMSWVKKLRKLVPVTALWVENVKFDTQKLQNPEVSGVEYQQGTLFGFEVREYLLEKFERRCVYCGAENTPLNIDHVVPRAKGGSDRVSNLVLACTECNQKKGAQPLEVFLKGKPEQFERIRRQLKAPLRDAAAVNATRWALFNALKQTGLPVATGTGAQTKFNRKSFGIPKEHWLDALCVGRINGTDHPEGMGVLQVRCTGRGSYQRTRLNKYGFPRGYLMRQKRVHGFATGDIVKAVKKGVTFQGRVAVRARGSFVLQTPDGKVDGIHWRHCRLISRNDGYGYAWLRPALHSSSV

SEQ ID NO: 14345 - protein, 425 aa, Arthrospira sp.; identical to SEQ ID NO: 3231

SEQ ID NO: 14346 - protein, 440 aa, Clostridium sp.; identical to SEQ ID NO: 8300

SEQ ID NO: 14347 - protein, 428 aa, Chamaesiphon sp.; identical to SEQ ID NO: 3970

SEQ ID NO: 14348 - protein, 414 aa, unidentified
MPCSPAKARLLLKEKKAIVKRRTPFTIQLTIATGETKQPVSLGVDAGYEHVGLSASTEKAELYASEVELRQDITDLLSARRTLRQSRRNRKTRYRAPRFDNRIRTKRKGWLAPSVENRINAHLSRIEAVLRLLPVTKITVETASFDLQLLKNPDISGKEYQEGEQLGFWNIREYVLCRDGHVCQHCYGRSKDPVLNVHHLESRRTGGDSPGNLITLCETCHKALHRGEITLKAKRGQSFRAEAFMGIMRWEVHNRLRALHPGIEVSNTYGYRTKHARIANGIAKSHCADAFCIAGNLGAERLCEFFFQKQTRRNNRQIHKLSILKGALRKRNQAPFEVKGFRLFDKVACQGEEGFIFGRRSSGFFDVRKLDGTRISAGISCKKLHLLEKRRTYLTEIRKEEALPPLPEGRGLRA

SEQ ID NO: 14349 - protein, 490 aa, unidentified; identical to SEQ ID NO: 6170

SEQ ID NO: 14350 - protein, 414 aa, unidentified; identical to SEQ ID NO: 2588

SEQ ID NO: 14351 - protein, 420 aa, unidentified; identical to SEQ ID NO: 4992

SEQ ID NO: 14352 - protein, 420 aa, unidentified
MVYVLNKQGQPLMPTKRYGKVRRMLRDGLAHVVRLVPFTIQLDYTSGKEVQEVTLGIDAGSKHIGVSATTEKHELLAMQVEERDDVVKLIADRREARRTRRNRKTRYRAARFDNRRRKEGWFAPSTENRISAHLRIIKLVFSILPVTKTNIEVAQFDSQKIKDDKITGVEYQKGEQLGFWNVREYVLARDGHVCQHCKGKSKDKILNVHHIESRKTGGDAPNNLITLCETCHKAYHRGDIQLKVRRGTSLRDAAAMSIMRWEVYNRAKQEFANVHLTYGYITKHNRINHDIEKTHCADAFCITGNVGARRLTWFLGIRMQRRHNRSLHLYKPKKGGLRQGNVASHWIGKSRLQQYDYVEWNGQKAFISGSQNGRPYLKNFDNKYIMSPKASVNAKTVKFIRRRRGSMIIEQLPKMLDYKP

SEQ ID NO: 14353 - protein, 429 aa, unidentified
MLWKFYRLIGRTSVRPISLAYRKKELFMRPVYVLDMNGKPLMPTCRFGKVRRMLKSGEVKVVDTLPFTVQLDRPTKTHVVQSVTLGCDPGRTNIGLAAVRSDGTDLYRSHCETRNKEIVDLMDARRAARRASRRGERLARKRLAAKHETATTFPNGRKLPGCKEPIMLKDIINTEARFNNRVRPAGWLTPTATQLLRTHLNLIKRISRILPVSDIALEINKFAFMQLDEPDKNKWNIDFQHGPLYGTGGLKAAVRQLQNDTCLLCQENVIEHFHHLVPRSKRGDNTINNIAGLCQKCHEAVHKSADTAEKLSTLKKGQTKHYGGTSVLNQIIPKLVEELGKTYHENLHLTYGGQMKEFRTKHKLEKTHDTDAYCIAAGTMQTVKPNIRTDVYEIKQFRRHNRANIYHQTERAYKLNGQTVTRNRRKRTD

SEQ ID NO: 14354 - protein, 334 aa, unidentified
MVYVVANDGQPLMPTERHGKVCRMLKSGMAKVVKKCPFTIQLQYESERNVQPVALGIDAGSKHVGVSATTKAKVLYESDVELRDDIVKLLATRRQLRRRRRSRKTRYRPARFDNRRRKEGWLAPSIRQKIESHLTVVANVCKILPVSQIIVETASFDIQKIKNPDIQGIEYQQGEQMDFWNIREYVLFRDGHTCQCCKGKSKDKVLNVHHIESRKTGGNAPNNLITLCETCHKGYHNGTVTLPKNIKRGMKFKDAAFMGIMRWTFYNTLKEQYEPDIPVHYTYGYITKNTRINHNLLKGHCIDARCISGNPDAVSDGTYYYQKKVRCHNRQIHK

SEQ ID NO: 14355 - protein, 376 aa, Bacillus sp.; identical to SEQ ID NO: 4597

SEQ ID NO: 14356 - protein, 416 aa, unidentified
MVYVLDKNGQPLMPTDRHRKVRLMLQSGQAKVIKRCPFTIQLTYNTGHQAQEISLGIDAGSKHIGVSATTKTRVLYEADVELRNDIVDLLSSRRELRRGRRNRKTRYRPARFDNRRREDGWLAPSIRQKIGTHLTVVENICKILPISRITVETASFDIQKIKNPDIQGAEYQQGDQLGFWNNREYVLFRDNHTCQCCKGKSKDKILNVHHIESRKTGGNAPNNLITLCEICHTGYHKGAIQLPKTVKRGMRFKDAAFMGIMRWAFYEALKQQYEPVGTPVHNTYGYITKHTRIAYNLPKEHYVDARCISGNPEASSNGEYYYQKKVRCHNRQMHKLTILKGGIRKQNQATYLVKGYRLFDKVSYQGKGYFVFGRRQSGFFDIRTLSGEKVNKGSLSCKKLKFIATRTHYLTERRAV

SEQ ID NO: 14357 - protein, 430 aa, unidentified
MSNFVFVLNTNKKPLEPVPPGQARRLLKQGKAAIYRRYPFTIIAKYTVSNPKTKAHQLKIDPGSKTTGLAIVQDDKVIWGAELTHRGQQIKNDLESRRAIRRSRRNRKTRYRKPRFLNRTRQLGWLPPSLQSRVENVLTWVNRIRRYVPITGISQELVKFDTQAMPNPEISGKEYQQGELAGYEVRQYLLEKWGRKCAYCNTQNLPLEIEHIQAKSKGGSNRVSNLTLACRPCNQAKGNRDIKDFLVQKPDVLNQVLKQAKQPLKDVAAVNSTRWALFNRLKETGLPIETGTGGRTKYNRVRLGLPKTHWLDSACVGSVESLQVLIQRPLLITARGWGNRQMCTPNKHGFPTKHRTRCKTFFGFQTGDIVQATLPTGKFTGVHVGRLTVRESGVFEMRTPIGKISPVRHKYCKLIHRNDGYMYAFCTNVQ

SEQ ID NO: 14358 - protein, 545 aa, unidentified
VQFAWWLCHPKPSDNIEDVNHETALMLLQIKAGTETFGTAPCGSGPKAEGVSHERKSMNIVSVVTNTNKPLMPTSPYRARKLLSSGKAKIVKHRPFTILLVNRSDGNVQEIEYKSDTGYLHVGISVCSEKREFVREQRDLLPDEREKHNDRRKYRRTRRKRKRYRKARFDNRIGKIRKKEKNKHVWLPPSLDHKVDAQVQLFLRLYQVMPIKRAVFEMGQFDPALMKALEKGEAAPQGIDYQMGERYQIATRRAAVFTRDRYACVFCGRSIKDHAILHVHHIGFWKQDRSNRLDNLATCCEQCHTSENHRPGGILYDVEPKLKSLASATYMNVVRFELLRRLKEAAPDVEFHISYGAKTSVIRKQRSISKSHTNDAYCLGQYFPKLRAEEIGFQKIRRNDRILQKFYDAEYLDSRDGTTKKGKELTNGRISRNHKKDHKNLHQYRGKKLSKGRITIRRGRSSLKTGSLVRFDGELLTVHGTHRSRKKNKAGHIKVSVNVEFECPSKTGRKSAALSKCQIISRSYNTGWKQIQLRKEEQGRIAAVV

SEQ ID NO: 14359 - protein, 557 aa, unidentified
MIYNLVSIRERSFMKQKKQKVMVYILNKKGKPLMPTTRCGHVRKLLDSKKAVVVSSNPFTIRLKYDTPNGVQDVFAGIDSGRENIGSGASNEDGDCLYLGELKTSNKSIKMKITERAGFRKERRRRDRQNKQRKARKDHTEIQNGNADICRTTISCKSVQISYPAAEKSVTHKIIRGKEGKFANRHRDEGWITPSARQLVQMHMNDLKSMCKILPISHVTLERVAFDFQKLENENIKAWEYGKGKLYGYDSPEEYIHDVQGGKCLICGKPHIDYLHHIIPRSKGGSNKVSNLAGLCYDCHYGPMGVHNCQDTQDRLPELKNEANKQYKVSLLNSVMPVLIEEMDKFCKANSIIFSICEGHDTAKVRDIYDLQKDHCVDGFAISLVGRNIKSVDVMPDRIHQKQRYKKKSKNIIKKRNCREYYDGKKLVAVNRHKGTDQKADSLEEYMNTYAETHTADECKKHFESLTVKPARRTYTFHKEGRICPFHIGDKVRYEKKNKIKGNTKVETFICEGIRFPKDENKAKVEHNKTKSKKMKFCRVLEPGCTPYIDYRKLVLI

SEQ ID NO: 14360 - protein, 285 aa, unidentified
LRLLPITKITVETASFDMQRLKNPDISGKEYQEGEQLGFWNVREYVLFRDGHVCRHCHGRSKDPVLNVHHLESRRTGSDSPDNLITLCETCHKALHRGEITLKAKRGQSFRAQAFMGIMRREVLNRLKASYPELKVHETYGYLTKHARIANGIVKSHGADAFCIAGNLGAERLGEFFFQKQTRRNNRQIHKLSILKGGIRKRNQAPFEAKGFRLFDKVACQGEEGFIFGRRSSGSFDVRKLDGTRISAGISCKKLRLLEKRRTYLTEIRKEEALPPLPEGRGLRA

SEQ ID NO: 14361 - protein, 441 aa, unidentified
MELRITYCKVEYFQGVDTLVYVISIDGKPLMPCKPVIARLLLKQHKAKVIKKYPFTIKLLYKTKTEYTQPLTLGIDTGSSKIGSAVVDENNNVLYLSQVEVRNDITDKMKQRAKYRRNRRNRKTRYRKARWLNRKNSIKEDRFSPTIVSKINSHLKEINFVKSILPIQNVILETATFDPHALKNPAVLHNKWLYQKGVNYGFANTRAYVLDRDNYTCQYCKGKSKDSKLEVHHIIFRSQGGSDESKNLITLCKTCHGKLHNGKINLKKNGKVKGQLKHATQMNSIRQQLLRLLPEAAETFGFITKEHRQLMKLPKEHYYDAVAIACLNNIENTGLIGVNFKTKNILFKRCIADGDFQQTKGIRSEQRIITGKIQGFRKLDKVEYQGKEYFIKGRMSTGYAILMDIEGNKINLKPIPKFEKMKRMQARKSWIISQETIQNIC

SEQ ID NO: 14362 - protein, 408 aa, unidentified
MKVYVINKDGSQLMPCNPAKARKLLRDGKAKSVKRIPFTIQLEWDCEENIQEITIGIDKGSHTTGYCAIANGEILISGYINHRTDIKNKMQKRAANRRQRRARLWYRKRRFNNRSSSKRAFRLPVSIKANVEEVIRTINQLPLPIKAVVIEDVQIDIARLNETKLNGKYYQQSKRLHENLRLATLIRDNFTCQCCKAKKTSLEAHHIHYRKDGGSETINNLITVCSTCHSRIHDGTKTLKKKGVDGFKDQIAQRTMQGKIYLYSELNKKYKVTKVYGYETSAFRKEQGLPKDHDADALAVATLRTGEVIPFHKENFYTINFRATQTRRQFHDLPKKGKGRVRYQVNSSFGKFSKGDIVLVFDKFLKQINSIYSNGRLAFKRVPGEPFSSIPKNCRLLERQSSLVFSSI

SEQ ID NO: 14363 - protein, 512 aa, unidentified; identical to SEQ ID NO: 13755

SEQ ID NO: 14364 - protein, 418 aa, unidentified; identical to SEQ ID NO: 2425

SEQ ID NO: 14365 - protein, 454 aa, unidentified
MQYVYVLNKHGEPLMPCSPRKARLLLKQKKACVVKRTPFTIKLLYGSTGYKQPITLGVDAGNKHVGLSASTEKRELYREEATPRNDVVDLLSARRAFRRSRRNRKTRYRAPRFNNRVHSKHKGWLAPSVEVKIQEHITLIKRVCRILPVTLVRVETAEFDTQRLKAMLEGKPLPVGTDYQLGEMYDEYNVRQYVLKRDKYTCQCCGAHPTKTKAVKLHVHHIETRRTGGNAPNNLITLCTACHKALHAGKVTLNGKKRGKPLKDAAFMGIMRKTLMERLLKELKIPVQETYGYITKYLREKHSIPKSHTNDARCISKNPLAIPCDTCYYTKAIRHHNRQLHKATILKGGIRKANQAPYTVKGYRLWDKVSYNGSECFITGRRTSGYFALKKLDGTVISNSASYEKNCGYKKLQQIILQKEGEGAIPPMTEVTGILAQLNEYQYSLARRLYCGHL

SEQ ID NO: 14366 - protein, 442 aa, unidentified; identical to SEQ ID NO: 2834

SEQ ID NO: 14367 - protein, 413 aa, unidentified; identical to SEQ ID NO: 3476

SEQ ID NO: 14368 - protein, 448 aa, unidentified
MSTGLRAVQAEPAGIRKGDALKVFVLNMRGQPLMPCSPAKARHLLKAGKAAVRRRTPFTIQLRIATGETKQSVTLGVDAGAKHVGLSAATEKEEVFASEVELRQDITGLLAARLSLRRDRRHRKTRYRAPRFLNRVRSKHKGWLAPSVENRIQAHMSRIDAVCRLLPVTRIVIETASFDVQKIRNPEVEGTGYQQGDQLGFWNVREYVLFRDGHVCQHCHGHAKDKILNVHHLESRQTGGDAPNNLITLCETCHKACHAGKIKLKVKRAQSFRAEAFMGIMRWTLLDRVRKAHPGLPVENTYGYLTKNTRITLGLPKAHCVDAYCIAGNLKAVRRGVYLHQRQVRKHNRQIHKCTVLSKTLKDGTKIGYRKLNQTPHLVKNFRLFDKVRCLGQTGFIFGRRSSGYFDVRRLDGVKLSSGISYRKLTLLEKRSTYLTELRKEDGASSPV

SEQ ID NO: 14369 - protein, 429 aa, unidentified
MLVYVLKQNGQPFMPTERFGKVRRLLKEKKAKVVRREPFTIKLLYEPETDVVQECYCGVDTGSQHIGVAVVGNDKVLYQSQTELRSDIKKKMDRRRAYKKLRRYRKTRYRKPRFLNRRNSIKKDRLPPSVRHKVQAHIDEIEFCKKILPVSDLILEVSQFDTALMKNPNLMNEKVRHWGYQQGFNYGYSSRRSAILHRDGYTCQCCGKKNCRLEVHHVKFRSDGGTDDEENLITLCVDCHKGVHAGTVVLNKKPKKSKNLKHATHMSIIRSRLLREYPDAIETFGFVTSENRHRLNLSKDHYIDACVIASGGLEFRELDVIYRKRRVSVQDRILTKGIRGERRIPTCKIHGFKRYDKIRYLEEVCFVKGRKTKGAFVLMNINNDSIDFRDRGGVQSPSYKNIERINARRSVLCIKEKIEREVRFIPVLN

SEQ ID NO: 14370 - protein, 410 aa, Bacillus sp.; identical to SEQ ID NO: 5906

SEQ ID NO: 14371 - protein, 227 aa, Eubacterium sp.
MVYVLGKDGQPLMPTDRHGKIRRLLKSNKAKVVRKCPFTIQLLYESTTHTQEITLGVDSGSKHIGISATTKDKVLFEADVELRNDIVDNISTRRQFRRTRRNKKTRYRKARFDNRRRKDGWLAPSVQQKVDCHLTMIDKVNKILPITKIIVEVASFDIQKIKNPKISGTDYQQGEQLDFWNVREYVLFRDNHICQCCKGKSKDKVLNIHHIESRKTGGNAPNNLITL

SEQ ID NO: 14372 - protein, 427 aa, unidentified; identical to SEQ ID NO: 3696

SEQ ID NO: 14373 - protein, 448 aa, unidentified; identical to SEQ ID NO: 8365

SEQ ID NO: 14374 - protein, 457 aa, unidentified; identical to SEQ ID NO: 3236

SEQ ID NO: 14375 - protein, 410 aa, Ktedonobacter sp.
MSYVFVIDQEKRPLDPVHPGRARKLLSSGKAAVYRRFPFVLILKHPVSEAHPQPLRLKIDPGSKTTGLAVLNDTSGQVLWAAELVHRGEEVHQALQKRAGVRRGRRSRHTRYRAARFSNRRRKRGWLAPSLCSRMQNVQTWTRRLMRWCPLGAISYEAVRFDTQAIQNPEIKGVAYQHGTLAGLEVKEYLLLKWRHKCVYCQKGDIPLEVEHIVPKRRGGSDRITNLTLACEACNQQKGSQTAQAFGFPHLQAQALQPLKDAAAVNSTRWALYERLKATGLPIEVSTGGQTKWNRKQRGIPKSHWLDAVCVGPSTPERVQWQHVIPLLITARGRQCRQLCNVDGWGFPRSRPKGPSKVFGFQTGDMVQAVVTRGKRMGTYVGRVAIKTDGYFKITGTHGMVEGIHGRHCP

SEQ ID NO: 14376 - protein, 442 aa, unidentified; identical to SEQ ID NO: 2903

SEQ ID NO: 14377 - protein, 456 aa, unidentified; identical to SEQ ID NO: 3505

SEQ ID NO: 14378 - protein, 512 aa, unidentified
MPTVYVLNKDGKPLMPTTRGGHVRHLLKEQKARVVRAKPFTIQLLYETDDAVQLLYLGIDPGRTNIGVAVVKANGTAVFTAHLESRNKEILKLMQDRKKARRARRTNGRRHRRQRRAKANGTISKKCVKQDTAQSKNPSKRAKEIGVIKRRLPGHKKDLLCIGIKNKEAKYTNRARPEGWLTPTANQLLQTHINLVKKIQKFLPISDVVLEVNKFAFMRLDNPDIQKWQYQQGPLYQKGSLENAVSEMQEHHCLFCDKPIDHYHHVVLQSENGSNTIANIVGLCSEHHNLVHKDAAWQKKLAEEKVGLNKKYGALSLLNQIIPALTNKLSVLFPKHFFVTTGKSTHDYRESHSVSKDHWLDAYCIACSVLPSNVCDSNINNHVPYELKQFRRHDRRALHKENMSRVYTLNGKAVATNRHKAIKQTTDSLEEFRQSHPGDVCKLKVKEHHPAYRNLNRNHPGSVFFVGEQAHVMQSIVASKDGKATRYKDTNVNKIAAGQCRFVAKNEGIVFT

SEQ ID NO: 14379 - protein, 421 aa, unidentified
  REGION 1..421: note = Ga0315279_10042333
VASGILSCNNPEMGLRKRVSGRKVIVPVLSITGSPLMPCTPAKARHLLERRKAKVVSLNPFAIKLTFECENKTQEVSLGIDSGYKYIGFSAVTKTKELVSGEVELDDKTSKRLTERKMYRGHRRNRLRYRKPRFNNRKTPEEWLPPSVQRRFDTHVNMIAKLKELTPVKKVTVEIGAFDIQKLMDSEISGKGYQQGDLYGYNNLKAFLFYREQGKCQFCGKKIDKGEKAHLHHIKLRSETGTDRPSNMALLHEDCHDKLHKKGLYKKLKAPKEYKAETFMSIMAARLKKALNCDVTYGYETAIKRNLLGIEKSHVNDAFVIAGGTNQERCLPCRVEQKRINNRTLQTNRKGFAPSIRKQRHKIQNRDFIWIGDKKYLCGGIASKGAMIYYFDGIEKKTIYYKEVNKFYSTGSLAWINYVSL

SEQ ID NO: 14380 - protein, 396 aa, unidentified; identical to SEQ ID NO: 9891

SEQ ID NO: 14381 - protein, 420 aa, unidentified; identical to SEQ ID NO: 11688

SEQ ID NO: 14382 - protein, 375 aa, unidentified
LNYDSGHQTQEISLGIDAGSKHIGVSATTKIKVLYEADVELRNDIVDLLSSRRELRRGRRNRKTRYRQAKFNNRRRGNGWLAPSIRQKIGTHLTVVENICKMLPISRIMVETASFDIQKIKNPDIQGAEYQQGDQLEFWNVREYVLFRDGHTCQCCKGKSKDKILNVHHIESRKTGGNAPNNLITLCETCHTGYHKGTVQLPKAIKRGMRFKDAAFMGIMRWAFYEALKQQYEPVGTPVHNTYGYITKHTRIAYNLPKEHYVDARCISGNPEASSNGEYYYQKKVRCHNRQIHKLTVLKGGIRKQNQATYLVKGYRLFDKVSYQGKGYFVFGRRQSGFFDIRTLSGEKVNKGSLSCKKLKFIATRTYYLTERRAV

SEQ ID NO: 14383 - protein, 453 aa, Lactobacillus sp.; identical to SEQ ID NO: 2687

SEQ ID NO: 14384 - protein, 423 aa, unidentified; identical to SEQ ID NO: 9087
  source 1..423: note = Firmicutes bacterium OM04-13BH

SEQ ID NO: 14385 - protein, 417 aa, unidentified
MPCSPAKARLLLKEKKAIVKRRTPFTIQLTIATGEPKQPVTLGVDSGYKHIGLSATTEKAELYASQVELRQDITDLLSARLALRRSRRSRKTRYRAPRFNNRVASKHKGWLAPSVENRIAAHLSRVEAVMRVLPVTAITVETAAFDTQLLKDPDIAGGAYQQGEQLGFWNVREYVLFRDGHVCQHCRGKSKDPVLNVHHIESRRTGGDAPNNLITLCETCHKAFHRGEIELKVKRGKSFKAETFMGIMRWTLFERLKKAHPELSVRNTYGYLTKHKRISHGIAKSHCADAYCIADNLGAKRLEGFFFQKQTRKHNRQIHKLSILKGGLRKKNQAPYEVKDFRLFDKVICKSEEAFIFGRRTSGSFDVRRLDGTRISAGISYKKLRLLEPRTTYLTEFRKEAALPPLHKCRGFRAEFL

SEQ ID NO: 14386 - protein, 465 aa, unidentified
MSTCVCVLSNNGERLMPTIRLGRVRHLLKDGKAKIIKHHPFTIQLLYDSKTNTQPIEICEDVGYNYIGISVKSESHEYVSAQYDTLQDEKEHHDDCRMHRRTRRNRFRYRKPRFDNRKRGEGWLAPSLKHKKELNVNIVKMYCAVMPITHATVEVGSFDTMLVKAIQEGKAVPEGADYQKGPRYNLATLREAVFYRDNYVCKVCGRKATEGAILHMHHMFYWKGRHGNSLDELLTVCEKCHTPANHQKSGKLYGFGEKIKFADLSGAAFMNTVRWQIVNELYVAFGKPFVTITYGAMTKEKRIALQLEKSHSNDAYAMGEFHPNRRCTFKHYEKARRNNRILEKFYDSRYIDIRTGEIATGKELFNGRINRSHKKDSENLHKYRGKRTYTGHRALLRKKVNLNPGDLVSLNGENLIVHSTHTKKNGAVNVEFETPAKSGQKSASLKKLKIVKAADSIHPAWEKVS

SEQ ID NO: 14387 - protein, 470 aa, Rhodanobacter sp.; identical to SEQ ID NO: 3168

SEQ ID NO: 14388 - protein, 424 aa, unidentified; identical to SEQ ID NO: 3434

SEQ ID NO: 14389 - protein, 442 aa, unidentified; identical to SEQ ID NO: 2903

SEQ ID NO: 14390 - protein, 421 aa, unidentified; identical to SEQ ID NO: 4235

SEQ ID NO: 14391 - protein, 375 aa, unidentified
LGVDAGSKTIGVSALTKKEELFAANVIPRNDVVDLLSTRREFRRARRNCKTRYRKPRFDNRVRSKHKGWLAPSVEVKIQEHITTIRRVYGILPVSKVVVETAEFDLQLLKAIADGKPVPQGEDYQKGEMYGHYNVRQYVLWRDDYTCQCCGAHATKKKEVRLHVHHLESRKVGGDAPDNQVTLCESCHEKLHKGLIAEKDFKKRKRKSTRDATFMGIMRKTLMQRLCSELPIPVIETRGYITKATREKLLVLPKSHTNDALAIAQGKQGFNVGYLPGILQIDKIYTIRPVRHHNRQLHKATILKGGIRKSNQTEKYVFGYRLFDKVQFNGQDCFIWGRRTTGIFTIKTINGKMIKDGISFKKLKLVEKSTSYLIA

SEQ ID NO: 14392 - protein, 446 aa, Halomonas sp.; identical to SEQ ID NO: 4517

SEQ ID NO: 14393 - protein, 515 aa, unidentified
MATVYVLNKDSKPLMPTTRCGHVRYLLKEKKARVVRANPFTIKLLYETDDVVQPLYLGIDPGRTNIGVAVAKGDGTAVFTAHLETRNKEIPKLMAKRKEYRQGRRHYRRCKRQRRAAAHGTLSKRCKKQDTAQGSNISERAQKIGVFERNLPGCEKPVLCIGIKNKEARFNNRVRPAGWLTPTANQLLLTHINFVKKICKFLPISDVVLEINKFAFMALDNPNIQKWQYQQGPLYQKGSLENAVSEQQDHHCLFCKKAIEHYHHVVPRSENGSNTIANIVGLCTKHHDSVHKDTAWQKKLAKKKTGLNKKYGALSVLNQIIPALTKELSSLFPKHFFATNGKSTYDYRAAHGVSKDHWLDAYCIACSVLPDGCFDNTVNSRIPHELRQFRRHDRQVCHQQNAKRKYYLDRKLVAINRHKATEQKTDSLEEYRNNGGATDKLVVKEHKPTSKRLNRILPGALMTANGKLNVMMASKGLHNGIPDYYVFADNSEAKPTKYTLINKNKGIVFVLNSVS

SEQ ID NO: 14394 - protein, 457 aa, unidentified
VWLYQAVYNLGEGFLPSSEERTAFYWLLIYRKEHGIMQYVYVLNKHGEPLMPCSPGKARLLLKQQKACVVKRTPFTIKLLYGSAGYKQPITLGVDAGSKHVGLSASTEKRELYREEFTPRNDVVDLLSTRRQNRRSRRNRKTRYRAPRFDNRVHSKHKGWLAPSVEVKIQEHITVIKRICRILPITLVRVETAEFDTQRLKAMLKGKLLPVGTDYQLGEMYDEYNVRQYVLKRDNYTCQCCGAHPTEKKPVRLHVHHLESRHVGGNAPNNLITLCVACHKALHEGKITLDKGKKRGKPLRDAAFMGIMRNTLLARLKDELNIPVKQTYGYITKLLREKNKIPKSHVNDARCIAKAPNAKPCDTMLYTRALRHHNRQIHKAKILNGGIRKKNQAPYLVKGFRLWDKVRYNGEECFITGRRSSGYFALKKYDGTVISNSASYKKLMLLEAATNYITERS

SEQ ID NO: 14395 - protein, 490 aa, unidentified
KYETPDIVQSLYLGIDTGRENIGIAVSEENGNCIYLAELETRNKSIKKKMTERREFRSERRRYKRISKQRKAIKNGTTIQNGEDAVLRSKKECKSKTVIYPGMEEGITHKIIQGAEAQFNNRKRKENWITPSGRQLIQMHMNAIKLVQKILPISHIIIERVSFDFQKLENQNIHTWQYGRGPLYGFKDYKNYINSEQNGICLLCRKNHIEYYHHIVSKSNGGSDNINNIAGLCYNCHYGNNGVHKNPKASKQLQTLKEGLKQKYKISLLNSVMPVLIEEVSEFCINNNYKFSVTDGYSTSVTRKQMNLPKTHCIDAYCISMTNKLFQCKMLPSVIYEQRRFKKKSGNIISKRNNREYYVKERDKLVLVAKNRHKATEQSFLSLEEYLSEYALTHTEYECIKQARSLLVKPCRRTYTYHKEKKVASIHPGDIVKYEKHNKKGNTKTEVFIAESIKISTNQICYETKSKNLKLCKRIMSTSVPYVSKRTLVI

SEQ ID NO: 14396 - protein, 428 aa, unidentified; identical to SEQ ID NO: 4440

SEQ ID NO: 14397 - protein, 431 aa, Escherichia sp.; identical to SEQ ID NO: 3801

SEQ ID NO: 14398 - protein, 442 aa, unidentified
MVTVQQSTHHLPFGRVFIRRNLFMVYVISQDGKPLMPCSDPIARLLLKQGKAKVKKREPFTIKLTYETTNHTQGLTLGVDTGSGTIGSAVSKDNGDIVYMSEVVVRNDITDKMTQRAKYRRNRRNRKTRYRKARWLNRASSIKKDRFSPTMQSKLHSHVREIEYIQSILPVTEMVFETGQFDMQLMKNPSLANPKVRPWGYQKGANYGFENTKAMVLNRDNYTCQCCKGKHKDSKLEVHHIVFRSQGGSDEESNLLTLCHTCHKDLHSGKINPKLSGKVKGNLKYATQMNSIRKQLFRFYPNAIETFGYVTKANRLHLGVDKEHYYDACTIATQGNAFNVKSNLYKKKCVSDGDFQKTKGIRSEQPIVTDKICGFRKFDKVRYFGNDYFIKGRMSTGYAILMDIDGNKIDFSTMPRGYKTPKLSNCKRITARSTVMTQVKVV

SEQ ID NO: 14399 - protein, 423 aa, Merismopedia sp.; identical to SEQ ID NO: 3144

SEQ ID NO: 14400 - protein, 415 aa, unidentified; identical to SEQ ID NO: 3370

SEQ ID NO: 14401 - protein, 442 aa, unidentified
LRDYMTPKKRKEASRMSEYIYVLGMDGDPQMPTKRKRHVEKLLQAGRARVFRQIPFTIQLTYENKPVLQPVTIAEDPGCSNIGMAVVSLSGELLSAAVVQTRNKEIVKLMEKRKQHRRASRNGERKARQRLAKKCHTMIKTGFLMRKLPMYGKDKRVRCNVIKNTEAKFCNRKREDGWLTPSAEHLVRTHINLIHKMQKFLPITDVAIEINRFAFLSLEDPSISGVDFQNGPLKGYDDLNVAIEDLQDGHCLMCNSPIEHRHHIVPRSMQGSNTIGNIAGLCCKCHERVHKDARFEDRLKKKKAGLNKRYAAVSVLNQAIPFICKRLEQEFGKEHVHYCSGRDTSMVRRSLGYHKTKEEQLHEVDAWCIAVLALQHVPEKAPEFDHVHEILQFRRQDRSRIKAQTSRAYYHEGKKIAKNRKKAEGQKDDSLQGWRKRQVERY

SEQ ID NO: 14402 - protein, 426 aa, unidentified
MVYVQDIDGKPMMPTTRYGKVRRLLKNKKAVVVNLCPFTIKLTYVTSDYKQEIVLGVDAGTKHVGLSATTKSKELYSSEVILRNDIVDLLSTRRELRRARRNRLRYRKPRFNNRIKSKRPGWIAPSVKYKIDAHIRVVENVCSILPISRIVIEVAQFDTQKIKNPNISGKEYQEGDQLGFWNTREYVLARDGHKCQYCKGKSKDKILNVHHIESRKTGGDSPSNLITLCETCHKEYHKGNIDLKIRRGKSLRDAAVMGIMKWRLYEEIKSKYDRVSMTFGYVTKYNRINHGFEKSHVSDAFVISKNFNAIRLGYYYKVRLVRRHNRQIHKQKIQKGGIKRLNQSPFEVFGFRLFDRVMFENSYYFIFGRRKTGSFDIRYIDGKNQKNVTYKKLKLSRCKRFMIQMELNKKTRTCFENERNSDRDAA

SEQ ID NO: 14403 - protein, 442 aa, unidentified
MVTVQQSTHHLPFGRVFIRRNLFMVYAISQDGKPLMPCSDPIARLLLKQGKAKVKKREPFTIKLTYETTNYTQGLTLGVDTGSGTIGTAVSKDNGDIVYMSEVVVRNDITDKMTQRAKYRRNRRNRKTRYRKARWLNRASSIKKDRFSPTMQSKLHSHVREIEYIQSILPVTEMVFETGQFDMHLMKNPSLANPKVRPWGYQKGANYGFENTKAMVLNRDNYTCQCCKGKHKDSKLEVHHIVFRSQGGSDEESNLLTLCHTCHKDLHSGKINPKLSGKVKGNLKYATQMNSIRKQLFRFYPNAIETFGYVTKVNRLHLGVAKEHYYDACTIATQGNAFNVKSNLYKKKCVSDGDFQKTKGIRSEQPIVTDKICGFRKFDKVRYFGNDYFIKGRMSTGYAILMDIDGNKIDFSTMPRGYKTPKLSNCKRITARSTVMTQVKVV

SEQ ID NO: 14404 - protein, 430 aa, unidentified
MPKVYVLNRHGRPLMPCTPAKARHLLDAGKAKVRHRTPFTIQLLYGSTGYTQEVILGVDAGSKTIGLSAATETEELFSAEVKPRNDVVELMSARRQFRRARRNRTTRYRKPRFDNRVRSKHKGWLATSVEVKIQEHMTAIRRVCVILPISRVVVETAEFDLQLLKAVAEGKPVPQGEDYQKGEMYGHYNVRQYVLWRDGYTCRVCGAHGSVKKGVPLHVHHLESRKVGGDAPDNLVTLCTACHDKLHKGIITAADLKKRKRRSTRDATFMGIMRMTLLRRLREQLPVPVVETRGYITKATREKLLVLPKSHTNDALAIAHGPQGFRAEYLPNIRQADRLYTICPVRHHNRQLHKATILKGGVRKANQAEKYICGFRLYDKVLYNGIECFVWGRRTSGSFLLRQLNGEKVKDGVSYKHLKLLERSQSYLVA

SEQ ID NO: 14405 - protein, 406 aa, unidentified; identical to SEQ ID NO: 3498

SEQ ID NO: 14406 - protein, 397 aa, unidentified
LRVFILNKRGKPLMPCSPAKARLLLKEKKAIVKRRTPFTIQLTIATGEAKQPVSLGIDAGYKHVGLSASTEKAELYASEVELRQDITDLLSARRTLRQSRRNRKTRYRAPRFDNRIRTKRKGWLAPSVENRINAHLSRIEAVLRLLPVTKITVETASFDLQLLKNPDISGKEYQEGEQLGFWNIREYVLCRDGHVCQHCYGRSKDPVLNVHHLESRRTGGDSPGNLITLCETCHKALHRGEITLKAKRGQSFRAEAFVGIMRWEVHNRLRALHPGIEVSNTYGYRTKHARIANGIAKSHCADAFCIAGNLGAERLCEFFFQKQTRRNNRQIHKLSILKGALRKRNQAPFEVKGFRLFDKVACQGEEGFIFGRRSSGFFDVRKLDGTRISAGISCKKL

SEQ ID NO: 14407 - protein, 442 aa, Sutterella sp.
MSTSVFVLDKKHRPLMPCRPARARRLLRAGRARVVKRFPFVIRLVDRTVEQSEVQPVLIKLDPGSRETGAAVVRDDEKKRHHALAFFVIKHRGGAIRDALKARSAFRRRRRSQNFRCRSPRFLNRVKPKGWLPPSLRHRVETTLSFVRRMCRYLPVSGIATELVKFDSQKPQNPEVSGVKYQQGTLFEYEVREYLLEKFGRKCVYCGAEGVPLNIDHVVPRAKGGSNRVSNLVLACVSCNQKKGARSLEDFLKGKPEVLARVRRELKTPLRDAAAVNATRWVLFNELKATGLPVETGSGALTKLNRHAFGVEKEHWLDALCVGRLNGVVTRKGLNALEIRCMGRGSRQRTRLTKYGFPRGYLMRQKCVHGFATGDMVEANVPKGKKAGLWRGRVAVRVSGSFNIQTPKGVIQGVGWKHCRLISHNDGYGYAWLGHAPHSSPA

SEQ ID NO: 14408 - protein, 427 aa, unidentified; identical to SEQ ID NO: 3696

SEQ ID NO: 14409 - protein, 512 aa, unidentified; identical to SEQ ID NO: 5549

SEQ ID NO: 14410 - protein, 470 aa, unidentified; identical to SEQ ID NO: 2825

SEQ ID NO: 14411 - protein, 442 aa, unidentified; identical to SEQ ID NO: 3161

SEQ ID NO: 14412 - protein, 427 aa, Enterococcus sp.; identical to SEQ ID NO: 2410

SEQ ID NO: 14413 - protein, 424 aa, unidentified
MRVFVFNMRGRPLMPCSQRKARLLLMENKAMIYKYHPFTIQLTYTTGETKQDCHIGIDTGSKYIGAAVRSEDKVFWKGEIELRQDIRSNLDTKRIYRRSRRNRKTRYRKPKFLNRKRRDEWLPPSLQSRINHTFHWIDTLSSLVPNPILHIEVGKFDVAKMINPEIHGVDYQHGQTYGFFDERYFVFARDNYTCQCCGKSKNKILNTHHIIYRSNGGTNRVDNLITVCTDCHTSQNHRKGGIFYQWQEQHKKVKQYKEPPFMNTLRKRIFGAYPDAEITYGSETTPKRKAMKLDKTHYNDAIVISGINEIKENPEEWLLIKQFRKKKRSLHEATARKGRKKPNRNQTRNSKNTPYYKGFYLNDKVSVFGKSGYITGFTSNAAYIKDENNDYITLPNKTYKQVSINKMKLECHNNNWQYIIKNAV

SEQ ID NO: 14414 - protein, 518 aa, unidentified; identical to SEQ ID NO: 13109

SEQ ID NO: 14415 - protein, 416 aa, unidentified
RKKARRARRTNGRRCRRQRRAKANGTISKKCVKQTTAQNGSVSKRAKDIGVIKRRLPGCEKDVLCIGIKNKETKFTNRTRPEGWLTPTANQLLQTHINLVKKIQKFLPISDVVLEVNKFAFMRLDNPNIQKWQYQQGPLYKKESLESAVSEIQEHHCLFCKKPIDHYHHVVPQHKNGINSIGNIVGLCAKHHDLVHKDSAWEKKLAKKSTGLYKKYGALGVLNQIIPTLTNELSSLFPKHSFVTNGKSTYDYRAAHGVSKDHWLDAYCIACSVLPSNVCDSNINNHMPYELKQFRRHDRRVLNNENMNRVYTLNNKAVAINRHKAKDQKTVSLEEFRKEHPDDVCKLKVKEHHPTYRNMNRNFPGSVFLVGKQIHVMQGIASSKDGKATKYNDTSATAIAAGKCKFVAKNTGILFV

SEQ ID NO: 14416 - protein, 442 aa, unidentified; identical to SEQ ID NO: 4418

SEQ ID NO: 14417 - protein, 463 aa, unidentified
MAVFVLDRSGRPLMPCTEKRARLLLARGRARVHKVMPFTIRVVDRLAEDNEFQALRVKLDPGSKTTGMALVRETAENGVAVINLFELMHRGIQISEALTARRGHRSLRRSRLRYRPARRLNRGNKKSGWLAPSLQHRVDTTLAWVNRIQRYAPVSAISTELVRFDMQALENPEIEGAQYQQGTLAGYEVREYLLEKWHRTCAYCGAKNVPLQIEHIHPKSKSGSDRISNLTLACQCCNAKKAALPVEVFLAKQPERLKRIQAQAKRPLKDAAAVNATRWALINALKTTGLVVETASGGRTKFNRIELGIPKTHALDAACVGPMNSMTGWRKPTLCIKAMGRGSYQRTRLDKFGCVRGYLTRSKNIQGFQTGDRVKAIVTKGKKAGCHIGRVAVRASGSFNIQTSNGLVQGVSHRYCTVVQRGDGYGYQLVAKTEATGTQPKQGDALHPALYLPGLKAGISRAN

SEQ ID NO: 14418 - protein, 532 aa, Acidithiobacillus sp.; identical to SEQ ID NO: 4458

SEQ ID NO: 14419 - protein, 518 aa, Anaerostipes sp.; identical to SEQ ID NO: 4915

SEQ ID NO: 14420 - protein, 410 aa, unidentified
MFVYMVYVQDINGKPMMPTTRYGKVRRLLKDKKAVVVNLCPFTIKLTYVTSDYKQEIVLGVDAGAKHVGLSATTKSKELYSSEVILRNDIVDLLSTRRELRRTRRNRLRYRKPRFDNRIKSKRPGWVAPSVKYKIDAHIRVVENVCSILPISRIVIEVAQFDTQKIKNPNISGKEYQEGDQLGFWNTREYVLARDGHKCQYCKGKSKDAILNVHHIESRKTGGDSPSNLITLCETCHKEYHKGNIDLKIKRGSSLRDAAVMGIMKWKLYEELRSRYDRVFMTFGYITKHNRIKYGIEKSHTSDAFVISMNINAKRIERQYLKRLIRRHNRQMHKMKILKGGKKKNNQAPFEVFGFRLFDKVLYNNKIFFVYGRRKSGSFNIRDFNGENSKDVSRKKFKLIRGKRHPIILK

SEQ ID NO: 14421 - protein, 331 aa, unidentified
VKYRRNRRNRKIRYRKARWLNRANSIKNDRFSPTMQSKLHSHVKEIEYIKSILPITEMVFETGQFDTHFMKNPSLANPKVKHWGYQKGTNYGFENTKAMVLNRDSYTCQCCKGKHKDSKLEVHHIVFRSQGGSDEESNLITLCHTCHKDLHSGKINPKLSGKVKGNLKYATQMNSIRKQLFRLYPNAIETFGYVTKANRLHLGVNKEHYYDACTIATQGNAFNVKSNLYKKKCVSDGDFQKTKGVCSEQPIVTDKICGFRKFDKVRYFGNDYFIKGRMSTGYAILMDIDGDKVDFSAMPKGYKTPKMVNLKRLEARSTWMITTVEVTPNIA

SEQ ID NO: 14422 - protein, 406 aa, unidentified
MVYVQDIDGKPMMPTTRHGKVRRLLKANKATVVNLCPFTIQLTYKSTDHKQPVTLGIDAGAKHIGFSATTEKEELFACETTLRTDIVDLLSMRLQNRRTRRSRLRYRKSRFNNRGSSKKKGWVAPSVKQRIDSHLNEVNEIHKILPITKIVIEVAQFDTQKMKNHDISGADYQNGEQLGFWNVREYVLFRDGHKCSHCKGKSKDPVLNVHHLESRKTGGDSPSNLITLCESCHKAFHKGEIELKKKRGKSLRDAAVMGIMKWKLYEELKSRYDNVSMTFGYITKHNRIKYGIEKNHTSDAFVISRNFNAKRIEYQYLKRLVRRHNRQIHKMKILKGGKKKNNQAPFEVFGFRLFDKVLYNNEICFIYGRRKSGNFNIRDFNGENPKDVSHKKFKLIRGKRHPIILK

SEQ ID NO: 14423 - protein, 427 aa, Anabaena sp.
MSKVFVLDTNFTPLNPIHSAQARQLLRSKKAAIFRQFPFTIILKKSRPDSPISSLRLKIDPGAKFTGMALVNDLTGEVVFAAELKHRGFAIRDALTSRRQLRRSRRARKTRYRQPRFLNRTRPEGWLAPSLQSRVENIKTWVKKLLNFAPIQAISQELVRFDMQLMANPDIQGQEYQQGTLAGYETREYLLEKWGRQCAYCGAKDVPFQVEHIHPRAKGGSNSITNLTLSCEKCNTKKGTKDIKDFLKKDFSKLEKILKQAKRPLADAAAVNTTRTALLKVLKATGLPVETGSGGLTKFNRSEQNLEKTHWIDAACVGQSTPILNIKGVKLLLITANGHGSRQSCRTDKYGFPNRHVPREKIHFGFQTGDIAKAVVTTGKKIGICVGKVAIRSTGSFNISTKNGLIQGISHKFCKRIHAKDGYSYAV

SEQ ID NO: 14424 - protein, 535 aa, unidentified; identical to SEQ ID NO: 6116

SEQ ID NO: 14425 - protein, 494 aa, unidentified
MAMVYVQNKDGKPLMPTTRYCYVRLLLKEKKARVVCTTPFTIQLNYDTPDITQDLILGIDPGRTNIGVAVVKEDGQCVFSAHLETRNKDIPLLMKKRAGFRRQHRTLDRRRKRQRRARAAGTTIAEGSVERLLPGYEKPVVCHYIRNKAARFNNRSRPAGWLTPTANHLLQTHINLIAKVAKFLPITKVVVELNRFAFMAMDNPNIHRWEYQQGPLYGLGSVEDAVYAQQDGHCLFCKKPIDHYHHVIPRHKGGSETLANRCGLCAKHHDLVHKDKAWADKLVTRKEGMNKKYHALSVLNQIIPFLMEYLGSETLYDVYAIDGRSIKGFRIAKNVPKEHYTDAYCIACSILDTDNKVSAPVEPFELKQFRRHDRQSCIRQMVDRKYLLDGKVVATNRHKAIEQKSDSLEEFREAYGDAAVSQLTVRPHSPQYKDMARIMPGAVMDFDGIVGVFKGSSGRNNGTPNYYNSTKGARVLTKRCALLAKNAGMVFIPA

SEQ ID NO: 14426 - protein, 431 aa, Petrotoga sp.; identical to SEQ ID NO: 11274

SEQ ID NO: 14427 - protein, 442 aa, unidentified; identical to SEQ ID NO: 2903

SEQ ID NO: 14428 - protein, 549 aa, Streptomyces sp.
MTTFPAGEQTHQAVLPQQPALESVGADTPGSRDETAHGHPASARGTGREHGRGETDGRGATTRRRHAKDAAMAAEAAENGSGDAPPHKPNYTGGAGANRVFVLSKDGKPLMPCHPARARELLNKGRAVIARQMPFAIRLKDRTHAESEVDGLQLRIDPGSKGTGLSLTDVKKETDQQGTVVTVRRGLVAVELRHRGDQIHKAMQQRAGYRHRRRSANLRYRAARFHNRSHRAGWLPPSLRHRVDTAFSQAARLCRYAPVTEIHLEHAAFDTHAISAGRPLTASEYQQGTLAGTETRAYLHTQWNSACAYCGTSGVPLNIDHVRPRSRGGSNRISNLVLACVPCNQTKGNTSVEAFLAHRPERLAKILKQVSPPLQDAAAMNATRWQLAEVLSDLGRPVHTWSGGRTKGNRDAMGLEKTHTLDALSVGQLEHESGDAIVRFPSQVLVVKATGRGSYARTTPDRFGFPRLRRARVKRHFGYVTGDLVRANVPSGKWVGTWTGRIAVRARGQHILTTPAGRINVRHQHLQLLQRADGYGYSSRPEPASRKMG

SEQ ID NO: 14429 - protein, 451 aa, Blautia sp.; identical to SEQ ID NO: 7022

SEQ ID NO: 14430 - protein, 533 aa, unidentified
MSTVYVLNKDGKPLMPTTRGGHVRHLLKEQKARVVQSNPFTIQLLYETNDAVQPLYLGIDPGRTNIGVAVVKADGTAVFTAHLKSRNKEIPKLMQDRKRARRARRTNGRRHRRQRRAKANGTISKKCVKQTTTQNGSVSKRAKEIGIIKRHLPGCEKDVLCIGIKNKETKYTNRERPEGWLTPTANQLLQTHVNLVKKVQKLLPISDVVLEVNKFAFMRLDNPDIQKWQYQQGPLYKKESLESAVSEMQEHHCLFCKKPIDHYHHVVPKSENGSNTIANIVGLCAEHHNLVHKDVAWQEKLAEEKTGLNKKYGALSVLNQIIPALTNKLSVLFPKHFFVTAGKSTHDYRAAHGVSKDHWLDAYCIACSVLPSNVCDSNINNHVPYELKQFRRHDRRVLHKANMSRVYTLNGKAVATNRHKAIKQTTDSLEEFRQNYPDDVYKLKVKEHHPAYRNLNRNYPGSVFLVGKQAHVMQGIASSKDGKTTKYNDTNATTITAGKCKFVAKNSGILFVQCKFRKTLSDGTTKKLQYPVR

SEQ ID NO: 14431 - protein, 418 aa, unidentified; identical to SEQ ID NO: 4327

SEQ ID NO: 14432 - protein, 424 aa, unidentified
MRVFVFNMRGRPLMPCSQRKARLLLRENKAMIYKYHPFTIQLTYTTGETKQDCHIGIDTGSKYIGAAVRSEDKVFWKGEIELRQDIRSNLDTKRIYRRSRRNRKTRYRKPKFLNRKRRDEWLPPSLQSRINRAFNWIDTLSSLVPNPILHIEVGKFDVAKMINPEIHGVDYQHGQTYGFFDERYFVFARDNYTCQCCGKSKNKILNTHHIIYRSNGGTNRVDNLITVCTDCHTSQNHRKGGIFYQWQEQHKKVKQYKEPPFMNTLRKRIFVAYPDAEITYGSETTPKRKAMKLDKTHYNDAIVISGINEIKENPEEWLLIKQFRKKKRSLHEATARKGRKKPNRNQTRNSKNTPYYKGFYLNDKVSVFGKSGYITGFTSNAAYIKDENNDYITLPNKTYKQVSINKMKLECHNNNWQYIIKNAV

SEQ ID NO: 14433 - protein, 412 aa, unidentified
MVYVLSKTGQPLMPTENHAKVRILLKQGKAKVVHSCPFTIQLLYSSTNYTQKVTLGVDSGSKHIGLSATTKDKVLFESDVELRNDIVDLLSTRRELRRSRRGRKLRYRKPRFNNRRRSDRWLAPSVKQKVDSHITMIAKVHKILPISNIVVEVASFDIQKIKNPTICGVDYQQGEQLDFWNVREYVLFRDGHTCQCCKGKSKDKILNVHHIESRKTGGDAPNNLITLCETCHTGYHKGTVKLPKTIHRGMSFKDATFMGIMRWALYEKLKAIYSDVKLTYGYITKNTRIKNSLPKDHYIDARCISGNPNAVSNGDVYYYKKVRCHNRQIHKNTILKGGYRKRNQAPYEVMGFRLFDKVQWKGCKCFIFGRRSTGRMDLRLLDGKHINASVGYKNLKLLKMCSSYLIEQRKVG

SEQ ID NO: 14434 - protein, 447 aa, Allochromatium sp.; identical to SEQ ID NO: 7851

SEQ ID NO: 14435 - protein, 406 aa, unidentified; identical to SEQ ID NO: 6445

SEQ ID NO: 14436 - protein, 442 aa, unidentified; identical to SEQ ID NO: 3218

SEQ ID NO: 14437 - protein, 419 aa, unidentified; identical to SEQ ID NO: 10184

SEQ ID NO: 14438 - protein, 408 aa, unidentified; identical to SEQ ID NO: 8232

SEQ ID NO: 14439 - protein, 426 aa, unidentified
MVFVLDKSKKPLNMISHAKARILLKNRLAVVHKIYPFTIRLKDNSCVGNDKTYTVKFDPGSKHTGVAITDNKDSVVMLAEIEHRGHLIKKDLTSRRMIRRHRRNRKTRYREARFQNRTKPEDWLAPSVKSRANNVINFIKKYKKILNINKVLIERVSFDVAQMTSDTKLWGVAYQQGPLYQTKLKSYLFKKCNGRCVYCGNKAEEIEHIVPKSKGGTDSPYNLVIACKKCNKLKGKSSLKEFGELMNKDYSHLEPKKLPRDASIVQAARNYMVKEITKLVSDTTLHDAWFTKYNRDELGLPKEHYYDALSVGEVPSKFNFLTDKILLISAKGRGSRQMCRVDKYGFPRTSPKGSKSVKGFQTGDMVKAIVPKGLKQGEYLGKVAVRSSGKFDIQTKTKTIEGINHKYCHLIQRGDGYLYSYKEREF

SEQ ID NO: 14440 - protein, 423 aa, unidentified; identical to SEQ ID NO: 6814

SEQ ID NO: 14441 - protein, 518 aa, Erysipelotrichaceae sp.; identical to SEQ ID NO: 7410

SEQ ID NO: 14442 - protein, 465 aa, unidentified; identical to SEQ ID NO: 10382

SEQ ID NO: 14443 - protein, 465 aa, unidentified; identical to SEQ ID NO: 6840

SEQ ID NO: 14444 - protein, 414 aa, unidentified
MPCSPAKARLLLKEKKAIVKRRTPFTIQLTIATGETKQPVGLGVDAGYKHVGLSASTDKAELYASQVELRQDITDLLSARRALRRARRNRKTRYRAPRFNNRIRTKRKGWLAPSVENRINAHLSRIEAVLRLLPVTKITVETASFDMQRLKNPDISGKEYQEGEQLGFWNVREYVLFRDGHVCRHCHGRSKDPVLNVHHLESRRTGSDSPDNLITLCETCHEALHRGEIALKTKRGHSFRAEAFMGMMRREVLNRLKASHSELEVNNTYGYRTKHARIVNGIDKSHCADAFCIAGNLGAERLCEFFFQKQTRRNNRQIHKLSILKGGIRKRNQAPFEIKGFRLFDKVACQGEEGFIFGRRSSGYFDVRKLDGTRISAGISYKKLRLLEKRRTYLTEIRKEEALPPLPEGRGLRA

SEQ ID NO: 14445 - protein, 296 aa, unidentified
LSRIEAVLRLLPVTKITVETASFDLQLLKNPDISGKEYQEGEQLGFWNIREYVLCRDGHVCQHCYGRSKDPVLNVHHLESRRTGGDSPGNLITLCETCHKALHRGEITLKAKRGQSFRAEAFMGIMRWEVHNRLRALHPGIEVSNTYGYRTKHARIANGIAKSHCADAFCIAGNLGAERLCEFFFQKQTRRNNRQIHKLSILKGGIRKRNQAPFEVKGFRLFDKVACQGEEGFIFGRRSSGFFDVRKLDGTRISAGISCKKLHLLEKRRTYLTEIRKEEALPPLPEGRGSAPKCDE

SEQ ID NO: 14446 - protein, 477 aa, unidentified; identical to SEQ ID NO: 5307

SEQ ID NO: 14447 - protein, 390 aa, Scytonema sp.; identical to SEQ ID NO: 14035

SEQ ID NO: 14448 - protein, 426 aa, unidentified
MVYVQDINGKPLMPTTRHGKVRRLLKDKKAVVVNLCPFTIKLMYVTSDYKQEIVLGVDAGTKHVGLSATTKSKELYSSEVILRNDIVDLLSTRRELRRARRNRLRYRKPRFNNRIKSKRPGWIAPSVKYKIDAHIRVVENVCSILPISRIVIEVAQFDTQKIKNPNISGKEYQEGDQLGFWNTREYVLARDGHKCQYCKGKSKDKILNVHHIESRKTGGDSPSNLITLCETCHKEYHKGNIDLKIKRGKSLRDAAVMGIMKWRLYEEIKSKYDRVSMTFGYVTKYNRINHGFEKSHVSDAFVISKNFNAIRLGYYYKVRLVRRHNRQIHKQKIQKGGIKRLNQSPFEVFGFRLFDRVMFENSYYFIFGRRKTGSFDIRYIDGKNQKNVTYKKLKLSRCKRFMIQMELNKKTRTCFENERNSDRDAA

SEQ ID NO: 14449 - protein, 423 aa, unidentified; identical to SEQ ID NO: 7848

SEQ ID NO: 14450 - protein, 420 aa, unidentified
MQYVYVLNKHGKPLMPCSPGKARLLLKQQKAHVVKRTPFTIKLLYGSTGYKQPITLGVDAGNKHVGLSASTEKRELYCEEFTPRNDVVDLLSTRKQNRRSRRNRKTRYRAPRFDNRVHSKHKGWLAPSVEVKIQEHITVIKRICRILPVALVRVETAEFDTQRLKAMLEGKPLPVGTDYQLGEMYDEYNVRQYVLKRDHYTCQCCEAHTTTKKTVKLHVHHLESRKVGSNAPSNLITLCTTCHDALHKGKVSLDGKERGKPLRDAAFMGIMRKALMARLREELPIPVQGTYGYITKMRREQNDIKKSHVNDARCISKHPLAEPCSVCYRTKAIRHHNRQTHKANFSKGGIRKRSQMPYVVEGYRLWDKVLYKGQECFVSGRRASGSFTLKKLDGTRISKGVTFKKLRLLEPATNYLIERM

SEQ ID NO: 14451 - protein, 442 aa, unidentified; identical to SEQ ID NO: 6809

SEQ ID NO: 14452 - protein, 396 aa, unidentified; identical to SEQ ID NO: 4508

SEQ ID NO: 14453 - protein, 399 aa, unidentified
LRVFVLNKRGQPLMPCSPAKARLLLKEKKAIVKRRTPFTIQLTIATGEAKQPITLGVDSGYKHIGLSATTEKAELYASQVELRQDITDLLSARLALRRSRRSRKTRYRAPRFNNRVASKRKGWLAPSVENRITAHMSRVEAVMRVLPVTAITVETAAFDTQLLKNPDIAGEAYQQGEQLGFWNVREYVLFRDGHVCQHCRGKYKDPILNVHHIESRRTGGDAPNNLITLCETCHKAFHRGEIKLKVKRGKSFKAATFMGIMRWTLFERLKKAHPELSVRNTYGYLTKHKRISHGIAKSHCADAYCIADNLGAKRLEGFFFQKQTRKHNRQIHKLSILKGGLRKKNQAPYEVKGFRLFDKVICKGKEAFIFGRRTSGSFDVRRLDGTRISAGISYKKLRL

SEQ ID NO: 14454 - protein, 474 aa, unidentified
  REGION 1..474: note = Ga0307928_10008592
MLVFVTDARNNIGHPTRRSGWINKKLKNGSAKKLKRYKNLIQVQLLDRIFSKEETIDCEFRIGIDPGYKHIGFCIYKIFNRKIVKLFSGELTTRTEEIKRLLQERKMYRRNRRRNRRKNVIRKYGTCKFRSPRWKNRRDKLDWNPTLNHLISTHCNLLNKFINLVGLEQTKIHIEYCTFDVHKIINPKVHSFWYQLGPKYKYQNTKMYVKKRDEYKCQRCGSRDIVNLTVHHIIQQIDGGTDRPDNLITVCRDCHDYIHKHNIKIKHTQKVFRDVGVLNSCMKKIFETLENVVPTQHTYGYITEVMRKEQGLEKTHSIDASIIALCDARGYQEEFSDYEYEYLENELEFVQKRRHVRNHVKRIEDRKYYVSGSKKFIAKNRRKRQTQKEDSLEDFRKKNLQVQVTVKPGVRRSRISNMKVLFKPGDKIWYNNDISTCYGWASTQGKVGLIEYDQYVPKRFCQVIARNSGIVCTN

SEQ ID NO: 14455 - protein, 396 aa, unidentified; identical to SEQ ID NO: 4508

SEQ ID NO: 14456 - protein, 396 aa, Geobacillus sp.; identical to SEQ ID NO: 11619

SEQ ID NO: 14457 - protein, 413 aa, unidentified; identical to SEQ ID NO: 3695

SEQ ID NO: 14458 - protein, 442 aa, unidentified; identical to SEQ ID NO: 2834

SEQ ID NO: 14459 - protein, 424 aa, unidentified; identical to SEQ ID NO: 2862

SEQ ID NO: 14460 - protein, 452 aa, unidentified
  REGION 1..452: note = Ga0315273_10116256
MQKLQVEFKNVPRNTSLVPCSTNPVLNREETLSVQDKVLACNNPEVNQSQHTERLKVKVYVIAKEGHPLMPCSCAKAKKLLKEGKAKVIKRDPFTIQLNWVCENQVQETILGIDTGYGNIGFSATTKKEELVSGMVKLDGKTKERLDEKRMYRRGRRNKLWYREPRWLNRKRKEDWLPPSIERRYQTHLNLIKKIKNLLPVSRVIIETAKFDIQKLENPDVKGKKYQQGDLYEYQNVRSYLMSREKGLCEYCKKDFKNSSGHIHHRKPKSKNGSNRLGNLMLLHKECHKKIHKKPELLKKYKNLSIKEYKQSTFMSIINKRFFNDIKDLEVTYGNITFVNRNKLGLTKTHCNDAFIISKGTNQVRTKHIEIIQKHRNNRVLQVNRKGFKPSIKRNRSIIAPLDLFWVGKIKYSCKTMFGYGRYIAYGDMKKKEYFNINKIKKYFNNGSLVWN

SEQ ID NO: 14461 - protein, 420 aa, unidentified; identical to SEQ ID NO: 3288

SEQ ID NO: 14462 - protein, 435 aa, Desulfovibrio sp.; identical to SEQ ID NO: 9014

SEQ ID NO: 14463 - protein, 536 aa, unidentified
VLRPRYQYPTRWYPSREQGSGNGCLSGEENTDLKQEVSGTLSKGDHSHPGEQDFCVPAITIQGGPAMSVFVVGLNGCRLMPTSERKARLLLKHGKASVYRKVPFTIKLNYKTGSTTQSGYLGIDTGSQHIGVSVVREDGAVLHKEEIGLRDSMSKRKLMQSRASSRRGRRHRKTRYRHPKWRPKAKRVYCKTPDRKGRHWKKRKITFASKRPKGWLPPSLQSKTDHHIRWIKKLQDLLPEGYRLSIELGRFDPARLKDPEIHGKLYQKGPQYDYENVRAYVLNRDRYTCQVCGKKGGKLHVHHILYRSYGATDDPQYMATVCSDCHNTENHHQGGILYQWMQKQKKFTRGLRDATFMNILRKRLIEAFPGATFTYGNITKADRERLRLPKSHGNDATAIAIVKTGIMTVKDKEPVIYIQQVRRKKRSLHEETPRKGRKEPNRKASRYDKNTKAVTVTKRKNKKKISITGCLFDRVELNGKKGWISGFTDKSCYVKDENDQYIRTSPKYKQVSLSKLKILHHCGNWAIGARRSLGKG

SEQ ID NO: 14464 - protein, 428 aa, unidentified
LKVFVLNMRGQPLMPCSPAKARHLLKAGKAVVKRRTPFTIQLRIATGETKQNVTLGVDAGAKHVGLSATTEKEEVFASEVELRQDITGLLAARLSLRRDRRHRKTRYRAPRFLNRVRSKHKGWLAPSVENRIQAHMSRIDAICGLLPVTKIVIETASFDIQKIKHPDVEGTDYQQGDQLGFWNVREYVLFRDGHVCQHCHGHAKDKILNVHHLESRQTGGDAPNNLITLCETCHKACHAGKIKLKVKRGQSFRAEAFMGIMRWTLLDRVRKAHPGLPVENTYGYLTKNTRITLGLPKAHCVDAYCIAGNLKAVRRGVHLYQRQVRKHNRQIHKCTVLSKTLKDGTKIGYRKLNQTPHLVKNFRLFDKVRCLGQTGFIFGRRSSGYFDVRRLDGVKISSCISYRKLTLLEKRSTCLTELRKEDGASSPV

SEQ ID NO: 14465 - protein, 440 aa, Clostridium sp.; identical to SEQ ID NO: 10846

SEQ ID NO: 14466 - protein, 509 aa, unidentified; identical to SEQ ID NO: 5057

SEQ ID NO: 14467 - protein, 423 aa, unidentified
MVYVLNIDGQPLMPTDKHGKVRHLLKDGRAEVVKRCPFTIRLLYDSTHYTQDIVLGVDAGSKHIGLSATTETKELYASDVELRNDIVDLISTRRQNRRSRRNRKIRYRKARFQNRVSGKKNWLAPSIRQKVDTHMTVVSRVCMILPVTKIIVETASFDIQKIKDPDISGTGYQQGEQLDFWNVREYVLSRDGHTCQCCKGKSKDPVLNVHHIESRKTGGDAPNNLITLCETCHKGYHSGAVQLPKAIHRGMRFKDATFMGVMRWNFYNKLKEIYELQGIEIRMTFGYLTKNTRIRHYLPKEHYIDARCISGHPEAIPSNEVFYQKKVRCHNRQIHKNTILKGGIRKRNQAGYLVKGFRLFDKVAYKGREYFIFGRRQSGFFDLRNLSGCKVNKGSLSYRKIRFLEPRQYYLCERRVMDTQGCA

SEQ ID NO: 14468 - protein, 464 aa, unidentified; identical to SEQ ID NO: 3455

SEQ ID NO: 14469 - protein, 414 aa, unidentified; identical to SEQ ID NO: 2588

SEQ ID NO: 14470 - protein, 485 aa, unidentified
MIVYVISKEKKPLMPTKRFGKVRRLLKEGKAKVVSTKPFTIQLLYETKGYTQTLYMGIDPGTKNIGISVRKETGEVVYLGEVETRSQEVTEKMKERSTARKARRRHQREKRKRRAKKAKKIFERKSFKIKGRKEPLVCKGIKPKLVKFQNRKRKKGWLTPTARHLLESHQAIVEKIKKILPIKKVSVEYGQFDIQKLENPEIQGKEYQNGRMKGYRNASEYVLSRDKHTCQLCEKRQGKLEVHHVVWKQEGGQDVPENLVTLCEKCHAQVHKNQKMKAKLAEIFTGMEKKYTPATLLNTIMPFFYQWLQSQFKEVNITYGYETKEKRLSQQLSKSHTLDAYLISLEEEIIHPEFYNFVPYRFQQFRRHNRQLIYALRDRNYKLGKDIVAKNRNKKTGQTKESLHEFILDKGASCLSSLKVYPGTKVHRSKFDKFRRGDTVYYQKKRYVVKGYGEMGRSLGFVGEKKYVLAKECKLIAKNTGLVCL

SEQ ID NO: 14471 - protein, 512 aa, unidentified; identical to SEQ ID NO: 3741

SEQ ID NO: 14472 - protein, 434 aa, Marinobacter sp.; identical to SEQ ID NO: 13211

SEQ ID NO: 14473 - protein, 377 aa, Anoxybacillus sp.
IKATYRLKIDYGSRHTGLAILRGQEVVWLGQLDHRTDIKERIDKRRAFRRARRNRKTRYRKPRFLNRKRKEGWLPSSLESRVQNIQTWVNRLKKLCPIGYISYENAKFDTQLMRNPEINGVEYQQGTLQGYEVREYLLEKFGRKCCYCGKENVPLEVEHIIPKSRGGTDRVDNLCLACHDCNQRKGSKTAEEFGYPHIQKQVKESLKDTSAINSTRWKVYEVLKQTGLDVECGTGARTKMNRIRLDLPKTHYFDACCVGESTTNHLYFKTKEVLFIKAKGRGSRSRTNLDRYGFPRGYLARQKFFFGFQTGDMVKAVVPRGKYQGVWFGEVACRKTGSFDIKGKDGKRIAQGINYRYVQVIQRFDGYAYGKGVAELA

SEQ ID NO: 14474 - protein, 456 aa, unidentified
MSTCVCVLSNSGERLMPTFRLGKVRHLLKDGKAKIVKHHPFTIQLLYDSKTNTQPIEICEDVGYNYIGISVKSQSHEYVSAQYDTLQDEKACHDSCRKYRRTRRNRLRYRKPRFDNRKRSEGWLAPSLRHKKELNVNVVKMYCAVMPITHATVEVGSFDTMLVKAIQEGKAIPEGADYQKGPRYNLATLREAVFYRDNYVCKVCGRKATEGAILHVHHMFYWKGRHGNSLSELITVCEKCHTPANHQKSGKLYGFGENVKFADLSGAAFMNTVRWQIVNELYAAFGKDFVTVTYGAMTKEKRIALHLEKSHNNDAYAMGNCHPAHRCEFGHYQKRCRNNRVLEKFYDATYIDTRTGNKAKGKELFNGRISRNHKKDSEDLHKYRSKKVSKGRRSIRRQRYAIQPYDTVRLESKSYITSGCHNKGTRLLIPANGKSKSVAISKVQVVCHAGAWIQII

SEQ ID NO: 14475 - protein, 408 aa, unidentified; identical to SEQ ID NO: 8232

SEQ ID NO: 14476 - protein, 382 aa, unidentified
MVYVLSKTGQPLMPTENHAKVRILLKQGKAKVVNRCPFTIQLLYSSTNYTQKVTLGVDSGSKHIGLSATTKDKGLFESDVELRNDIVDLLSTRRELRRSRRNRKLRHRKPRFNNRRRNDGWLAPSVKQKVDSHITMIAKVHKILPISNIVVEVASFDIQKIKDPTISGMDYQQGEQLGFWNVREYVLFRDGHKCQCCKGKSKDKILNVHHIESRKTGGDAPNNLITLCETCHTGYHKGTVKLPKTIHRGMSFKDATFVGIMRWALFEKLKAIYSDVKLTYGYITKNTRIKNGLPKDHYIDARCISGNPNAVSNGNVYYYKKVRCHNRQIHKTNFIKGGYRKRNQAPYGPVERSEVLYFWPQGNRAHGFEAFRWNTCQCLCRI

SEQ ID NO: 14477 - protein, 431 aa, unidentified
MPDKVYVISRLGHPLMPCSPAKARHLLDDKKAKVVKRMPFTIRLLYGSTKYIQPIILGVDAGSKTIGLSASTAKEEVFAAEVMPRNDVVENLSTRREFRRARRNRTTRYRKPRSDNRVRSNHERWLAPSVKVKIQEHITSIKRVCTILPISKVVIETAEFDLQLLKAIQEGKPIPEGEDYQKGEMYGSYNVCQYVLWRDNYTCICCGVRGTPKNPVRLYVHHFESCKYGGNAPDNHGTLCDDCHKKFHLGIITDVKLKTRRRQSTRDAAFMGIMRKTLMWRLRTELFIPVAETKGYITKATREKLLVLPKSHTRDALAIAQGRHGFGIKEYAYVEPANHIYTVRPVRHHNRQLHKASILKGGIRKRNQASKYVFGFRLYDKVLYQGKACFVWGRRTSGTFLLRTIDGIKVKDGVSYRNLTLLERSSNYLIA

SEQ ID NO: 14478 - protein, 353 aa, unidentified
LRVLVWNKRGKPLMPCSPAKARLLLKEKKAIVVRRTPFTIQLTIATGESKQPVSLGVDAGYKHVGLSASTEKAELYASEVELRQDITDLLSARRALRQSRRNRKTRYRAPRFDNRIRTKRKGWLAPSVENRINAHLSRIETVIRLLPVTKISVETTSFDMQLLKNSDIAGKEYQESEQLGFWNVREYVLFRDGHVCQHCHGRSKDPVLNVHHLESRRTGGDSPGNLITLCETCHKELHRGEITLKAKRGQSFRAETFMGIMRWEVLDRLKASHPKLEVQNTYGYRTKHARIVNGIAKSHCADAFCIAGNLGAERLGEFLFQKQTRRNNRQIHKLSILKGGIRKRNQVPFEVKG

SEQ ID NO: 14479 - protein, 231 aa, unidentified
MVYVQDINGKPMMPTTRHGKVRRLLKDKKAIAVNLCPFTIKLMYVTSDYKQEIVLGVDAGTKHVGLSATTKSKELYSSEVILRNDIVDLLSTRRELRRSRRNRLRYRKPRFDNRIKSKRPGWVAPSVKYKVDAHIRVIDNVCSILPISRIVIEVAQFDTQKINNPNISGKEYQEGDQLGFWNVREYVLARDGHKCQHCKGKSKDPVLNVHHIESRKTGGDSPSNLITLCET

SEQ ID NO: 14480 - protein, 419 aa, unidentified; identical to SEQ ID NO: 8591

SEQ ID NO: 14481 - protein, 512 aa, unidentified; identical to SEQ ID NO: 5549

SEQ ID NO: 14482 - protein, 462 aa, unidentified
MSVLVIGRNGRALMPTNPRKARLLLKKKTASVVCRHPFTIQLLYKTGCATQEGCIGIDTGSQHIGVGITCGDRVILKDELALRSSMEKRSLLATRTVMRRGRRYRKVRYRKPKWRHHTKRMYFEKANRRGQHWRKVKTTTQSPRLKGWLPPSLQSKCDHHFRIIDRYLKYLPDPITRNLVIEAGRFDMARMNDPTIHGEMYQRGPMYDAENLRAYIFARDNYQCACCKAKAGTTRKADGTTVKLVAHHILFRSRGATDNPKYIISVCDHCHTTKAHQPGGILYSWMENNKKVARGLRDATFMNILRKRLFARYPQAAFTYGNITAADRKQLRLPKSHANDAVAISLFGKEASTVKNICQTMHYKQIRKSKRSLHEAIPRKGRKNPNTKAVRNKKNTTQVNGFKLWDSVLADGKKLFICSFTGTSAYLIDKNGCYISQPGKTYKQWPLSKLKRLHPNGNWLMA

SEQ ID NO: 14483 - protein, 420 aa, unidentified
MVYVLNKNNEPVMPCSERKARLLLKQGMAVIYRKDVFTIKLINGSYGYKQHITLGIDCGSKHIGVSATTDKQELFSANAELRNDVVKLLSDRRMLRRSRRFRKTRYRKPRFDNRRIKEGWLAPSIRQKIDSHVRIVSLIHKLLPVKQVNVEVAAFDMQKIKNPDIKSSEYQMGEQLDSYNVREYVLSGDNHICQHCKGKSKDDVLQVHHIESGKTGGNAPNNLVTLCKTCHEKYHSGEITLNVNRGKSFRDASAMSTMRWFLYEELKSRFSNVNITYGYITKYKRIKLGLSKEHYNDAYCITGNLNTSRLCNHHLIRFIPRHSRILHMQKFSKGGVRRSASASYWLNGGKPSKSGAMFTMFDKVKFNGIVCFISGSSNGYAALRDINWNKVHGCKTTVTVNKLALVSRRRGSMLFGELCG

SEQ ID NO: 14484 - protein, 406 aa, unidentified; identical to SEQ ID NO: 2752

SEQ ID NO: 14485 - protein, 442 aa, unidentified
MKHENANRVFLLNKDGKPLMPCCPRKARLLLKSGKAFVVKKYPFTIQLKYGSYGYKQKVSLGVDTGQRHIGFAIVSQNKVLHQSEVELRQDVHKNLYTRKIYRRGRRNRKTRYRQARFLNRVHGKRDGLWLPPSIKGKVSHNIAWIKRYLAVLPNPDLHIEVGKFDMAKMVNPEISGKQYQEGSLKDWKNYEYYVLARDEYTCQLCHKHGEGVKLVVHHIVYRSQGGTDRVDNLITLCTNCHTTKNHQPGGKLYKWMKAKKKVTKQLKGATFMNILRKRIMTAFPEASFQYGSQTYVDRKNLLLPKGHFMDAIAISGIKSVGQMPDTVTMISQFRKKKRSLHEATARKGRKQPNTSSKRNEKNTKHARGLWLNDYVRVVGNHVKGYVKGFKSNGYYVYLTDGLGNYVLNSGRNYVNTKQCQLIMHNGNWQKAEQKLSLYEFK

SEQ ID NO: 14486 - protein, 420 aa, unidentified; identical to SEQ ID NO: 3504

SEQ ID NO: 14487 - protein, 465 aa, unidentified
MSTCVCVLGNNGERLMPTFRLGKVRRLLKDGKAKIVKHHPFTIQLLYDSKTNTQPIEICEDVGYNYIGISVKSESHEYVSAQYDTLQDEKACHDSCRKYRRTRRNRLRYRKPRFDNRKRSEGWLAPSLRHKKELNVNVVKMYCAVMPITHATVEVGSFDTMLLQAIQKGKSKPEGVDYQKGPRYNLATLREAVFYRDNYTCQVCGRKIADGAILHMHHMFYWKGRHGYQLDELVTACEKCHTPANHQKGGKLYGFGEDKEFANLSGAAFMNAVRWQIVNALYATYGKEFVTITYGAMTKEKRIALHLEKSHNNDAYAMGSFHPVNRCAFEHYEKMKRNNRILEKFYDSQYIDTRTGELTNGKSLFNGRISRSHKKDSENLHKYRGKRICKGHRALRRKKLALNPGDLVSLNGEILVVHGTHTNKKGAVNVEFKAPAKNGQKSASLKKLKIVKAADSIHPAWEKVS

SEQ ID NO: 14488 - protein, 427 aa, unidentified; identical to SEQ ID NO: 7460

SEQ ID NO: 14489 - protein, 406 aa, unidentified; identical to SEQ ID NO: 4082

SEQ ID NO: 14490 - protein, 470 aa, unidentified; identical to SEQ ID NO: 2949

SEQ ID NO: 14491 - protein, 413 aa, unidentified; identical to SEQ ID NO: 8326

SEQ ID NO: 14492 - protein, 427 aa, Parasutterella sp.; identical to SEQ ID NO: 6030

SEQ ID NO: 14493 - protein, 541 aa, unidentified
LQLRRKVRPANASSVRGSRRRWCRQAIGYARNGPAIQAGLQHGRGEMHRKVCVTRPLRAGCWKDSNLFWRNGLSVFVLDRQGVAVMPCTQKRARLLLARGRARVHRLVPFVIRLVDVKAEHCNLQPLSLKIDPGSKTTGMALVRDAQKLDIDTGEISKGAAVLSLVEIAHRGRQISEALTARRQMRRRRRGQLRYRAPRFLNRGNKGKGWIAPSLQHRVDGTLAWVNRIMRWAPVRSISQELVRFDTQAMQTPGIEGIEYQQGTLAGYELREFLLEKWDRKCAYCGAENVPLQIEHIHPRSKGGSNRESNLTLACQCCNEKKAALPIEVFLAKKPEVLKRILSQAKKPLRDAAAVNTTRWVLFECLRETGTPVFASSGGRTKFNRQQNHVPKTHALDAACVGDVDWVVNWNRPTLQIKCTGRGSYQRTRLDKFGFPRGYLMREKSVKGFATGDLVKAVVPAGKKAGCHQGRVAIRATGSFNIQTQEGVVQGISHRHCTRVQRGDGYGYQQQSKPDAGRDRASHDALCLPGMNAGVSRAIHG

SEQ ID NO: 14494 - protein, 490 aa, Anaerostipes sp.; identical to SEQ ID NO: 6170

SEQ ID NO: 14495 - protein, 518 aa, unidentified; identical to SEQ ID NO: 7468

SEQ ID NO: 14496 - protein, 423 aa, unidentified; identical to SEQ ID NO: 3576

SEQ ID NO: 14497 - protein, 406 aa, unidentified; identical to SEQ ID NO: 6079

SEQ ID NO: 14498 - protein, 420 aa, unidentified; identical to SEQ ID NO: 7360

SEQ ID NO: 14499 - protein, 453 aa, unidentified
MVYVRNIEGKALMPTSNAKARKLLKQKKAKVISLKPFVIKLNYKTETEYTQNLHLGIDSGYSNVGFSIIDAKQEYIAGEVKLLEGMKKRLLEKSMYRKIRRSRLRHRKARWNNRIKSKKKGWLAPSLKHKLDTHIKFIDYLKSIIPIRKITIEVANFDIQKMKDDMISGIDYQNGDMLGFWNIREYVLHRDGHKCQNPNCKYKDKKDQILKIHHIKYRSEDGSDRPENLITLCSKCHTPANHKKGKFLYEWCMEGKKVRGFKNATFMSMIRWYLVNELKSKHNDVSITYGYITKNHRIKNKIEKSHLNDAFAIAKGTTQIRTNEKFLVVQDRLKNRNLEKFYDSKIIDIRTGEKVFGAYLNCGRSTRNKSQNTENLRKYRGAKISKGQRRIRKKKYFYQPNDLVKYEGKIYTVKGTQNEGKYIALKEIKKVPKVELLTPYMFKKELNWTYGLC

SEQ ID NO: 14500 - protein, 442 aa, unidentified; identical to SEQ ID NO: 4886

SEQ ID NO: 14501 - protein, 413 aa, unidentified
LKVFVLNMRGKPLMPCSPAKARHMLKAGKAFVVRRTPFTIKLTIATGETKQDVTLGVDAGARHVGISATTEKEEVFASEVALRQDITGLLADRLAFRRARRNRKTRYRAPRFNNRVRSKHKGWLASSVENRIQAHMSRIEAVCRLLPVTKIVIETASFDIQKIRNPEVEGTGYQQGDQLGFWNVREYVLFRDGHICQHCRGRSKDPILNVHHLESRKTGGDAPNNLITLCETCHKAYHAGKIKLKVKRGQSFRAEAFMGIMRWTLLNRMRKAHPSLPVENTYGYLTKHKRIALGLPKTHCADAFCIAGNLKALRRGDFLFQQQTRKHNRQIHKCSILKGGVRKLNQAPFLVKGFRLFDKVRIGGQIGFVFGRRVRGTFNIRRLDKTVIGTDINCKKLSLLETRKTFLTELRKE

SEQ ID NO: 14502 - protein, 350 aa, Anabaena sp.; identical to SEQ ID NO: 7152

SEQ ID NO: 14503 - protein, 440 aa, unidentified
LLLKKKTASVVCRHPFTIQLLYKTGCATQEGRIGIDTGSQHIGVGVTCEDRVILKDEHKLRSSMEKRSLLVTRAAMRRGRRYRKVRYRKPKWRHHTKRMYFEKVNRKGQHWRKVKTTTQSPRPKGWLPPSLQSKCNHHFRIIDRYLKYLPDSITRNLVIEVGRFDMARMNDPTIHGEMYQRGPMYDAENLRAYIFARDDYQCACCKAKAGTTRKADGTTVKLVAHHILFRSRGATDNPKYIISVCDHCHTTKAHQPGGILYSWMENNKKVARGLRDAAFMNILRQRLFARYPQAAFTYGNITAADRKQLLLPKSHANDAVAISLFGKEVSAVRNTCQTIYYRQVRKSKRSLHEAIPRKGRKNPNTKAVRNKKNTTQVNGFKLWDSVLANGKKLFICSFTGTSAYLIDKNGCYISQPGKTYKQWPLSKLKRLHPNGNWLMA

SEQ ID NO: 14504 - protein, 414 aa, unidentified; identical to SEQ ID NO: 2588

SEQ ID NO: 14505 - protein, 442 aa, unidentified; identical to SEQ ID NO: 7396

SEQ ID NO: 14506 - protein, 434 aa, Erysipelotrichaceae sp.
MKVFVLNKHGNPLMPCNPKKARLLLKQQKAVVAKQMPFTIRLLYGSSGYKQPVSLGVDAGSKHIGIAATTEKEVLFAEELTPRNDVVNLMSVRRQNRRSRRNRKTRYRKVRFDNRVHAKHKGWLAPSVEVKIQEHITAIKHVQQILPITEVHVETAEFDTQRMKAVEEGRPLPVGTDYQLGEMYDSYNVRQYVLKRDNYTCQCCGKHGDGVKFHVHHLESRKTGGNAPGNLITLCEDCHKAIHAGAKTLHARKAKRSTKSLRDAAFMGIMRKTMLERLRAEPGIPVNGTYGYITKLYRDLYRIEKSHINDAIVISKHFTAVPDDVWYFAKAVRRHNRQIHKNKILKGGIRKRNQAPHVVKGCRLFDSVKYARNTYFIFGRRASGQMDIRTLDGVKVSGGSLSFRKFSVQHCNAGALLERRKAIPPTNESVGFLA

SEQ ID NO: 14507 - protein, 420 aa, unidentified; identical to SEQ ID NO: 7168

SEQ ID NO: 14508 - protein, 453 aa, Lactobacillus sp.; identical to SEQ ID NO: 2687

SEQ ID NO: 14509 - protein, 427 aa, Enterococcus sp.; identical to SEQ ID NO: 12295

SEQ ID NO: 14510 - protein, 453 aa, Lactobacillus sp.; identical to SEQ ID NO: 7420

SEQ ID NO: 14511 - protein, 424 aa, Anabaena sp.; identical to SEQ ID NO: 5550

SEQ ID NO: 14512 - protein, 428 aa, unidentified
LKVFVLNMRGQPLMPCSPAKARHLLKAGKAAVRRRTPFTIQLRIATGETKQSVTLGVDAGAKHVGLSAATEKEEVFASEVELRQDITGLLAARLSLRRERRQRKTRYRAPRFLNRVRSKHKGWLAPSVENRIQAHMSRIDAICGLLPVTKIVIETASFDIQKIKHPDVEGTDYQQGDQLGFWNVREYVLFRDGHVCQHCHGHAKDKILNVHHLESRQTGGDAPNNLITLCETCHKACHAGKIKLKVKRGQSFRAEAFMGIMRWTLLDRVRKAHPGLPVENTYGYLTKNTRITLGLPKAHCVDAYCIAGNLKAVRRGVHLYQRQVRKHNRQIHKCTVLSKTLKDGTKIGYRKLNQTPHLVKNFRLFDKVRCLGQTGFIFGRRSSGYFDVRRLDGVKISSCISYRKLTLLEKRSTYLTELRKEDGASSPV

SEQ ID NO: 14513 - protein, 431 aa, unidentified; identical to SEQ ID NO: 8285

SEQ ID NO: 14514 - protein, 487 aa, unidentified; identical to SEQ ID NO: 11019

SEQ ID NO: 14515 - protein, 412 aa, unidentified; identical to SEQ ID NO: 4932

SEQ ID NO: 14516 - protein, 419 aa, unidentified
MYVYVLNKHGEPLMPCSSRKARTLLDNKKACVAKRTPFTIKLLHGSAGYKQPITLGVDAGSKHVGLSASTETHELYREEFTPRNDVVDLLSTRREFRRARRNRKTRYRAPRFNNRVHSKHKGWLAPSVEVKIQEHITVIKHVCQIMPVSLVRVETAEFDTQRLKAMLEGKPLPVGTDYQLGEMYDEYNVRQYVLKRDNYTCQCCGAHATKTKQVKLHVHHLESRKTGGNAPSNLITLCSTCHKAIHEGKKTLDTKKRGKPLRDAAFMGIVRKTLLMRLRKKLSIPVQQTYGYITKMLREKNNLPKSHMNDALCIAKHPKAAPCENCYRSKAVRHHNRQIHKATILKGGIRKNNQAPYTVKGFRLWDKVLCNGQECFISGRRATGYFALKKLDGTVVTNSVSYQKLRLLETAKNYLRERM

SEQ ID NO: 14517 - protein, 512 aa, unidentified; identical to SEQ ID NO: 2745

SEQ ID NO: 14518 - protein, 443 aa, unidentified
LTKDENRPSGRTTGLRAEQAEPAGIRKGDTLKVFVLNMRGKPLMPCSPAKARHMLKAGKAFVVRRTPFTIKLTIATGETKQDVTLGVDAGARHVGISATTEKEEVFASEVKFRQDITGLLADRLAFRRARRNRKTRYRAPRFNNRVRSKHKGWLAPSVENRIQAHMSRIEAVCRLLPVTKIVIETASFDIQKIRNPEVEGTGYQQGDQLGFWNVREYVLFRDGHICQHCRGRSKDPILNVHHLESRKTGGDAPNNLITLCETCHKAYHAGKIKLKVKRGQSFRAEAFMGIMRWTLLDRVRKTHPKLPVENTYGYLTKHKRIALGLPKTHCADAFCIAGNLKALRRGDFLFQQQTRKHNRQIHRCSILKGGVRKLNQAPFLVKGFRLFDKVRIGGQIGFVFGRRVRGLFNIRRLDKTVIGTDINCKKLSLLETRKTFLTELRKE

SEQ ID NO: 14519 - protein, 493 aa, unidentified; identical to SEQ ID NO: 2644

SEQ ID NO: 14520 - protein, 421 aa, unidentified; identical to SEQ ID NO: 2610

SEQ ID NO: 14521 - protein, 456 aa, unidentified; identical to SEQ ID NO: 13627

SEQ ID NO: 14522 - protein, 463 aa, unidentified
MEYRVYVISKSGKPLMPTTHFAKVRRRLKENRAKVVKREPFTIQLLYETTEYTQPITLGIDAGYQKIGFSAVSEKEEIIAGEVEMLKGQTERNEERRMYRRQRRHRERYRKPRFENRKKDKGWLAPSIQHKLDTHLRLVDFLKMILPISFVRIEVADFDIQRIQNPDIQGTEYQEGNQKGFSNLREYIFYRDGYKCQNTDCKNRNTSPILVVHHIDFNRTNNHHSNLITLCNRCHIPANHKGFLKDWKPKLKPLKAETFMSTVRWRMVNQLQCQHTYGYQTKQKRFEHGLEKSHANDAFVIAGGGKPKASVAFCAKTKSCVASCRDGPRCVQYEVKQVRRNNRSLEKFYDATYIDTRDGKQKKGVELFCGRTTRNKNKNGENLRKYRLNKVSKGRRSIRRKRHSFQPNDLVRYEQQLYHVAGLQNLGTYVRLRELKKAVSVKKIQLVKYAKGLCWEKAAFIPD

SEQ ID NO: 14523 - protein, 431 aa, unidentified
MPNKVYVINKHGRPLMPCSPAKARHLLDAGKAKVKKRTPFTIQLVYGSSGYTQEVILGVDAGSKTIGMSASTTKEELLSAEVKPRNDVVDLLSTRREFRRARRNRKTRYRKPRFDNRVRSKHKGWLAPSVEVKIQEHITAIRRVCGILPVSKVVVETAEFDLHLLKAIADGKPVPQGEDYQKGEMYGHYNVRQYVLWRDDYTCQCCGAHATKKKEVRLHVHHLESRKVGGDAPDNQVTLCESCHEKLHKGLIAEKDFKKRKRRSTRDATFMGIMRKTLMQRLCSELPIPVVKTRGYITKATREKLLVLPKSHTNDALAIAQGKRGFNVGYLPEIAQIDKIYTIRPVRHHNRQLHKAAILKGGIRKSNQAGKYVFGYRLFDKVQFNGQDCFIWGRRTTGIFTIKTINGKMIKDGISFKKLKLVEKSTSYLIA

SEQ ID NO: 14524 - protein, 534 aa, unidentified
MNSIKQEKNMIYVLDKDGNPLDPTYRNHKVRELLVDKKAFVKYYKPYTIQLLYEPEIKITGTHIAAIDPGRTNIGTAVVDENGVEEYAAHITTRNKEVPKKMKERAEHRRNSRSGERKVRQRQAKRNGTIFPFDEKHPYVDNTVRERILPKCENPIHIKYISNTEAKYCNRMRPDGWHCPTVNQLLQTHINSVELMCDILPITDFVLEINKFNFERLQHSNIKPWEYGNGPLKNTTVEELVAEEQNHHCLLCKNEIEHYHHIVHQSKNGSNTVSNLVGLCKKHHNQVHNNKKVEQKVLEKKEGLEKQFDALSVLNQIFKSFIEYLILKFGEEHVFFTDGKTTATFRANHQIDKSHHNDAYCIACSILENVKIDYSSQVYEIKQFRRYNRQLISARRERKYYEVEDITTTKILKNGKEKTITKQKKTLVATNRHKRCNQKTDSLRQYYQKLREEYDKQTSKQIVSRLVVEKGLNRYRDTNLIMPGAVFIYEGKHYVLSGNSHYGQYYMAIGCGAKTFPAKKCKIVQKNKGLVYLY

SEQ ID NO: 14525 - protein, 431 aa, unidentified; identical to SEQ ID NO: 7994

SEQ ID NO: 14526 - protein, 448 aa, unidentified; identical to SEQ ID NO: 8365

SEQ ID NO: 14527 - protein, 450 aa, unidentified; identical to SEQ ID NO: 2935

SEQ ID NO: 14528 - protein, 417 aa, Petrotoga sp.
CHSARARELLKKGKAAVFRYHPFTIILKEREGGDTQPIQVKIDPGSKITGVTLVGDFKNGKKVIWGAEIHHRGQSIKKALDTRRGVRRSRRNRKIRYRIARFDNRKRSKGWLPPSLISRVENILTWIKRIRRFSPITGISLELVRFDTQKLQDPEINGIEYQRGTLYGYEIKEYLLEKWGRKCVYCGKENVPLEIEHIVPKSKGGSDRISNLTLACHECNQKKGNQSIEEFLTNNPERLKQIKSESKRPLKDTAALNATRWYIFNQLRGNSLTAGKEELPIEVGTGGRTKYNRETQNYPKKHWIDAACVGESGQNVQIEPDMQVLEIKAMGHGMRRMCFVDKYGFPKSYRPKERTYMGYKTGDIVLAVIPKGKNMGIHIGRIAIRHRPSFLLNGVGDVHPKYLTLLQKNDGYGYQIS

SEQ ID NO: 14529 - protein, 420 aa, unidentified
MQYVYVLSKHGKPLMPCSPGKARLLLKQQKACVVRRTPFTIKLLYESAGYKQPITLGVDAGSKHVGLSASTEKRELYREEFTPHNDVEKLLSTRRQNRRSRRSRKTRYRAPRFDNRVHSKHKGWLAPSVEVKIQEHITIIKRICKILPISLVRVETAEFDTQRLKAMLAGKPLPVGTDYQLGEMYDEYNVRQYVLKRDHYTCQCCGAHNTAEKVVKLHVHHLESRKTGGNAPSNLVTLCTTCHKNLHKGKVTLDGKERGKPLRDAAFMGIMRKTLMARLKEELPIPVQGTYGYITKMRREQNDIKKSHTNDARCISKHPLAEPCSVCYRTKAIRHHNRQTRKANFSKKGIRKRSQMPYLAEGFRLWDKVLYKGQECFVSGRRSSGSFALKKLDGTSISKGVTFKKLRLLEPATNYLIERM

SEQ ID NO: 14530 - protein, 512 aa, unidentified
MSTVYVLNKDGKPLMPTTRCGHVRHLLKEQKARVVRTKPFTIQLLYETDDVVQLLYLGIDPGRTNIGVAVVKTDGTAVFTAHLETRNKEIPKLMKKRKESRRARRTNGRRCRRQRRAKANGTISKKCVKHDTAQNGSVSKRAKEIGVIKRHLPGCEKDVLCICIKNKEAKFSNRTRPEGWLTPTANQLLQTHINLVKKIRKFLPISDAVLEINKFAFMRLDNPNVQKWQYQQGPLYQKANLEETVSEMQEHHCLFCKKKIDHYHHVVPQHKNGSNTIDNIIGLCTQHHDLVHKDTAWQKKLAKKKTGLNKKYGALSVLNQIIPALTKELSSLFPKHFFATNGKSTYDYRSAHGVSKDHWLDAYCIACSVLPNDVCDSGINNRVPYELKQFRRHDRRALNNENMSRVYTLNDNVVATNRHKATKQTTDSLEEFRQNHPDDVCKLKVKEHHPTYRNMNRNYPGSVFLVGNQVHVMQGIAGSKDGEATTYKDTNANSIAAGKCKFVAKNSGILFV

SEQ ID NO: 14531 - protein, 442 aa, Selenomonas sp.; identical to SEQ ID NO: 4776

SEQ ID NO: 14532 - protein, 420 aa, unidentified
MQYVYVLNKHGEPLMPCSPRKARLLLKQKKACVIKRTPFTIKLLYGSTGYKQPVTLGVDAGSKHIGISATTEKHELYREEATPRNDVVDLLSARRAFRRSRRNRKTRYRAPRFDNRVHSKHKGWLAPSVEVKIQEHITLIEHVCRILPVTLVGVETAEFDTQRLKAMLEGKPLPVGTDYQLGEMYDEYNVRQYVLKRDNYTCQCCGAHSTKTKGVKLHVHHIETRRTGGNAPNNLITLCKACHKALHAEKVTLDGKKRGKPLKDAAFMGIMRKTLMERLRKELKIPVQGTYGYITKYLREKNGIPKSHTNDARCISKNPLAIPCDTCYYTKAVRHHNRQLHKATILKGGIRKANQAPYIVKGYRLWDKVAYNGTECFITGRRTSGYFALKKLDGTVASNSISYKKLRLLEAATNYIIERK

SEQ ID NO: 14533 - protein, 413 aa, unidentified; identical to SEQ ID NO: 13794

SEQ ID NO: 14534 - protein, 451 aa, unidentified; identical to SEQ ID NO: 7526

SEQ ID NO: 14535 - protein, 536 aa, unidentified; identical to SEQ ID NO: 4526

SEQ ID NO: 14536 - protein, 423 aa, unidentified; identical to SEQ ID NO: 3951

SEQ ID NO: 14537 - protein, 452 aa, Lactobacillus sp.; identical to SEQ ID NO: 3322

SEQ ID NO: 14538 - protein, 427 aa, unidentified; identical to SEQ ID NO: 5902

SEQ ID NO: 14539 - protein, 466 aa, unidentified
VAVFVLDRHKKPLMPCSEKRARKLLEKGRARVHRLMPFSIRLVDRTVNDSVLQPVTLKLDPGSKATGIAVVRESETIDEETGEIKTTVYVLTLFELQHRGKQISESLTARRQMRRRRRGNLRYRAPRFLNRTKPKGWLAPSLQHRVDTVSAWVQRFQRLAPITGIAQELVRFDLQQMENPEISGVEYQQGTLHGFETKEYLLEKWNRECAYCGTKNIPLQVEHIQPKANGGSHRVSNLTLACQPCNQKKGAQAIEIFLAKAPKRLAKIKAQVKRPLKDASAVNSTRWALFNALKATGLPILTGSGGRTKFNRSTLGIPKDHALDAACVGIMEAIHHWDKPALAIKATGRGSYQRTRLNAFGFPRGYLTRQKRIKGFQTGDMVKAEVPTGKKIGSYRGRVAVRASGSFNIQTATGLIQGISHRYCKVTQRADGYGYSQQLNPKEVALAGDPLSLPALKGGVSRGKSR

SEQ ID NO: 14540 - protein, 442 aa, Lactobacillus sp.
MKHENANRVFLLNRDGKPLMPCRPRKARLLLKSGKAFVVKKYPFTIQLKYGSYGYKQKVSLGVDTGQRHIGFAVVSQEKVLCQSEVELRQDVHKNLYTRKIYRRSRRNRKTRYRQACFLNRVHGKRDGLWLPPSVKGKVNHNIAWIKRYLAVLPNPDLHVEVGKFDMAKMLNPQISGKQYQEGSLKGWKNYEYYVLARDKYTCQLCRKHGKGVKLVVHHIIYRSQGGTDRVSNLITLCTDCHTTNNHQPGGKLYKWMKAKKKVTTHLKGATFMNILRKRMMAAFPEASFQYGSQTYVNRKNLNLPKGHFMDAIAISGIKLVGQMPETVTMISQFRKKKRLLHEATARKGRKQPNKAAKRNAKNTKYARGIWLNDYVRVIGNNAKGYVQGFKSNGYFVYLTDGLGNYVLNSGKNYINRKQCQLIMHNGNWQKAEQKLSLYEFK

SEQ ID NO: 14541 - protein, 172 aa, unidentified
MVYVQDIDGKPMMPTTRHGKVRRLLKDNKAVVVNTCPFTIKLTYKTSDYKQEIVLGVDSGTKHVGLSATTKSKELYASEVILRSDVVDLLSTRRGLRRTRRSRLRYRKQRFNNRVKSKKDGWIAPSVRHKIDSHIRIISFVYSILPVSKLIVEVAQFDTQKIKNPEISGKEY

SEQ ID NO: 14542 - protein, 441 aa, unidentified
MDPGRTNIGNCAVETNGKVLYSSLVETRNKEIPKLMRERKGHRQMSRRGERKRLQRRAIRADKTGMARATEYWRMLTGQRKPIRCKVIRNQEVKFQNRKRQAGWLTPTAEQLARTHLNVVRKIQKILPVSAIVIEINRFDFARMENPDIENWEYQRGRLAGYADVREAVSRQQRGKCLLCGRKQIEHYHHIVPKSRGGSESIDNYAGLCITCHEKVHQDESVKGKLQSKKQGIQKKYHALSVLNQIMLTLLRELPKLVPAFITTGYETHRIRESVRLQEKQKGDNTHYMDAWCIAMSIVGAYETEPDFSGLYRIKQFRRHDRARVKAQKERTYYHNGKAVAKNRHKRTGQADAKVPFPSLAEYLQEHPEHKGRLTVRKSIRSYNNTKRNLPGTVYTECGTPFVLRATQSNGTRLYGMGEGKDYHKTVRCKLSQHNAGLVYI

SEQ ID NO: 14543 - protein, 535 aa, unidentified
MYRLITEAGIPLIPERLHDTKKKKGASRMSEYIYVLGMDGNPQMPTKRKRHVEQLLQTGRAHVFRQVPFTIQLTYKNQPVLQPVTIAEDPGRSNIGMAVVSLSGELLSAAVVQTRNKEIVKLMEKRKQYRRASRNGERKARQRLAKKCHTMIKAGFLMRKLPMYGKDKRVKCLVIKNTEARFCNRKREDGWLTPSAEHLARTHINLIHKMQKFLPITDVAIEINRFAFLSLEDPSISGVDFQNGPLKGYDDLNAAIEDLQDGHCLMCNSPIEHRHHIVPRSMQGSNTIGNIAGLCCKCHEKVHKSTAFEDSLKKKKAGLNKRYGAISTLNQAIPFICKRLEQEFGKEHVHYCSGRDTSMVRRSFGYHKTKEEQLHEVDAWCIAVLSLQQIPEKAPEFDHMHEILQFRRQDRSRIKAQTSRAYYHERKKIAKNRKKAEGQREDSLQEWRKRQVERYGKEQTRKMISQLEVKESIRRYNRLDRLMPGAVFYYRGNRYVMRGQHSNGQYLQAVGMGKKDFPVKDCMIVAHNEGLIFVS

SEQ ID NO: 14544 - protein, 452 aa, unidentified
  REGION 1..452: note = Ga0315284_10004537
MSKQTLQREFKNVPTGAPLACSSTSTPLNRLETVSVASGILSCNNPEVGQRKQVSGLKVTVPVLSINGSPLMPCSLTKARHLLERRKAKIINLNPFAIRLTFECENKVQEVSLGVDSGYNHIGFSAITKTKEITSGEISLDDKTSKRLTERRMYRRNRRNRLRYRKPRFNNRKTPEGWLPPSVQRKLDTHINMVNKLKELTPVKKVTVEIGEFDIQKLMNPDIYGKEYQQGDLYGYNNLKAFLFSREHGRCQFCGKNIVKGEKAHTHHIKPRSETGTDSPSNMALLHEDCHDELHKRGLYRKLKAPKEYKAEIFMSIIAARLKKALNCGVTYGYETATKRNLLGIEKSHVNDAFIIAGGINQERCLPYKVEQKRINNRTLQTNRKGFVPSIRTQRYVIQNRDFIWISDKKYLCGGVANRGIMIYYFDDTKKKLIYYKKVNKFYSTGSLTWIN

SEQ ID NO: 14545 - protein, 442 aa, unidentified
MSTSVFVLDKKHRPLMPCRPARARRLLRAGRARVVKRFPFVIRLVDRTVEQSEVQPVLIKLDPGSRETGAAVVRDDEKKRHHALAFFVIKHRGGAIRDALKARSAFRRRRRSQNLRCRSPRFLNRVKPKGWLPPSLRHRVETTLSFVRRMCRYLPVSGIAAELVKFDSQKLQTPEVSGIEYQQGTLFEYEVREYLLEKFGRKCVYCGAEGVPLNIDHVVPRAKGGSNRVSNLVLACVSCNQKKGARSLEDFLKGKPEVLARVRRELKTPLRDAAAVNATRWVLFNELKATGLPVETGSGALTKFNRHAFGVEKEHWLDALCVGRLNGVVTRKGLNVLEIRCMGRGSRQRTRLTKYGFPRGYLMRQKCVHGFATGDMVEANVPKGKKAGLWRGRVAVRVSGSFNIQTPKGVIQGVGWKHCRLISHNDGYGYAWLGHAPHSSPA

SEQ ID NO: 14546 - protein, 441 aa, unidentified
MELRITYRKVKYFQGVDILVYIISIDGKPLMPCKPVIARLLLKQHKAKVIKKYPFTIKLLYKTKTEYTQPLTLGIDTGSSKIGSAVVDENNNVLYLSQVEVRNDITDKMKQRAKYRRNRRNRKTRYRKARWLNRKNSIKEDRFSPTIVSKINSHLKEINFVKSILPIQNVILETATFDPYALKNPAVLHNKWLYQKGVNYGFANTRAYVLGRDNYTCQYCKGKSKDSKLEVHHIIFRSQGGSDESKNLITLCKTCHGKLHNGKINLKKNGKVKGQLKHATQMNSIRQQLLRLLPEATETFGFITKEHRQLMKLPKEHYYDAVAIACLNNIENTGLIGVNFKTKNILFKRCIADGDFQQTKGVRSEQRIITGKIQGFRKLDKVEYQGKEYFIKGRMSTGYAILMDIEGNKINLKPIPKFERMKRMQARKSWILSQEVIQNIC

SEQ ID NO: 14547 - protein, 512 aa, unidentified; identical to SEQ ID NO: 2792

SEQ ID NO: 14548 - protein, 417 aa, unidentified
MPCSPAKARLLLKEKKAIVKRRTPFTIQFTIATGEARQPVTLGVDSGYKHIGLSATTEKDELYASQVELRQDITDLLSARLALRRSRRSRKTRYRAPRFDNRVASKRKGWLAPSVENRIAAHMSRVEAVMRVLPVTAITVETAAFDTQLLKNPDIAGEAYQQGEQLGFWNVREYVLFRDGHVCQHCRGKYKDPILNVHHIESRRTGGDAPNNLITLCETCHKAFHRGENKLKVKRGKSFKAETFMGIMRWTLFERLKKAHPELRVRNTYGYLTKHKRISHGIAKSHCADAYCIADNLGAKRLEGFFFQKQTRKHNRQIHKLSILKGGLRKKNQAPYEVKGFRLFDKVICKGEEAFIFGRRTSGSFDVRRLDGTRISAGISCKKLRLLEPRTTYLTEFRKEAALPPLHKCRGFRAEFL

SEQ ID NO: 14549 - protein, 425 aa, unidentified
  REGION 1..425: note = Ga0315279_10041265
MRDKPLQHWRRLLTGAILYYSEGVFVVYIISKTGKPLMPTKRLGKVRHLLKDGLAKVVQRTPFTIQLLYDSDEYTQPITLGIDAGSKTIGLSATTDKKELFSAEVQLRTDIVDLLSTRRQNRRARRSHKIDTHLTVVDKIHKILPITNIIVEVAQFDIQKIKNPDISGVEYQQGEQLDFFNVREYVLYRDDHKCQLCNGKSKDKILNVHHIESRKTGGDAPNNLITLCETCHKKQHNSSLELKVKRGQLFKDASFMGIMRWAFYNTLKEKYPNVLMTYGYITKNTRIANNLPKDHKTDALCITGNPTVKGLDTWYFYKKVRCQNRQIHKNTINKGGARKLNQSPFIILGFRLFDKVKYNDQECFVFGRRVSGSFDIRLLDGTTVNAGVGYKKVKVLEQRKTILIERRRAIKRTCPPTAKVRWFLA

SEQ ID NO: 14550 - protein, 470 aa, unidentified; identical to SEQ ID NO: 5320

SEQ ID NO: 14551 - protein, 442 aa, Anaerostipes sp.; identical to SEQ ID NO: 2903

SEQ ID NO: 14552 - protein, 451 aa, unidentified; identical to SEQ ID NO: 3199

SEQ ID NO: 14553 - protein, 512 aa, unidentified; identical to SEQ ID NO: 8071

SEQ ID NO: 14554 - protein, 451 aa, unidentified; identical to SEQ ID NO: 3061

SEQ ID NO: 14555 - protein, 410 aa, Bacillus sp.; identical to SEQ ID NO: 10447

SEQ ID NO: 14556 - protein, 442 aa, unidentified; identical to SEQ ID NO: 2903

SEQ ID NO: 14557 - protein, 428 aa, unidentified
MQRVFVLVSNKQPLMPCHPARARKLLRKEKAAVYRRYPFTIIMTHRVGGDLQPIEIKFDPGSRTTGVALVGHFNRGSEVIWAGNLNHRGAQIKRNLNSRRAIRSSRRNRKTRYRPARFLNRRRPKGWLPPSLRSRVDNVKNWMLKLDKLAPLTQIAVETVRFDTQKMQNPEISGVEYQQGDLAGYELREYLLEKWGRECAYCGAKNVPLEIEHIVARSKGGSDRVSNLTLACTPCNIDKGNKDIKDFLKRKQKRLKKIQAQAKTPLKDAAAVNATRYATGNVLKGFSLPIVFSSGGRTKFNRIKLGYKKDHWIDAACVGESGSHVIIPQAITPLIITAKGRGSRQKCSMNQYGFPRTGPKKHKRVKGFQTGDLVKAIVTKGKKIGTYVGRVVVRASGSFDIGSGEEKVAGISYKYCRLLQRSDGYEYT

SEQ ID NO: 14558 - protein, 457 aa, unidentified; identical to SEQ ID NO: 3236

SEQ ID NO: 14559 - protein, 424 aa, unidentified
MASMQYVYVLNKHGEPLMPCSPGKARLLLKQQKACVVKRTPFTIKLLYGSAGYKQPVALGIDAGSKHVGLSASTEKRELYREEFTPRNDVVELLSTRRQNRRSRRNRKTRYRAPRFDNRVHSKHKRWLAPSVEVKIQEHITVIKRICRILPITLVRVETAEFDTQRLKAMLKGKPLPVGTDYQLGEMYDEYNVRQYVLKRDNYTCQCCGAHPTEKKPIRLHVHHIESRHVGGNAPNNLITLCVACHKALHEGKITLDKGKKRGKPLRDAAFMGIMRNTLLARLKDELNIPVKQTYGYITKLLREKNKIPKSHVNDARCIAKAPNAKPCDTMLYTRALRHHNRQIHKAKILKGGIRKKNQAPYLVKGFRLWDKVRYNGEECFITGRRSSGYFALKKYDGTVISNSASYKKLMLLEAATNYITERS

SEQ ID NO: 14560 - protein, 552 aa, Streptomyces sp.; identical to SEQ ID NO: 3032

SEQ ID NO: 14561 - protein, 431 aa, unidentified; identical to SEQ ID NO: 6055

SEQ ID NO: 14562 - protein, 426 aa, unidentified
MVYVQDIDGKPMMPTTRYGKVRRLLKNKKAVVVNLCPFTIRLTYVTSDYKQEIVLGVDAGTKHVGLSATTKSKELYSSEVILRNDIVDLLSTRRELQRARRNRLRYRKPRFNNRIKSKRPGWIAPSVKYKIDAHIRVVENVCSILPISRIVIEVAQFDTQKIKNPNISGKEYQEGDQLGFWNTREYVLARDGHKCQYCKGKSKDKILNVHHIESRKTGGDSPSNLITLCETCHKEYHKGNIDLKIRRGKSLRDAAVMGIMKWRLYEEIKSKYDRVSMTFGYVTKYNRINHGFEKSHVSDAFVISKNFNAIRLGYYYKVRLVRRHNRQIHKQKIQKGGIKRLNQSPFEVFGFRLFDRVMFENSYYFIFGRRKTGSFDIRYIDGKNQKNVTYKKLKLSRCKRFMIQMELNKKTRTCFENERNSDRDAA

SEQ ID NO: 14563 - protein, 418 aa, unidentified; identical to SEQ ID NO: 2425

SEQ ID NO: 14564 - protein, 450 aa, unidentified
VGDFCRGAAPQTTACSCLHYLLNQIKNTIERIAYQMVYVLNVNGVPLMPTDRHGKVRRLLKSKQARVVKRTPFTIQLLYDTPTCVQPLTLGVDAGSKHIGLSVSSENKEVYAGQIEPRQDVSKKLNERRQYRRSRRNRLRYRKPRFNNRTASKPKGWIAPSIACKIESHVAVIGQLHQILPITEIVVEVADFDTQKILNPDIQGKEYQTGPLFNSNLRQYTFARDGYTCQWCKGKSKNKILHVHHWNYWRGDHTNKPSSVITLCDVCNDSKNHKKGGFLYGWEPKITNNLKDAAFMNISRWALYSRLKEIYPNVRLTYGYITKVVRNDNGLEKSHVNDALCIANHPNATRLPYCYLIKKNRVHNRQIHKANKLKGGRLKLNQAPHLVKSYRLNDIVKCDGQNYVITGRKKTGYFQLKNFTTGEKLPSVNYKKLKLLEKAKYYTTERIARN

SEQ ID NO: 14565 - protein, 466 aa, unidentified
MSTCACVLSKNGERLMPTIRLGKVRHLLKDGKAKIIKHHPFTIQLLYDSKTDTQPIEICEDVGYNYIGISMKSESHEYVSVQYDTLQDEKDCHDSCRKMRRIRRNRLRYRKPRFDNRKRNKDWLGPSLEHKKELNVNVIKMYCEVVPITHVTVEVGSFDTMLVKAIQEGKAIPEGADYQKGPRYNLATLREAVFYRDNYTCKVCGRKAKNDSAILHVHHMFYWKGRHGNSLNELLTVCEKCHTPANHQKGSKLYGFGENIKFANLSGAAFMNTVRWQIVNELYATFGKLFVTFTYGAMTKEKRIALHLEKCHNNDAYAMGNFHPVDRCAFEHYKKVKRNNRILEKFHDSQYIDIRTGKVANGRSLFNGRINRSHKKDSENLHKYRGKRTRKGYRALRRKKVALNPGDLVSLNGEILVVHSTHAGKNGYVGVEFKTPSKSGKKSASLKKLKIVKTSNSMHSAWTKVS

SEQ ID NO: 14566 - protein, 417 aa, unidentified
MPCSPAKARLLLKERKAIVKRRTPFTIQLTIATGEAKQPVALGVDSGYKHIGLSATTEKAELYASEVELRQDITDLLSARLALRRSRRSRKTRYRAPRFDNRVASKREGWLAPSVENRIVAHMSRVEAVMRVLPVTAITVETAAFDTQLLKNPDITGAAYQQGEQLGFWNVREYVLFRDGHVCQHCSGKSKDPILNVHHIESRRTGGDAPNNLITLCETCHKAFHRGEIKLKVKRGKSFKAETFMGIMRWTLFERLKKAHPELSVRHTHGYLTKHKRISHGIAKSHCADAYCIAGNLGAMRLNSYLFQKQTRKHNRQLHKLSILKGGLRKKNQAPYEVKGFRLFDKVICKDEEAFIFGRRSSGSFDVRRLDGTRISAGISYKKLRLLEPRTTYLTEFRKEAALPSLHKCRGFRAEFL

SEQ ID NO: 14567 - protein, 443 aa, Anoxybacillus sp.; identical to SEQ ID NO: 2800

SEQ ID NO: 14568 - protein, 366 aa, unidentified; identical to SEQ ID NO: 11303

SEQ ID NO: 14569 - protein, 423 aa, Arthrospira sp.; identical to SEQ ID NO: 10370

SEQ ID NO: 14570 - protein, 442 aa, unidentified; identical to SEQ ID NO: 4418

SEQ ID NO: 14571 - protein, 480 aa, unidentified
LYTKPLDNIGEGSLPPSGEINLKGMTFMVYVKSIDGKALMPTSNAKARKLLKQKNAKVVSLRPFVVKLTYKTKTEYTQKLNLGVDSGYSNIGFSVIDAKQEYIAGEVKLLEGMKKRLLEKASYRRIRRSRLRYRKARWNNRVKSKKKGWLAPSLKHKLDTHIKFIDYLKDILPIGKITIEVANFDIQKMKDDLISGIDYQNGDMFGFWNVREFVLHRDGHKCQNPNCKHKDKKEQILKVHHIRYRSEGGSDRPENLITLCSKCHTPVNHRKGKFLYDLCVNGKKVRGFKEATFMSMIRWYLVNELKSKHNNVSITYGYITKNHRIQNGIEKSHLNDAFAIAKGTNQARTKDRFLVIQDRLKNRSLEKFYDSKIIDIRIGKKVSGGDLSCGRSTRNKNLNTENLRKYRGVKISKGQRRIRKQKYFYQPNDLVKYDGKVYTVKGTQNEGKYIALKEIKKVPKVELLIPYVFKKGLNWSYRLC

SEQ ID NO: 14572 - protein, 442 aa, Deinococcus sp.; identical to SEQ ID NO: 5259

SEQ ID NO: 14573 - protein, 469 aa, unidentified
MTYTNYQPTPVFSSDGQPIMPCHPARARKLLTKGRAVPHHVRGIFGIRILDRSRADCQVQDVALNIDTGSSTTGFAVVSDDEKGQRTVLAAVELTHRARVIKATMTRRRQLRHTRRGRLRHRAPRFNNRRRKPGTLPPSVDSLRTDTMRVVNTLTSMYPISHISIEHKKFDTQLMVYPDIRSVEYQRGTLFGWQIRAYILERDQGRCVYCRRSRVRLELDHVRPRATGSDRVDNLVACCRECNVKKANQPIEQFLTDQPELLKRILERLQRSNLASAAHINAALPAIIRDLWQLGLPLSSTDAASVSWARQQLNVPKTHCYDAALQGHDFTSVVSLPSRVLVLRPNNGRSKQKANVDRHGTPIGRPFRQQQALQHHLRRHNPAVGHSDRRQRHGPQLISTGDTVRFTHQDVLHTGRAVIKSAGRRVAIHGTKPEISTKIERCSRLARNPKWVIRRAAPSQQTRAEAATK

SEQ ID NO: 14574 - protein, 416 aa, unidentified; identical to SEQ ID NO: 7736

SEQ ID NO: 14575 - protein, 476 aa, unidentified; identical to SEQ ID NO: 3164

SEQ ID NO: 14576 - protein, 415 aa, unidentified
MVYVLANDGQPLMPTERHGKVCRMLKSGIAKVVKKCPFTIQLQYESERNVQPVALGIDAGSKHVGVSATTKAKVLYESDVELRDDIVKLLATRRQLRRRRRSRKTRYRPARFDNRRRKEGWLAPSIRQKIESHLTVVANACKILPINQIIVETASFDIQKIKDPEIQGIEYQQGEQMDFWNIREYVLFRDGHICQCCKGRFKDKILNVHHIESRKTGGNAPNNLITLCETCHKGYHNGTVILPKNIKHGMQFKDAAFMGIMRWTFYNTLKEQYEPDIPVSMTYGYLTKNTRIEHGLPKEHYIDARCISGNPDAVSDGTYYYQKKVRCHNRQIHKQTILKGGIRKSNQAEYLVRGFRLFDKVRYQGREYFIFGRRKSGFFDIRTLSGEKVNKGSISVKKLTFADTRKNYLIERRTV

SEQ ID NO: 14577 - protein, 415 aa, Bacillus sp.; identical to SEQ ID NO: 2671

SEQ ID NO: 14578 - protein, 418 aa, unidentified
MSMVYVISQDGQPLMPTANGGKVRVLLKEKKAKVIKACPFTIQLLYKTTSYTQPLILGVDAGSKKVGLSVRTDEKEVYAGEVELRNDIVKLLSEKRQYRRSRRNRLRYRAPRFDNRNRTEGWLAPSIRNKVEAHLRVVEDLHKILPITSIRAEVASFDIQKIQAILEGKEVPEGKGYQEGVQLGFWNIREYVFFRDNHECQHCHGKSKDKILNVHHIESRQTGGDRPDNLVTLCETCHKLYHAGKITLHLKKKYGFRDAAFMGIMRWAFYNELKERYPDVALTYGYITKNTRIQAGLPKEHYIDALCITGKPDVERCEEYYYIKQTRRHNRQIHKANLLKGGRKKLNQAPFQVKGYRLFDRVKVGNQVGFIFGRRSTGYFDIRKLDGTRIHAGISYKKIQLIETRKRYLVERRFKEAA

SEQ ID NO: 14579 - protein, 420 aa, unidentified; identical to SEQ ID NO: 11059

SEQ ID NO: 14580 - protein, 470 aa, unidentified
MSVFVVGLNGCRLMPTSERKARLLLKHGKASVYRKVPFTIKLNYKTGSTTQSGYLGIDTGSQHIGVSVVREDGTVLHKEEIGLRDSMSKRKLMQSRASSRRGRRHRKTRYRHPKWRPKAKRVYCEIPDRNGRHWKKKEITFASKRPKGWLPPSLQSKTDHHIWWIKKLQDLLPEGYRLSIELGRFDPARLKDPEIHGELYQKGPQYDYENVRAYVLDRDRYTCQVCGKKGGKLHVHHILYRSHGATDDPQYMATVCSDCHNTENHQQGGILYQWMQKQKKFTKGLRDATFMNILRKRLIEAFPGATFTYGNITKADRERLRLPKSHGNDATAIAIVKTRIMTVKDKEPVIYIQQVRRKKRSLHEETPRKGRKEPNRKASRYDKNTKAVTVTKRKNKKKITITGCLFDRVELNGKKGWISGFTDKSCYVKDENDQYIRTSPKYKQVSLSKLKILHHCGNWAIGARQSLGKG

SEQ ID NO: 14581 - protein, 428 aa, unidentified
MSKVFVIDSEKRPLTPIHSAQARQLLRNKKAAVFRRFPFTIILKESRPPDAPVSFLRLKIDPGAKHTGIALVDDNSGEVVFAAELKHRGFAIRDALTSRRQLRRSRRNRKTRYRQPRFLNRTRPDGWLPPSLNSRVENIKTWVERLRKFAPIAAISQELVRFDMQLICNPNIQGKEYQQGTLAGYETRQYLLEKWNRQCAYCDVKDVPLQVEHIQPRAKRGSNSITNLCLSCEKCNIKKGTQDIRDFLKKDSPRLEKILEQVKILLADAAAVNTTRFAVLEVLKATGLPVETGSGGLTKFNRCTQNLEKQHWIDAACVGTSTPILSIKGVKPLLIAANGHGTRQSCRTDKYGFPIRHCSRTKFHFGFQTGDIVKAVVTSGKKIGEYVGRIATRATGSFNILTHVGLVQGISHKYCNHVHRKDGYSYVA

SEQ ID NO: 14582 - protein, 472 aa, unidentified; identical to SEQ ID NO: 8020

SEQ ID NO: 14583 - protein, 455 aa, Thiomicrospira sp.; identical to SEQ ID NO: 5231

SEQ ID NO: 14584 - protein, 582 aa, unidentified
MYLDGVFGHLKDAGTCRYSSSLQHRRVYAKSRKTIPGQCLGLQPMRKNRFFVGRYCPTLIRRQHLANLKLIDTLLEKTEYIYVLGADGKPQMPTNRKVRVRSLFKSGLAKIVDTVPFTIRLLYENNAVLQPITLAEDPGRTNIGVAVLTQFGDLVFSAVVETRNKYIKKLMSDRKAHRQASRRGERKARQRLAKKHGSMIKSGMIMRKLPRYAADKFVTCKFIKNTEARFCNRKRIPDWLTPTVNHLVETHINIIRKISKYIPVTDIAVEVNRFAFMQMENPETTGIDFQNGPLKGFNDVKAALRVQQHGKCLMCKNDISDFHHIVPRSQGGSDNIQNQVGLCPKCHKKAHTNENFKQKLADKKVGLLKKYGALSALNQAVPFICKSLLEIYGKDHVHFCTGKDTSLIRTGLGYEKTKDNQMHEVDAYCIGLAAVGADIVNLPKFENIYKIKQFRRQDRSIINYQRERTYYLDGKKIATNRKPRFEQKKDAFSDWYSKRVKSDGKEQADKLTGRVTVKKSIRGYNSKNRLMPGTIFYYNGKRLVLTGQLTGGKYYRAYGDSKTNYPAAKCQVYKQNEGLVFV

SEQ ID NO: 14585 - protein, 431 aa, Escherichia sp.; identical to SEQ ID NO: 3801

SEQ ID NO: 14586 - protein, 461 aa, unidentified; identical to SEQ ID NO: 4910

SEQ ID NO: 14587 - protein, 451 aa, unidentified; identical to SEQ ID NO: 5875

SEQ ID NO: 14588 - protein, 420 aa, unidentified; identical to SEQ ID NO: 6472

SEQ ID NO: 14589 - protein, 457 aa, unidentified
LDKRKRPLGHCTTKRARQLIEKGRACVYRYYPFTIIIKDLDVRKIEVHHDYRIKPDPGAGYTGISIIEDDRVIAYFELQHRGSEIVDRLQTRRNSHRNRRSRETGYRRCKFPKNGVYETSREKGWLPPSQMSILNNVLNFVRRLEKLLGPCKISIELVKFDMQLLENLDIKGEDYQHVELYNYELKTYLLEKYQHTCQYCANETGDHRLEKEHMVPKSRGGSDSLKNLILACHTCNQKKADRTPEEWLDALKAKKNAGDMDKKRFECLEKVVEGKKVGQELRYAAWTNSMRWRLYNALRELSADGTVSVGTGGRTAYNRNKLGIPKAHHLDALCCTKDVPENGYRNAVQPCLVVKATGRGGRLLGTINDCGIITTKFYQRNKRVNGIQTGDIVQAVVSNGKYKGTYTGRVKVRRRGDFDLVTMAGKKISTTRKTTFKVLQRMDGYEYSFSEAIPLGS

SEQ ID NO: 14590 - protein, 417 aa, unidentified
MSTCVCVLSNSGERLMPTFRLGKVRRLLKDGKAKIVKHHPFTIQLLYDSKTNTQPIEICEDVGYNYIGISVKSESHEYVSAQYDTLQDEKEHHDDCRKMRRARRNRLRYRKPRFDNRKRSEGWLAPSLEHKKQLNISLIERYVSVIPITRATVEVGSFDTILLQAIQKGKSKPEGVDYQKGPRYNLATLREAVFYRDNYTCQVCGRKIADGAILHMHHMFYWKGRHGYQLDELVTACEKCHTPANHQKGGKLFGFGEDKEFANLSGAAFMNAVRWQIVDALHATYGKEFVTITYGAMTKEKRIILGIEKTHNNDAYAMGDYHPVHRCVFRHYQKRRRNNRVLEKFYDATYIDARTGNKAKGKELFNGRINRNHKKDSENFHKYRSKKVSKGRRSIRRQRYAIQPYDTVRLEGKTYIT

SEQ ID NO: 14591 - protein, 413 aa, Blautia sp.; identical to SEQ ID NO: 3476

SEQ ID NO: 14592 - protein, 442 aa, unidentified; identical to SEQ ID NO: 3218

SEQ ID NO: 14593 - protein, 466 aa, unidentified; identical to SEQ ID NO: 11103

SEQ ID NO: 14594 - protein, 447 aa, unidentified; identical to SEQ ID NO: 10267

SEQ ID NO: 14595 - protein, 481 aa, unidentified; identical to SEQ ID NO: 4958
  REGION 1..481: note = Ga0373627_0007249

SEQ ID NO: 14596 - protein, 346 aa, unidentified
LRQDITDLLSARRALRQSRRNRKTRYRAPRFNNRLCTKRKGWLVPSVENRINAHLSRIKAVLRLLPVTKITVETASFDLQLLKNPDISGKEYQEGEQLGFWNIREYVLCRDGHVCQHCYGRSKDPVLNVHHLESRRTGGDSPGNLITLCETCHKALHRGEITLKAKRGQSFRAEAFMGIMRSEVLNRLKASHPELEVNNTYGYRTKHARIANDIAKSHCADAFCIAGNLGAERLGEFFFQKQTRRNNRQIHKLSILKGGIRKRNQAPFEVKGFRLFDKVACQGEEGFIFGRRSSGFFDVRKLDGTRISAGISCKKLHLLEKRRTYLTEIRKEEALPPLPEGRGLRA

SEQ ID NO: 14597 - protein, 406 aa, unidentified; identical to SEQ ID NO: 10063

SEQ ID NO: 14598 - protein, 443 aa, unidentified
MGRNGVADTTSLLNLGEEYPTSERMVNVVFVYVLNCHGQPLMPCQPRTARLLLKKGKAKVVKMVPFMLQLLHGSSGYKQDVSLGIDAGSQHIGVSATTEQMVLFEAEVQLRTDIQQVLATRRQFRRSRRSRKTRYRKARFLNRKKRSGWLAPSVQHKVEAHLKTIRLVHKLLPVIRTTIEVAQFDIQKIRTPEISGKDYQQGPQLGFWNVREYILARDGHVCQWYQGKSKDKFLNVHHIESRKTGGDSPDNLITLCETCHDLIHRTHQEHMIERRSRGFRDATQMGIMRWRIYEQAKELFSNVHLTYGYITKQTRIAHTVEKSHVTDARCISDHPLAVSDGTWYLMKYVRRNNRQLHKATIKKGSKRQRNTAPKYVHGFRLFDCVTYQGKLCFVFGRRSSGYFDLRTLDGVKISASASYKKLTIVQKASALLVERRAAFPLVS

SEQ ID NO: 14599 - protein, 489 aa, unidentified
MYVVYVLNQSGKPLMPTRRFGHVRRLLKSGMAKAVSTKPFIIRLQYISSDTKQPLHGATDPGRTNIGEAVINDKGEVVYAAHVASRNKEIPKLMENRASHRSASRRGERLRRKRRAEKNGTTTEFPNGRKLPGYEDGVLPLKDIINTEAKFNNRRRPAGWLTPTARQCVQTHLSMVRRICKFLPVTDWTLEYNRFAFMQLEDGTVRGWDFQNGRLKGYASKEDYVCALQDGRCALCGEPIEDYHHILPKHKGGSDTPENLVGLCASCHAAVHARKKSLSQIGRAKKYAGTSIVNTAMPFIWDGLVRMFGEDAHICEGQDTADARKALNVPKEHFTDAVCIAGLGSGIMPRYDDAQPFELRQFRNHDRALIKAQTERTYRLDGKIVARNRKPRFEQKGPALSDWFDSVAKEKGEKEAMRLLSKLEVSKSQRRYNNLERHLPGSVFLYKGKRYVMQGQRTNGNYLIPVGHADWNLPRKQCTFVGFQSLAYI

SEQ ID NO: 14600 - protein, 512 aa, unidentified
MPTVYVLNKDGKPLMPTTRCMHVRHLLKNGKARVVKSKPFTIQLLYETDDVVQPLYLGIDPGRTNIGVAVVKADGAAVFTAHLETRNKEVPKLMKKRKESRCARRTNGRRCRRQRGAKTNGTISKKCVKQTTAQNGSVSKRAKEIGVIKRHLQGCEKDVLCIGIKNKEAKFTNRARPEGWLTPTANQLLQTHINLVKKIQKFLPISDVVLEVNKFAFMQLDNPNIQKWQYQQGPLYQKGSLENAVSEMQEHHCLFCEKPIEHYHHVVPKSENGSNTIANIVGLCTEHHNLVHKDATWQKKLAKEKVGLVKKYSALSVLNQIIPALTKEMNSLFPKHFFVTNGKSTYDYRTAHGVSKDHWLDAYCIACSVLPNDVCDSNINSHVPYELKQFRRHDRRVLHKANMSRVYTLNGKTVATNRHKAIKQTTDSLEEFRQSHPGDVCKLKVKEHHPAYRNLNRNYPGSVFLVDGQVHVMQGVSGSHNGKADGYYNTNGNAYPYYKCKFVVKNEGIVFA

SEQ ID NO: 14601 - protein, 419 aa, unidentified; identical to SEQ ID NO: 4877

SEQ ID NO: 14602 - protein, 429 aa, Parasutterella sp.; identical to SEQ ID NO: 3656

SEQ ID NO: 14603 - protein, 490 aa, Anaerostipes sp.; identical to SEQ ID NO: 6170

SEQ ID NO: 14604 - protein, 430 aa, unidentified; identical to SEQ ID NO: 4002

SEQ ID NO: 14605 - protein, 424 aa, unidentified
LVWNKRGKPLMPCSPAKARLLLKEKKAIVVRRTPFTIQLTIATGETKQPVSLGVDAGYEHVGLSASTEKAELYASEVELRQDITDLLSARRALRQSRRNRKTRYRAPRFDNRIRTKRKGWLAPSVENRINAHLSRIETVIRLLPVTKISVETTSFDMQLLKNSDIAGKEYQESEQLGFWNVREYVLFRDGHVCQHCHGRSKDPVLNVHHLESRRTGGDSPGNLITLCETCHKELHRGEITLKAKRGQSFRAETFMGIMRWEVLDRLKASHPKLEVQNTYGYRTKHARIVNGIAKSHCADAFCIAGNLGAERLGEFFFQKQTRRNNRQIHKLSILKGGIRKRNQAPFEVKGFRLFDKVACQGEEGFIFGRRSTGYFDVRKLDGTCISAGISYKKLHLLEKRRTYLTEIRKEEALPPPPEGRGLRA

SEQ ID NO: 14606 - protein, 417 aa, unidentified; identical to SEQ ID NO: 13676

SEQ ID NO: 14607 - protein, 518 aa, unidentified; identical to SEQ ID NO: 3878

SEQ ID NO: 14608 - protein, 466 aa, unidentified
MWLNSSEGKEQCCIHGNLGITLGKDSHSLRRGQFCQSLTVTTTRKETTSMYVYVLNQHGEPLMPCSPRKARTMLRDHKATVVRRTPFTIRLLHRSSEYRQDITLGVDAGSKFIGLSACTENKELFAAEVKPRNDVVDLLSTRRELRRSRRNRKTRYRAARFNNRVHSKHKGWLAPSVEVKIQEHITAINRTCAILPISMVIVETAEFDTQRLKAMLEGKPLPVGTDYQLGEMYDEYNVRQYVLKRDNYTCQCCGIQSTDKAPVKFAVHHKESRHVGGNAPNNLITLCEKCHRRLHAGVITLEEGKRKRGKSFRDAAFMGIMRKTLMRRLRSELSIPVKETYGYITKLLRETHSIQKSHVNDARCIARVPNAQPSDTLYRIRTVRNHNRQLHKANPIRGGIRKRNQAPYEVFGFRLWDKVLFSGRECFITGRRASGYFALKDFDGKKVHASASHKVLTVVESATSYL

SEQ ID NO: 14609 - protein, 487 aa, Lactobacillus sp.; identical to SEQ ID NO: 7743

SEQ ID NO: 14610 - protein, 424 aa, unidentified
MVFVLNKNKEPLSLCHPARARKLLKDGKAVVHKKYPFTIRLKEYKKVNKKNKDEYRLKIDYGSRYTGLAILKNNKDIVWLAQIEHRTDIKKKLDNRRAYRRRRRSNNLRYRQLRFNNRKRKEGWIPPSLQSRVDNIESWVNRITKLCPLTHISYENVKFDTQLMDNPTIKSVEYQQGTLMGYEIREYLLEKFNRKCVYCGKTGIPLEIEHIIPKSRGGSNKIDNLAIACKGCNQVKGNKTAEEFGYPDIQKQVKKSLKDAAILNATRWKVYEILIATDLPVECGTGARTKMNRINLGLPKDHHYDACCIGKSTPDSLHFKTDNVLYIKVMSRGSHCRTNLDKYGFPRSYLPRQKYFFGFMSGDMVKAIVPKGKNKGIWYGSVACRSTGSFNINLKKGRVQGINHKYCQIVQKSDGYKYTLERRK

SEQ ID NO: 14611 - protein, 456 aa, unidentified; identical to SEQ ID NO: 11534

SEQ ID NO: 14612 - protein, 419 aa, unidentified; identical to SEQ ID NO: 9782

SEQ ID NO: 14613 - protein, 419 aa, unidentified
MVYVINKQGQALMPTERFGKVRRLLKNSLAHVVCRIPFTIQLDYDTTDNTQPVSLGIDAGSKHIGISATTSDKELYAADVELRNDIVDKLSTRRELRRTRRSRLRYRKARFNNRVSSKRKGWLAPSVENKIQTHLTVVEKIHKFLPITNIVVETAAFDIQKINNPSISGSEYQQGEQLDFFNVREYVLFRDNHTCQHCKGKSKDKVLNVHHIESRKTGGDSPNNLITLCETCHKAYHRGEFKLNVKRGKSFRDAAFMGIMRWKLYDRLKNIYPNVSMTFGYITKNTRITNNLPKEHYVDARCISGNPVAKPLGYYFYQKKVRCQNRQIHKVNFLKGGRKKLNQAPFLVKGFRLFDLVEYQKDLYYIFGRRNSGFFDIRKLDGTKVNKGSINCKHLRLMATRKSILIEKRMQINYENTGF

SEQ ID NO: 14614 - protein, 416 aa, unidentified
MFVYVLDKTGQPLMPTARCGWVRRALRQGRAVVVNVSPFTIRLTYESGVVTQRCSLGVDAGSKVVGISVTTEQKEVYAAECCLRTDVVDNLSARRMFRNNRRHRKTRYRPVRFNNRKNRKGRLAPSLEQKINSHIQLIRKVCRILPIVSITVETAQFDIQKIKNPTVANEQYQHGEQFGHANVREYVLYRDGHKCQICGKVKDVKLHVHHIESRATGGDSPNNLTTLCTECHASLHAGDVSLKKKRGKSFRDATGMNIMRPTLLKRLRELFPNVQETFGYITKEIRKQYGLEKTHAVDARCISGNADVMPSPNRYQQQCVRTKNRMLHKATVQKGGTCKANQAAKFVCGFQLFDKVQLGDIECFVFGRRTKGSFDVRLLSGDKIHAGISYKKLKLIQKRTTILTTLTRKDGNSSHV

SEQ ID NO: 14615 - protein, 460 aa, unidentified
  REGION 1..460: note = Ga0315284_10034031
LIRELKGNFMQKLQVEFKNVPRNTSLVPCSTNPVLNRDESLSVQDKVLACNNPEVNLARRSGHSFLVFILNKNGKPLMPCSFKKSKQLVREGKALVIKRSPFTIQMNYGSTGYRQKINLGIDSGYENIGFSARTDKEELISGTVKLDGRTKERLDEKRMYRRGRRNKLWYREPRWLNRTKPEGWLPPSIERRYQTHLILIERIKKLIPISKVIIEIAKFDIQKLENPDIKGKEYQQGSLYEYQNVRSYLMSREKGLCEYCKKDFKNSSSHIHHRKPRNKNGNNRLGNLMLLHKDCHKKIHKKPELLKKYEKTSVKSYKQSTFMSIINKRFFNDIKDLEVTYGNITFVNRNKLGLIKTHYNDAFVISGGITQKRIKPFKVTQKHRNNRVLQMNRKGFKPSIKRNRSIIAPLDLFWVNKIKYSCRGMYNKGKYILYGDVKKKEYFKMNSVEKYFNNGSLVWS

SEQ ID NO: 14616 - protein, 415 aa, unidentified; identical to SEQ ID NO: 6883

SEQ ID NO: 14617 - protein, 442 aa, unidentified; identical to SEQ ID NO: 2807

SEQ ID NO: 14618 - protein, 411 aa, Virgibacillus sp.
MTEFSFVIDGKGKKLSPTKVNKAWFLIRKKRANLISKFPMVIQLTKEVEVEEIDRSAIHFNIDDGSKFAGVAIVQECSTKNKPIFKGTIEIRQDVKDKMNVRRGYRRYRRSHKRYRKKRFDNRLSSKRSRRVAPSILQKKESILRITKQLHKWIRMDTIHLEDVAIDIRALESGYKPYRWQYQKSNRLDENIRKAAILRDEHQCKQCGQKNCRLEVHHIIPKRLNGSNSIHNLITFCSDCHALVTGKELKYVNHFFNLIKGKKLDFTYAMHVMQGKNYLKKELEKVAPVKLTTGGDTANKRIDWGIEKSHSDDAIVISNLPIRSDQCEIKDYTIKPMRWKRKYKIDELAGFKHRDFVRYTKRNGETYEGYITVLNPRRKTFDMKTLDGKTLKKYGIKSAQLLWRFNKIYWF

SEQ ID NO: 14619 - protein, 474 aa, unidentified
MWLNSSEGKEQCCIHGNLGKTLGKDSHSLRRGQFCQSLTVTTTRKETTSMYVYVLNQHGEPLMPCSPRKARTMLRDHKATVVRRTPFTIRLLHRRSEYKQDITLGVDAGSKFIGLSACTESKELFAAEVKPRNDVVDLLSTRRELRRSRRNRKTRYRAVRFNNRVHSKHKGWLAPSVEVKIQEHITAIKRTCAILPISMVIVETAEFDTQRLKAMLEGKPLPVGTDYQLGEMYDEYNVRQYVLKRDTYTCQCCGIQSTDKAPVKFAVHHKESRHVGGNAPNNLITLCEKCHRLLHAGVVTLEEGKRKRGKSFRDAAFMGIMRKTLMRRLRNELSIPVKETYGYITKLLRETHFIQKSHVNDARCIARVPDAQPSDTLYRIRAVRHHNRQLHKVNPIKGGIRKRNQAPYEVFGFRLWDKVLFNGQECFITGRRVRGYFALKNFDGKKVHTGAPYTALTIVESSTSYLIERRGETT

SEQ ID NO: 14620 - protein, 415 aa, unidentified; identical to SEQ ID NO: 10543

SEQ ID NO: 14621 - protein, 427 aa, Anabaena sp.; identical to SEQ ID NO: 7770

SEQ ID NO: 14622 - protein, 471 aa, unidentified
MDGLQKWTESLTYTPNSSPWRFRQQPLKWEAPCESWERRSQTPSNNPDVDIQSGMTGRDLRVPVLNMRNEPLMPTTPGRARKLLKQNKARVISSNPFTIQLLYATGETKQPVRLGVDSGYKRTGFSVVTQKRELISGEAVIRTDIPKLNQEKSMYRRGRRNKLWYRQPRFMNRGNKKEGWLAPSINHKLQTHVKLIEKLKRILPITETVIEVASFDAQKMQNPEISGIEYRQGELQGYEIREYLLEKFHRTCVYCGKTNVPLEIEHLTPRSRGGPDTVNNLAISCHECNQRKNNLTAEEFGYPEVRKMALVTLRDAAFMNTVRWKLTHLTGSAHTFGYITKKNRISLGLDKSHANDAFVIAGGTDQIRASQYEISQRRRNNRSLQVNRKGFMPSIRRKRYTFQPGDIVVHSHERFSVIGVHSYGKSIVIKGGEMKMDINTKEVKLVKYGKGLRFTAQFLPPLKKVGILGGS

SEQ ID NO: 14623 - protein, 279 aa, unidentified
VVVETAEFDLQLLKAIADGKPVPQGEDYQKGEMYGHYNVRQYVLWRDNYTCQCCGTHPSKKKEVRLHVHHLESRKVGGDAPDNQVTLCESCHEKLHKGLIAEKDFKKRKRRSTRDATFMGIMRKTLMQRLCSELPIPVVETRGYITKATREKLLVLPKSHINDALAIAQGQRGFNVGYLPEIAQIDKIYTIRPVRHHNRQLHKATILKGGIRKSNQTEKYVFGYCLFDKVQFNGQDCFIWGRRTTGIFTIKTINGKMIKDGISFKKLKLVEKSTSYLIA

SEQ ID NO: 14624 - protein, 411 aa, unidentified
MVYVQDIDGKPMMPTTRHGKVRRLLKDNKAVVVNTCPFTIKLTYKTSDYKQEIVLGVDSGTKHVGLSATTKSKELYASEVILRSDVVDLLSTRRELRRKRRYRLRYRKPRFKNRIKYKKEGWIAPSIRQKIDSHIRIISFVYSILPVSKLIVEVAQFDTQKIKNPEISGKEYQEGDQLGFWNVREYVLARDGHKCQHCKGKSKDPILNIHHIESRKIGGDSPSNLITLCETCHKEFHKGNIKLKVSRGKSLRDAAVMGIMKWKLYEELKSRYDNVSMTFGYITKYNRINHGIEKSHVSDAFVISRNFNSCRLGYYYKRKLVRRHNRQIHKMKILKGGIRKRNQAPFKVFGFRLFDKVMFQGEEHFIYARRLSGQFNIRDINGENKKDVSCKKLKYVSHGLVSVKTNLFLSQ

SEQ ID NO: 14625 - protein, 424 aa, unidentified
MRVFVLDKNLKPLDPCRPARARLLLKQGRAKVFRRYPFTIILPDLEVENCTTHNHQLKIDPGAKTTGLAIRQNNTVIWGAEITHRGFQIRDALTSRRQLRRSRRNRKTRYRKPRFLNRKRPERWLAPSLMSRVHNILTWVKKLIRFCPIAGISQELVRFDTQKMENPEISGTEYQQGTLYGYEIREYLLEKWNRKCAYCGTTDTKLEIEHIKPKSLGGSDRVSNLAIACHDCNQAKGNQDIEQFLSGKPEVLKQVLSQAKRPLADAAAVNATRWKLYNELQLTGLPVETGSGGQTKYNRRRFNLVKTHWLDAACVGNVQSIYVENYQPLSIVAKGHGTRKICRTDKFGFPKRYCSRTKIHKGFQTGDIVKAVVTKGKKIGTYIGRVATRKTGSFNISTANGLIQGISHKYCQPIHKKDGYAYTI

SEQ ID NO: 14626 - protein, 420 aa, unidentified
MQYVYVLNKHGEPLMPCSPRKARLLLKQKKACVVKRTPFTIKLLYGSTGYKQPITLGVDAGSKHIGISATTEKHELYREEATPRNDVVDLLSARRAFRRSRRNRKTRYRAPRFDNRVHSKHEGWLAPSVEVKIREHITLIKRVCRILPITLVRVETAEFDTQRLKAMLEGKPLPVGTDYQLGEMYDEYNVRQYVLKRDNYTCQCCGAHPTKTKAVKLHVHHIETRKTGGNAPNNLITLCTVCHKALHAGKVTLDGKKRGKPLKDAAFMGIMRKALLERLRKELKIPVQGTYGYITKYLREKHGISKSHTNDARCISKNPLAIPCDTCYYTKAVRHHNRQLHKATILKGGIRKANQAPYIVKGYRLWDKVSYNGKECFITGRRTSGYFALKKLDGTVISNSISYKKLRLLEVATNYITERK

SEQ ID NO: 14627 - protein, 414 aa, unidentified
MPCSPAKARLLLKEKKAIVVRRTPFTIQLTIATGEAKQPVSLGVDAGYKHVGLSASTEKAELYASEVELRQDVSDLLSARRALRQSRRNRKTRYRAPRFNNRLRTKRKGWLAPSVENRINAHLSRIEAVLRLLPVTKITVETASFDMQLLKNPDIAGKEYQEGEQLGFWNVREYVLFRDRHVCQHCYGRSKDPVLNVHHLESRRTGGDSPDNLITLCETCHKALHRGDITLKAKRGKSFRAEAFMGIMRWEVHNRLRALHPGIEVSNTYGYRTKHARIANGIAKSHCADAFCIAGNLGAERLCEFFFQKQTRRNNRQIHKLSILKGGIRKRNQAPFEVKGFRLFDKVACQREESFIFGRRSSGFFDVRKLDGTRISAGISCKKLHLLEKRRTYLTEIRKEEALPPLPEGRGLRA

SEQ ID NO: 14628 - protein, 512 aa, unidentified; identical to SEQ ID NO: 5549

SEQ ID NO: 14629 - protein, 493 aa, unidentified
MAAVYVISASGKPLMPTTRCGHIRGLLNAGKARVVEREPFTIQLKYETPDVTQPLYLGIDPGRTNVGSAVVREDGECVFTAQLTTRNKNVPKLMKARKQFRMAHRRLKRRCKRQRRAKGAETLSQKGEFQRLLPGYEEPILCKGIRNKEARFNNRQRPAGWLTPTANHLLLTHLNMVKKLQKLLPITDVVLEVNRFAFMAMENPSIRRWQYQQGPLYGKGSVEDAVYAQQDGHCLFCGKPIAHYNHVVPQHKNGSETLENRVGLCNEHHDLVHKDRAWDAKMKETKAGLNKKYHALSVLNQIIPALTEQLTAMFPQHAFVTTGKDTADFREDYGIAKEHHLDAYCIACSVLAEPTKVAAPTGKPHRLMQFRRHDRQVCHKENIKRVYLSEGKAVATNRHKAIEQKDDSLEEFRKTHTQQEVSALTVKDHQPVYKDMRRFMPGGVFLFNGKVHTLQRSHGRYKGMPFYYIDTDGSKNHAKGCIFLQQNCGLRWV

SEQ ID NO: 14630 - protein, 406 aa, unidentified; identical to SEQ ID NO: 4082

SEQ ID NO: 14631 - protein, 424 aa, unidentified; identical to SEQ ID NO: 5018

SEQ ID NO: 14632 - protein, 512 aa, unidentified
MSTVYVLNKDGKPLMPTTRCGHVRHLLKEQKARVVASKPFTIQLLYKTNDVVQPLYLGIDPGRTNIGVAVVKADGTAVFTAHLETRNKEIPKLMKKRKDSRRARRTNGRRCRRQRRAKANGTISKKCVKHDTAQNGSVSKRAKEIGVIKRHLPGCEKDVLCIGIKNKEAKFSNRTRPEGWLTPTANQLLQTHINLVKKIRKFLPISDAVLEINKFAFMQLDNPNIQKWQYQQGPLYQKANLEEAVSEMQEHHCLFCKKPIAHYHHVVPQSENGSDTIGNIVGLCTKHHDLVHKDTAWQKKLAKKKTGLNKKYGALSVLNQIIPALTKELSSLFPKHFFATNGKSTYDYRSAHGVSKDHWLDAYCIACSVLPNDVCDSGINNRVPYELKQFRRHDRRALNNENMSRVYTLNGNVVATNRHKATKQTTDSLEEFRQNHPDDVCKLKVKEHHPTYRNMNRNYPGSVFLIGKQVHVMQGIASSKDGEATKYKDTNANSIAAGKCKFVAKNSGMLFV

SEQ ID NO: 14633 - protein, 270 aa, unidentified
LQLLKAIEEGKPVPQGEDYQQGEMYGHYNVRQYVLWRDDYTCQCCGAHATKKKEVRLHVHHLESRKVSGDAPDNQVTLCESCHEKLHKGLIAAKDFKKRKRRSTRDATFMGIMRKTLIQRLHAELTIPVAETRGYITKATREKLLVLPKSHTNDALAIAQGKHGFNVGYLPGIAQIDKIYTIRPVRHHNRQLHKAAILKGGIRKSNQAEKYVFGYRLFDKVQFSGQDCFIWGRRTTGIFTIKTINGKMIKDGISFKKLKLVEKSTGYLIA

SEQ ID NO: 14634 - protein, 408 aa, unidentified
MVYVQDINGKPMMPTTRHGKVRRLLKDKKAVVVNLCPFTIKLTYVTSDYKQEIVLGVDAGTKHVGLSATTKSKELYSSEVILRNDIVDLLSTRRELRKTRRNRLRHRKHRFNNRIKSRRPGWVAPSVKYKIDAHIRVIDNVFSILSVSRIVIEVAQFDTQKINNPNISGKEYQEGDQLGFWNVREYVLARDGHKCQHCKGKSKDPVLNVHHIESRKTGGDSPSNLITLCETCHKEYHKGNIDLKIRRGKSLRDAAVMGIMKWRLYEELKSKYDNISMTFGYVTKYNRIKHGIEKSHVFDAFVISKNFDAIRLGYYYKVRLVRRHNRQIHKQKIPKGGIKRLNQSPFEVFGFRLFDRVMFENSYYFIFARRKTGSFNIRDIDGKNQRDITYKKLKLSRCKRFMVQKEMD

SEQ ID NO: 14635 - protein, 400 aa, unidentified
KKAIVKRRTPFTIQLTIATGETKQPVGLGVDAGYKHVGLSASTDKAELYASQVELRQDITDLLSARRALRRARRNRKTRYRAPRFNNRIRTKRKGWLAPSVENRINAHLSRIEAVLRLLPVTKITVETASFDMLLLKNPDIAGKEYQEGEQLGFWNVREYVLFRDGHVCQHCYGRSKDPVLNVHHLESRRTGGDSPGNLITLCETCHEALHRGEIALKTKRGHSFRAEAFMGMMRWEVLNRLKASHSELEVNNTYGYRTKHARIVNGIDKSHCADAFCIAGNLGAERLCEFFFQKQTRRNNRQIHKLSILKGGIRKRNQAPFEVKGFRLFDKVACQGEESFIFGRRSSGYFDVRKLDGTRISAGISYKKLRLLEKRRTYLTEIRKEEALPPLPEGRGLRA

SEQ ID NO: 14636 - protein, 411 aa, Clostridium sp.; identical to SEQ ID NO: 7735

SEQ ID NO: 14637 - protein, 465 aa, unidentified
MSTCVCVLGSDGERLMPTFRLGKVRRLLKDGKAKIIKHHPFTIQLLYDSKTNTQPIEICEDVGYNYIGISVKSESHEYVSAQYDTLQDEKACHDSCRKLRRTRRNRLRYRKPRFDNRKRGEGWLAPSLRHKKELNVNVVKMYCAVMPITHATVEVGSFDTMLVKAIQEGKAIPEGADYQKGPRYNLATLREAVFYRDNYTCQVCGRKIADGAILHMHHMFYWKGRHGNSLDELLTVCEKCHTPANHQKSGKLYGFGEDVKFSNLSGAAFMNTVRWQIVNELYAAFGKPFVTITYGAMTKEKRIALHLEKSHNNDAYAMGEFHPNCRCAFEHYEKVRRNNRILERFYDSRYIDIRTGEIATGKELFNGRINRNHKKDSENLHKYRGKRTYAGHRALLRKKVNLNPGDLVSLNGEVLIVYGTHTDKKGAVNVEFKTPAKNGRKSASLKKLKIVKATSSIHPAWEKVS

SEQ ID NO: 14638 - protein, 430 aa, unidentified; identical to SEQ ID NO: 4002

SEQ ID NO: 14639 - protein, 375 aa, unidentified; identical to SEQ ID NO: 5583

SEQ ID NO: 14640 - protein, 557 aa, unidentified
MIYNLVSIRERSFMKQKKQKVMVYILNKKGKPLMPTTRCGHVRKLLDSKKAVVVSSNPFTIRLKYDTPNGVQDVFAGIDSGRENIGSGASNEDGDCLYLGELKTSNKSIKMKITERAGFRKERRRHDRQNKQRKARKDHTEIQNGNADICRTTISCKSVQISYPAAEKSVTHKIIRGKEGKFANRHRDEGWITPSARQLVQMHMNDLKSMCKILPISHVTLERVAFDFQKLENENIKAWEYGKGKLYGYDSPEEYIHDVQGGKCLICGKPHIDYLHHIIPRSKGGSNKVSNLAGLCYDCHYGPMGVHNCQDTQDRLPELKNEANKQYKVSLLNSVMPVLIEEMDKFCKANSIIFSICEGHDTAKVRDIYDLQKDHCVDGFAISLVGRNVKSVDVMPDRIHQKQRYKKKSKNIIKKRNCREYYDGKKLVAVNRHKGTDQKADSLEEYMNTYAETHTADECKKHFESLTVKPARRTYTFHKEGRICPFHIGDKVRYEKKNKIKGNTKVETFICEGIRFPKDENKAKVEHNKTKSKKMKFCRVLEPGCTPYIDYRKLVLI

SEQ ID NO: 14641 - protein, 423 aa, unidentified
MRVFVLNKNRQPLDPCKPARARILLSAGKAKVYRRYPFTIILTEEIKNPVTHEHQLKIDPGAKTTGLAIIQGQRVIWGAELTHRGFQIRDNLTSRRQLRRSRRSRKTRYRKPRFSNRTRPKGWLAPSLTSRVQNILTWVKKLIRFCPVTGISQELVRFDTQKLQNPEISGIEYQQGTLYGYELREYLLEKWNRKCAYCGATGTQLEIEHIKPKSRGGSNRVSNLTIACHSCNQAKSNQDIELFLSKKPSLLKRILRQAKRPLADAASVNITRWKLYHVLKSIGLPVEVGSGGLTKFNRCRQSLPKAHWLDAANVGKVETLIIEVTLPLLITAKGHGTRQLCRTNKYGFPIRHCSRIKFHKGFQTGDIVHAVVTKGKKVGTYVGRVATRKSGSFNISTKLGLVQGISHKYCQFIHRKDGYAYGI

SEQ ID NO: 14642 - protein, 512 aa, unidentified; identical to SEQ ID NO: 5549

SEQ ID NO: 14643 - protein, 446 aa, unidentified
VAFSLATIQKKEEGIMPNKVYVINKHGRPLMPCSPAKARHLLDAGKAKVKKRTPFTIQLVYGSSGYTQEVILGVDAGSKTIGISASTKKEEVFAADVTPRNDVVDLLSTRREFRRARRNRKTRYRKPRFDNRVRSKHKGWLAPSVEVKIQEHITAIRRVCGILPVSKVVVETAEFDLQLLKAIEEGKPVPQGEDYQQGEMYGHYNVRQYVLWRDNYTCQCCGAHATKKKEVRLHVHHLESRKVGGDAPDNQVTLCDRCHEKLHKGLITEKDLKKRKRRSTRDATFMGIMRKTLMQRLCSELPIPVIETRGYITKATREKLLVLPKSHTNDALAIAQGKHGFNVGYLPGIEQIDKIYTIRPVRHHNRQLHKAAILKGGIRKSNQVEKYVFGYRLFDKVQFNGQDCFIWGRRTSGYFAVKTIDGKVIHNSASFKKLNLVERASNYLIA

SEQ ID NO: 14644 - protein, 448 aa, unidentified; identical to SEQ ID NO: 3877

SEQ ID NO: 14645 - protein, 406 aa, unidentified; identical to SEQ ID NO: 5685

SEQ ID NO: 14646 - protein, 417 aa, Geobacillus sp.; identical to SEQ ID NO: 5432

SEQ ID NO: 14647 - protein, 438 aa, unidentified
LITGKHISSTRYWYEEKFSERKVSEMTNYAFVLDADNKQLTPTKEQKAWFLIRKKRATLVSKYPMVIQLKKKIPDKEICKDEVRCGIDDGGLHVGVALVQKCHTRNKVIFKGVIEQRNDVKHLMDVRRGYRRYHRYHKRYRPARFNNRNSSKREGRITPSILQKRQATIRVVNQLNKWINITNYWLEDVAIDIRALTDGYKPYRWQYQKTNRLDENIRKAVILRDGCKCMECEKSNCRLEVHHIKPRRLKGSNTLDNLITLCAKCHQKTESVEELYMDRYFALLKSSDNKNLNYAQHVMIGKKWLREQLSNLGMLHLTNGGDTANKRIDWDITKSHSNDAICITDLKPDTYEIKEWVIKPMRRQSKAKADNVLGIKHRDLVEYTFRNGETHRGYVTALYPEQNAINFQSPTKHCKKVNARKCKVLWKYSKIYWLDNVS

SEQ ID NO: 14648 - protein, 413 aa, unidentified
MTSYSFVLDANGKPLAPTKEQKAWFLIRKKRAALVSKYPMVIQLMKEIPENEICQDEIRCGIDDGGLHVGIALVQKCKTKNKVVFKGTMEQRNDVKHLMEVRRGYRRYHRYHKRYRQARFDNRKSSKRKGRIAPSILQKRQATIRVINRLNKWINITNYWLEDVSVDIRALTDGYQSYRWQYQKSNRLDENIRKAAILRDGGKCMECGKSNCRLEVHHIKPRRRNGSNTLDNLITLCESCHQKTEGQEELYMDRYFSLLKSSDNKNLNYAQHVMIGKMWLRKQLSGLGVLYLTSGGDTANKRIDWNIEKSHANDAVCITDLRPDTCDVKEWTMKPMRRQSKAKTDHVLGIHHRDLVEYTFKNGETHRGYVTALYPDQKAINFQSQTKHCKKVNARKCKLLWNYSKIYWFENAS

SEQ ID NO: 14649 - protein, 451 aa, unidentified
VTTILKTCFAAFNLAKVVVLMDAWDIIVVLNKRGKPLMPCSPAKARLLLKEKKAIVKRRTPFTIQLTIATGETKQPVGLGVDAGYKHVGLSASTDKAELYASQVELRQDITDLLSARRALRRARRNRKTRYRAPRFNNRIRTKRKGWLAPSVENRINAHLSRIEAVLRLLPVTKITVETASFDMLLLKNPDIAGKEYQEGEQLGFWNVREYVLFRDGHVCQHCYGRSKDPVLNVHHLESRRTGGDSPGNLITLCETCHEALHRGEIALKTKRGHSFRAEAFMGMMRWEVLNRLKASHSELEVNNTYGYRTKHARIVNGIDKSHCADAFCIAGNLGAERLCEFFFQKQTRRNNRQIHKLSILKGGIRKRNQAPFEIKGFRLFDKVACKGEESFIFGRRSSGYFDVRKLDGTRISAGISYKKLRLLEKRRTYLTEIRKEEALPPLPEGRGLRA

SEQ ID NO: 14650 - protein, 418 aa, unidentified; identical to SEQ ID NO: 6784

SEQ ID NO: 14651 - protein, 420 aa, unidentified
MQYVYVLNMHGEPLMPCSPRKARLLLKEGKARVVKHTPFVIKLLHGSVGYKQPVVLGIDAGSKHVGLSACTKDRELYKEELAPRNDVVELLSARRQYRRSRRNRKTRYRAPRFNNRVHSKHKGWLAPSVEVKIQEHITVIKRVCKILPVTLVRVETAEFDTLRLKAMLEGKPLPVGTDYQLGEMYDEYNVRQYILKRDNYTCQCCGAHPTEQKLVRLHVHHMESRQTGGNAPNNLITLCVACHKALHAGKISLDGKKRGKPLRDAAFMGIMRKTLLSRLETELSVPVQQTYGYITKMLREKNHIEKSHTNDARCITGFPKATPCDAMLCTRALRHHNRQIHKAKILKGGIRKRNQAPYLVKGFRLWDKVRYDDKECFITGRRVSGYFALKKYDGTVISNSASYKKLTLLEAATNYITERS

SEQ ID NO: 14652 - protein, 442 aa, unidentified; identical to SEQ ID NO: 10357

SEQ ID NO: 14653 - protein, 512 aa, unidentified; identical to SEQ ID NO: 5811

SEQ ID NO: 14654 - protein, 428 aa, unidentified
LKVFVLNMRGRPLMPCSPAKARHLLKAGKAVVRRRTPFTIQLRIATGETKQSVTLGVDAGAKHVGLSAATEKEEVFASEVELRQDITELLAARLSLRRERRQRKTRYRAPRFLNRVRSKHKGWLAPSVENRIQAHMSRIDAICGLLPVTKIVIETASFDIQKIKHPDVEGTDYQQGDQLGFWNVREYVLFRDGHVCQHCHGHAKDKILNVHHLESRQTGGDAPNNLITLCETCHKACHAGKIKLKVKRGQSFRAEAFMGIMRWTLLDRVRKAHPGLPVENTYGYLTKNTRITLGLPKTHCVDAYCIARNLKAVRRGVCLHQRQVRKHNRQIHKSTVLSKTLKDGTKIGYRKLNQTPHLVKNFRLFDKVRCLGQTGFIFGRRSSGYFDVRRLDGVKISSCISYRKLTLLEKRGTCLTELRKEDGASSTV

SEQ ID NO: 14655 - protein, 472 aa, unidentified; identical to SEQ ID NO: 4119

SEQ ID NO: 14656 - protein, 396 aa, unidentified; identical to SEQ ID NO: 4508

SEQ ID NO: 14657 - protein, 397 aa, unidentified
IVKRRTPFTIQLTIATGESKQPVTLGVDAGYKHVGLSASTEKAELYASEVELRQDVSDLLSARRALRQSRRNRKTRYRAPRFNNRLRTKRKGWLAPSVENRINAHLSRIEAVLRLLPVTKITVETASFDMQLLKNPDIAGKEYQEGEQLGFWNVREYVLFRDRHVCQHCYGRSKDPVLNVHHLESRRTGGDSPGNLITLCETCHKALHRGDITLKAKRGKSFRAEAFMGIMRWEVHNRLRALHPGIEVSNTYGYRTKHARIANGIAKSHCADAFCIAGNLGAERLCEFFFQKQTRRNNRQIHKLSILKGGIRKRNQAPFEVKGFRLFDKVACQGEEGFIFGRRSSGFFDVRKLDGTRISAGISYKKLHLLEKRRTYLTEIRKEEALPPLPEGRGLRA

SEQ ID NO: 14658 - protein, 415 aa, unidentified
MVYVLANDGQPLMPTERHGKVCRMLKSGIAKVVKKCPFTIQLQYESERNVQPVALGIDAGSKHVGVSATTKAKVLYESDVELRDDIVKLLATRRQLRRRRRSRKTRYRPARFDNRRRKEGWLAPSIRQKIESHLTVVANVCKILPVSQIIVETASFDIQKIKNPDIQGIEYQQGEQMDFWNIREYVLFRDGHTCQCCKGKSKDKVLNVHHIESRKTGGNAPNNLITLCEPCHKGYHNGTVTLPKNIKRGMKFKDAAFMGIMRWTFYNTLKEQYEPDIPVHYTYGYITKNTRINHNLPKGHCIDARCISGNPDAVSDSTYYYQKKVRCHNRQIHKQTILKGGIRKSNQAEYLVRGFRLFDKVRYQGREYFIFGRRKSGFFDIRTLSGEKVNKGSINVKRLTFVDTRKNYLTERRTV

SEQ ID NO: 14659 - protein, 420 aa, unidentified
MQYVYVLNKHGEPLMPCSPGKARLLLKRQKACVVKRTPFTIKLLHGSAGYKQPITLGVDAGSKHVGLSASTETHELYCEEFTPRNDVVELLSTRRQNRCSRRNRKTRYRTPRFNNRVHSKHKGWLAPSVEVKIQEHITVIKRICRILPITLVRVETAEFDTQRLKAMLAGKPLPVGTDYQLGEMYDEYNVRQYVLKRDNYTCQCCGAHTTAKKAIKLHVHHLESRKVGGNAPSNLITLCTACHDNLHKGKVTLDGKKRGKTLRDAAFMGIMRNTLLIRLRNELNIPVQNTYGYITKLLREQNDIKKSHINDARCISKHPLAEPCSVCYRTKAIRHHNRQIHKAKILKGGIRKANQAPYIVKGFRLWDKVLYNGQECFISGRRSSGYFALKKLDGTAITNSISFRKLRLLEPAINYLIERM

SEQ ID NO: 14660 - protein, 453 aa, unidentified
MSVAVVSKTGMLLMPTSEYRARKLLKSKKAIIHGYHPFTIQLTERETGYIQPVELCMDTGYIHIGTSVKSEKHEYLGEQIDTLTDERQKHDACRMYRRQRRNRKRYRQPRFNNRERDDGWISPSLEHKKTIHIQALSRICKVIPVTDITLEMGNFDTQVLKAREEGRPLPQGLDYQHGERYSVTTLREAVFLRDGYTCQRCGRTIKDGAILHVHHVVYRSQGGTNRISNLITICDKCHTPANHKPGGKLYGWKPKVASFKGATYMTTIRWKLYNEIKALFPDIDIHITYGAETKERRRAFDITKSHVNDAFVMGQFHPKYRSKPVCYKKKRRNNRCLEKFYDAKYIDSRNGKTRTGQELFNGRISRNHKKDSENLHQYRRQKISTGKRTIRKQHYAIQPHDIVIFNGEKFETSGCHNNGTRVILLPQKKSVAIKKLNIYRYAGGYFKSAFNQK

SEQ ID NO: 14661 - protein, 411 aa, unidentified; identical to SEQ ID NO: 6901

SEQ ID NO: 14662 - protein, 419 aa, unidentified; identical to SEQ ID NO: 6355

SEQ ID NO: 14663 - protein, 431 aa, unidentified; identical to SEQ ID NO: 4306

SEQ ID NO: 14664 - protein, 451 aa, unidentified
LSADRNINFYSLLKERRFFLKQKEYAFVVDKTGKQLSPTDINNAWRLIRTKKAKCIKYNPFTIKLNKIVKDEELDQSVFEIGIDDGSSNVGFSILQYCKKDNQITRIKVIQKATMEQRKDVKHLMDVRRGYRRNRRSEKRSRACRFNNRSASKRKERIAPTIKQKRDAVVRVVKYYKKFVNITQIALEDVSIDIRVLTEGQKLKGEEYQKSNRQDDNIRRAVYLRDHGTCQMCEEHKNKMEAHHIHPRRMGGPDSIYNEILLCHDCHLSINGKELQYEEEFYNKINGKLVKTDIAQHVMQGKYYLRNELSSLGELHLTYGGTTANKRNAWNIEKSHSNDAICIGCKDINMKPDTVNVKEYVIKPMRHKRKSNTTSMGFELGDYVELEIRSNKLKKKIKVRGYITAFIKCRNGKEKGKLTYLNLTADDGTIYKRYSLKKCRLLERQKNLRFL

SEQ ID NO: 14665 - protein, 412 aa, unidentified
MVYVISSNGQPLMPTENHAKVRILLKNQKAKVIKKCPFTIQLTYNSTNYTQPVSLGVDAGSKHIGLSATTKDKVLFESDVELRNDIVDLLSARRQNRRARRNRKTRYRKPRFSNRRRKDGWLSPSVQSKVDTHLTAVRKVHEILPVSKIIVEVASFDIQKIKNPAISGADYQKGEQMGFWNVREYVLFRDGHECQCCHGRSKDMILNVHHIESRKTGGDAPNNLITLCESCHTGYHKGTVKLPKTIHRGMSFRDACFMGIMRWAFYNKLKELYSNVSLTYGYITKTIRIENDLPKDHCIDARCISGNPLASSDGTVYYQKKVRDHNRQIHKNTILKGGIRKRNQAPYEVMGFRLYDKVRWKGKNCFIFGRRSTGRMDLRLLNGTKVNSSVGYKNLRLLEMRKNMLIELRKVV

SEQ ID NO: 14666 - protein, 419 aa, Aneurinibacillus sp.; identical to SEQ ID NO: 4563

SEQ ID NO: 14667 - protein, 410 aa, unidentified
MVYVLNRIGQPLMPCKEAKARKLLKNHKARVDKREPFTIQLLFDCENRIQDITLGIDAGSKHLGLSATTEQKELYAADVELRSDIVELLSTRRQYRRTRRGRLRYRAPRFCNRVRSRNKGWLAPSVEQKIKTHLRVVNDVCRILPVSKIIVETAAFDVQKIENPDISGEGYQQGSQLDFWNVREYVLWRDNHECQCCHGKSMDKILNVHHIESRKTGGDSPKNLITLCKNCHDQYHMGKINPNLKCREPLRDAAFMGIMRWSFYNRYGYITKNTRIQHDLPKEHYTDARCISGNPQAEPLGYYFCQKKVRCHNRQIHKANIQKGGIRKRNQAAYLVKGFRLFDKVRYDNQAGFVFGRRANGYFDLRKLNGEVIHRSASYKKLELLDTRKTLLTERRQAVPLKAKAMSIPA

SEQ ID NO: 14668 - protein, 456 aa, Halomonas sp.; identical to SEQ ID NO: 14271

SEQ ID NO: 14669 - protein, 448 aa, Deinococcus sp.
MQSDKPEHAPLGELYMALTRNKETMSNRVFVLNPDTTPLMPCTAKRARKMLEAGKAAVWRRYPFTIILKSEAGKGSQPLALKLDPGSKTTGMALVLDGKHGKKAIWGAELHHRGHAIRDSLTRRRQLRASRRSRKLRHRPARFLNRTRAEGWLPPSLMHRVLTVISWAKRLDRFTMLDSFSMELVSFDTQKMMNPDIQRQDYQRGTLFGTEVRAYLMHKWEGKCAYCGKKEKGLQVEHLLPRSRGGSNRISNLVMSCQKCNAAKGSKALEEFLRRKPAGLKRIQEQQKQSLADTAAVNATKHRLLDELKCFGYPVETGSGAQTSFNRQQQGYDKAHWIDAACVGDSGEQVQVKPLEPLKIKCMGRGNRQMCGTDKYGFPIRHRTRQKVFFGFQTGDIVRAEVLSGKYVGVHVGRIAVRARPNFKLETFDVHAKYLTALHKADGYSYSF

SEQ ID NO: 14670 - protein, 447 aa, unidentified; identical to SEQ ID NO: 5937

SEQ ID NO: 14671 - protein, 429 aa, Arthrospira sp.
MPNYQNYVFVVDTLGQPLSPTHRARARKLLKQGLAAVFRTYPFTIILKKTVENPVNEPLRLKLDPGASVTGIALVNQSRDTVIWGAELTHTGDRIRAKLTAHRVVRRHRRCRKTRYRQARFNNRKRADGWLAPSLKHRVETTLTWVNRLISSCPITDISMELVRFDTQKLQNPEISGVEYQQGVLFGYELREYLLTKWQHQCAYCGGQNIPLEIEHIQPKSQGGSDRVSNLAIACHKCHQKKGSQALEQFLEKKPEILKRLLVQAKAPLKNAAAVNSTRWALFNSLKLTGLPIEIGTGGLTKYNRTVQGLPKTHWLDDADCVGKSTPTRLKIKTHQPLLITCFGRGGRQKAAPNKRLPIRHNPLKPIKGWLTGDIAKHKTHGIGRITLRSRGSFVLTKPDKTQFSVKPIDLKPVFRRDGYLYKFSRVFR

SEQ ID NO: 14672 - protein, 428 aa, Oscillochloris sp.
MVFVLATDRTPLDPTTLHRADQLLNRGRASVFRKYPFTIILHDRTAAESITHPHRVKLDPGSKTTGIAVVAEATGQVVFGAELTHRGQAIRDALRSRRASRRSRRQRTTRYRQPRFLNRRRPAGWLAPSLQHRVDTTLTWITRLRRSIPLTTISMELVRFDTQLMENAEISGVAYQQGTLAGYEVREYLLEKWGRRCVYCGASNTPLQVEHIVPRARGGSDRVANLTLACEPCNTRKGTQTAIEFGHPDVQAQARRPLKDATAVNTTRWAMYQRLVATGLPVEVGTGGRTKYNRTRLGLAKAHWHDAACVGASTPEYLDTRWVRPLLITATGHGSRQMCRMDRYGFPRTGPKGTRVVKGFKTGDMVRAVVTTSTKQGVYRGRVAVRASGWFNITTSTRTIQGIHARFCRHLHRADGYTYPEGVASSHP

SEQ ID NO: 14673 - protein, 440 aa, Clostridium sp.; identical to SEQ ID NO: 8300

SEQ ID NO: 14674 - protein, 408 aa, unidentified
MVYVQDINGKPMMPTTRHGKVRRLLKDKKAVVVNLCPFTIKLMYVTSDYKQEIVLGVDAGTKHVGLSATTKSKELYSSEVILRNDIVDLLSTRRELRRSRRNRLRYRKPRFDNRIKSKRPGWVAPSVKYKVDAHIRVIDNVCSILPISRIVIEVAQFDTQKINNPNISGKEYQEGDQLGFWNVREYVLARDGHKCQHCKGKSKDPVLNVHHIESRKTGGDSPSNLITLCETCHKEYHKGNIDLKIKRGSSLRDAAVMGIMKWRLYEELRSKYNRVSMTFGYVTKYNRIKHGIEKSHVFDAFVISKNFDAIRLGYYYKVRLVRRHNRQIHKQKIPKGGIKRPNQSPFEVFGFRLFDRVMFENSYYFIFARRKTGSFNIRDIDGKNQRDITYKKLKLSRCKRFMVQKEMD

SEQ ID NO: 14675 - protein, 465 aa, unidentified; identical to SEQ ID NO: 5709

SEQ ID NO: 14676 - protein, 450 aa, unidentified; identical to SEQ ID NO: 4205

SEQ ID NO: 14677 - protein, 462 aa, unidentified
PLINIGEGVIYSSICTGLSLQTYQKRKEVPCMVYVLDINGQPLMPTTRHGKVRRLLNSHLAKVVKRCPFTIQLLYQSTKEIQPVSLGVDAGSKHIGMAATTEKKVVYQEELSPRNDVVKLLSARRTLRRTRRNRKTRYRKPRFNNRVHSKHKGWLAPSVEVKIQEHITAIKRICQILPISEIHVEISEFDLQRLKAMEEGRTLPVGTDYQLGEQYDFYNTRQYVLHRDGYTFQCCGTHDNNIKLHVHHIESRQTGGDAPSNLITLCEHCHKALHKGKLELPKGKKRGKTYRDATFMGIMRKTLLERLRKEVDVPASGTYGYITKYWRERAGLEKSHINDAICISKYPYAKPLDTYYLTKAVRNHNRQIHKSNFSKGGIRKRNQAPYLVKGFRLFDKVLYQGKEYFIFGRRATGYFDIRTLDGTKVNKGSISYKKLRIQDTAKAYLKEARAIPHMNKFTCVLA

SEQ ID NO: 14678 - protein, 459 aa, Petrotoga sp.; identical to SEQ ID NO: 6495

SEQ ID NO: 14679 - protein, 466 aa, unidentified; identical to SEQ ID NO: 8215

SEQ ID NO: 14680 - protein, 426 aa, Lactobacillus sp.; identical to SEQ ID NO: 3294

SEQ ID NO: 14681 - protein, 436 aa, Lactobacillus sp.
  VARIANT 49..52: note = X can be any naturally occurring amino acid
MQNRVFVINRQGEPLMPCKQRKCRKLLQFGKAKVVKKEPFTIQLLFGSXXXXGYKQPVSIGVDSGQHHIGLAVTSQDKVLFQGEVSLRQDVKKLLDTRRSYRRGRRDRNTRYRPPRFLNRAKPAGWLPPSVASKVQHNITWIQRIQAVLPKAELHIEVGKFDMAKMVNPGITGLGYQQGDLYGYETAKQYVLDRDNYTCQICHGKTKDPKLKIHHIIYRSNGGTNQVSNLLTVCASCHTQANHQPGGKLYVLQAKQFQSHRSLKGATFMNILRRRLFTAFPAASFQYGAQTTLDRAKLDLPKAHYNDAVTISGIQNIVQQPTAVVMFHQFRKKKRSLHEATARKGRKTPNRVSKRNAKNTKAVSGFHLNDYVQLPNSQRGYISGFSGKTTCYVKAGNHYLTVSPKYKQVSLSKLKVIRHQNNWNVQEISTGNYTMA

SEQ ID NO: 14682 - protein, 301 aa, unidentified
MVYVLSKQGDPLMPTERHGKVRHLLNQGKAKVVRKTPFTIQLLYDTPGHVQPVNLGVDAGTSNVGLLATTEEEVLFEADVQLRTDIVDLLSTRSSLRGSRRNRKTRYRKKRFDNRRRNKGWLPPSVQNKVDTHVKLVNLVTSILPIQNITIEVAQFDTQKLKNPEIEGVEYQQGEQLGFWNVREYVLFRDKHTCQYCNGKTKDKVLNVHHIRSRKTYGDRPGNLITLCKTCHDKLHAENLKDHFSPLDKGFRSEGQMTVMRWFIYNGIKEVYPNTKLTENLTCRKPQGFNPGGKAGLFPRL

SEQ ID NO: 14683 - protein, 408 aa, Bacillus sp.; identical to SEQ ID NO: 6002

SEQ ID NO: 14684 - protein, 450 aa, unidentified; identical to SEQ ID NO: 6257

SEQ ID NO: 14685 - protein, 428 aa, Lactobacillus sp.
MKGKKAMQNRVFVINKHGKALMPCKPRKARILLRDGKAKVLKKEPFTIQLLYGSTGYKQDISVGIDSGQRYIGLAVTSQNKVLFQGEVELRQDVKKLIDTRRTYRRSRRNRKTRYRKSRFLNRIAKKKDNWLPPSVASKVNHNINWIKRLLSVLPKADLHIEVGKFDMQKMKNPEINGEGYQQGDLYGYQTVKQFVLARDNYTCQVCKKKGGKFKIHHIIYRSLGGTNTVDNLITVCSNCHTTKNHQTGILAKWCKDKKKVNKSYKGATFMNILKRRLFLAFPQAKFQYGAWTTLQRADLELTKSHYNDAVAISGIRKVKAKPTSIMMFKQFRKKKRSLHEATARKGRKTPNITSKRNAKNTKYAKGFWLNDYVKIKDSNKKGYISGFMSKGTNVRLRDIFGEYVSNSDKSYTSTKNISLINHSNNWQ

SEQ ID NO: 14686 - protein, 413 aa, unidentified
GVQQTRTNGRRCRRQRRAKANGTISKKCVKHDTAQNGSVSKRAKEIGVIKRHLPGCEKDVLCIGIKNKEAKFSNRTRPEGWLTPTANQLLQTHINLVKKIQKFLPISDVVLEINKFAFMRLDNPNVQKWQYQQGPLYQKANLEETVSEMQEHHCLFCKKKIDHYHHVVPQHKNGSNTIDNIIGLCTQHHDLVHKDATWQKRLAKKKTGLNKKYGALSVLNQIIPALTKELSSLFPKHFFVTNGKSTYDYRAAHGVSKDHWLDAYCIACSVLPNDTCDKTINSRVPYELKQFRRHDRRALNNENMSCVYTFNGKMVATNRHKATEQTTDSLEEFRQRQPNDVCNLKVKEHHPTYRNMNRNYPGSVFLVGNQVHVMQGIAGSKDGEATTYKDTNANSIAAGKCKFVAKNSGILFV

SEQ ID NO: 14687 - protein, 442 aa, unidentified; identical to SEQ ID NO: 2834

SEQ ID NO: 14688 - protein, 406 aa, unidentified
MVYVQDIDGRPLMPTTRHGKVRRLLKSKKATVVNLCPFTIRLLYDTTGYKQEITLGVDTGTKHVGLSATTKSKELYASEVILRSDVVDLLSTRRELRKIRRYRLRYRKPRFMNRIKSKKRGWIAPSIRQKIDSHIRIIGFVYSILPVSKLIIEVAQFDTQKIKNPEISGKEYQEGEQLGFWNVRGYVLARDEHKCQHCKGKSKDPVLNVHHIESRKTGGDSPSNLITLCKTCHKEFHKGNIKLKVNRGESLRDAAVMGIMKWELYDELKSLYPNVKMTFGYITKYNRINQGIEKSHVSDAFVISRNFDSERLGYYYKRKLVRRHNRQIHKMKAPKGGNKRMNQSPFKVFGFRLFDKVMFQGKERFIYARRLRGIFNIRDINGENKKDISYKKLEYVSHGLISIVAG

SEQ ID NO: 14689 - protein, 416 aa, unidentified; identical to SEQ ID NO: 6623

SEQ ID NO: 14690 - protein, 415 aa, unidentified; identical to SEQ ID NO: 3582

SEQ ID NO: 14691 - protein, 406 aa, unidentified; identical to SEQ ID NO: 6445

SEQ ID NO: 14692 - protein, 414 aa, unidentified
MPCSPAKARLLLKEKKAIVVRRTPFTIQLTIATGETKQPVSLGVDAGYKHVGLSASTEKAELYASEVELRQDITDLLSARRALRQSRRNRKTRYRAPRFDNRIRTKRKGWLAPSVENRINAHLSRIEAVLRLLPVTKITVETASFDLQLLKNPDISGKEYQEGEQLGFWNIREYVLCRDGHVCQHCYGRSKDPVLNVHHLESRRTGGDSPGNLITLCETCHKALHRGEITLKAKRGQSFRAEAFMGIMRWEVLNRLKASHPELEVNNTYGYRTKHARIANDIAKSHCADAFCIAGNLGAERLGEFFFQKQTRRNNRQIHKLSILKGGIRKRNQAPFEVNGFRLFDKVACQGEEGFIFGRRSSGFFDVRKLDGTRISAGISYKKLHLLEKRRTYLTEIRKEEVLPPLPEGRGLRA

SEQ ID NO: 14693 - protein, 421 aa, unidentified; identical to SEQ ID NO: 2610

SEQ ID NO: 14694 - protein, 474 aa, unidentified
RVFRQIPFTIQLTYENKPVLQPVTIAEDPGRSNIGMAVVSLSGELLSAAVVQTRNKEIVKLMEKRKQHRRASRNGERKARQRLAKKCHTMIKTGFLMRKLPMYGKDKRVRCNVIKNTEAKFCNRKREDGWLTPSAEHLVRTHINLIHKMQKFLPITDVAIEINRFAFLSLEDPSISGVDFQNGPLKGYDDLNVAIEDLQDGHCLMCNSPIEHRHHIVPRSMQGSNTIGNIAGLCCKCHERVHKDARFEDRLKKKEAGLNKRYAAVSVLNQAIPFICKRLEQEFGKEHVHYCSGRDTSMVRRSLGYHKTKEEQLHEVDAWCIAVLALQHVPEKAPEFDHVHEILQFRRQDRSRIKAQTSRAYYHEGKKIAKNRKKAEGQKDDSLQGWRKRQVERYGEEQTRKMISQLKVKKSIRRYNRLDRLMPGAVFYYQGVRYVMRGQHSNGQYLQAVGMRDKDFPAKKCKIVVHNQGLVFVS

SEQ ID NO: 14695 - protein, 451 aa, unidentified
KRAVLYRVFPTVVILMDVDARTIPDLPSFRIKIDPGSKYTGIAIIRNDTDEFVYAMQIEHRGDAVRAALNKRKNARRNRRSRETGYRRAKWGNRCLSEKDKRSYDSSREDDWLPPSIRSAADNVISWVRRLGRWINLTECSFEAVRFDTQLMEDPDIEGEEYQHGTLFGLEIKEYLMEKFGHTCQYCGGKSGDPVLEWEHMRPKSRGGSDRVKNALLSCSSCNKDKGNRTPEEWLELIKARLPREKEKRKELDEERVELIQKVIDGKPQGGALRYAAWVSSSRRYLEKALFGIFGNVECSSGGRTKYNRTELGYPKEHHYDALCVGTVPEKGYHDRTNGYYLYAKAAGRGTRLRGHLNKCGVIVAKWTDRKKGFFGFQTGDIVVAEVPHKTPKPYKYEGRFVGRVMVRATGSFDIKTTDGKLVTVKEQYCRLLQANSGYQYTMKRAIPLGH

SEQ ID NO: 14696 - protein, 545 aa, Streptomyces sp.; identical to SEQ ID NO: 9474

SEQ ID NO: 14697 - protein, 470 aa, unidentified
MSVFVVGLNGCRLMSVSERKARLLLKGGKASVYRKVPFTIKLNYKTGSTVQPGYLGIDTGSQHIGVSVVQKDGTVLHKEEIGLRDSMSKRKLLESRASSRRGRRYRKTRYRHPKWKPKTKRIYNEKADRKGRHWKKQKNTFTSKRQAGWLPPSLQSKTDHHIQWIRKLLDLLPEGYRLSIELGRFDPARMKDPGIHGELYQKGPQYDYENVRAYVLARDGYTCRVCKKKGGKLHVHHILYRSRGASDDPKYMAAVCSNCHTTENHLPGGILYQWMQDQKKFTRGLRDATFMNILKKRLRKAFPDAVFNYGNITKADREKLELPKSHGNDATAIALVKTEVTSVKDEEPVIHIQQVRRKKRSLHEETPRKGRKEPNRTASRIDKNTKSVTVTKGSGEKKASMTACLFDRVELDGKKGWITGFTGTSCYVKDKEDSYICTSPKYKQVSISRLRILHHCGNWAIGAEKPLGKG

SEQ ID NO: 14698 - protein, 457 aa, unidentified
LDKRKRPLGHCTTKRARQLIEKGRACVYRYYPFTIIIKDLDVRKIEVHHDYRIKPDPGAGYTGISIIEDDRVIAYFELQHRGSEIVDRLQTRRNSHRNRRSRETGYRRCKFPKNGVYETSREKGWLPPSQMSILNNVLNFVRRLEKLLGPCKISIELVKFDMQLLENLDIKGEDYQHVELYNYELKTYLLEKYQHTCQYCANETGDHRLEKEHMVPKSRRGSDSLKNLILACHTCNQKKADRTPEEWLDALKAKKNAGDMDKKRFECLEKVVEGKKVGQELRYAAWTNSMRWRLYNALRELSADGTVSVGIGGRTAYNRNKLGIPKAHHLDALCCTKEVPENGYRNAVQPCLVVKATGRGGRLLGTINDCGIITTKFYQRNKRVNGIQTGDIVQAVVSNGKYKGTYTGRVKVRRRGDFDLVTMAGKKISTTRKTTFKVLQRMDGYEYSFSEAIPLGS

SEQ ID NO: 14699 - protein, 425 aa, unidentified
MVYVISQDGQPLMPTDRHGKIRRLLKSDKAKVVKHCPFTIQLLYGSTDYTQEISLGIDAGSKYIGISATTQNRVLYESDVELRNDIVSLLSARRQNRRTRRNRKTRYRKPRFNNRISCKKKGWLAPSVRQRVNTHLTVVAKVHQILPVTRIIVETASFDIQKIKNPTISGTDYQQGDQLGFWNVREYVLFRDGHVCQCCKGKSKDKILNVHHIESRKTGGDSPDNLITLCKTCHTGYHRGTIKLPKTIHRGMSFRDASFMGIMRWSFYDELKTLYPDVNLTFGYITKNTRIKNNLPKEHYIDARCISGHPLTVSDETYYYQKKVRCHNRQIHKNTILKGGVRKRNQAPYFVKGFRLFDKVMYQGQECFIFGRRSTGRMDLRLLDRTHINASVSYKKLKLIESRKNYITERRTAVPPTGKSVDFPA

SEQ ID NO: 14700 - protein, 450 aa, unidentified; identical to SEQ ID NO: 2935

SEQ ID NO: 14701 - protein, 473 aa, unidentified; identical to SEQ ID NO: 9549

SEQ ID NO: 14702 - protein, 448 aa, Erysipelotrichaceae sp.; identical to SEQ ID NO: 9395

SEQ ID NO: 14703 - protein, 420 aa, unidentified
  source 1..420: note = Archaeon sp.
VPRKVLANNSSDEDQLSGKSGQDLRVPVLNMRGKPLMPTTPRNARVLLKQEKARVVQRSPFTIQLNYPTGEAKQDITLGIDAGYSAIGFSAVTDKKKLICGELTLRKRISKLLEQRRTYRRTRRAKLWHRKPRFNNRSRPNGWLAPSIQHKFDTHLRLIEKLKKILPVTKITVEVSSFDTQKMQNPEIKGVEYQHGELQGYEVREYLLEKWGHKCAYCGKSNVPLEIEHIIPKIRGGTDRVFNLTIACHKCNQKKGDRTAEEFGYPEIQKKAKQTLKSTAFMNIVRWRLANTLNCAWTYGYITKHNRIKLGLEKSHVNDAFVITGGTTQERAVPYMVTQTRRNNRSIQTNRKGFKPSIRKQRYKLQPNDLVKYRKILCRVKGVFNYGKWVRLSTQKGKIINTNIKKVELVKYGGGLQFQF

SEQ ID NO: 14704 - protein, 470 aa, unidentified; identical to SEQ ID NO: 2925

SEQ ID NO: 14705 - protein, 470 aa, unidentified; identical to SEQ ID NO: 2825

SEQ ID NO: 14706 - protein, 472 aa, unidentified
VVGNRLLSIKPLINIGEGVIYSSICTGLSLQTYQKRKEVPCMVYVLDINGQPLMPTTRHGKVRRLLNSHLAKVVKRCPFTIQLLYQSTKEIQPVSLGVDAGSKHIGMAATTEKKVVYQEELSARNDVVKLLSARRTLRRTRRNRKTRYRKPRFNNRVHSKHKGWLAPSVEVKIQEHITTIKRICQILPISEIQVETAEFDLQRLKAMEEGRTPPVGTDYQLGEQYDFYNTRQYVLHRDGYTCQCCGTHDNNIKLHVHHIESRQTGGDAPNNLIILCEHCHKALHEGKLELPKGKKRGKSYRDATFMGVMRKTLLERLKKEIDVPVEGTYGYITKYWRERAGLEKSHIHDAVCISQYPYAKPLDIYYLTKTVRHHNRQIHKSNFSKGGIRKRNQAPYLVKGFRLFDKVLYQGKEYFIFGRRATGYFDIRTLDGTKVNKGSVSYKKLRIQDTAKAYLKEARAIPHMNKFTCVLA

SEQ ID NO: 14707 - protein, 424 aa, Xenococcus sp.; identical to SEQ ID NO: 12141

SEQ ID NO: 14708 - protein, 471 aa, Streptomyces sp.
VPGEGREAHSVVFVLDKHGTPLQPTSPARARKLLKRGRAVVARHTPFVIRLKDRTATGSSVDGVELGIDPGSKRTGIAVFTTNGGGERRGLFAVELAHRGGQIRDRLTVRAAYRRGRRSRNLRYRAPRFNNRSRLRGWLAPSLRHRVETTMSWTNRLARWAPVTAVHVERVAFDTHLMTAGKPLEGVEYQHGTLHGTEVREYLLAKWGRVCAYCGASGVPLNIDHIHPSSRGGSDRISNLTIACARCNQTKNNSPVEDFLINKPKLLAKILTQAKAPLRDAAAVNATRWALWRALDAAFPHAVRTASGGRTKWNRQRTGLPKTHTLDALCVGALNTVTQHPHTVLTALAGGRGRYRRTDPDRYGFPRKTNPRTKTVHGFQTGDYARAIVLAGKHAGTHTGRIAVRSTGRFNIRTAHGLVQGIHYRHIRLLQRADGYAYTIQDEGPPSPSHPAANPSLLRQELRAGRVVPEG

SEQ ID NO: 14709 - protein, 366 aa, unidentified; identical to SEQ ID NO: 11303

SEQ ID NO: 14710 - protein, 453 aa, unidentified
MMTAVLSSIGVRLMPTTCFRARKLIKSGKAVIHSYGPFTIRLTQRENGGTQPIEYCCDTGYQHIGISIKSVKHEYVGVQVDALKDEKKHHQDAMTYRRTRRNGKTRYRAARFNNRKATKSKGWLAPSIRHKKDIHLAQVQKYAKVFPITSIVFEMGEFDTQKLKAIEEGRPAPAGIECQQGEQYGFDDVRNAVFTRDGYRCVCCGRGIEDGAILHAHHLKYRSLGGTNRMGNLVTVCDKCHTPVNHQKGGPLWKLMDKYKVKNFKGATFMTSVRWQMYDELKTMFPDTEIHLTYGSRIKEARRLLGVRKSHINDAYCMGDFHPKHRSEHWLYTKKHRNNRVLSKFYDAKYIDSRDGKKKSGQELFSGRAKRNRELNAENLHRYRQRKVSKGRVSVRRQHYSIQPGDTVIYEDRKCITKGVQNLGTYLKIGEKVVPVKKIRIHHYAGGYIRQRM

SEQ ID NO: 14711 - protein, 420 aa, unidentified; identical to SEQ ID NO: 6017

SEQ ID NO: 14712 - protein, 419 aa, unidentified
MLVYVLKQNGQPFMPTSRFGKVRRLLKEKKAKVVRREPFTIKLLYEPETDVVQECYCGVDTGSKHVGVAVVGNDRVLYQSQTELRDDISRKMERRRDFRQNRRSRKTRYRKCRFLNRRNSIRKDRLPPSVKHKVQAHIDEIEFCKKILPMSDLILEVSQFDTALMRNPSLINEKVRHWGYRQGFDYGYSSRRSAILHRDNYTCQHCGKKNCRLEVHHIIFRSNGGTDDEENLITLCKECHKGVHAGTVVLNKKPKKSKNLKHATHMSIIRSQLLKIYPDAIETFGFVTSENRNHLNLEKDHYIDACIIASGGLEFEPSATVYYKRRMGKGEYQLIRKCCGKEYVCKGKILGFKSFDKVEYFGVKCFIWKRRNNGYATLGDIFNNILDFSYLPRGYKTPKMALLKRISSRKTVNIICYTR

SEQ ID NO: 14713 - protein, 380 aa, unidentified
LVSKYPMVIQLKKEIPENEICKDEIRCGIDDGGLHVGIALVQKCKTKNKVVFKGTIEQRNDVKHLMEVRRSYRHYHRYHKRYRPARFDNRKSSKRKKRIAPSILQKRQAIIRVIHWLNKWINITNYWLEDVSIDIRALTDGYKPYRWQYQKSNRLDENIRKAAILRDGGKCMECGKSNCRLEVHHIKPRRRNGSNTLDNLITLCESCHQKTEGQEELYMDRYFSLLKSSDNKNLNYAQHVMIGKMWLRKQLSGLGVLYLTSGGDTANKRIDWNIEKSHANDAVCITDLRPDTCDVKEWTMKPMRRQSKAKTDHVLGIHHRDLVEYTFKNGETHRGYVTALYPEQKAINFQSPTKHCKKVNARKCKLLWKYSKIYWFENAS

SEQ ID NO: 14714 - protein, 512 aa, unidentified
MSTVYVLNKDGKPLMPTTRCGHVRRLLKEQKARVVTSKPFTIQLLYETNDVVQPLYLGIDPGRTNIGVAAVKTDGTAVFTAHLETRNKEIPKLMQGRKKARRARRTNGRRCRRQRRAKANGTISKKCVKQTTAQNGSVSKRAKEIGVIKRHLPGCEKELLCIGIKNKEAKFSNRTRPEGWLTPTANQLLQTHINLVKKIQKFLPISDVVLEINKFAFMQLDNPNIQKWQYQQGPLYQKASLEEAVSEMQEHHCLFCKKPIAHYHHVVPQSENGSNTIGNIVGLCTKHHDLVHKDATWQKKLAKKKTGLNKKYGALSVLNQIIPALTKELSSLFPKHFFATNGKSTYDYRAAHGVSKEHWLDAYCIACSVLANDVCDSNINSHVPYELKKFRRHDRRALHKENMSRVYTLNGKSVATNRHKAIKQTTDSLEEFRQRQPNDVYKLKVKEHHPEYRNPKRNFPGCVFLVGKHTHVVQGTSGSHNSKADGYYDTNGNSYSSGKCKFVAKNKGIVFA

SEQ ID NO: 14715 - protein, 460 aa, Fischerella sp.
MRGESKNKAGLNSSCDKSNQRINNTTKPALFSSQYARQNFVFVLDTNKQPVNPIPPKRARELLTKQKAAVYRMYPFTLILKHAVPNPTPKPLTIKLDPGSKFTGIAVLSGDDVIWVAELEHRGWQIKNALESRCSLRRSRRHRKTRYRQPRFDNRKRFEGWLPPSLMHRVLTIETWVKRLCRYAPITQIVMELVKFDTQALQNPEIDGVEYQQGELFGYEVREYLLEKWGRKCAYCDKEGVLLQIEHMHPRAKGGSNRVSNLTLSCERCNTKKGTKSIDEFLKKDASRLEKIKQQAKKPLKDAAAVNATRWALFRTLKDILLTTTGTGGRTKYNRVRFELPKQHWIDAACVGQVERLNLLTQQPLRIKCTGWGTRQMCGTNKYGFPIRHRERKQVHFGFRTGDIAKVVVTEGSKIGQYVARVLCRARGSFDIVTKSGRVGDIHYRFCKTIHKKDGYSYAF

SEQ ID NO: 14716 - protein, 431 aa, unidentified; identical to SEQ ID NO: 5274

SEQ ID NO: 14717 - protein, 456 aa, unidentified; identical to SEQ ID NO: 4174

SEQ ID NO: 14718 - protein, 456 aa, unidentified; identical to SEQ ID NO: 7423

SEQ ID NO: 14719 - protein, 465 aa, unidentified; identical to SEQ ID NO: 5709

SEQ ID NO: 14720 - protein, 429 aa, unidentified
MSTSVFVLDKRHRPLMPCRPARARRLLRAGRARVVKRFPFVIRLVDRTVEQSEVQPVLIKLDPGSRETGAAVVRDDEKKRHHALAFFVIKHRGGAIRDALKARSAFRRRRRSQNFRCRSPRFLNRVKPKGWLPPSLRHRVETTLSFVRRMCRYLPVSGIATELVKFDSQKLQNPEVSGVKYQQGTLFEYEVREYLLEKFGRKCVYCGAEGVPLNIDHVVPRAKGGSNRVSNLVLACVSCNQKKGARSLEDFLKGKPEVLARVRRELKTPLRDAAAVNATRWVLFNELKATGLPVETGSGALTKLNRHAFGVEKEHWLDALCVGRLNGVVTRKGLNVLEIRCMGRGSRQRTRLTKYGFPRGYLMRQKCVHGFATGDMVEANVPKGKKAGLWRGRVAVRVSGSFNIQTPKGVIQGVGWKHCRLISHNDGYG

SEQ ID NO: 14721 - protein, 380 aa, Arthrospira sp.; identical to SEQ ID NO: 3196

SEQ ID NO: 14722 - protein, 479 aa, unidentified
MQKLDRRNTYTPPNTAPVRCNCDPSLKVPRGKDGVVSLKTLSNNSEEHLLQPAGGHKADTLVFVINKNGNPLMPCKPAKARHLLEAGRAEVVQQTPFTIRLLWDCEENTQDTTLGIDAGYTTVGFSTVTSDRELIAGELTLRSDIKRLIEKRRTYRRTRRARLWHREPRFNNRGIPKGWLAPNIQHKLNNHIKLIEKLKKILPITKIVIEVASFDAQKMQNPEISGIEYQQGELQGYEVREYLLEKWGRKCAYCGKKDVPLEIEHIVPRSRGGSDRVSNLTIACHECNQAKGNQTAGEFGHPEIQSKAEKTLKATAFMNAVRSRIVDLLNCNQTYGYTTKYNRIKLGLEKSHATDAFVIAGGNGQMRSDSIIISKQVRRQNRSLYKANLLKGGRLKRNTVKEVKGFRRYDKVKYNNNECFIHGLRSSGYFGLRTITGDQIGASVNSKKLTLLKRAKGVIQEVCAIPARPCGLGLLAQVR

SEQ ID NO: 14723 - protein, 493 aa, unidentified; identical to SEQ ID NO: 2644

SEQ ID NO: 14724 - protein, 430 aa, unidentified
MPKVYVLNRHGRPLMPCTPAKARHLLDAGKAKVRHRTPFTIQLLYGSTGYTQEVILGVDAGSKTIGLSAATETEELFSAEVKPRNDVVELMSARRQFRRARRNRTTRYRKPRFDNRVRSKHKGWLAPSVEVKIQEHMTAIRRACAILPVSKVVVETAEFDLQLLKAVAEGKPVPQGEDYQKGEMYGHYNVRQYVLWRDSYTCRICGAHGSVRKGVPLHVHHLESRRVGGDAPDNLVTLCTACHDKLHKGIIMAADIKKRKRRSTRDATFMGIMRMTLLRRLREQLPVPVVETRGYITKATRENLLVLPKSHANDALAIAHGPQGFRAEHLPNIRQADRLYTIRPVRHHNRQLHKATILKGGVRKANQAEKYICGFRLYDKVLYNGIECFVWGRRTSGSFLLRQLNGEKVKDGVSYKHLKLLERSQSYLVA

SEQ ID NO: 14725 - protein, 470 aa, unidentified; identical to SEQ ID NO: 2825

SEQ ID NO: 14726 - protein, 419 aa, unidentified
MVYVLDINGQPLMPTTRHGKVRRLLNNHLAKAVKRCPFTIQLLYQSTKETQPVSLGVDAGSKHIGLAAATEKKVVYQEELIPRNDVVKLLSARRALRYSRRNRKTRYRKSRFNNRVHSKHKGWLAPSVEAKIQEHITAIKRICQILPVSEIHVETAEFDLQRLKAIEEGKPLPVGTDYQLGEQYDFYNTRQYVLHRDGYTCQCCGTHDNNVKLHVHHIESRQTGGNAPNNLITLCEHCHKALHEGKLKLSKGKKRGKSYRDATFMGITRKTLLERLKKEVDVPVTGTYGYITKYWREKAGLEKSHINDAVCISKHPYVEPLDTYYLTKAVRHHNRQIHKVNFSKGGIRKRNQAPHLVKGFRLFDKVLYQGKECFIFGRRVSGRMDIRLLDGIRINASVGYKNLELLELRKAYLTERRTC

SEQ ID NO: 14727 - protein, 506 aa, unidentified
MVAVLSNVGKPMMPTTEYKARKLIEKGRAIPYQYKPMFTIMILDRSGGYTQPIELKEDTGYEHIGISVCSQKHEYERKEVITLLDEHEKHHDALMYRRTRRNRLGYRPPRFDNRKRENDWIPPSLQHKIDIHLYWFNQYAEVLPITDAVFEIGTFDTQRLNAIEKGEKRPYGDDYQKGEQADFYTLRDAVFTRDDYTCIVCGKGIQDGAVLRTHHIGYRYGDRSNRMSNLVTVCDHCHTTKNHQEGGALYNLKSPTKKKANAAFMNVVRQRIIDGPKKSHPEINISGAFCSETKMSRKNLRIEKSHTNDAYAMGAFHPKHRCKEILYQKIRRNNRILSRFYDAKYIDRRDGSTKTGKQLSSGRTNCNHKLDSENFRVYRGKKIQKGRTATRQQSYEFKTKDIVLYQGQRYVVKGTNNKGQNVQLYLNITADLKDLTIKTKNKRKTADLNCIEIGDKVFTEFNGKKKVFTIKNIDPITNQVSLQADLSTKPSELKLVKYNNGYKQIK

SEQ ID NO: 14728 - protein, 406 aa, unidentified; identical to SEQ ID NO: 3980

SEQ ID NO: 14729 - protein, 426 aa, unidentified; identical to SEQ ID NO: 3614

SEQ ID NO: 14730 - protein, 421 aa, unidentified; identical to SEQ ID NO: 11007

SEQ ID NO: 14731 - protein, 407 aa, unidentified
LNNHLAKVAKRCPFTIQLLYQSTKETQPVSLGVDAGSRHIGLAATTEQKVVYQEELVPRNDVVKLLSARRALRSSRRSRKARYRKPRFNNRVHSKHKGWLAPSVEVKIQEHITAIKRICQILPISDIHVETAEFDLQRLKAMEEGRPLPIGTDYQLGEQYDFYNTRQYVLHRDEYTCQCCGTHDNNVKLHVHHIESRQTGGDAPNNLITLCEHCHKLLHAGKTILPKGKKRGKSYRDATFMGIMRKTLLERLKKEVDIPVTGTYGYITKYWREKAGLEKSHINDAICISKYPYAKPLDTYYLTKAVRHHNRQIHKSNFSKSGIRKRNQAPYLVKGFRLFDKVLYQGKSYFIFGRRDTGFFDIRTLNGAKVNKGSISYKKLRIQDTANAYLKEIKAIPHMNKFTCVLA

SEQ ID NO: 14732 - protein, 459 aa, unidentified; identical to SEQ ID NO: 11427
  source 1..459: note = Cyanobacteria bacterium UBA9226

SEQ ID NO: 14733 - protein, 496 aa, unidentified
LVRGSQRCDGCNKPGQPWREELLGHACLSTSLAPYGVPKGRGAMAVFVLDRHRKPLMPCSEKRARLLLACQRAVVHRFEPFCIRLKDRSVQESTLQPVVLKLDPGSTTTGIALARVESTEIGEVHHALHLAHLEHRGEEVKMHLDKRRGFRRRRRSTDLRYRVPRFLNRRRTSGWLAPSLQSRIGNVLTWAKRYQRWIPLCRIEVERVKFDMQLMQNAEVFGVHYQRGELAGWEVRSYLLEKYHRQCAYCGATNRPFEIDHVLPRSRGGSHRVSNLVLSCHSCNQAKGNQTAAEFGHASVELQAKHPFKDAAAVNTTRYALVERIGRLGLPIGTWSGGRTRWNRDRFGIGKDHSLDALCVGDIIGVRRGSMRTVKVKAVGRGRYGRTLVDGSGFPGGYLMQHKRVQGFQSGDLVCAEVPEFARNKPLKTHGIHRGCIAVRETGSFRVASIDGINAKYCRLLQRADGYEYTLVLTATAGSEIPCPHPRKEDLLPLQN

SEQ ID NO: 14734 - protein, 466 aa, unidentified
MSTCACVLSKNGERLMPTIRLGKVRHLLKDGKAKIIKHHPFTIQLLYDSKTDTQPIEICEDVGYNYIGISMKSESHEYVSVQYDTLQDEKDCHDSCRKMRRIRRNRLRYRKPRFDNRKRNKDWLAPSLEHKKELNVNVIKMYCEVVPITHVTVEVGSFDTMLVKAIQEGKAIPEGADYQKGPRYNLATLREAVFYRDNYTCKVCGRKAKNDSAILHVHHMFYWKGRHGNSLNELLTVCEKCHTPANHQKGSKLYGFGENIKFANLSGAAFMNTVRWQIVNELYATFGKLFVTFTYGAMTKEKRIALHLEKCHNNDAYAMGNFHPVDRCAFEHYKKVKRNNRILEKFHDSQYIDIRTGKVANGSSLFNGRINRSHKKDSENLHKYRGKRTRKGYRALRRKKVALNPGDLVSLNGEILVVHSTHAGKNGYVGVEFKTPSKSGKKSASLKKLKIVKTSNSMHSAWTKVS

SEQ ID NO: 14735 - protein, 393 aa, Clostridium sp.
MLQSGQAKVIKRCPFTIQLNYDSGHQTQEISLGIDAGSKHIGVSATTKIKVLYEADVELRNDIVDLLSSRRELRRGRRNRKTRYRQAKFNNRRRGNGWLAPSIRQKIGTHLTVVENICKILPISRIMVETASFDIQKIKNPDIQGAEYQQGDQLGFWNVREYVLFRDGHTCQCCKGKSKDKILNVHHIESRKTGGNAPNNLITLCKTCHTGYHKGTVQLPKAIKRSMRFKDAAFMGIMRWAFYEALKQQYEPVGTPVHNTYGYITKHTRIAYNLPKEHYVDARCISGNPEASSNGEYYYQKKVRCHNRQIHKLTVLKGGIRKQNQATYLVKGYRLFDKVSYQGKGYFVFGRRQSGFFDIRTLSGEKVNKGSLSCKKLKFIATRTYYLTERRAV

SEQ ID NO: 14736 - protein, 374 aa, unidentified
VTDVSTIYVLNKDGKPLMPTTRCGHVRYLLKEKKARVAASKPFTIQLLYETDDVVQPLYLGIDPGRTNIGVAVVKTDGTAVFTAHLETRNKEIPKLMQGRKKARRARRTNGRRCRRQRRAKANGTISKKCVKQTTAQNGSVSKRAKEIGVIKRHLPGCEKDVLCIGIKNKEAKFSNRTKSEGWLTPTANQLLQTHINLVKKIRKFLPISDVVLEINKFAFMQLDNPNVQKWQYQQGPLYQKANLEEAVSEMQEHHCLFCKKPIAHYHHVVPQSENGSNTIGNIVGLCTKHHDLVHKDTAWQLLKTLLSVEYDDIVAAIMMPVMRDDFQEAIAALPDLNEKEGLDIRPEDIEKLVNLMEGPSLAPRTSGIDAIIR

SEQ ID NO: 14737 - protein, 426 aa, unidentified; identical to SEQ ID NO: 3614

SEQ ID NO: 14738 - protein, 414 aa, unidentified; identical to SEQ ID NO: 2588

SEQ ID NO: 14739 - protein, 431 aa, Citrobacter sp.
  VARIANT 431: note = X can be any naturally occurring amino acid
MNRVFVLGKTGQALMPCHPARARQLLQSKKARVKRLYPFTIQLTQRSDGYIQPVELKFDPGSKQTGVGLVLHGKNRLSAIYAAVLTHRGQEIKSNLDSRRMIRRARRNRKTRYRQERFLNRVRSKHKGWLAPSVHSRVDNIVEWSKRFMRLSHVDFITVESVKFDMQKMESAAVEGLEYQRGTLFDYEVKEYLLEKYHYSCVYCGIKNVPFEKEHVVPRSRGGSNRISNLVLSCRSCNEKKDNLPIEEFLKDNPALLKKIKAQLKSSLKDAAAVNITRKQIVKELSDLNVPVLTGIGAETKYNRVSQGYGKEHYIDALCAGTTGTKVYIPSKLKPLLIKKERRNNRQMCLVDKYGFPRGKAKGSKIVHGFKTGDIVKAVVLKGKKKGVYKGKVAVRSSGSFNINVKQGRIEGIGWKNCVMLHRFDGYSYTX

SEQ ID NO: 14740 - protein, 406 aa, unidentified; identical to SEQ ID NO: 3980

SEQ ID NO: 14741 - protein, 443 aa, unidentified; identical to SEQ ID NO: 11672

SEQ ID NO: 14742 - protein, 430 aa, unidentified; identical to SEQ ID NO: 11913

SEQ ID NO: 14743 - protein, 505 aa, unidentified
VYDRSSRRTPERFSNSRPCKVSAMQAKGKAPNAGIAPAKSAGGAGRIHRRGERLPFKEKGSDPMAQRVLVLDTNRRPLSPCHPARARQLLKRGKAAVFRRVPFTIILKYVPEGEPTPVRVKLDPGSRTTGIALTMRRRGRDEVVWAAEIEHKGLEVKSKLEKRRALRRGRRNRKTRYRAPRFLNRRRRKSWLPPSLESRVGNVVSWVNRLRRWSFVGGIAMELVKFNTQAIQNPEISRAEYQRGTLFGYEVREYLLEKWERRCAYCGTENVPLEVDHIVPRSRGGSDRVSNLTLACHNCNQKKSNRPVEEFLCRKPEVLKKVLAQAKASLRDAAAVNATRFALLERLRATGLPVECGSGAQTKYNRIAQNYPKKHWIDAACVGKSGNDVRLDPEMNVLLIKAMGRGSRQMCRMDRYGFPRTGPKTARSVHGFRTGDLVRADVPKGRHTGIHTGYAAVRAIGSFRVGNTDGVSWKHCRLLQRGDGYQYNGTHQPKGLVGTSNSAGV

SEQ ID NO: 14744 - protein, 447 aa, unidentified; identical to SEQ ID NO: 3626

SEQ ID NO: 14745 - protein, 423 aa, Microcoleus sp.
MSNYVFLIDANKKPMNPVHPSHARKLLDSGKAAVFRRYPFTLLLKRVVENIVVHPLTLKIDPGSKVTGISLVTDRNEAIWGVELEHRGQQIEDALQSRRAVRRGRRNRNTRYRQARYFNRKRPQGWLAPSLMHRVLTTETWIKRLRKFAPIGDIKLELVQFDTQQLENPEISGIEYQQGELQGYEVREYLLEKWERKCAYCDAENIPLQIEHIQPKAKGGSNRIYNLCLACEKCNLKKATQDIRDFLKGKSDLASRILSWAKSPLKDAAAVNSTQWKLFKTLKVTGLLVTTGTGGQTKFNRTRLGLPKEHWIDAACVGVTPSLKILTTRILRVKATGMGGRQRCQTDKFGYPQKHRPLRPIFGFCTGDIVRADVPKGKYKGTFTARVCPMSDGRGEFVIDKKRRSIRLEYCTTAHRKDGYSYA

SEQ ID NO: 14746 - protein, 470 aa, unidentified
  source 1..470: note = SAR202 cluster bacterium
MHYTNYQPTPVYSSDYEPLMPCHPARARKLLRNGRAAPHHVRGIFGIRLLDRSRAQCEVQDTSLNVDAGSDISGFAVVQDDDNGQRTVLALVELRHRAKAIKSTMTGRSQHRRSRRGRLRHRAPRFNNRRREPGTLPPSVDSIHLDAMRVVSTMCRIYPVSRFSIERYKFDTQLMNNPDIRGVEYQRGTLFGWQVRAYIFNRDQGRCVYCRRRNVRLELDHIRPRAIGSDRVDNLVTCCRDCNLAKANRPIEEFLADRPELLTRILDRLQRSDLASAAHINTALPAIVRDLWTLGRPISSANAASVSWKRRQLNMPKNHCYDAALQGQDFSAIVSLPSRILVLRPNNGRSKQKANVDRHGTPIGRPFREHQRLPKRLRRRRNPAPGHAGHHQRHGAHLISTGDTVTLEHHAQQYTGRAVIKSGGTRVAIHGTKPEISAQISQCRRIARNPRWTIRHASPAQQSHQASTVK

SEQ ID NO: 14747 - protein, 404 aa, unidentified
VKTYPFTIRLVDRLLENSAVQPVAVKVDPGSKQSGMAVVRDDGKAHHHALFFINLVHRGKVIRDRLTGRRAFRHRRRSANLRYRAPRFLNRKRRKGWLPPSLQHRVDTTMSWVKKLRKLVPVTALWVENVKFDTQKLQNPEVSGVEYQQGTLFGFEVREYLLEKFGRRCVYCGAENTPLNIDHVVPRAKGGSDRVSNLVLACTDCNQKKGAQPLEAFLKDKPQQFERIRRQLKAPLRDAAAVNATRWALFNALKQTGLPVATGTGAQTKFNRKAFGIPKEHWLDALCVGRINGADHPEGMGVLQVRCTGRGSYQRTRLNKYGFPRGYLMRQKRVHGFATGDIVKAVKKGVTFQGRVAVRESGCFVLQTPDGKVDGIHWRHCRLISHNDGYGYAWLRPALHSSSV

SEQ ID NO: 14748 - protein, 406 aa, unidentified; identical to SEQ ID NO: 3795

SEQ ID NO: 14749 - protein, 465 aa, unidentified
MSTCACVLSKNGERLMPTIRLGKVRHLLKDGKAKIIKHHPFTIQLLYDSETNIQPIEICEDVGYNYIGISVKSQSHEYVSVQYDTLQDEKDCHDSCRKMRRIRRNRLRYRKPRFDNRKRNKGWLAPSLEHKKELNVNVIKMYCKVVPITHVTVEVGSFDTMLVKAIQEGKAIPEGADYQKGPRYNLATLREAVFYRDNYTCQVCGREASEGAILHVHHMFYWKGRHDNSLSELITVCEKCHTPANHQKGGKLYGFGEDIKFANLSGAAFMNTVRWQIVNELYAAFGKPFVTFTYGAMTKEKRIALHLEKSHNNDAYAMGEFHPNCRCTFEHYEKVRRNNRILEKFYDSRYIDIRTGEIATGKELFNGRINRSHKKDSENLHKYRGKRIRKGYRALRRKKVALNPGDLVSLNGEILTVHGTHTNKKGAVNVEFKTPGKSGQKSASLKKLKIVNTTDSMHSAWEKIS

SEQ ID NO: 14750 - protein, 442 aa, unidentified; identical to SEQ ID NO: 3234

SEQ ID NO: 14751 - protein, 424 aa, unidentified; identical to SEQ ID NO: 3351

SEQ ID NO: 14752 - protein, 416 aa, unidentified; identical to SEQ ID NO: 8483

SEQ ID NO: 14753 - protein, 431 aa, Escherichia sp.; identical to SEQ ID NO: 3801

SEQ ID NO: 14754 - protein, 494 aa, Leptospirillum sp.
MLPQSRALEAADADNREGQDETVGGKGAIPKPVANIPEGRRFARSALRPQGQCNVRFDEGFVQVFVLDKKKKPLMPCHPARARELLREGRAVVHRIAPFTIRLKDRIGGETQTIRVKLDPGSKTTGLAVVREEETDGEKTAHVLFQAEIHHRGSAIKKKLDQRRAFRRRRRSQLRYRTPRFDNRTRPDGWLPPSLRHRVDTTLAWVERLRRLVPVSELSQELVRFDMQKIENPEISGVEYQQGTLAGYEVREYLLEKWGGTCAYCGSENVPLEIDHIHPRSLGGSDRVSNLTLACRSCNLKKGNRPVGEFLAKTPERLSTILARAKAPLKDAAAVNATRWVLFQALKATGLPVETASGGRTKWNRTRLLLPKTHALDAACVGKVDRIEGWNRPCLSVKATGRGSYRRTRLDAFGFPRGSLTRTKAHFGFQTGDRVMAIVTKGKKNRNLCRTGGSEKLRQFQHPNRLRSGAGDFLQGLSASPAGRRVRIFYPSDH

SEQ ID NO: 14755 - protein, 443 aa, Anoxybacillus sp.; identical to SEQ ID NO: 4769

SEQ ID NO: 14756 - protein, 456 aa, unidentified
MAIFVLDKKKQPLMPCSEKRARLLLARGRAVVHKRYPFTIRLKDRVGGETQPLRLGIDPGSKTTGLALMREPDSQQRHVLCLFELIHRGFQIKKALQQRAAFRRRRRSANLRYRAPRFNNRIKPKGWLAPSLQHRVDTVTAWVKRLSRLAPVTAISQELVRFDTQKLDNPEISGVEYQQGTLLGYEVREYLLEKWGRECAYCGTTDTPLEIEHVVPRSRGGSNRVSNLTLSCHPCNQSKDALSLVDFFATDKGLKKRLKANGHTANARLERVQRQLKQPLRDASAVNATRWALFSALNATGLPVTVASGGRTKYNRQRLNIPKSHALDAACVGAFEKLHDWTVPTLTIKAMGRGSYQRTRLTKHGFPRGYLMRQKQVHGFQTGDMVRAIVPTGKKAGTHTGRVAIRKTGSFNIQAEYGAVQGISHKYCTLIQRGDGYGYHFTLFSNLTGGAGQAVA

SEQ ID NO: 14757 - protein, 431 aa, unidentified
MMNVVYVLSQEGKPLIPTERHGKVRRMLKEGKAKVVKAKPFTIQLMYETTEYTQPATLGLDSGYSNVGFSAVNAAKEWIAGELSLLQCQVERNKERSRYRRQRRSRLRYRKARFNNRKKPEGWLAPSLQNKLDTHIRLVDKISALVPISKVVVEVAAFDIQEIKNPNIEGKGYQQGEQYGFWNLREYIFHRDNHQCQNPDCKNKAKEKVLQVHHIGFWKGDRTDRPGNLITLCTKCHTPANHQSGKFLYGWEPKVKSYKPETFMSVVRWKLVNAIGCEHTYGHITKTLRIESGLEKSHVNDAFCIAGGTSQQRVDPLQIKQIRRNNRSLELFYDARYIDIRTGEKVSGGELFSGRRARNINLNGPNLRIYRGKKMSKGQRRIRKTRYAYQPCDTVLFNNQKYAVKGIQNKGVYIKLKDLAKPVKTELVSPL

SEQ ID NO: 14758 - protein, 278 aa, unidentified
LTHQFKKGVPVMVYVLDKNGQPLMPTDRHRKVRLMLQSGQAKVIKRCPFTIQLNYDSGHQTQEISLGIDAGSKHIGVSATTKIKVLYEADVELRNDIVDLLSSRRELRRGRRNRKTRYRQAKFNNRRRGNGWLAPSIRQKIGTHLTVVENICKILPISRIMVETASFDIQKIKNPDIQGAEYQQGDQLEFWNVREYVLFRDGHTCQCCKGKSKDKILNVHHIESRKTGGNAPNNLITLCETCHTGYYKGTVQLPKAIKRGMRFKDAAFMGIMRWAFYE

SEQ ID NO: 14759 - protein, 421 aa, unidentified; identical to SEQ ID NO: 11150

SEQ ID NO: 14760 - protein, 457 aa, Anaerostipes sp.; identical to SEQ ID NO: 2712

SEQ ID NO: 14761 - protein, 420 aa, unidentified
MQYVYVLNKHGEPLMPCSPRKARLLLKQKKACVIKRTPFTVKLLYGSTGYKQPVTLGVDAGSKHIGISATTEKHELYREEATPRNDVVDLLSARRAFRRSRRNRKTRYRAPRFDNRVHSKHKGWLAPSVEVKIQEHITLVEHVCRILPVTLVRVETAEFDTQRLKAMLEGKPLPVGTDYQLGEMYDEYNVRQYVLKRDNYTCQCCGAHSTKTKGVKLHVHHIETRRTGGNAPNNLITLCTACHKALHAGKVTLDGKKRGKPLKDAAFMGIMRKTLMERLRKELKIPVQGTYGYITKCLREKNGIPKSHTNDARCISKNPLAIPCDTCYYTKAVRHHNRQLHKATILKGGIRKANQAPYIVKGYRLWDKVAYNGTECFITGRRTSGYFALKELDGTVVSNSISYKKLRLLEAATNYITERK

SEQ ID NO: 14762 - protein, 413 aa, unidentified; identical to SEQ ID NO: 8260

SEQ ID NO: 14763 - protein, 489 aa, unidentified; identical to SEQ ID NO: 5672

SEQ ID NO: 14764 - protein, 512 aa, unidentified
MSTVYVLNKDGKPLMPTTRGGHVRHLLKEQKARVVQSNPFTIQLLYETNDAVQPLYLGIDPGRTNIGVAVVKADGTAVFTAHLKSRNKEIPKLMQDRKRTRRARRTNGRRHRRQRRAKANGTISKKCVKQTTTQNGSVSKRAKEIGVIKRHLPGCEKDVLCIGIKNKEAKFNNRTRPESWLTPTANQLLQTHVNLVKKIQKFLPISDVVLEVNKFAFMQLDNPNIQKWQYQQGPLYKKESLESAVSEMQEHHCLFCKKPIDHYHHVVPQHKNGSNTIDNIVGLCTKHHDLVHKETAWQEKLAKKKTGLNKKYGALSVLNQIIPALTKGLSSLFPKHFFVTTGKSTYDYRAAHDVCKDHWLDAYCIACSVLPNDVCDSNINSHVPYELKQFRRHDRRALHKENMNRVYTLNGKKVATNRHKAIEQTTDSLEEFRQNYPNDVCKLKVKEHHSEYRNPKRNFPGCVFLVGKRTHVMQGTSGSHNGKADGYYDTNGNSYPFGKCKFVAKNEGIVYA

SEQ ID NO: 14765 - protein, 585 aa, unidentified
MILTPFAPVALAQVAALHQVLVTLQVQVYLIRIYSNAHHKRIISERRFIMKYVYIIDKHGKPLMPTTRFGHIRKLMKSGKAVPISNNPFTIRLKYDTTSYTQDLWEGIDTGRQNIGDAVSDKDGKNVYLADVCTNNKSIKSNMQDRAGFRRERRRHDRQSKQRKAKHDGTEIKNGDDDTIRTKYFCKSVKISYPAADEAVTHKVIRGKEGKFANRKRPDGWMTPSAKQVIQITINEIKQTAKILPITHINLERVSFDFQKLENQDIRKWEYGKGILYGYKTYKDYIWDKQHGKCACCGQPITQYHHIIHRAEGGIDNVKNIIGLCDACHDEIHGSQDAEDKLKELKEGVRQRYYIGLLNSVIPALIEEISAYCKKNGIEFMVTDGKMTADTRKEHGLQKDHCTDAYAISLAGRNITTVSVSDTIYEKRRFKKKSCNIIAARNQRVYKFCGKIIAYNRHKATNQKTDSFEEYMAKYTKTHTEKECRQHVAKIEIIPAKRTYTYHKNGLIAPMHTGDIVRYEKHNKIKRNTKFETFVATSVKMSGEGHIKYGDKCNSKKIKFCRPIGSGCLQVIHALCTEEYLKSLA

SEQ ID NO: 14766 - protein, 555 aa, unidentified; identical to SEQ ID NO: 9226

SEQ ID NO: 14767 - protein, 416 aa, unidentified
MVYVLDKNGHPLMPTNRHGKVRRMLRSGNAKVIRRCPFTIQLLYNGTDYTQPVSLGIDAGSRHIGVSATTETKVLYEADVTLRNDIVDLLSTRREARRTRRNRKTRYRKPRFNNRTRKDGWLAPSVQQKVDTHLATVRKVTEILPVSGITVETASFDIQKIKNPDIAGTGYQQGEQLDFWNVREYVLFRDGHKCQCCKGKSKDPILNVHHIESRKTGGNAPNNLITLCETCHKGYHNGTVSLPKSIRRGMKFKDATFMGIMRWAFYNKVKETYEPLGIRVNMTYGYITKNTRIEHNLPKNHFIDARCISGHPDAISNGIVFYQKKVRCHNRQIHKQKILKGSIRKRNQAPYLVKGFRLFDKVTAKGREWYINGRRLKGAFILKNLDGDTLEITPSKIRFVAQQHSFIIERKMLGEC

SEQ ID NO: 14768 - protein, 454 aa, unidentified; identical to SEQ ID NO: 8101
  source 1..454: note = uncultured beta proteobacterium

SEQ ID NO: 14769 - protein, 470 aa, unidentified
MSVFVVGLNGCRLMPTSEREARLLLKHGKASVYRKVPFTIKLNYKTGSTTQPGYLGIDTGSQHIGVSVVREDGTVLHKEEIGLRDSMSKRKLMESRSSLRRGRRHRKTRYRHPKWRLKAKRVYYETPDRKGRHWKKQKITFASKRPQGWLPPSLQSKTDHHIQWIKKLQDLLPDGYRLSIELGRFDPARMKDTEIHGDLYQKGPQYDYENVRAYVLDRDRYTCQVCGKKGGKLHIHHILYRSHGATDNPQYMATICSDCHSTENHQPGGILYQWMQEQKKFTRGLRDATFMNILRKRLMKAFPKATFTYGNITKADREKLKIPKSHGNDATAIAIVKTGIMTVKDNEPVIYIQQVRRKKRSLHEETLRKGRKEPNRKASRYNKNTKAVTVTKRKNKKRISITGCLFDRVELNGKKGWISGFTDKSCYIKDENDQYIRISPKYKQVSLSKLKILHHCGNWVIGARRSLGKG

SEQ ID NO: 14770 - protein, 416 aa, unidentified
MVYVLNIQGNPLMPCKEAKARRLLKNSLAKIIKRTPFTIQLLFECENKTQDITLGIDAGSKTIGVSASTEKQELYSAEVVLRNDIVDLISTKKQNRRTRRNRLRYRKPRFNNRIKFKKKGRLAPSVSQKIETHLNVIKKIHKILPISKIIVETASFDIQKIKNPNITGVEYQQGEQLGFWNVREYVLHRDGHTCQHCKGKSKDKILNVHHIESRKTGGDSPSNLITLCETCHKKYHNGEIKLKVKRGQSFRDSAFMGIMRWAFYEKLKETYQNVRMTFGYITKNTRISNNLPKEHCIDAYCIAGNLKAKLMDSYFYQIKKRCQNRQIHKANFLKGGRKKLNQAPYIVKGFRLFDKVSYQDKPYYIFGRRSSGAFDVRDLSGNKINKGSINCKYLKLLEARKYYLTEKRERAIPSND

SEQ ID NO: 14771 - protein, 418 aa, unidentified; identical to SEQ ID NO: 8891

SEQ ID NO: 14772 - protein, 435 aa, Desulfovibrio sp.; identical to SEQ ID NO: 13095

SEQ ID NO: 14773 - protein, 514 aa, Nocardiopsis sp.; identical to SEQ ID NO: 6856

SEQ ID NO: 14774 - protein, 502 aa, unidentified; identical to SEQ ID NO: 6049

SEQ ID NO: 14775 - protein, 423 aa, unidentified; identical to SEQ ID NO: 3951

SEQ ID NO: 14776 - protein, 512 aa, unidentified
MSTVYVLNKNGKPLMPTTRCGRVRHLLKEQKARVVTSNPFTIQLLYETDDVVQPLYLGIDPGRTNIGVAVVKTDGTAVFTAHLETRNKEIPKLMKKRKESRRARRTNGRRCRRQRRAKANGTISKKCVKHDTAQNGSVSKRAKEIGVIKRHLPGCEKDVLCIGIKNKEAKFSNRTRPEGWLTPTANQLLQTHINLVKKIQKFLPISDVVLEINKFAFMRLDNPNVQKWQYQQGPLYQKANLEETVSEMQEHHCLFCKKKIDHYHHVVPQSENGSDTIGNIVGLCTKHHDLIHKDTAWQKKLAKKKTGLNKKYGALSVLNQIIPALTKELSSLFPKHFFVTNGKSTYDYRAAHGVSKDHWLDAYCIACSVLPNDTCDKTINSRVPYELKQFRRHDRRALNNENMSRVYTFNGKMVATNRHKATEQTTDSLEEFRQRQPNDVCNLKVKEHHPTYRNMNRNYPGSVFLVGNQVHVMQGIAGSKDGEATTYKDTNANSIAAGKCKFVAKNSGILFV

SEQ ID NO: 14777 - protein, 420 aa, unidentified; identical to SEQ ID NO: 3335

SEQ ID NO: 14778 - protein, 450 aa, unidentified; identical to SEQ ID NO: 2935

SEQ ID NO: 14779 - protein, 431 aa, unidentified
VEQNLRVFVLNKRGKPLMPCSPAKARLLLKEKKAVVVRRTPFTLQLTIATGEAKQAVSLGVDAGYKHVGLSASTKKAELYASEVELRQDITDLLSARRALRRARRNRKTRYRAPRFDNRIRTKRKSWLAPSVENRINAHLSRIEAVLRLLPVTKITVETASFDTQLLKNPDITGKEYQEGEQLGFWNVREYVLFRDGHVCQHCHGRSKDPVLNVHHLESRRTGGDSPGNLITLCETCHKALHRSEITLKAKRGQSFRAESFMGIMRWEVLNRLKTSHSELEVHNTYGYRTKHARIANGIDKSHCADAFCIAGNLGAQRLGEFFFQKQTRRNNRQIHKLSILKHGLRKRNQAPFEIKGFRLFDKVACKGEEGFIFGRRSSGFFDVRKLDGTRISAGISYKKLHLLEKRRTYLTEIRKEEALPPLPEGRGLRA

SEQ ID NO: 14780 - protein, 269 aa, unidentified
MVYVLDKNGQTLMPTDRHRKVRLMLQSGQAKIIKRCPFTIQLNYDSGHQTQEISLGIDAGSKHIGVSATTKIKVLYEADVELRNDIVDLLSSRRELRRGRRNRKTRYRQAKFNNRRLGNGWLPPSIRQKIGTHLTVVENICKILPISRIMVETASFDIQKIKNTDIQGAEYQQGDQLGFWNIREYVLFRDNHTCQCCKGKSKDKILNVHHIESRKTGGNAPNNLITLCEICHTVVIIKVPYSYRRPSNAVCDLRMLHLWELCDGLSTKH

SEQ ID NO: 14781 - protein, 524 aa, unidentified
MEILRIDWKDICPTGRSGLPQKELFMRPVYVLDMNGKPLMPTCRFGKVRRMLKSGEAKVVDTLPFTIQLDRPTKTHVVQSVTLGCDPGRTNIGLAAVRSDGTDLYRSHCETRNKEIVDLMDARRAARRASRRGERLARKRLAAKHETATTFPDGRKLPGCEKPIMLKDIINTEARFNNRVRPAGWLTPTATQLLWTHLNLIKRISRILPVSDIALEINKFAFMQLDEPDKNKWNIDFQHGPLYGTGGLKAAVRQLQNNTCLLCQENVIEHFHHLIPRSKRGDNTINNIAGLCQKCHEAVHKSADTAEKLSTLKKGQTKRYGGTSVLNQIIPKLVEELGKTYHEHLHLTYGWQTKEFRTKHKLEKTHDTDAYCIAAGTMQTVKPNIRTDVYEIKQFRRHNRANIHHQTERTYKLNGQTVARNRRKRTDQKTDSLAEWFENTVKQYGQQKAEHLRAGLKVRKSTRYYNFKDRVMPGAVFQYEGNRYVVTGQPSGGQYYRAYGKGNQNFPAKKIRIISLNRGLVYVA

SEQ ID NO: 14782 - protein, 432 aa, unidentified; identical to SEQ ID NO: 2042

SEQ ID NO: 14783 - protein, 438 aa, Petrotoga sp.; identical to SEQ ID NO: 8698

SEQ ID NO: 14784 - protein, 335 aa, Butyrivibrio sp.
MIVKDGFAPSIRNKRDRHIDIFLMYHKVVPITKATFEMGQFDTQVLKAIAEGKSLPEGSDYQHGERYGAETLREAVFTRDGYKCICCKRTPFKDGAILHVHHVGFWKGDRTDRLSNLATVCEKCHISKNHKPGGKLYGFEPKLPNMSPATFMTMVRFDMFKRLKELAPDEEFRMTYGAKTKLSRKDLSIKKSHANDAYAMGEFHPRHRTNTVHYEKRRRNNRILSKFYDAKYIDIRDGSIKKGSQLSCGRTKRSIPRNSELNERIYRGKKVSEGRYSIRTQRYSYRPHDIVWVDGVRYTVKGVISNGTRVALNERLPVSIHKIQKIIHIGGWYMS

SEQ ID NO: 14785 - protein, 426 aa, unidentified; identical to SEQ ID NO: 3614

SEQ ID NO: 14786 - protein, 376 aa, unidentified
LSKVKTMRVFVFNMRGRPLMPCSQRKARLLLRENKAKIYKYHPFTIQLTYTTGETKQDCHIGIDTGSKYIGAAVRSEDKVFWKGEIELRQDIRSNLDTKRIYRRSRRNRKTRYRKPRFLNRKRRDEWLPPSLQSRINHTFHWIDTLSSLVPNPILHIEVGKFDVAKMINPEIHGVDYQHGQTYGFFDERYFVFARDNYTCQCCGKSKNKILNTHHIIYRSNGGTNRVDNLITVCTDCHTSQNHRKGGIFYQWQEQHKKVKQYKEPPFMNTLRKRIFVAYPDAEITYGSETTPKRKAMKLDKTHYNDAIVISGINEIKENPEEWLLIKQFRKKKRSLHEATARKGRKKPNRNQTRNSKNTPYYKGFYLNDKVSVFGK

SEQ ID NO: 14787 - protein, 536 aa, unidentified
VLRPRYQCPTRWYPSREQGSGNGCLSGEENTDLEQEVSGTLSKGDHSHPGEQDFCVPAITIQGGPAMSVFVVGLNGCRLMPTSERKARLLLKHGKASVYRKVPFTIKLNYKTGSTTQSGYLGIDTGSQHIGVSVVREDGTVLHKEEIGLRDSMSKRKLMQSRASSRRGRRHRKTRYRHPKWRPKAKRVYCEIPDRKRRHWKKKEITFTSKRPKGWLPPSLQSKTDHHIRWIKKLQDLLPEGYRLSIELGRFDPARLKDPEIHGELYQKGPQYDYENVRAYVLNRDRYTCQVCGKKGGKLHVHHILYRSHGATDDPQYMATVCSDCHNTENHHQGGILYQWMQKQKKFTRGLRDATFMNILRKRLIEAFPGATFTYGNITKADRERLRLPKSHGNDATAIAIVKTGIMTVKDKEPVIYIQQVRRKKRSLHEETPRKGRKEPNRKASRYDKNTKAVTVTKRKNKKKISITGCLFDRVELNGKKGWISGFTDKSCYVKDENDQYIRTSPKYKQVSLSKLKILHHCGNWAIGARRSLGKG

SEQ ID NO: 14788 - protein, 477 aa, unidentified
LVSGQLIMAWEAIQTRRIKPHDIGEGTLRRHAAGTVSFPVLCKNRKETLMSVLVIGRNGRALMPTNPRKARLLLKKKTASVVCRHPFTIQLLYKTGCATQEGCIGIDTGSQHIGVGITCGDRVILKDEHALRSSMEKRSLLATRAVMRRGRRYRKVRYRKPKWRHHTKRMYFEKANRRGRHWRKVKTTTQSPRPKGWLPPSLQSKCDHHFRIIDRYLKYLPDPITRNLVIEAGRFDMARMNDPTIHGEMYQRGPMYDAENLRAYIFARDNYQCACCKAKAGTTRKADGTTVKLVAHYILFRSRGATDNPKYIISVCDHCHTTKAHQPGGILYSWMENNKKVARGLRDAVFMNILRKRLFARYPQSAFTYGNITATDRKQLRLPKSHANDAVAISLFGKEASTVKNICQTMHYKQIRKSKRSLHEAIPRKGRKNPNTKAVRNKKNTTQVNGFKLWDSVLADGKKLFICSFTGTSAYLI

SEQ ID NO: 14789 - protein, 443 aa, Anoxybacillus sp.; identical to SEQ ID NO: 7070

SEQ ID NO: 14790 - protein, 407 aa, Succinivibrio sp.
MIYVLNCKGVPIMPTSRHGMVRRLLREHKAKVVRKCPFTIQLSYECANITQPITLGVDTGYENVGISACTEKKVLFEAKAKIRTDIVKLLSTRRETRRTRRSRKTRYCKARFLNRNRAKGWLPPSIRAKVESHLRLVAKVHEILPIGKIIVEIASFDIQKIKNPEIKGAEYQQGDQLGFKNVKAYVLARDGCTCRCCKGKSKDKVLRVHHLESRLIGGDAPNNLVTLCDSCHTKFHKGLISLDDIKRGKSFKAETFMGLMRNFFFKELCNKYPCVECTYGYITKHLREKYHLKKDHHVDARCICGTPQALPSDVYLMKKVRCHNRQIHKFTTLKGGRRKLNQAPYTVKGFRLFDKVKVGDQVGFIFGRMTTGYLDIKNLQGDLLYKAISCKKVKLLDTRKSWLIEKC

SEQ ID NO: 14791 - protein, 411 aa, Virgibacillus sp.; identical to SEQ ID NO: 14618

SEQ ID NO: 14792 - protein, 414 aa, unidentified; identical to SEQ ID NO: 12176

SEQ ID NO: 14793 - protein, 512 aa, unidentified; identical to SEQ ID NO: 4350

SEQ ID NO: 14794 - protein, 416 aa, unidentified; identical to SEQ ID NO: 6623

SEQ ID NO: 14795 - protein, 481 aa, unidentified
ARVVTSNPFTIQLLYETDDVVQPLYLGIDPGRTNIGVAVVKADGTAVFTAHLETRNKEIPKLMQGRKKARRARRTNGRRCRRQRRAKANGTISKKCVKQTTAQNGSVSKRAKEIGVIKRHLPGCEKDVLCIGIKNKETKFSNRTRPEGWLTPTANQLLQTHINLVKKIRKFLPISDAVLEINKFAFMRLDNPNIQKWQYQQGPLYQKASLEEAVSEMQKHHCLFCKKPIAHYHHVVPQSENGSDTIGNIVGLCTKHHDLVHKDTAWQKKLAKKKTGLNKKYGALSMLNQIIPALTKELSSLFPKHFFATNGKSTYDYRAAHGVRKDHWLDAYCIACSVLPNDVCDKNINSRVPYELKQFRRHDRQALNNENMSRVYTLNGNVVATNRHKATKQTTDSLEEFRQNHPDDVCKLKVKEHHPTYRNMNRNYPGSVFLIGKQVHVMQGIASSKDGEATKYKDTNANSIAAGKCKFVAKNSGMLFV

SEQ ID NO: 14796 - protein, 451 aa, unidentified; identical to SEQ ID NO: 3061

SEQ ID NO: 14797 - protein, 424 aa, unidentified
MRVFVLNMRGEPLMPCTQRKARLLLKESKAVIYKYNPFTIQLTYATGETKQDCHIGIDTGSKYIGVAITSEDKVLFKGEIELRQDVKSNLDKRRMYRRDRRNRKTRYRQPRFLNRKRIDKWLPPSLQNRINHTFHWIDTFSRLVPSPKLHIEVGKFDTAKLINPEINGVDYQHGQTYGFFDERYFVFARDNYTCQCCGKSKDKILQTHHIIYRSNSGTNRVDNLITVCTDCHTSENHKKGGVFYKWQEQRKKVKQYKEPPFMNTLRKRIFTKYPNAVITYGSETTPKRKGTGLNKTHYNDAIVISGICKINENSEEWLLIKQFRKKKRSLHEATARKGRKIPNRNQVRNSKNTPCYQGFFLNDKVSVLGKSGYITGFTSNGAYIKDNASNYITLPDKTYKQVSISKLRLEHHNNNWQYVVKTAV

SEQ ID NO: 14798 - protein, 590 aa, Streptomyces sp.; identical to SEQ ID NO: 3355

SEQ ID NO: 14799 - protein, 427 aa, unidentified
MKGVSVMVYILDINGQPLMPTDRYGKVKHLLRQGKAVVVKRCPFTIRLLYDTTAYTQKLTLGVDTGSGTLGTAVSDEKGNIVYMSEVTVRNDITDKMKQRLRYRRNRRNRKTRYRKARYLNRRNSIKSDRFNPTMTSKFHSHIKEIDYIKSILPVKTLVLETGQFDTHLLKNPCLANPKVRHWGYQKGVNYGFENTKAMVLNRDNYTCQYCRGKHKDSRLEVHHIIFRSNGGSDEQENLITLCHTCHKALHSGRINPNFSGRKKGTLRYATQMNSIRCQLLKHYPDAIETFGCVTKANRLNLNLEKHHYTDACVIATETKPVCLITDILYLKKSVSDGDFQQTKGIRSEQVINTGKIYGFRKFDKVRYLGNEYFIKGRMSTGYAVLMDINGKKADFSKMPKGFKTPKLSICRRISARKSQLIQAMAI

SEQ ID NO: 14800 - protein, 457 aa, unidentified
VDTHHLRKQSIFPKGMCFMNMVYVFSPERAPLMPCSGVMARLLLKQGKAKVVHRTPFTIQLLSQPENTYTQPLTLGVDTGSSLMGSAVADENGNVLYLSEVEIRNDIARTMRERAASRRNRRNRKTRYRPARWLNRKNSIKKERFSPTMTSKIDAHLREMRFVQSLLPITSMVLETGTFDPHALKNPEVLQNKWLYQKGINYGYAHTKAYVLTRDGYTCQHCQGKSKDQRLEVHHLVFRSEHGSDEEANLLTLCKTCHDGLHAGTVTLKQAGKRKGNLLHPTQMNSIRNQLLQRVQAEETWGFVTKEHRHFLGLLKEHLFDATVIATRGAKPIFQTNSALLKKCVPDGDYQQTKGVRSTQRIPTGKIAGFRKFDKVHYLGQEYFIKGRMATGYAILMDIQGHKLTLKPIPKFEQMKRVSARSSWIIHQRTIPSFSSPLTSSSSVNTGKSSGFPMERW

SEQ ID NO: 14801 - protein, 319 aa, unidentified
APRFDNRIRTKRKGWLAPSVENRINAHLSRIGAILRLLPVTKITVETASFDTQLLKNPDISGKEYQEGEQLGFWNVREYVLFRDGHACQHCHGRSKDPVLNVHHLESRRTGGDSPGNLLTLCETCHKALHRREIKLKTKRGQSFRAEAFMGIMRWEVLNRLKASHPELEVHNTYGYRTKHTRIVNGIDKSHCADAFCIAGNLGAKRLGEFFFQKQTRRNNRQIHKLSILKHGLRKRNQAPFEVKGFRLFDKVVCQGEEGFIFGRRSSGSFDVRKLDGTRISAGISCKKLRLLEKRRTYLTEIRKEEALPPLPEGRGLRA

SEQ ID NO: 14802 - protein, 557 aa, unidentified; identical to SEQ ID NO: 3108

SEQ ID NO: 14803 - protein, 419 aa, unidentified; identical to SEQ ID NO: 9782

SEQ ID NO: 14804 - protein, 512 aa, unidentified
MSTVYVLNKDGKPLMPTTRCGHVRHLLKEQKARVVTSKPFTIQLLYEADDVVQSLYLGIDPGRTNIGVAVVKADGTAVFTAHLETRNKEIPKLMKKRKESRRARRTNGRRCRRQRRAKANGTISKKCVKQDTAQNGSVSKRAKEIGVIKRHLPGCEKDVLCICIKNKEAKFSNRTRPEGWLTPTANQLLQTHINLVKKIQKFLPISDVVLEINKFAFMRLDNPNVQKWQYQQGPLYQKANLEETVSEMQEHHCLFCKKKIDHYHHVVPQHKNGSNTIDNIIGLCTQHHDLVHKDATWQKRLAKKKTGLNKKYGALSVLNQIIPALTKELSSLFPKHFFVTNGKSTYDYRAAHGVSKDHWLDAYCIACSVLPNDTCDKTINSRVPYELKQFRRHDRRALNNENMSRVYTFNGKMVATNRHKATEQTTDSLEEFRQRQPNDVCNLKVKEHHPTYRNMNRNYPGSVFLVGNQVHVMQGIAGSKDGEATTYKDTNANSIAAGKCKFVAKNSGILFV

SEQ ID NO: 14805 - protein, 411 aa, unidentified; identical to SEQ ID NO: 9890

SEQ ID NO: 14806 - protein, 502 aa, unidentified; identical to SEQ ID NO: 6341

SEQ ID NO: 14807 - protein, 442 aa, unidentified; identical to SEQ ID NO: 2903

SEQ ID NO: 14808 - protein, 449 aa, unidentified; identical to SEQ ID NO: 13052

SEQ ID NO: 14809 - protein, 404 aa, unidentified
LMPTERHGKVCRMLKSGIAKVVKKCPFTIQLQYESERNVQPVALGIDAGSKHVGVSATTKAKVLYESDVELRDDIVKLLATRRQLRRRRRSRKTRYRPARFDNRRRKEGWLTPSIRQKIESHLTVVANVCKILPVSQIIVETASFDIQKIKNPDIQGIEYQQGEQMDFWNIREYVLFRDGHTCQCCKGKSKDKVLNVHHIESRKTGGNAPNNLITLCETCHKGYHNGTVTLPKNIKRGMKFKDAAFMGIMRWTFYNTLKEQYEPDIPVHYTYGYITKNTRINHNLPKGHCIDARCISGNPDAVSDGTYYYQKKVRCHNRQIHKQTILKGGIRKSNQAEYLVRGFRLFDKVRYQGREYFIFGRRKSGFFDIRTLSGEKVNKGSINVKRLTFVDTRKNYLTERRTV

SEQ ID NO: 14810 - protein, 440 aa, unidentified; identical to SEQ ID NO: 6406

SEQ ID NO: 14811 - protein, 414 aa, unidentified; identical to SEQ ID NO: 10282

SEQ ID NO: 14812 - protein, 413 aa, unidentified
MPDKVYVISRLGHPLMPCSPAKARHLLDDKKAKVVKRMPFTIRLLYGSTKYIQPIILGVDAGSKTIGLSASTAKEEVFAAEVMPRNDVVENLSTRREFRRARRNRTTRYRKPRSDNRVRSNHERWLAPSVKVKIQEHITSIKRVCTILPISKVVIETAEFDLQLLKAIQEGKPIPEGEDYQKGEMYGSYNVCQYVLWRDNYTCICCGVRGTPKNPVRLHVHHFESRKYGGNAPDNHGTLCDDCHKKFHLGIITDVKLKTRRRQSTRDAAFMGIMRKTLMWRLRTELFIPVAETKGYITKATREKLLVLPKSHTRDALAIAQGRHGFGIKEYAYVEPANHIYTVRPVRHHNRQLHKASILKGGIRKRNQASKYVFGFRLYDKVLYQGKACFVWRRRTSGTFLLRTIDGIKVKDG

SEQ ID NO: 14813 - protein, 428 aa, unidentified
LKVFVLNMRGQPLMPCSPAKARHLLKAGKAVVKRRTPFTIQLRIATGETKQNVTLGVDAGAKHVGLSATTEKEEVFASEVELRQDITGLLAARLSLRRDRRHRKTRYRAPRFLNRVRSKHKGWLAPSVENRIQAHMSRIDAVCRLLPVTKIVIETASFDIQKIKDPSVEGTDYQQGDQLGFWNVREYVLFRDGHVCQHCHGCSKDKILNVHHLESRQTGGDAPNNLITLCETCHKAYHAGKIKLKVKRGQSFRAEAFMGIMRWTLLDRVRKAHPGLPVENTYGYLTKHTRITHGLPKTHCVDAYCIAGNLKAVRRGVYLHQRQMRKHNRQIHKFTVLSKRLEDGTKIGYRKLNQSPYLVHGFRLFDKVRCLVQIGFIFGRRSSGYFDVRRLDGVKLSPSISWRKLTLLEKRSTYLTELRKQDGASSPV

SEQ ID NO: 14814 - protein, 450 aa, unidentified; identical to SEQ ID NO: 2935

SEQ ID NO: 14815 - protein, 507 aa, unidentified
MSEYIYVIGMDGDPQMPIKRKRHVEKMLQTGRARVFRQVPYTIQLTYKNQPVLQPVTIAEDPGRSNIGMAVVSLSGELLSAAVVQTRNKEIVKLMEKRKLHRRASRNGERKARQRLAKRCHTMLKAGFLMRKLPMYRKDKRVKCLVIRNTEARFCNRKREDGWLTPSAEHLVRTHINLIHKMQKFLPITDVAIEINRFAFLSLEDPSISGVDFQNGPLKGYDDLNAAVEDLQDGHCLMCNSLIEHRHHIVPRSMQGSNTIGNIAGLCCKCHERVHKDARFEDRLKKKKAGLDKRYAAVSALNQAIPFICKRLEQEFGKEHVHYCSGRDTAMVRRSFGYHKTKEEQLHVVDAWCIAVLSLRQIPEKAPEFDHVHEILQFRRQDRSRIKAQTSRAYYHEGKKIVRNRKKAEGQGEDSLQEWRKRQVDRYGEEQTRKMISQLKVKKSIRRYNRLDRLMPGAVFYYQDVRYVMRGQHCEGTYLQAVGIGSKDFPAKKCKIVANNEGLVFVS

SEQ ID NO: 14816 - protein, 512 aa, unidentified
MSTVYVLNKDGKPLMPTTRCGHVRHLLKEQKARVVTSKPFTIQLLYEADDLVQSLYLGIDPGRTNIGVAVVKADGTAVFTAHLETSNKEIPKLMKKRKESRRARRTNGRRCRRQRRAKANGTISKKCVKHDTAQNGSVSKRAKEIGVIKRHLPGCEKDVLCIGIKNKEAKFSNRTRPEGWLTPTANQLLQTHINLVKKIQKFLPISDVVLEINKFAFMRLDNPNVQKWQYQQGPLYQKANLEETVSEMQEHHCLFCKKKIDHYHHVVPQHKNGSNTIDNIIGLCTQHHDLVHKDATWQKRLAKKKTGLNKKYGALSVLNQIIPALTKELSSLFPKHFFVTNGKSTYDYRAAHGVSKDHWLDAYCIACSVLPNDTCDKTINSRVPYELKQFRRHDRRALNNENMSRVYTFNGKMVATNRHKATEQTTDSLEEFRQRQPNDVCNLKVKEHHPTYRNMNRNYPGSVFLVGNQVHVMQGIAGSKDGEATTYKDTNANSIAAGKCKFVAKNSGILFV

SEQ ID NO: 14817 - protein, 414 aa, unidentified
MPCSPAKARHLLKEKKAIVVRRTPFTIQLTIATGESKQPVSLGVDAGYKYVGLSASTEKAELYASEVELRQGITDLLSARRALRRARRNRKTRYRAPRFDNRIRTKRKGWLAPSVENRINAHLSRIEAVLRLLPVTKITVETASFDMQLLKNPDISGKEYQEGEQLGFWNVREYVLFRDGHVCQHCHGRSKDPVLNVHHLESRRTGGDSPGNLITLCETCHKALHRGEITLKAKRGQSFRAEAFMGIMRWEVLNRLKASHPELEVNNTYGYRTKHARIANDIAKSHCADAFCIAGNLGAERLGEFFFQKQTRRNNRQIHKLSILKSGIRKRNQAPFEVNGFRLFDKVACQGEEGFIFGRRSSGFFDVRKLDGTRISAGISCKKLHLLEKRRTYLTEIRKEEALLALPEGRSLRT

SEQ ID NO: 14818 - protein, 448 aa, unidentified
MSTGLRAVQAEPAGIRKGDALKVFVLNMRGRPLMPCSPARARHLLKAGKAVVRRRTPFTIQLRIATGETKQSVTLGVDAGAKHVGLSAATEKEEVFASEVELRQDITGLLAARLSLRRDRRHRKTRYRAPRFLNRIRSKHKGWLAPSVENRIQAHMSRIDAVCRLLPVTRIVIETASFDVQKIRNPEVEGTGYQQGDQLGFWNVREYVLFRDGHVCQHCHGHAKDKILNVHHLESRQTGGDAPNNLITLCETCHKACHAGKIKLKVKRAQSFRAEAFMGIMRWTLLDRMRKAHSGLPVENTYGYLTKNTRITLGLPKTHCVDAYCIAGNLKAVRRGVCLHQRQVRKHNRQIHKCTVLSKTLKDGTKIGYRKLNQTPHLVKSFRLFDKVRCLGQTGFIFGRRSSGYFDVRRLDGVKISSCISYRKLTLLEKRSTYLTELRKEDGASSPV

SEQ ID NO: 14819 - protein, 494 aa, unidentified
MTMVYVQNKDGKPLMPTTRYCYVRLLLKGKKARVVCTTPFTIRLNYDTPNITQDLILGIDPGRTNIGVAVVKEDGSCVFSAHLETRNKEVPLLMKKRAAFRRQHRTQDRRRKRQRRAIAAGTTVESNTIERLLPGYEKPIVCHHIRNKEARFNNRSRPAGWLTPTANHLLQAHINLIAKAAKFLPITKVVVELNRFAFMAMDNPNIRRWEYQQGPLYGLGSVKDAVYAQQDGHCLFCKKPIDHYHHVVPRHKGGSETLANRCGLCEKHHALVHKDKAWAEKLVTRKGGMNKKYHALSVLNQIIPHLMEYLGSETPYDVYATDGKSTKGFRIAKNVPKEHYTDAYCIACSILDADTKVSAPAEPFKLKQFRRHDRQSCIRQMVDRKYLLDGKVVATNRHKSIEQKSDSLEEFREAYGDAAVSQLTVRPHSPQYKDMARIMPGAVMDFDGIVGVFKGSSGRNNGTPNYYNSTKGARVLTKRCALLAKNAGMVFIPA

SEQ ID NO: 14820 - protein, 433 aa, unidentified
LSYRVNNSKIRKESKRHVCICNIKRRTTTYADCSFGKVRRLLKDKKAKVIRSCPFTIKLLYEPESLVVQEVVLGQDTGSKHVGTACVANDKVLYQSEVTLRDDIKKKMESRRALRRNRRQRKARYRKPRFLNRANSIKKDRLPPSTKSKVQSHIDEIEFCKKILPISKIVLEVSQFDTALMKNPSLIFEKVKHWGYQEGFNYGYSSRREAVLHRDNYTCQCCGKKHVRLEVHHIIFRCMGGTDDEKNLITLCEKCHKMVHNGLLVLTKKPKKLNLKYATQMSIIRSQLLKIYPDAIETFGFVTKENRNNLNLQKGHYIDACVIASGGKKFEQLNWLFKKKRVAKQNRKLCNGVRGEKKLPTRKILGFKKFDKVKYLGEICFIKGRRTSGGFVLMDIDNNAIDFRDRGGRQNPSYKLLERLNTRKSILCISQKF

SEQ ID NO: 14821 - protein, 521 aa, Streptomyces sp.; identical to SEQ ID NO: 5439

SEQ ID NO: 14822 - protein, 320 aa, unidentified
MRASRRSRKTRYRPKRFDNRRRGEGWFAPSIRQKINTHLVTVARVCEILPVSQIIVETASFDIQKIKNPEIQGVEYQRGEQMDFWNVREYVLFRDGHICQCCKGKKKDPVLNVHHIESRKSGGDAPNNLITLCETCHKGYHNGTIKLPTKIKRGMKFKDAAFMGIMRWTFYNTLKENYEPDIPVSMTYGYLTKNTRIQHNLPKGHHIDARCISGNPGAKSDGVYYYQKKVRCHNRQIHKFNTLRKGVRKLNQSEYLVKGYRLFDKVRYQGKEYFVFGRRKTGFFDIRTLSGEKVNNGSLSIKKIAFVDTRKNYITERRTA

SEQ ID NO: 14823 - protein, 462 aa, unidentified; identical to SEQ ID NO: 2823

SEQ ID NO: 14824 - protein, 417 aa, unidentified
MPCSPAKARLLLKEKKAIVKRRTSFTIQLTIATGEAKQPVTLGVDSGYKHIGLSATTEKAELYASQVELRQDITDLLSARLALRRSRRSRKTRYRAPRFDNRVASKRKGRLAPSVENRIAAHMSRVEAVMRVLPVTAITVETAVFDTQLLKTPDIAGAAYQQGEQLGFWNVREYVLFRDGHVCQHCRGKSKDPILNVHHIESRRTGGDAPNNLITLCETCHKAFHRGEIELKIKRGKSFKAETFMGIMRWTLFERLKKAHPELNVHNTYGYLTKHKRISHGIAKSHCADAYCIADNLSAKRLKGFFFQKQTRKHNRQIHKLSILKGGLRKKNQAPYEVKGFRLFDKVICKGEEAFIFGRRTSGSFDVRRLDGTRISAGISYKKLRRLESRTTYLTEFRKEAALPPLHKCRGFRAEFL

SEQ ID NO: 14825 - protein, 425 aa, unidentified; identical to SEQ ID NO: 2757

SEQ ID NO: 14826 - protein, 442 aa, unidentified; identical to SEQ ID NO: 3791

SEQ ID NO: 14827 - protein, 512 aa, unidentified
MSTVYVLNKDGKPLMPTTRCGHVRHLLKEQKARVVTSKPFTIQLLYEADDVVQSLCLGIDPGRTNIGVAAVKADGTAVFTAHLETRNKEIPKLMKKRKESRRARRTNGRRCRRQRRAKANGTISKKCVKNDTAQNGSVSKRAKEIGVIKRHLPGCEKDVLCIGIKNKEAKFSNRTRPEGWLTPTANQLLQTHINLVKKIQKFLPISDVVLEINKFAFMRLDNPNVQKWQYQQGPLYQKANLEETVSEMQEHHCLFCKKKIDHYHHVVPQHKNGSNTIDNIIGLCTQHHDLVHKDATWQKRLAKKKTGLNKKYGALSVLNQIIPALTKELSSLFPKHFFVTNGKSTYDYRAAHGVSKDHWLDAYCIACSVLPNDTCDKTINSRVPYELKHFRRHDRRALNNENMSRVYTFNGKMVATNRHKATEQTTDSLEEFRQRQPNDVCNLKVKEHHPTYRNMNRNYPGSVFLVGNQVHVMQGIAGSKDREATTYKDTNANSIAAGKCKFVAKNSGILFV

SEQ ID NO: 14828 - protein, 407 aa, unidentified; identical to SEQ ID NO: 3417

SEQ ID NO: 14829 - protein, 428 aa, Mastigocladus sp.; identical to SEQ ID NO: 9878

SEQ ID NO: 14830 - protein, 422 aa, unidentified; identical to SEQ ID NO: 5333

SEQ ID NO: 14831 - protein, 421 aa, unidentified
MTMVYVQNKDGKPLMPTTRYCYVRLLLKEKKARVVCTTPFTIQLNYDTSDITQDLILGIDPGRTNIGVAVVKENGQCVFSAHLETRNKEVPLLMKKRAAFRRNHRTLDRRRKRQRRAIAAGTTVESNTIERLLPGYEKPVVCHYIRNKEARFNNRSRPVGWLTPTANHLLQTHINLIAKVAKFLPITKVVVELNRFAFMAMDNPNIRRWEYQQGPLYGLGSVDDAVYAQQDGHCLFCKKSIDHYHHVVPRHKGGSETLANRCGLCEKHHDLVHKDKAWAEKLVTRKGGMNKKYHALSVLNQIIPHLMEYLGSETPYDVYATDGKSTKGFRIAKNVPKEHYTDAYCIACSILDADTKVSAPAEPFKLKQFRRHDRQSCIRQMVDRKYLLDGKVVATNRHKSIEQKSDSLEEFREAYGDAAVS

SEQ ID NO: 14832 - protein, 420 aa, unidentified; identical to SEQ ID NO: 13144

SEQ ID NO: 14833 - protein, 421 aa, Lactobacillus sp.; identical to SEQ ID NO: 5881

SEQ ID NO: 14834 - protein, 406 aa, unidentified
MSTCVCVLSNNGERLMPTIRLGKVRHLLKDGKAKIIKHHPFTIQLLYDSETNIQPIEICEDVGYNYIGISVKSQSHEYVSAQYDTLQDEKSCHDACRRMRRTRRNRLRYRQKRFDNRKRDKGWLAPSLKHKKELNVNVIKMYCEVVPITHATVEVGSFDTMLVKAIEEGKATPEGADYQKGPRYNLATLREAVFYRDNYTCQVCGREASEGAILHVHHMFYWKGRHDNSLSELITVCEKCHTPANHQKGGKLYGFGEDIKFANLSGAAFMNTVRWQIVNELYAAFGKPFVTFTYGAMTKEKRIALHLEKSHNNDAYAMGEFHPNCRCTFEHYEKVRRNNRILEKFYDSRYIDIRTGEIATGKELFNGRINRSHKKDSENLHKYRGKRIRKGYRALRRKKVALNPGD

SEQ ID NO: 14835 - protein, 413 aa, unidentified; identical to SEQ ID NO: 2605

SEQ ID NO: 14836 - protein, 427 aa, Nostoc sp.; identical to SEQ ID NO: 2670

SEQ ID NO: 14837 - protein, 491 aa, unidentified
MAEDPRLYVLKLLKTGRARIAEDIPFTIRLTYRNAPVLQPVTLAEDPGRTNIGAAVLSPLGDLLFAAVIETRNKEIKKLMADRQKSRQASRRGERKARQRLAKRYGSMVKSGMVMRKLPMYAADRFVTCKFIRNTQARFCNRKRCPDWITPTVQHLVQTHLNIIRKISRYLPVTDIAFEVNRFAFMHMENPEAMGVDFQNGPLKGYGDVKEAIRTQQHGKCLMCKKPISHFHHIVPRSRGGSDTIQNLAGLCPECHTKVHTDTAFRKDFDEKKSGQLKKYGALSALNQAVPFICKKLLEEYGEEHVHFCRGLDTSLIRTALGFEKTKKNQMHEVDAYCIGLAALEVNEVETPAFDHTFQIRQFRRQDRSIIHHQTGRSYYQGKEKVAQNRKPGFEQKTTALSQWYEEQVRIHGEKEAEKLRSQLRVEKSCRHYNDMDRFLPGAVFLYEGKRYVLSGRITNGKYLRACGQGMKNFPAAECTFIRHNAGLVFI

SEQ ID NO: 14838 - protein, 477 aa, unidentified
MKSHKSVLVIGMNGIGLMPTTACKARKLLEAKKAKVYSKMPFTIKLLYKTGCAVQNISLGIDTGSQHIGVAVTTDNCVQLKDEHELRSTMEKRKLIETRAEARRSRRYRKTRYRKPKFKPHCKHVYMNSMTKRHGHKTHWHNVKNEYGTNRQPGWVPPSIQQKIDHHIQIINRYLEALPKKTKVNIEVGRFDTQKVKNPDIKGKQYQLGRMYDYENKKAYILAKYDYKCPICGRKFGSVRENGSIVKFRKHHLHFVSNGATDNPDSYMAICDCCHTAEAHGDGGILNKIMKESKKTSRGLRDMPFMNILRRRLWNAFPEACFTYGNITNADRKWISLPKTHANDAVAIAMHEYLQQAKSYDVKDVPYTKIYKEVRKKKRSLHEMNPRKGRRIPNTSATRNSKNTKSVINKHRTFSLYDKVRYAGQIGWITGFSGTNTAYLKNKEGKYITIQGKNYKNIPLSNVQILERNNTWITYTK

SEQ ID NO: 14839 - protein, 457 aa, unidentified
VWLYQAVYNLGEGFLPSSEERTAFYWLLIYRKEHGIMQYVYVLNKHGEPLMPCSPGKARLLLKQQKACVVKRTPFTIKLLYGSAGYKQPITLGVDAGSKHVGLSASTEKRELYREEFTPRNDVVDLLSTRRQNRRSRRNRKTRYRAPRFDNRVHSKHKGWLAPSVEVKIQEHITVIKRICRILPVTLVRVETAEFDTQRLKAMLKGKSLPVGTDYQLGEMYDEYNVRQYVLKRDNYTCQCCGAHPTEKKPVRLHVHHLESRHVGGNAPNNLITLCVACHKALHEGKITLDKGKKRGKPLRDAAFMGIMRYTLLARLKDELNIPVKQTYGYITKLLREKNKIPKSHVNDARCIAKAPNAKPCDTMLYTRALRHHNRQIHKAKILNGGIRKKNQAPYLVKGFRLWDKVRYNGEECFITGRRSSGYFALKKYDGTVISNSASYKKLMLLEAATNYITERS

SEQ ID NO: 14840 - protein, 417 aa, unidentified; identical to SEQ ID NO: 2758

SEQ ID NO: 14841 - protein, 320 aa, unidentified
MEQNLSVLNRIARVVPVSRIVMEMGQFDTQVLKAVASGIPLPQGADYQQGDRYGIATLREAVFTRDNYTCQCCGKKGTDGVILHVHHIRYRSQGGTDAMSNLATVCYKCHTPKNHKPGGILYGWKLKLPSFKGATFMTSVRWMLYHQVKELYPELEIQLTYGAATKEQRRILDVPKSHVNDAYTMGDFHPSHRVRPVIYQKKRRNNRVLEKFYDAKYIDLRDGKKHSGQELFNGRTNRNHNRDTENLHKYRGKKVSKGRRSIRRRRYPFQPHDLVVYRGKSLETAGCHNKGTRLLIGKRSIAVKEVKIRQYCGGYFAVEI

SEQ ID NO: 14842 - protein, 427 aa, unidentified; identical to SEQ ID NO: 2799

SEQ ID NO: 14843 - protein, 420 aa, unidentified
MQYVYVLNKHGEPLMPCSPGKARLLLKQQKAHVVKRTPFTIKLLYGGAGYKQPITLGVDAGSKHVGLSASTEKRELYREEFTPRNDVVDLLSTRKQNRRSRRNRKTRYRASRFDNRVHGKHKGWLAPSVEVKIQEHITVIKRTCRILPVALVRVETAEFDTQRLKAMLEGKPLPVGTDYQLGEMCDEYNVRQYVLNRDHYTCQCCGAHTTTKKTVKLHVHHLESRKVGGNAPSNLITLCTTCHDALHKGKVSLDNKKRGKPMRDAVFMGIMRKTLMARLREELPIPVQGTYGYITKMWREQNDIKKSHVNDARCISKHPLAEPCSVCYRTKAIRHHNRQTHKANFSKGGIRKRSQMPYVVGGYRLWDKVLYKGQECFVSGRRTSGSFTLKKLDGTRISKGVTFKKMRLLEPATNYLIERM

SEQ ID NO: 14844 - protein, 236 aa, unidentified
LTHQFKKRVPVMVYVLDKNGQPLMPTDRHRKVRLMLQSGQAKVIKRCPFTIQLNYDSGHQTQEISLGIDAGSKHIGVSTTTKIKVLYEVDVELRNDIVDLLSSRRELRRGRRNRKTRYRQAKFNNRRRGNGWLAPSIRQKIGTHLTVVENICKMLPISRIMVETASFDIQKIKNPDIQGAEYQQGDQLEFWNVREYVLFRDGHTCQCCKGKSKDKILNVHHIESRKTGGNAPNNLI

SEQ ID NO: 14845 - protein, 512 aa, unidentified
MSTVYVLNKDGKPLMPTTRGGHVRHLLKEQKARVVRAKPFTIQLLYETNDVVQPLYLGIDPGRTNIGVAVVKANGTAVFTAHLETRNKEVPKLMQDRKKARRARRTNGRRCRRQRRAKANGTISKKCVKQDTAQSKNPSKRAKEIGIIKRRLPGYKKDVLCIGIKNKEAKYTNRTRPEGWLTPTANQLLQTHINLVRKMQKFLPISDVVLEVNKFAFMRLDNPDIQKWQYQQGPLYQKGSLENAVSEMQEHHCLFCDKPIDHYHHVVPQSENGSNTIANIVGLCAEHHNLVHKDAAWQKKLAEEKVGLNKKYGALSVLNQIIPALTNKLSVLFPKHFFVTAGKSTHDYRAAHGVSKDHWLDAYCIACSVLPSNVCDSNINNHMPYELKQFRRHDRRVLNNENMNRVYTLDNKAVAINRHKATEQEAASLEEFRKEHPNDVCKLKVKEHHPTYRNMNRNYPGSIFLVGKHVHIMQGIAGSKDGKATTYKDSNANSITASKCKFVAKISGILFV

SEQ ID NO: 14846 - protein, 471 aa, Acidithiobacillus sp.; identical to SEQ ID NO: 3868

SEQ ID NO: 14847 - protein, 418 aa, unidentified
MPCKPVIARLLLKDGKAKCIRRTPFTIKLLYQATDYIQDLTLGIDTGSGKIGSAVVNNENEVFYMSEIEIRNDISDKIDKRAKYRRTRRNRKTRYRKPRFNNRKNSIKKDRFSPTMTSKINSHLKEIEFVKSILPIKNIIIETATFDPHALKNPAVLNNKWLYQKGTNYGFANTKAYVLNRDNYTCQHCKGKSKDSRLEVHHIVFRKNGGSDDAENLITLCKTCHDSLHKGKIKLKKNGKIKGQLKHATQMNSIRQQLLKRLPDAKETFGFITKEHRYLMELPKEHYYDAIAIACLNNIEDIGLIDVSFKTEKVILKKCISKGDYQQTKGVRSHQKIPTGKIEGFRKFDKVRYLGDEYFVKGRMSTGYAVLMNIDGDKIDFSDAPRGMKTPKMSKMQRISARKSWIICEQNRANSSHD

SEQ ID NO: 14848 - protein, 431 aa, unidentified
MPNKVYVINKHGRPLMPCSPAKARHLLDAGKAKVKKRTPFTIQLLFGSTGYTQEVILGVDAGSKTIGLSASAETEELLSAEVKPRNDVVDLLSARREFRRARRNRKTRYRKPRFDNRVRSKHKGWLAPSVEVKIQEHITSIKRACRILPVSKVVIETAEFDLQLLKAIEEGKPVPQGEDYQQGEMYGHYNVRQYVLWRDGYTCQCCGAHTTKKKEVRLHVHHLESRKTGGDAPGNLVTLCDSCHEKLHKGLITEDDFKKRKRRSTRDATFMGIMRKTLMQRLCSELPIPVIETRGYITKATREKLLVLPKSHTNDALAIAQGKRGFNVGYLPEIAQIDKIYTIRPVRHHNRQLHKAAILKGGIRKSNQAGKYVFGYRLFDKVQFNEQDCFIWGRRTTGIFTIKTINGKMIKDGISFKKLKPVEKSTSYLIA

SEQ ID NO: 14849 - protein, 430 aa, Oribacterium sp.
MEGVPHMVYVISKDGHPLMPTMRYGKVRRMLKSGLAKVISRCPFTIQLLYETTDITQNISLGVDTGSKDVGLSVTTNKKVLFEAKVTLRNDIVELISTRREQRRTRRNRKTRHRKPRFDNRTRHEGWLSPSVRQKAESHITMVQKVIKILPVSHIKVETASFDIQKIKNPDVSGTDYQNGEQTDFWNVREYVLWRDGHVCQCCKGKSKDKILNVHHIESRKTGGDSPNNLITLCKYCHKQYHLGKIKLPKTIHRGMSFRDATFMGITRWAVYDKLKELYPDVNLTYGYITKKTRIENSLPKDHHIDARCISGNPKAESEGTVYFYKKVRCHNRQIHKCTINKGGIRKRNQAPYEVHGFRLYDKVTVNNVEAFVFGRRLDGRFAIRMLDGTKINEQLSYKKIKLLEMRKNYICERRTPLLIGASPDVPVAV

SEQ ID NO: 14850 - protein, 427 aa, Nostoc sp.; identical to SEQ ID NO: 7770

SEQ ID NO: 14851 - protein, 420 aa, unidentified
MQNYVFVIDTNKQPLNPVHPKKARRLLDRGKAAVFRMYPFTIILKTAIANPTISFCQIKIDPGSKTTGFALVQDDQVVWAMELEHRGGLIKKKLESRSAVRRGRRNRNTRYRKPRFLNRRRPKGWIAPSLEHRVLTTETWVKRLIKFCPVNQIWIERVKFDTQKMQNPEISGIEYQQGELAGYEVREYLLEKWGRECSYCGQENVPLQIEHISPKSKGGSDRIGNLCLACEKCNQRKGNKPVEEFLKKKPSLLQKIKNKAKQPLRDAAAVNATRNKIVKVLKEIKPVVTGTGAQTKYNRNRLGLPKQHWIDAACVGDIKTLVLKTSQPLLVTCKGQGGRQKAALNKYGYPIRYNPLKPIKGWSSGDIAKNLLTGEFGRVNPRSKGNSFNYTVPGKKAINLHLKNLLRVHRKDGYTYGFCR

SEQ ID NO: 14852 - protein, 419 aa, unidentified; identical to SEQ ID NO: 3867

SEQ ID NO: 14853 - protein, 427 aa, unidentified
MAVFVLDRRGRPLMPCSEQRARLLLARGRARVHRVVPFVVRLTDRLAEDSAYQSLRVKLDPGSEVTGVALVRVFDEGVAVLNLFDLVHRGRQISEALTARRAFRRRRRSANLRYRAPRFNNRTRREGWLAPSLQHRVDTTMSWVRRLMRWAPVSALSMELVRFDMQAMQKPEISGVEYQQGELLGYEVREYLLEKWGRQCAYCDDEGVPLQIEHIVARARGGSNRVSNLTLACEPCNCRKGSLDVREFVKDEQRLKRILARAKAPLRDAAAVNSTRWALASALKETELAVELASGGRTKWNRTRLHIPKAHALDAVCVGEVESVQAWKRPTLEVKCAGRGSYQRTRLTAQGFPRGYLMRTKRVHGFQTGDRIKAVVPSGKKAGSYVGRVAVRATGSFNIQTSQGVVQGISHRHCKVIQRADGYGYSH

SEQ ID NO: 14854 - protein, 223 aa, unidentified
MVYVVANDGQPLMPTERHGKVCRMLRSGMAKVIKKCPFTIQLQYESERNVQPVSLGVDAGSKHIGISATTKAKVLYESDVELRDDIVKLLATRRQLRRSRRSRKTRYRPARFDNRKRKEGWLAPSIRQKIGSHLTVVANVCKILPINQIIVETASFDIQKIKNPEIQGIEYQQGEQMDFWNVREYVFFRDGHTCQCCKGRSKDKILNVHHIESRKTGGNAPNN

SEQ ID NO: 14855 - protein, 415 aa, unidentified; identical to SEQ ID NO: 6534

SEQ ID NO: 14856 - protein, 407 aa, unidentified
QPLMPTENHAKVRALLKHGKAKVIQRCPFTIQLLYESTTHTQKINLGIDAGSKTIGVSATTDSKVLYESEVVLRNDIVELLSGRRALRNSRRSRKTRYRKPRFDNRKKPDGWLAPSIRQKIETHVTVVGNVMKILPVTKIIVETASFDIQKIKNPEIEGEGYQHGEQLDFWNVREYVLFRDGHTCQCCKGKSKDNILNVHHIESRKTGGNAPNNLITLCETCHKAYHKGIITLPKEIHRGMRFRDAAFMGIMRWAFYDRLKELYNPLGAEVINTYGYITKNTRIEHGLPKEHYVDARCISDNPAAKPLDHYYFQKKVPCHNRQIHKNTILKGGIRKRNQASYEVKGFRLYDQVLWKGQKCFIFGRRSTGRMDLRLLDGTHINASVGHKNLKLLSMRKNYLIEQRKAG

SEQ ID NO: 14857 - protein, 423 aa, Microcoleus sp.
MSNFIFVLDTNRKPLTPCKPSIARKLLAAGKAAVFRRFPYTIILKKAVTATIESISLKLDPGSKTTGIALLQGEKVIFGAELTHRGQAIKASLESRRLLRRVRRNRHTRYRQARFLNRTRRKGWLAPSLQHRVETTLTWVDKLRRLVPLSSIAMELVRFDLQQLENPEISGVEYQQGELLGYEVREYLLNKWNRKCAYCGAENLALQVEHIHPKAKGGSNRISNLCLACEKCNLKKGTRDIKDFLSKKPDLLKQIMAQVKRPLKDAAAVNSTRWALFNRLKLTGLPVTTGSGGQTKYNRTRLKLPKSHWLDAACVGELESLSVLTSKPLLIKATGHGTRQICRTDKVGFPSRYVPRSKFVKGFQTGDIVKAVVTSGKKIGEYVGRVAVRTTGSFNISASELVQGISHKYCKIVHHKDGYSYSF

SEQ ID NO: 14858 - protein, 368 aa, unidentified
MIIALDKYKRPLGFLTERRCRILMERKRAVLYRVFPTVVILMDVDARTIPGLPSFRIKIDPGSKYTGIAIIRNDTDEFVYAMQIEHRGDAVRAALNKRKNARRNRRSRETGYRRAKWGNRCLSEKDKRSYDSSREDGWLPPSIRSAADNVISWVRRLGRWINLTECSFEAVRFDTQLMEDPDIEGEEYQHGTLFGLEIKEYLMEKFGHTCQYCGGKSGDPVLEWEHMRPKSRGGSDRVKNALLSCSSCNKDKGNRTPEEWLELIKARLPREKGKRKELDEERVELIQKVIDGKPQGGALRYAAWVSSSRRYLEKALFGIFGNVECSSGGRTKYNLTKKYHNTNESKNLFSFGNIFASHFNPPVFFVYL

SEQ ID NO: 14859 - protein, 343 aa, unidentified
DITDLLSARRALRQSRRNPKTRYRAPRFDNRIRTKRKGWLAPSVENRINAHLSRIETVIRLLPVTKISVETTSFDMQLLKNSDIAEKEYQESEQLGFWNVREYVLFRDGHVCQHCHGRSKDPVLNVHHLESRRTGGDSPGNLIALCETCHKELHRGEITLKAKRGQSFRAETFMGIMRWEVLDRLKASHPKLEVQNTYGYRTKHARIVNGIAKSHCADAFCIAGNLGAERLGEFLFQKQTRRNNRQIHKLSILKGGIRKRNQVPFEVKGFRLFDKVACKGEEGFIFGRRSSGYFDVRKLDGTCISAGISYKKLHLLEKRRTYLTEIRKEEALPPLPEGRGLRA

SEQ ID NO: 14860 - protein, 418 aa, unidentified
MLVFVLNKHENPLMPASPAKARHLIDNGQAVVVRRTPFTIQLLHGSSGYKQDVALGIDAGYSTVGFSAVTTDKELIAGELELRNDVKRLLEKRKAYRRTRRSCKWYREPRFDNRGRHDGWLAPSIQHKLDSHIRLIEKLKKILPITRTIAEVASFDTQKMQNPEISGIEYQQGELQGYEVREYLLEKWRRKCAYCGKKDVPLEIEHIVPRSRGGSDRVSNLTIACRECNQTKGNHTAEEFGHPQIQAKAEKSLKATAFMNIVRSKMVDLLNCDQTYGYITKHDRIELNLPKSHATGAFVIAGGNGQVWSTHQVINKQVRRQNRSLYKANFLKGGKLKRNTVKEVKGFKRFDKVKYGDKECFIHGLRSSGYFNLRTITGGRIGASVSSRRLKLLERAKGIMQEVCAIPPHPCGRGLLAR

SEQ ID NO: 14861 - protein, 424 aa, unidentified; identical to SEQ ID NO: 3434

SEQ ID NO: 14862 - protein, 429 aa, unidentified; identical to SEQ ID NO: 3068

SEQ ID NO: 14863 - protein, 427 aa, Oscillochloris sp.; identical to SEQ ID NO: 5291

SEQ ID NO: 14864 - protein, 451 aa, unidentified; identical to SEQ ID NO: 5203

SEQ ID NO: 14865 - protein, 443 aa, Anoxybacillus sp.; identical to SEQ ID NO: 4812

SEQ ID NO: 14866 - protein, 418 aa, unidentified; identical to SEQ ID NO: 2704

SEQ ID NO: 14867 - protein, 518 aa, Anaerostipes sp.; identical to SEQ ID NO: 4915

SEQ ID NO: 14868 - protein, 453 aa, Nostoc sp.; identical to SEQ ID NO: 3348

SEQ ID NO: 14869 - protein, 440 aa, unidentified; identical to SEQ ID NO: 5150

SEQ ID NO: 14870 - protein, 423 aa, unidentified
MVYVLNIDGQPLMPTDRHGKVRHLLKDGRAEVVKRCPFTIRLLYDSTHYTQDIVLGVDAGSKHIGLSGTTETKELYASDVELRNDIVDLISTRRQNRRSRRNRKIRYRKARFQNRVSGKKNWLAPSIRQKVDTHMTVVSRVCMILPVTKIIVETASFDIQKIKDPDISGTGYQQGEQLDFWNVREYVLSRDGHTCQCCKGKSKDPVLNVHHIESRKTGGDAPNNLITLCETCHKSYHSGAVQLPKAIHRGMRFKDAAFMGVMRWNFYNKLKEIYELQGIEIRMTFGYLTKNTRIRHHLPKEHYIDARCISGHPEAIPNNEVFYQKKVRCHNRQIHKNTILKGGIRKRNQAGYLVKGFRLFDKVAYKGREYFIFGRRQSGFFDLRNLSGCKVNKGSLSYRKIGFLEPRQYYLCERRVMDTQGYA

SEQ ID NO: 14871 - protein, 518 aa, unidentified; identical to SEQ ID NO: 6957

SEQ ID NO: 14872 - protein, 442 aa, Sutterella sp.; identical to SEQ ID NO: 7529

SEQ ID NO: 14873 - protein, 431 aa, unidentified
MPNKVYVINKHGRPLMPCSPAKARHLLDDGKAKVKKRTPFTIQLVYGSSGYTQEVILGVDAGSKTIGMSVSTTKEELLSAEVKPRNDVVDLLSTRREFRRARRNRKTRYRKPRFDNRVRSKHKEWLAPSVEVKIQEHITAIRRVCGILPVSKVVVETAEFDLQLLKAIEEGKPVPQGEDYQKGEMYGHYNVRQYVLWRDDYTCQCCGAHATKKKEVRLHVHHLESRKVGGDAPDNQVTLCESCHEKLHKGLIAEKDFKKRKRRSTRDATFMGIMRKTLMQRLCSELPIPVVKTRGYITKATREKLLVLPKSHTNDALAIAQGKRGFNVGYLPEIAQIDKIYTIRPVRHHNRQLHKATILKGGIRKSNQTEKYVFGYRLFDKVQFNGQDCFIWGRRTTGIFTIKTINGKMIKDGISFKKLKLVEKSTSYLIA

SEQ ID NO: 14874 - protein, 409 aa, unidentified; identical to SEQ ID NO: 7451

SEQ ID NO: 14875 - protein, 451 aa, unidentified
VTTILKTCFAAFNLAKVVVLMDAWDIIVVLNKRGKPLMPCSPAKARLLLKEKKAIVVRRTPFTIQLTIATGETKQPVSLGVDAGYEHVGLPASTEKAELYASEVELRQDITDLLSARRALRQSRRNRKTRYRAPRFDNRIRTKRKGRLALSLENRINAHLSRIEAVLRLLPVTKITVETASFDLQLLKNPDISGKEYQEGEQLGFWNIREYVLCRDGHVCQHCYGRSKDPVLNVHHLESRRTGGNSPGNLITLCETCHKALHRGEIKLKAKRGHSFRAQAFMGIMRWEVLNRLKASHPELEVNNTYGYRTKHARIANDIAKSHCADAFCIAGNLGAKRLGEFFFQKQTRRNNRQIHKLSILKGGIRKRNQAPFEVKGFRLFDKVACQGEEGFIFGRRSSGFFDVRKLDGTRISAGISYKKLHLLEKRQTYLMEIRKEEEFPPLPEGRGLRA

SEQ ID NO: 14876 - protein, 413 aa, unidentified
MTNYAFVLDANGKQLAPTKEQKAWFLIRKKRATLVSKYPMVIQLKKEISDEQICKDEICCGIDDGGIHVGLALVQKCKTKNKVVFKGTIEQRNDVKHLIEVRKGYRNYHRFHKRYRQARFNNRKSSKRKGRIAPSIFQKRQATIRVIKQLNKWINIANYSLEDVAIDIRALTDGYKSYRWQYQQSNRLDENIRKAVILRDGCKCMECGKSNCRLEVHHIKPRRLNGSNTLDNLISLCEKCHQRTEGQEELYMDRYFSILSSIDNKNLDYAQHVMIGKKWLREQLSELGTLILTTGGDTANKRIDWNIEKSHANDAICITGLQPDACNVKEWTIKPMRRQSKAKTDNVLGIKHRDLVEYTFKNGETHRGYVTALYPKQNAINFQSPTKHCKKVNAKKCKLIWKYSKIYWLDNVL

SEQ ID NO: 14877 - protein, 489 aa, unidentified
LVGNVQAPWDVYPSPTLCGLCLKVLRGRNGDADKKPIPTLTKDENRPSGRTTGLRAEQAEPAGIRKGDTLKVFVLNMRGKPLMPCSPEKARHMLKAGKAFVVRRTPFTIKLTIATGETKQDVTLGVDAGARHVGISATTEKEEVFASEVALRQDITGLLADRLAFRRARRNRKTRYRSPRFNNRVRSKHKGWLAPSVENRIQAHMSRIDAVCRLLPVTRIVIETASFDVQKIRNLEVEGTGYQQGDQLGFWNVREYVLFRDGHVCQHCHGRSRDKILNVHHLESRKTGGDAPNNLITLCETCHKAYHAGKIKLKVKRGQSFRAEAFMGIMRWTLLDRVRKTHPKLPVENTYGYLTKHKRIALGLPKTHCADAFCIAGNLKALRRGDFLFQQQTRKHNRQIHKCSILKGGVRKLNQTPFLVKGFRLFDKVKCKGRIGFIFGRRSFGYFDVRTLDGVRLSAGVSFKKLMLVEKRTTFLTQLRKECGASSPS

SEQ ID NO: 14878 - protein, 447 aa, unidentified; identical to SEQ ID NO: 13151

SEQ ID NO: 14879 - protein, 453 aa, unidentified; identical to SEQ ID NO: 10368

SEQ ID NO: 14880 - protein, 415 aa, Bacillus sp.; identical to SEQ ID NO: 2431

SEQ ID NO: 14881 - protein, 445 aa, Burkholderia sp.
MAAFVLDKRGSPLMPCSEKRARLLLKRGRARVHRVLPFVIRLTDRLAEESAFQSLRVKVDPGSKVTGVALVREFNSGIAVLNLFSLMHRGRQISEALVTRRNFRHRRRSANLRYRAPRFLNRARRDAWLAPSLQHRVDTTMSWVRRIKRWTPISATSVEFERYDLQAMRSAEVAGYEHRKYERVDYEIREYLLKKWWHRCAYCDKEGVPLHVGHIISRARGGSDHLTNLTICCGPCHFRKGERDIKEFVVDGIRCNRILGRAKVPLKESASVSSTRAALVTELRSARLVVETSTGGRTKWNRARFGIPKTYALDAVCVGDVSVVMDWQRPTVEVKCSGRGSYQRTRLTAEGFPRSYLIRKKRIYGFQTGDRVRADVSKGKMIGIYVGRVAVRASGNFNIKTQNGVVQGINHRYCKVVQRADGYGYSPLLRLAQRVTRSKSVGPAL

SEQ ID NO: 14882 - protein, 342 aa, unidentified
MSTCACVLSNSGERLMPTIRLGKVRQLLKDGKAKIVKHHPFTIQLLYDSKTNTQPIEICEDVGYNYIGISVKSQSHEYVSAQYDTLQDEKACHDSCRKLRRTRRNRLRYRKPRFDNRKRGEGWLAPSLRHKKELNVNVVKMYCAVMPITHATVEVGSFDTMLVKAIQEGKAIPEGADYQKGPRYNLATLREAVFYRDNYTCQVCGRKIADGAILHMHHMFYWKGRHGYQLDELVTACEKCHTPANHQKGGKLFGFGEDKEFANLSGAAFMNAVRWQIVNALYATYGKEFVTITYGAMTKEKRIALRLEKSHNNDAYAMGNCHPAHRCEFSSPALGKSSSFRR

SEQ ID NO: 14883 - protein, 430 aa, unidentified
MPKVYVLNRHGRPLMPCTPAKARHLLDAGKAKVRHRTPFTIQLLYGSTGYTQEVILGVDAGSKTIGLSAATETEELFSAEVKPRNDVVELMSARRQFRRARRNRTTRYRKPRFDNRVRSKHKGWLAPSVEVKIQEHMTAIRRACAILPVSKVVVETAEFDLQLLKAVAEGKPVPQGEDYQKGEMYGHYNVRQYVLWRDSYTCCICGVHGSVRKGVPLHVHHLESRRVGGDAPDNLVTLCTACHDKLHKGIIMVADIKKRKRRSTRDTTFMGIMRMTLLRRLWEQLPVPVVETRGYITKATREKLLVLPKSHANDALAIAHGPQGFRAEHLPNIRQADRLYTIRPVRHHNRQLHKATILKGGVRKANQAEKYICGFRLYDKVLYNGIECFVWGRRTSGSFLLRQLNGEKVKDGVSYKHLKLLERSQSYLVA

SEQ ID NO: 14884 - protein, 292 aa, unidentified
MQSKLHSHVREIEYIQSILPVTEMVFETGQFDMHLMKNPSLANSKVRPWGYQKGANYGFENTKAMVLNRDNYTCQCCKGKHKDSKLEVHHIVFRSQGGSDEESNLLTLCHTCHKDLHSGKISPKLSGKVKGNLKFATQMNSIRKQLFRFYPNAIETFGYVTKANRLHLGVDKEHYYDACTIATQGNAFNVKSNLYKKKCVSDGDFQKTKGIRSEQPIVTDKICGFRKFDKVRYFGNDYFIKGRMSTGYAILMDIDGNKIDFSTMPRGYKTPKLSNCKRITARSTVMTQVKVV

SEQ ID NO: 14885 - protein, 450 aa, Clostridium sp.; identical to SEQ ID NO: 2935

SEQ ID NO: 14886 - protein, 467 aa, Clostridium sp.
LALSWLCKSSEGKERSTTLRRLSNIGEGQINPKGGRNLRVYVKNQRNQPLMPTTQRKARIFLKQKKAKIITYEPFTIQLLYATGETTQETILGVDAGNRTIGLSATTYKCELFSAELKLRTDIVELLATKRQFRRSRRSRKTRYRQPRFENRKKTEGWLAPSIENKIGTHLKVVNKVHSLLPISKIIIEVASFDIQKIKNPDIQGEKYQQGNQLGFWNVREYVIFRDGHKCQGKKNCKGKILNVHHIESRKTGGDSPDNLITLCEDCHKDYHSGKLKLNLKRGQSFRDAAFMGIMRWSFYNKLKELYSNVNLTYGYITKNTRITNNLPKEHRIDALCITGNSTVKRLDNWYLIKQVRKKKRSLHEAIARKGRKEPNITSKRNSKNTKEIISKGKKWCLFDKVKIGSNTGFVSGFTGNMVYVQDIEGNYLQVSPKYKQISTDNVSLISRNNNWIYKEVALGTANHPHL

SEQ ID NO: 14887 - protein, 419 aa, unidentified; identical to SEQ ID NO: 13948

SEQ ID NO: 14888 - protein, 431 aa, unidentified; identical to SEQ ID NO: 8901

SEQ ID NO: 14889 - protein, 428 aa, unidentified
LKVFVLNMRGQPLMPCSPAKARHLLKAGKAVVKRRTPFTIQLRIATGETKQNVTLGVDAGAKHVGLSAATEKEEVFASEVELRQDITGLLAARLSLRRERRQRKTRYRAPRFLNRVRSKHKGWLAPSVENRIQAHMSRIDAVCRLLPVTKIVIETASFDIQKIRNPEVEGTGYQQGDQLGFWNVREYVLFRDGHICQHCRGRSKDPILNVHHLESRKTGGDAPNNLITLCETCHKAYHAGKIKLKVKRGQSFRAEAFMGIMRWTLLDRVRKAHPGLPVENTYGYLTKNTRITQGLPKAHCVDAYCIAGNLKAVRRGVHLYQRQVRKHNRQIHKCTVLSKTLKDGTKIGYRKLNQTPHLVKNFRLFDKVRCLGQTGFIFGRRSSGYFDVRRLDGVKLSPSISWRKLTLLEKRSTYLTELRKEDGASSPV

SEQ ID NO: 14890 - protein, 350 aa, unidentified
VLQLCYITTEVVVRNDITDKMTQRAKYRRNRRNRKTRYRKARWLNRSNSIKKDRFSPTMQSKLHSHVKEIEYIQSILPITEMVFETGQFDMHLMKDPSLANPKVRPWGYQKGTNYGFENTKAMVLNRDNYTCQCCKGKHKDSKLEVHHIVFRSQGGSDEESNLITLCHTCHKDLHSGKINLKLSGKVKGNLKYATQMNSIRKQLFRLYPNAIETFGYVTKANRLHLGVDKEHYYDACTIATQGNTFNVKSNLYKKKCVSDGDFQKTKGICSEQPIVTDKICGFRKFDKVRYFGKDYFIKGRMSTGYAILMDIDGNKIDFSTMPRGYKTPKLSNCKRITARSTVMTQVKVV

SEQ ID NO: 14891 - protein, 414 aa, Sutterella sp.; identical to SEQ ID NO: 4492

SEQ ID NO: 14892 - protein, 414 aa, unidentified
MPCSPAKARLLLKEKKAIVKRRTPFTIQLTIATGESKQPVTLGVDAGYKHVGLSASTEKAELYASEVELRQDVSDLLSARRALRQSRCNRKTRYRAPRFNNRLRTKRKGWLAPSVENRINAHLSRIEAVLRLLPVTKITVETASFDMQLLKNPDIAGKEYQEGEQLGFWNVREYVLFRDGHVCQHCYGRSKDPVLNVHHLESRRTGGDSPGSLITLCETCHKALHRGDITLKAKRGKSFRAEAFMGIMRWEVLNRLKVSHPELEVNNTYGYRTKHVRIANGIAKSHCADAFCIAGNLGAKRLGEFFFQKQTRRNNRQIHKLSILKHGLRKRNQAPFEIKGFRLFDKVVCKGEEGFIFGRRSSGYFDVRKLDGTRISAGISYKTLHLLEKRQTYLTEIRKEEALPPLPEGRDLRA

SEQ ID NO: 14893 - protein, 423 aa, unidentified; identical to SEQ ID NO: 3951

SEQ ID NO: 14894 - protein, 417 aa, unidentified; identical to SEQ ID NO: 6036

SEQ ID NO: 14895 - protein, 429 aa, unidentified
  REGION 1..429: note = Ga0307928_10000789
VLACNNPEVDPLQHAGGQNLRVSDNMHVFVLNKRKEVLMPTSCRKARLLLKSGKAVVIKRFPFIIQLTYATGENKQKITCGVDPGYSDIGFSCITKTRELIGGTVKLDNFTSKHLSEKRMYRRNRRNRLRYRSPRFLNRRRSNKWIPPSIERRYQTHINLINKLKQFLPISNITIEIGNFDIQKLNNPDINGKGYQQGNLYNYSNLKSFVLSREKHICQLCNKNDLKNDKWKLHHIILKSKGGTDKSNNMALLHESCHKKLHKQNLYNKLKKNKQYKESIFMNIIKSRFKNSLNCKLVFGYETYCRRNELKLEKSHSNDSFVVAGGTNQKRSMEYNIKQRRRNNRTLQLNRKGFSPSIRRKRYKLQPYDLVKIDNNIYDVVGTHCLGKRVKVKSEKNKKKEISIKKIDWYFNNNSLIWKKGVSGNSSHY

SEQ ID NO: 14896 - protein, 450 aa, unidentified
  source 1..450: note = Cyanobacteria bacterium UBA8553
MTKVLVVNKHGRPLMPTTARKARILLKERKAKIYARNPFTIQLLYGCRGYTQPVTLGIDAGYQTIGFSAVTEKDELVGGEFKLLEGMSERITERRKYRRTRRNRLRHRKPRFNNRKRKEGWLAPSIQHKFDSYIKLVERLKARLPITKVIIETAKFDIQKINNTDIQGEQYQQGEQYGWKNLASYIRHRDGYKCQNKDCKNKSNQKILQVHHIGFWKNDRSNKPANLITLCSKCHTPANHKKGKLLDGWHPKVKSFKAETFMTIVYRKLVQTLQAEETYGYITEVDREALELPKSQMLEDSLTLRYHNDAFVIAGGKTQTRCKPLNLEQNRRNRRSLELFYDAKYIDIRTGDKATGSELFSGRRTRNKNENSENLRKYRGQRVSKGRRSIRKSRYPYQQNDLVKFGDTVYQVRGMQNLGARVALYAENNLTVDVRKVQPYLWRKGICEVI

SEQ ID NO: 14897 - protein, 518 aa, unidentified
MTPKKRKEASRMSEYIYVLGIDGNPQMPTKRKRHVEQLLQTGRARIFRQVPFTIQLTYKNEPVLQPVTIAEDPGRSNIGMAVVSLSGELLSAAVVQTRNKEIVKLMEKRKQHRRASRNGERKARQRLAKKCHTMIKTGFLMRKLPMYGKDKRVRCNVIKNTEAKFCNRKREDGWLTPSAEHLVRTHINLIHKMQKFLPITDVAIEINRFAFLSLEDPSISGVDFQNGPLKGYDDLNAAIEDLQDGHCLMCNSPIEHRHHIVPRNMQGSNTIGNIAGLCCKCHERVHKDARFEDRLKKKKAGLNKRYAAVSVLNQAIPFICKRLEQEFGKEHVHYCSGRDTSMVRRSLGYHKTKEKQLHEVDAWCIAVLALQHVPEKAPEFDHVHEILQFRRQDRSRIKAQTSRAYYHEGKKIAKNRKKAERQREDSLQEWRKRQVERYGKEQTRKMISQLEVKESIRRYNRLDRLMPGAVFYYQGVRYVMRGQHSNGQYLQAVGMGDKNFPAKKCKIVVHNQGLVFVS

SEQ ID NO: 14898 - protein, 420 aa, unidentified; identical to SEQ ID NO: 11059

SEQ ID NO: 14899 - protein, 411 aa, unidentified; identical to SEQ ID NO: 3917

SEQ ID NO: 14900 - protein, 472 aa, Cupriavidus sp.; identical to SEQ ID NO: 4331

SEQ ID NO: 14901 - protein, 417 aa, unidentified; identical to SEQ ID NO: 14176

SEQ ID NO: 14902 - protein, 473 aa, unidentified; identical to SEQ ID NO: 3562
  source 1..473: note = uncultured beta proteobacterium

SEQ ID NO: 14903 - protein, 447 aa, unidentified
MAVFVLDRHKKPLMPCSEKRARLLLERRRAVVHRCIPFTIRIKDRQVESCALQPLRLSFDPGSEKTGLALVRESQEADRIVGGSHRIRTVCFLLEIWHRAALIRKRLRQRKAFRRHRRARKTRYRAPRFLNRRRPAGWLPPSLEHLVATTITWVRRIRRWAPVSGLAMESNSFDVQKLENPDTTGTMYQRGTLNGYAVRKYLLDKWARRCAYCGTEGVPLEIDHIVPKSRGGSDRMSNLILACRNCNQAKGNLNVRAFMAHDQKRLARILAQARASLRDAAAVNSTCWRLMTTLAKTGLPVETSTGERTKWNRTRLGLPKTHALDAACVGQVDAIVAWRVPILNIRCTGRGSHQRTRLDRYGFPRGYLMRSKRVQGFQTGDLVKAVVLSGKNAAIHVGRVAIRASGKFNIQTSTGVIQGVHARRCSIVQRGDGYAYSFRQIPQMTSV

SEQ ID NO: 14904 - protein, 462 aa, unidentified
MSVLVIGRNGRALMPTNPRKARLLLKKKTASVVCRHPFTIQLLYKTGCATQEGSIGIDTGSQHIGVGITCGDKVILKDEHALRSSMEKRSLLATRAAMRRGRRYRKVRYRKPKWRHHTKRMYFEKANRRGQHWRKVKTTTQSPRSKGWLPPSLQSKCDHHFRIIDRYLKYLPDPITRNLVIETGRFDMARMNDPTIHGEMYQRGPMYDAENRRAYIFARDNYQCACCKAKAGTTRKADGTTVKLVAHHILFRSRGATDNPKYMVSVCDHCHTTKAHQPGGILYSWMENNKKVTRGLRDATFMNILRKRLFARYPQAAFTYGNITAADRKQYHLPKSHVNDAVAVSLFGKEVPTVRDTCQTTYYKQVRKSKRSLHEAIPRKGRKNPNTKAVRNKKNTTQVNGFKLWDSVLANGKKLFICSFTGTSAYLIDKNGCYISQPGKTYKQWPLSKLKRLHPNGNWLMA

SEQ ID NO: 14905 - protein, 406 aa, unidentified
MVYVQDIDGKPMMPTTRHGKVRRLLKDNKAVVVNTCPFTIKLTYKTSDYKQEIVLGVDAGTKHVGLSATTKSKELYSGEVILRNDVVELLSTRRESRRARRNRLRYRKPRFENRVKSKHHGWVAPSVRHRIDAHIRVIDNVCSILPISRIIIEVAQFDTQKINNPNISGNEYQKGDQLGFWNVREYVLARDGHKCQHCKGKSKDHILNVHHIESRKTGGDSPSNLITLCETCHKEYHKGNIDLKVRRGKSLRDAAVMGIMKWKLYDELKSKYDNVSMTFGYITKYNRIKYGIEKSHTSDAFVISRNFNAKRIERQYLKRLIRRHNRQIHKMKILKGGKKKNNQAPFEVFGFRLFDKVLYNNEINFIYGRRKSGCFDIRDFDGKNSKNVTYKKLKLIRGKRYPIILK

SEQ ID NO: 14906 - protein, 371 aa, unidentified
VDAGYKHVGLSASTEKAELYASEVELRQDVSDLLSARRALRQSRRNRKTRHRAPRFDNRIRAKRKGWLAPSVENRINAHLSRIEAVLRLLPVTTITVETASFDMQLLKNPEISGKEYQEGEQLGFWNVREYVLSRDGHVCQHCHGRSKDPVLNVHHLESRRTGGDSPGNLITLCETCHKALHRGEITLKAKRGQSFRAEAFMGIMRWEVLNRLKASHPEQEVQNTYGYRTKHARIENGIAKSHCADAFCIAGNLGAERLGEFFFQKQTRRNNRQIHKLSVLKHGLRKRNQAPFEIKGFRLFDKVACKGEEGFIFGRRSSGYFDVRKLDGTHISAGISYKKLRLLEKRQTYITEIRKEEALPPLSEGRGLRA

SEQ ID NO: 14907 - protein, 431 aa, unidentified
MPNKVYVINKHGRPLMPCSPAKARHLLDAGKAKVKKRTPFTIQLVYGSSGYTQEVILGVDAGSKTIGMSASTTKEELLSAEVKPRNDVVDLLSTRREFRRVRRNRKTRYRKPRFDNRVRSKHKEWLAPSVEVKIQEHITSIKRVCRILPVSKVVIETAEFDLQLLKAIADGKSVPQGEDYQKGEMYGHYNVRQYVLWRDNYTCQCCGAHATKKKEVRLHVHHLESRKVGGDAPSNLITLCDSCHEKFHKGIITAANLKKRKRRSMRDATFMGIMRKTLIQRLRAELTIPVAETRGYITKTTRKKLLVLPKSHTNDALAIALGKHGFNVGYLPEIAQIDKIYTIRPVRHHNRQLHKVTILKGGIRKSNQAEKYVFGYRLFDKVQFNGQDCFIWGRRTTGIFTIKTINGKMIKDGISFKKLKLVEKSTSYLIA

SEQ ID NO: 14908 - protein, 420 aa, unidentified; identical to SEQ ID NO: 6017

SEQ ID NO: 14909 - protein, 504 aa, unidentified
MPTTRCGKVRRMLKNGQAEVVSRIPFTIRLCYEPASKETQRLVYGCDPGRTNIGSAVVRENGCCVYLDKCATRNREIPPLMAKRRRHRQVSRRGERLARKRLAKRLRTTTKKLLDRLLPGYEKPVRVKDIINTEARFNNRFRPKGWLTPTARQLLRTHLNILKKVRKILPITDVVLEANRFAFMQLDNPHIFRWQFQYGPLHGKGSVENAVKEQQGGTCIFCKHEIEHYHHIIPRSRGGSNTLPNTAGLCNACHDKVHKSEEWFRKLKKKKAGLNKKYGALSVLNQIIPYLVDSYTELFPDHTYVTAGYSTKQFREDHGIEKDYDSDAACIACSILEKVDRIIFPGMTYQMEQFRRHDRAKIKSFRNRYYYLGKEKVAVNRKKAIMADPSGKEKNGKLQTQDSLEEWFAKEAEKNGLREAERKRSRLRAVKSIRIRNNMQRPLPGSIFIFEGKRYLLTGNHGEYYQTKVAGKTVEFLKSKCKIAAGNQGLVYTGQVKSGASSHV

SEQ ID NO: 14910 - protein, 440 aa, unidentified
MPTNSYRARRLLKLKRAVIYKYRPVFTIKLVDRTNGYTQPIEYKCDTGYQNIGISICSDTKEFVNEQRELLKDEVKRHSDSRKYRRTRRNRLRYRKKRFDNRKGMISKDGFAPSIRNKRDVHIHLYEEYYKVFPITKAVFEMGQFDTQVLKAVEAGLPIPDGTDYQRGEQYGYATLREAVFARDNYKCICCGKSAVRDGVKLRIHHIGYLSGDRSNRMANLGSVCESCHTSKNHKPGGKLYSLKPELKTFKGATFMTTVRYSMVKKLKVMTPTVDIKVTYGAATKLARRVLSVKKTHSNDAYCMGEFHPKHRSDFKHYKKCRRNSRVLSRFYDAKYRDLRDGSVKTGSQLSCGRTNRKISRHAELDERIYRAHKISKGRVSTRRQHYSLRPGDKVLYDGKVYFVTGMQNSGTHVKLTNGKVCSLKKVHVLQHCNAWTAVI

SEQ ID NO: 14911 - protein, 512 aa, unidentified
MPTVYVLNKDGKPLMPTTRCMHVRHLLKNGKARVVKSKPFTIQLLYETDDVVQPLYLGIDPGRTNIGVAVVKADGAAVFTAHLETRNKEVPKLMKKRKESRCARRTNGRRCRRQRRAKTNGTISKKCVKQTTAQNGSVSKRAKEIGVIKRHLQGCEKDVLCIGIKNKEAKFTNRARPEGWLTPTANQLLQTHINLVKKIQKFLPISDVVLEVNKFAFMQLDNPNIQKWQYQQGPLYQKGSLENAVSEMQEHHCLFCEKPIEHYHHVVPKSENGSNTIANIVGLCTEHHNLVHKDATWQKKLAKEKVGLVKKYSALSVLNQIIPALTKEMNSLFPKHFFVTNGKSTYDYRTAHGVSKDHWLDAYCIACSVLPNDVCDSNINSHVPYELKQFRRHDRRVLHKANMSRVYTLNGKTVATNRHKAIKQTTDSLEEFRQSHPGDVCKLKVKEHHPAYRNLNRNYPGSVFLVDGQVHVMQGVSGSHNGKADGYYNTNGNAYPYYKCKFVVKNEGIVFA

SEQ ID NO: 14912 - protein, 518 aa, unidentified
MVYVFVLDRDGNPLMPTTRCGKVRRMLKNGQAEVVFRIPFTIRLCYEPASKETQRLVYGCDPGRTNIGSAVVRENGCCVYLDKCATRNREIPQLMAKRRQHRQASRRGERLARKRLAKRLGTTTKKLLDRLLPGYEKPVRVKDIINTEARFNNRFRPKGWLTPTARQLLRTHLNILKKVRKILPITDVVLEANRFAFMQLDNPHIFRWQFQYGPLHGKGSVENAVKEQQGGTCIFCKHEIEHYHHIIPRSRGGSDTLPNMAGLCNACHDKVHKSEEWFRKLKKKKAGLNKKYGALSVLNQIIPYLVDSYTELFPDHTYVTAGYSTKQFREDHGIEKDHDSDAACIACSILEKVDRIIFPGMTYQMEQFRRHDRAKIKSFRNRYYYLGKEKVAVNRKKAIMADPSGKEKNGKLQTQDSLEDWFTKETERNGLQEAERKRSRLRAVKSIRIRNNMQRPLPGSIFIFEGKRYLLTGNHGEYYQTKVAGKTVEFLKSKCRIASGNQGLVYTGQVKSGASSHV

SEQ ID NO: 14913 - protein, 378 aa, unidentified; identical to SEQ ID NO: 2642

SEQ ID NO: 14914 - protein, 430 aa, unidentified
MRIMVYVLNPFGQPLMPTDDHRKVRILLKEKKATVVRRSPFTIRLLHRTKQYVQPVTLGVDAGSKHVGVSACTPEKELFRAELMPRNDVVDLMSTRRELRRSRRNRTTRYRAPRFENRVHSKRKGWLAPSVEVKIHNHNQLIEFACKILPVSLIRIETAEFDLQRLKAMEEGKPLPEGEDYQHGEMYDQYNVRQYVLFRDNYTCQCCGAHPTDKKPVKLHVHHKESRKVGGNAPNNLITLCEDCHDLLHKGIVELPDYKKRRGKSTRDATFMGIMRKTLLQRLRDKMGIPIQNTYGYITKAIRESNGIEKTHTSDARCIARCPKAKLAAEEYLIKPVRRHNRRLHKNAILKGGYRKANQAPTFVFGFKLFDMVDYNGEECFVYGRRSSGSFDVRHLDGKKVSAGVSYKRIRLLEHPNNLLFERGGGSSHD

SEQ ID NO: 14915 - protein, 465 aa, unidentified; identical to SEQ ID NO: 6446

SEQ ID NO: 14916 - protein, 470 aa, unidentified; identical to SEQ ID NO: 2825

SEQ ID NO: 14917 - protein, 442 aa, unidentified
MFCIDNRETHIPSTTLARRKILRKEGYPEMENIKKEYCFVVDKNNKPLAPTKMNKGWYLIRKGKAILKSMYPMVIQLEKEIKTNKNDKSYIVCGIDDGSIHVGLAIVQKCPTKNKVVFKGTIKQRQDVKHLMDVRRGYRHYHRYHKRYRPMRFNNRSSSKRIGRLAPSIKQKKDSILRVLYQLNKLINIKEYYLEDVCIDIRAMTDDYKPYKWQYQKSNRLDENLRKAAIIRDNYKCQECGKSNCKLEVHHIQARKYSGADTIGNLITLCFKCHQKTEGKEQDFEDKYFKIIGSKPKRFDYAMHVMQGKNYLRSKISELGLLHLTNGGETANKRIEWNIEKSHSNDAICITNSIPDSCSIKEWTIKPMKRKSKAKTDNVLGIKHRDLVSYTYKNGETHTGYVTALYPKQLALNFQSRIKHCKKVNARKCRLLWQFNKIYWLE

SEQ ID NO: 14918 - protein, 490 aa, unidentified
VDVVYVLAKNGVPLMPTQNYGYVRVLLKSHDAVVVRQKPFTIRLKYTTTTYTQPLVCGIDPGRTNIGVAVVTENGECVFSANADTHNKDVPKRMAERKAHRQASRHGERLRRQRRAKAAGTCFTEGKRQRILPGCKEPITCKGIKNSEARFNNRKRKKGWLTPTANHLLQSHLTLLRLVKKILPISKVVLELNSFDFMAMENPNIQRWQYQKGPLYGKGSVKDAVSMSQGGTCLFCSHSIQHYHHIVPRSKGGSNTLPNIVGLCENHHKLIHTDSVWQSKIKSEKAGRNKKYGALSVLNQIIPALTEALHEIPDIEVCVTDGHSTKAFRDVHQVDKDHHLDAYCIACSVLGDSITVAPPTNHYSLRRFRRHDRAAVSRQEERKYYLDSKLVARNRHKRTEQTADSLTEFRNTNPADIGKLRVIKGTAKYKDPTRILPGAIFLVNGKQMLFQGSTGKYKGKPVYYTFVGHSKRILATKCALLIKSGGWQFM

SEQ ID NO: 14919 - protein, 476 aa, unidentified; identical to SEQ ID NO: 13038

SEQ ID NO: 14920 - protein, 462 aa, unidentified; identical to SEQ ID NO: 10791

SEQ ID NO: 14921 - protein, 430 aa, unidentified; identical to SEQ ID NO: 4504

SEQ ID NO: 14922 - protein, 407 aa, unidentified
MADAASRRQRRAKANGTISKKCVKQTTAQNGSVSKRAKDIGVIKRRLPGCEKDVLCIGIKDKETKFTNRTRPEGWLTPTANHLLQTHINLVKKIQKFLPISDVVLEVNKFAFMRLDNPNIQKWQYQQGPLYKKESLESAVSEIQEHHCLFCKKPIDHYHHVVPQHKNGSNTIGNIVGLCAKHHDLVHKDSAWEKKLAKKSTGLYKKYGALGVLNQIIPTLTNELSSLFPKHSFVTNGKSTYDYRAAHGVSKDHWLDAYCIACSVLPSNVCDSNINNHMPYELKQFRRHDRRVLNNENMNRVYTLNNKAVAINRHKAKDQKTVSLEEFRKEHPDDVCKLKVKEHHPTYRNMNRNFPGSVFLVGKQIHVMQGIASSKDGKATKYNDTSATAIAAGKCKFVAKNTGILFV

SEQ ID NO: 14923 - protein, 493 aa, unidentified; identical to SEQ ID NO: 2644

SEQ ID NO: 14924 - protein, 413 aa, unidentified; identical to SEQ ID NO: 3587

SEQ ID NO: 14925 - protein, 442 aa, unidentified; identical to SEQ ID NO: 3234

SEQ ID NO: 14926 - protein, 406 aa, unidentified
MPCSPRKAKLLLKNKKAKVKHRMPFTIQLIYGRSGYKQPVSLGVDAGSKVIGLSATTEKKELFASEVVLRDDIVKLLSVRREFRRARRNRKKRYRAPRFNNRVHSKNKGWLAPSVENKIETHLKAVHHVFLILPIAKIIVETAAFDIQMLRAKELGLPLPEGVDYQQGEQLYSYNVREYVLFRDNHTCQHCKGKSKDPVLQVHHIESREVGGDAPNNLITLCKTCHAKYHAGLIKLQIKRGASFRDAAFMGIMRWAFYDRLKQIYPNVSMTFGYITKHTRIKHQLEKKHYIDARCISGHPNALPTENLYLQKAVRKRNRQLHKATINKGGIRKSNQSPKYVYGFQLFDKVFYDNKECFIFGRRATGYFDIRMLDGTKLSAGVSYKKLKLLERRKTILMQRVEDFAV

SEQ ID NO: 14927 - protein, 466 aa, unidentified
LSIKPLINIGEGVIYSSICTGLLLQTYQKRKEVPCMVYVLDINGQPLMPTTRHGKVRRLLNSHLAKVVKRCPFTIQLLYQSTKEIQPVSLGVDAGSKHIGMAATTEKKVVYQEELSPRNDVVKLLSLRRASRSSRRSRKTRYRKPKFNNRVHSKHKGWLAPSVEVKIQEHITAIKRICQILPISEIQVETAEFDFQRLKAMKEWKPLPVGTDYQLGEQYDFYNTRQYVLHRDGYICQCCGTHDNNIKLHVHHIESRQTGGDAPSNLITLCEHCHKALHKGKLELPKGKKRGKTYRDATFMGIMRKTLLERLRKEVDVPVSGTYGYITKYLREKTDLEKSHINDAICISKYPYAKPLDTYYLTKVVRNHNRQIHKSNFSKGGIRKRNQAPYLIKGFRLFDKVLYQGKEYFIFGRRATGYFDIRTLDGTKVNKGSISYKKLRIQDTAKAYLKEARAIPHMNKFTCVLA

SEQ ID NO: 14928 - protein, 427 aa, Parasutterella sp.
LRVFVRNKRGKPLMPCSPAKARLLLKEKKAIVVRRTPFTIQLTIATGETKQPVSLGVDAGYKHVGLSASTEKAELYASEVELRQDITDLLSARRALRQSRRNRKTRYRAPRFDNRIRTKRKGWLAPSVENRIDAHLSRIEAVLRLLPVTKITVETASFDLQLLKNPDISGKEYQEGEQLGFWNIREYVLCRDGHVCQHCYGRSKDPVLNVHHLESRRTGGDSPGNLITLCETCHKALHRGEITLKAKRGQSFRAEAFMGIMRSEVLNRLKASHPELEVNNTYGYRTKHARIANDIAKSHCADAFCIAGNLGAERLGEFFFQKQTRRNNRQIHKLSILKGGIRKRNQAPFEVNGFRLFDKVACQGEEGFIFGRRSSGFFDVRKLDGTRISAGISYKKLHLLEKRRTYLTEIRKEEVLPPLPEGRGLRA

SEQ ID NO: 14929 - protein, 417 aa, unidentified
MPCSPAKARLLLKEKKAIVKRRTPFTIQLTIATGEAKQPVALGVDSGYKHIGLSATTEKAELYASEVELRQDITDLLSARLALRRSRRSRKTRYRAPRFDNRVASKRKGRLAPSVENRIAAHMSRVEAVMRVLPVTAITVETAAFDTQLLKNPDIAGAVYQQGEQLGFWNVREYVLFRDGHVCQHCRGKSKDPILNVHHIESRRTGGDAPNNLITLCETCHKAFHRGEIKLKVRRGKSFKAETFMGIMRWTLLERLKKAHPELRVRNTYGYLTKHKRISHGIAKSHCADAYCIADNLGAKRLEGFFFQKQTRKHNRQIHKLSILKGGLRKKNQAPYEVKGFRLFDKVICKGEEAFIFGRRTSGSFDVRRLDGTRISAGISYKKLRLLEPRTTYLTEFRKEAALPPLHKCRGSRAEFL

SEQ ID NO: 14930 - protein, 430 aa, unidentified; identical to SEQ ID NO: 4504

SEQ ID NO: 14931 - protein, 557 aa, unidentified; identical to SEQ ID NO: 10483

SEQ ID NO: 14932 - protein, 412 aa, unidentified
MSKQKEYAFVLDFTNNKLAPTNTNKAWILIRKKKAKLLQKYPMVIQLNYEVKIDKETEIICGIDDGSSHVGISLIQKCKTYNKPIFKGTIELRQDIKGLMDVRRGYRRYKRSHKRYRQARFSNRSMSTRKGRVAPSILQKKQSIIRVINQLLRFINIKKFHLEDVTIDIRALTDGKKLYRWQYQKSNRLDENIRKAIILRDGCKCMECGKSNCVLEVHHIVPKRLKGKNNQDNLITLCSNCHDKTKGQEEKFIKHYQLMINGKNIRLDYAQHVMQGKNWLRNELSKLGKLVLTTGGDTANKRIDWNIDKTHSNDALVASDLIINNELCNIKDYIIKPMRRKSKAKTYECLGFKHRDLIKYTKKNGESYIGYITALYSEKKQCNITTLENKILKRYGIKPCKLLWRFNKIYWF

SEQ ID NO: 14933 - protein, 516 aa, unidentified; identical to SEQ ID NO: 2369

SEQ ID NO: 14934 - protein, 462 aa, unidentified; identical to SEQ ID NO: 2842

SEQ ID NO: 14935 - protein, 411 aa, unidentified
MVYIQDIDGKPMMPTTRHGKVRRLLKDNKAVVVNTCPFTIKLTYKTSDYKQEIVLGVDSGTKHVGLSATTKSKELYASEVILRSDVVDLLSTRRGLRRTRRSRLRYRKQRFNNKVKSKKDGWIAPSVRHKIDSHIRIISFVYSILPVSKLIVEVAQFDTQKIKNPEISGKEYQEGEQLGFWNVREYVLARDGHKCQHCKGKSKDPILNIHHIESRKIGGDSPSNLITLCETCHKEFHKGNIKLKVSRGKSLRDAAVMGIMKWKLYEELKSRYDNVSMTFGYITKYNRINHGIEKSHVSDAFVISRNFNSCRLGYYYKRKLVRRHNRQIHKMKILKGGIRKMNQAPFKVFGFRLFDKVMFQGEEHFIYARRLSGQFNIRDINGENKKDVSCKKLKYVSHGLVSVKTNLFLSQ

SEQ ID NO: 14936 - protein, 512 aa, unidentified
MSTVYVLNKDGKPLMPTTRGGHVRHLLKEQKARVVRAKPFTIQLLYETNDVVQPLYLGIDPGRTNIGVAVVKANGTAVFTAHLETRNKEIPKLMQDRKKARRARRTNGRRCRRQRRAKANGTISKKRVKQTTAQNGSVSKRAKDIGVIKRRLPGCEKDVLCIGIKNKETKFTNRTRPEGWLTPTANQLLQTHINLVKKIQKFLPISDVVLEVNKFAFMRLDNPNIQKWQYQQGPLYKKESLESAVSEIQEHHCLFCKKPIDHYHHVVPQHKNGSNTIGNIVGLCAKHHDLVHKDSAWEKKLAKKSTGLYKKYGALGVLNQIIPTLTNELSSLFPKHSFVTNGKSTYDYRAAHGVSKDHWLDAYCIACSVLPSNVCDSNINNHMPYELKQFRRHDRRVLNNENMNRVYTLDNKAVAINRHKAKDQKTVSLEEFRKEHPDDVCKLKVKEHHPTYRNMNRNYPGSIFLVGKHVHIMQGIAGSKDGKATTYKDSNANSITASKCKFVAKNSGILFV

SEQ ID NO: 14937 - protein, 412 aa, Coprococcus sp.; identical to SEQ ID NO: 9618

SEQ ID NO: 14938 - protein, 428 aa, unidentified; identical to SEQ ID NO: 4440

SEQ ID NO: 14939 - protein, 512 aa, unidentified
MSTVYVLNKDGKPLMPTTRCGHVRHLLKEQKARVVASKPFTIQLLYKTNDVVQPLYLGIDPGRTNIGVAVVKADGTAVFTAHLETRNKEIPKLMKKRKDSRRARRTNGRRCRRQRRAKANGTISKKCVKHDTAQNGSVSKRAKEIGVIKRHLPGCEKDVLCIGIKNKEAKFSNRTRPEGWLTPTANQLLQTHINLVKKIRKFLPISDAVLEINKFAFMQLNNPNIQKWQYQQGPLYQKANLEEAVSEMQEHHCLFCKKPIAHYHHVVPQSENGSDTIGNIVGLCTKHHDLVHKDTAWQKKLAKKKTGLNKKYGALSVLNQIIPALTKELSSLFPKHFFATNGKSTYDYRSAHGVSKDHWLDAYCIACSVLPNDVCDSGINNRVPYELKQFRRHDRRALNNENMSRVYTLNDNVVATNRHKATKQTTDSLEEFRQNHPDDVCKLKVKEHHPTYRNMNRNYPGSVFLIGKQVHVMQGIAGSKDGEATTYKDTNANSIAAGKCKFVAKNSGILFV

SEQ ID NO: 14940 - protein, 425 aa, Nodularia sp.; identical to SEQ ID NO: 3165

SEQ ID NO: 14941 - protein, 466 aa, unidentified; identical to SEQ ID NO: 8215

SEQ ID NO: 14942 - protein, 506 aa, unidentified
MKQKKQKVIVYILNKKGKPLMPTTRCGHVRKLLDSKKAVVVNSNPFTIRLKYDTPNGVQDVFAGIDSGRENIGSGASNEDGDCLYLGELKTSNKSIKIKMTERAGFRRERRRHDRQNKQRKARKDHTEIKNGNADICRTTISCKSVQISYPAAEKSVTHKIIRGKEGKFANRHRNEGWITPSARQLVQMHMNDLKSMCKILPISHVTLERVAFDFQKLENENIKVWEYGKGKLYGYDSPEEYIHDVQNGKCLVCGKPHIDYLHHIIPRSKGGSDKVSNIAGLCYDCHYGPMGVHNCQDTQDRLPELKNEADKQYKVSLLNSVMPVLIEEMDKFCKANSIMFSICEGHDTAKVRDMYDLQKDHCIDGFAISLVDRNVKSVDVMPDRIYQKQRYKKKSKNIIQKRNCREYYDGKKLVAVNRHKGTDQKADSLEEYMNTYAETHTADECKKHFDSLTVKPARRTYTFHKKGCICPFHIGDKVRYEKKNKIKGNTKVETFICESIHFYQG

SEQ ID NO: 14943 - protein, 414 aa, unidentified; identical to SEQ ID NO: 2588

SEQ ID NO: 14944 - protein, 406 aa, unidentified; identical to SEQ ID NO: 2703

SEQ ID NO: 14945 - protein, 451 aa, unidentified
VLHARNLSITLAKVSYGLYDAGLPQKIIQKERSTYMVYVLSQNGQPLMSTIRHGKVRRLLKEGKANVVKKCPFTIRLTYPSGDQTQEISLGIDSGSKYIGISATTQKKVLYEAEVELRNDISKLLAARRQNRRSRRSRKTRYRKPRFDNRKRKEGWLAPSVQQKVDCHLKVVEDVCKLLPVTRIIAEVASFDIQKIKDPKIHGTDYQQGDQLGFWNVREYVLFRDGHTCQCCKGKSKDKILNVHHIESRQTGGNAPNNLITLCETCHKGYHKGQVKLPKKIKRGMTFKDAAFMGIMRWAFYDRLKEIYLPLGIDVSLTYGYLTKNTRIAHQLPKTHYLDARCISGHPDAISDGIYYHQKKIRCHNRQLHKANTLKGGIRKRNQAEYLVHGFRLFDKVRYQGKDYFIFGRRKSGYFDIRDLNGEKVNKGSISYKKLRLVETRRSYLTERRLA

SEQ ID NO: 14946 - protein, 396 aa, unidentified
  REGION 1..396: note = Ga0307928_10042824
MTQKIFVIDADGKQLLPTHPARSRKLLRAGRAQVHQVVPFTIQLSRVVENPVGAFTVGIDDGAKHVGIAVVNRHQKEVVFRGTIRLRQDVSRKMTQRAAYRRTRRSRLRFRAPRFRNRGRRGFLPPTIRQKKESILRVLVDLKKRLNIIEATIEEGQFDTSSLVAGRKLTGAEFQKSEYSKGGFRAKVLWRDKYKCQHCGTSDRLQAHHIQFKSRGGGDSPQNGLTLCGTCHADLHEGLWVLTKKPRPFRYPAHLQAGKNYLRELLHGIGLRIEVCFGWMTAKWRKCLELEKAHDLDAVAMVCRGCKPYLCLRSFLVIPKRTKVWENNPTKKRFEFRGFRHWDLVKARHRTRGVVVGSIRSLKKTTLTLRTNWDSNFPVSYNKSQVLWRFGGLVYV

SEQ ID NO: 14947 - protein, 470 aa, unidentified; identical to SEQ ID NO: 6354

SEQ ID NO: 14948 - protein, 431 aa, unidentified; identical to SEQ ID NO: 9032

SEQ ID NO: 14949 - protein, 407 aa, Succinivibrio sp.; identical to SEQ ID NO: 5381

SEQ ID NO: 14950 - protein, 428 aa, Enterococcus sp.; identical to SEQ ID NO: 4335

SEQ ID NO: 14951 - protein, 475 aa, Petrotoga sp.
MAGEVLLLKTLLIIGEVNLPPQGELLSRRMFFMVYVLSVNGKPLMPTNNAKARILLKQKKAKVITVRPFTIQLLYETTTYTQSIILGIDSGYLNIGFSAVTEKKELISGEVKLLQGMKERLYERSMYRKIRRQRLRYRKPRWSNRIKSKKQGWLAPSIQHKLDSHIRFIDSIYKILPVTKTIVEIANFDIQKIKNPDINGAEYQQGDMLGFWNIREYVLYRGGHKCQNPNCKNKDKNPILEVHHLNYRSNGATERPEDLITLCTKCHTSPNHKGFLKDWKPKLKNFKDATFMSIVRWYLVNILKEKYNNVSFTYGYITKNHRINNKIEKSHYNDAFCIAKGINQIRIKPVKIEQVRRNNRSLEKFYDAKYIDKRTSEKVSAGDLNCGRRTRNKNKNGERLKNFRGQKVSDGQRRIRAGKYFYQPNDLVRYEGKIFTVRGTQNGGKYIALKEIKKVPKVELLTPYKFNKGFVYGLC

SEQ ID NO: 14952 - protein, 424 aa, Enterococcus sp.; identical to SEQ ID NO: 4844

SEQ ID NO: 14953 - protein, 420 aa, unidentified
MQYVYVLNKHGEPLMPCSPGKARLLLKQQKAHVVKRTPFTIKLLYGGAGYKQPITLGVDAGSKHVGLSASTEKRELYREEFTPRNDVVDLLSTRKQNRRSRRNRKTRYRASRFDNRVHGKHKGWLAPSVEVKIQEHITVIKRTCRILPVALVRVETAEFDTQRLKAMLEGKPLPVGTDYQLGEMCDEYNVRQYVLNRDHYTCQCCGAHTTTKKTVKLHVHHLESRKVGGNAPSNLITLCTTCHDALHKGKVSLDNKKRGKPMRDAVFMGIMRKTLMARLREELPIPVQGTYGYITKMWREQNDIKKSHVNDARCISKHPLAEPCSVCYRTKAIRHHNRQTHKANFSKGGIRKRSQMPYVVGGYRLWDKVLYKGQECFVSGRRTSGSFTLKKLDGTRISKGVTFKKLRLLEPATNYLIERM

SEQ ID NO: 14954 - protein, 506 aa, unidentified
MVAVLSNVGKPMMPTTEYKARKLIEKGRAIPYQYKPMFTIMILDRSGGYTQPIELKEDTGYEHIGISVCSQKHEYERKEIITLLDEPEKHHDARMHRRTRRNRLGYRPPRFDNRKRENGWIPPSLQHKIDIHLYWFNQYAEVLPITDAVFEIGTFDTQRLNAIEKGEKLPYGEDYQKGEQADFYTLRDAVFARDDYTCVVCGKGIQDGAVLRTHHVGYRHGDRSNRMSNLVTVCDHCHTTKNHQEGGALYDLKAPTKKKANAAFMNVARQRIIDCAKKSHPEINISCAFGSETKMSRKNLQIEKSHTNDAYAMGEFHPKHRCKEKIFQKVRRNNRILSRFYDAKYIDRRDGLTKTGKQLSSGRTNRNHKLDSENFRVYRGKKIQKGRTATRQQVYEFKTKDIVLYQGKRYVVKGTNNKGQNVQLYLNMTADLKDLTIKTKNKRKTADPNRIEVCDKVFTEFNGKKKVFTVKNIDPATNQVSLQADLSTKPSELKLVKYSNGYKQIK

SEQ ID NO: 14955 - protein, 431 aa, unidentified
MPNKVYVINKHGRPLMPCSPAKARHLLDAGKAKVKKRTPFTIQLVYGSSGYTQEVILGVDAGSKTIGVSALTKKEELFAANVIPRNDVVDLLSTRREFRRARRNCKTRYRKPRFDNRVRSKHKGWLAPSVEVKIQGHITAIRRVCGILPVSKVVVETAEFDLQLLKAIEKGKPVPQGEDYQQGEMYGHYNVRQYVLWRDDYTCQCCGAHTTKKKEVRLHVHHLESRKTGGDAPSNLITLCDSCHEKLHKGLIAEKDFKKRKRRSTWDATFMGIMRKTLMQRLCSELPIHVVETRGYITKATREKLLVLPKSHTNDALAIALGKHGFNVGYLPEIAQIDKIYTIRPVRHHNRQLHKVTILKGGIRKSNQAEKYVFGYRLFDKVQFNGQDCFIWGRRTTGIFTIKTINGKMIKDGISFKKLKPVEKSTSYLIA

SEQ ID NO: 14956 - protein, 439 aa, Arcobacter sp.; identical to SEQ ID NO: 3280

SEQ ID NO: 14957 - protein, 431 aa, unidentified
MPNKVYVINKHGRPLMPCSPAKARHLLDEGKAKIKKRTPFTIQLLFGSTGYTQEVILGVDAGSKTIGLSASAETEELFSAEVKPRNDVVDLLSTRRESRRARRNRKTRYRKPRFDNRVCSKHKEWLAPSVEVKIQEHITSIKRVCRILPVSKVVVETAEFDLQLLKAIEEGKPVPQGEDYQQGEMYGHYNVRQYVLWRDNYTCQCCGAHATKKKEVRLHVHHLESRKVGGDAPDNQVTLCESCHEKLHKGLIAEKDFKKRKRCSTRDATFMGIMRKTLMQRLCSELPIPVIETRGYITKATREKLLVLPKSHTNDALAIAQGKHGFNVGYLPGIEQIDKIYTIRPVRHHNRQLHKATILKRGIRKSNQAEKYVFGYRLFDKVQFNGQDCFIWKRRTSGYFVVKTIDGKIIHNSASFKKLRIAERASNYLIA

SEQ ID NO: 14958 - protein, 467 aa, unidentified
MKVFVIGMTGKRLCLTSPSKAKKLLKAGKAHVYRRVPFTIRLDYKTGGSAPALKLGIDTGEQHIGTAVCNDATVFCKSEIELIKSMEKKKRLEKRKIYRRSRRYRKTRYRHPKFRFRTKRVYVEGGYRKRKGGKMVLRHWKKVPNSVMTNRHEGWLPPSIESKVKHHIDWNNRYMDVLPDGTMLGIEVARFDIARMKDPSIRGELYQFGRMYGRENTKAYVLAKFDYTCPICKKKFDRDRKPRMHHVTMRKNAATDNPDEYAPVCVLCHSGEEHLPGGVLDKLAKECRRREYREPTFMNILRRRLFETYPEAEFTYGNITKADRKMLGLEKTHANDAVSIAMHGAKKVIDCEDTVYYRQVHRKKRSLHEATPRKGKKEPNHTAKRNVKNVPYVGKFHINDKVKGPDGNIGYITGFTGSAAYITDFTGEYIYPEGKDYKQHTLSSLRYVHHCGNWITSSVSGAAVSHD

SEQ ID NO: 14959 - protein, 428 aa, unidentified; identical to SEQ ID NO: 9019

SEQ ID NO: 14960 - protein, 413 aa, unidentified
LKVFVLNMRGKPLMPCSPAKARHMLKAGKAFVVRRTPFTIKLTIATGETKQDVTLGVDAGARHVGISATTEKEEVFASEVALRQDITGLLADRLAFRRARRNRKTRYRAPRFNNRVRSKHKGWLASSVENRIQAHMSRIEAVCRLLPVTKIVIETASFDIQKIRNPEVEGTGYQQGDQLGFWNVREYVLFRDGHICQHCRGRSKDPILNVHHLESRKTGGDAPNNLITLCETCHKAYHAGKIKLKVKRGQSFRAEAFMGIMRWTLLNRMRKAHPSLPVENTYGYLTKHKRIALGLPKTHCADAFCIAGNLKALRRGDFLFLQQTRKHNRQIHKCSILKGGVRKLNQAPFLVKGFRLFDKVRIGGQIGFVFGRRVRGTFNIRRLDKTVIGTDINCKKLSLLETRKTFLTELRKE

SEQ ID NO: 14961 - protein, 422 aa, unidentified
LNKRGKPLMPCSPAKARLLLKEKKAIVVRRTPFTIQLTIATGESKQPVSLGVDAGYKHVGLSASTEKAELYASEVELRKDITDLLSARRALRQSRRNRKTRYRAPRFDNRIRTKRKGWLAPSVENRLNAHLSRIEAVLRLLPITKITVETASFDMQRLKNPDISGKEYQEGEQLGFWNVREYVLFRDGHVCRHCHGRSKDPVLNVHHLESRRTGSDSPDNLITLCVTCHKALHRGEITLKAKRGQSFRAQAFMGIMRREVLNRLKASYPELKVHETYGYLTKHARIANGIVKSHGADAFCIAGNLGAERLGEFFFQKQTRRNNRQIHKLSILKGGIRKRNQAPFEAKGFRLFDKVACQGEEGFIFGRRSSGSFDVRKLDGTRISAGISCKKLRLLEKRRTYLTEIRKEEALPPLPEGRGLRA

SEQ ID NO: 14962 - protein, 421 aa, unidentified
MVYVVANDGQPLMPTNRYGKVYRMLRSGMAVVVKKCPFTIQLQYESERNVQPVALGIDAGSKHVGVSATTKAKVLYESDVELRGDIVKLLATRRQLRRSRRSRKTRYRPARFDNRKRKNGWLAPSIRIMEDIRQKIESHLTVVANVCKILPVSRIIVETASFDIQKIKNPDIQGTEYQQGEQMDFWNVWEYVFFRDGHTCLCCKGRSKDKILNVHHIESRKTGGNAPNNLITLCETCHKGYHNGIVTLPKNIKRGMKFKDAAFMGIMRWTFYNTLKEQYEPDIPVSMTYGYLTKNTRICHDLPKGHCIDARCISGNPDAVSDGTYYYQKKVRCHNRQIHKQTILKGGVRKSNQAEYLVKGYRLFDKVRYQGREYFIFGRRKSGFFDIRTLSGEKVNKGSISVKKLTFVDTRKNYLIERRTV

SEQ ID NO: 14963 - protein, 436 aa, Sutterella wadsworthensis
  VARIANT 436: note = X can be any naturally occurring amino acid
MSTSVFVLDKKHRPLMPCRPARARRLLRAGRARVVKRFPFVIRLVDRTVEQSEVQPVLIKLDPGSRETGAAVVRDDEKKRHHALAFFVIEHRGGAIRDALKARSAFRRRRRSQNLRCRSPRFLNRVKPKGWLPPSLRHRVETTLSFVRRMCRYLPVSGIATELVKFDSQKLQTPEVSGIEYQQGTLFEYEVREYLLEKFGRKCVYCGAEGVPLNIDHVVPRAKGGSNRVSNLVLACVSCNQKKGARSLEDFLKGKPEVLARVRRELKTPLRDAAAVNATRWVLFNELKATGLPVETGSGALTKLNRHAFGVEKEHWLDALCVGRLNGVVTRKGLNVLEIRCMGRGSRQRTRLTKYGFPRGYLMRQKCVHGFATGDMVEANVPKGKKAGLWRGRVAVRVSGSFNIQTPKGVIQGVGWKHCRLISHNDGYGYAWLGHX

SEQ ID NO: 14964 - protein, 453 aa, unidentified
LDTVAVISASGKKLMPTNSYRARGLLKSKRAVIHKYRPVFTIKLVDRTNGYTQPIEYKCDTGYQNIGISICSDTKEFVNEQRDLLKDEAKKHSDSRRYRRTRRNRLRYRKKRFNNRRGMISRDGFAPSIRNKRDVHVRLYEEYYKIFPIAKAVFEMGQFDTQVLKAIEAGLPVPKGADYQRGEQYGYATLREAVFARDDYKCICCGKSAIKDGVKLRIHHIGYLSGDRSNRMANLGSVCENCHTPNNHKPGGKLYNLKPKLKELKGATFMTTVRYSMIKNLKAATPNVDIKVTYGAETKLARKNLNVRKTHSNDAYCMGEFHPKHRSDFKHYKKCRRNNRVLSRFYDAKYRDLRDGSTKTGSQLSCGRTNRKISRHTKLDERIYRAHKISEGRISTRRQHYSLRPGDKVLYDGKVYFAKGVQSNGTSIKLANGKTCPLKKVSILQHCNAWAII

SEQ ID NO: 14965 - protein, 456 aa, Achromobacter sp.; identical to SEQ ID NO: 7899

SEQ ID NO: 14966 - protein, 401 aa, unidentified
LNKRGKPLMPCSPAKARLLLKEKKAIVVRRTPFTIQLTIATGESKQPVSLGVDAGYKHVGLSASTEKAELYASEVELRKDITDLLSARRALRQSRRNRKTRYRAPRFDNRIRTKRKGWLAPSVENRINAHLSRIEAVLRLLPITKITVETASFDMQRLKNPDISGKEYQEGEQLGFWNVREYVLFRDGHVCRHCHGRSKDPVLNVHHLESRRTGSDSPDNLITLCETCHKALHRGEITLKAKRGQSFRAQAFMGIMRREVLNRLKASYPELKVHETYGYLTKHARIANGIVKSHGADAFCIAGNLGAESSANSSSRSRLAETTGRFTNFPSSKGAFESAIRHPLRPKASVFLIRLPAREKKASFSAVDHPGLLMYESSTAPAFQPASAARSCVCWRRDGPI

SEQ ID NO: 14967 - protein, 415 aa, unidentified; identical to SEQ ID NO: 4916

SEQ ID NO: 14968 - protein, 415 aa, Eubacterium sp.; identical to SEQ ID NO: 6925

SEQ ID NO: 14969 - protein, 419 aa, unidentified; identical to SEQ ID NO: 10192

SEQ ID NO: 14970 - protein, 527 aa, Streptomyces sp.; identical to SEQ ID NO: 12129

SEQ ID NO: 14971 - protein, 408 aa, unidentified; identical to SEQ ID NO: 12402

SEQ ID NO: 14972 - protein, 496 aa, Oribacterium sp.
VPCGTKRRFLERRHRQILIYIIDASGKPLMPTARTGHIKRLLNRGKARIATKVPFTVQLKYETPGITQPLYGGTDPGRTNLGEAVIDENGTVIYKSHVETRNKDIPKLMSERKQHRQASRRGERLRKKRRAAKCGTTKEFTEGRMISGCEKPVMMKDIINTESRFANRKRPENWITPTTRQLVQTHLNMVRKICQVLPVTDWTLEVNRFAFMKMDDGSIRGLDFQNGRLKGYSSSHEYIYAMQDGKCACCDNDIEHYHHLTPRSKDGSDTPENLIGLCGSCHEKVHTGNLKLESIGLRKKYAALSVLNQAIPFIIEGLVETFGEKYVHFCEGYNTQMIRKSLCIGKDHPEDAVCIALLGSGIQKVTDNTEAFEVMQFRRHNRAIINNQRERTYYLNGKAVCKNRHKRFEQKGDSLEEFSKKHPSDVKRLTVKRSTRFYNANSRMMPGVVFMYKGQRHIMSGQLTGGKYLRAVGDTKTNYPVTQCYILNGNTGLVYI

SEQ ID NO: 14973 - protein, 441 aa, unidentified
MTKMATQKVTQVCVLDQNGQPLMPTQRLGKVYRLLKTKKAHIVAYEPFTIKLNYEPKTHIIQPMTLGVDSGAIHSGYSLANEHSEYYSAEVIARDNISKNISDKRMYRRNRRSRKTRYRKPRFNNRKNKGKGWIPPSLEQKVTVQVNEIKHLHQYFPIKDIIIEVAEFDIQKIENPEISGKEYQQGTLQGYNIRNYLLEKYNHKCFYCDKEVSTFEVEHMIPRARRGSNRIDNLTLACHDCNQKKGTLTAEEFIKQTLTPQKAAQKIRQIPKMKQLLKYMAHMNATRWVLYNTIKETYESVSLTYGYITKHNRINACLPKAHHIDAKCITGFSTVPSFDITVVKTKMRRHNRQLHRATFSKGHKRRAATLSKYVHGFQLYDIVLFNNHRYYIKSRRSFGSFKLASLEGLKDEERSYKKLTFLTHTNAYLTNHYVNDKSVNG

SEQ ID NO: 14974 - protein, 257 aa, unidentified; identical to SEQ ID NO: 5154

SEQ ID NO: 14975 - protein, 413 aa, unidentified; identical to SEQ ID NO: 2636

SEQ ID NO: 14976 - protein, 466 aa, unidentified
DSLFTKGVPCMSTCVCVLSNSGERLMPTIRLGKVRRLLKDGKAKIVKHHPFTIQLLYDSKTNTQPIEICEDVGYNYIGISVKSESHEYVSAQYDTLQDEKEHHDDCRKYRRTRRNRLRYRKPRFDNRKRSEGWLAPSLEHKKQLNIRLIERYVSVIPITRATVEVGSFDTMLLQAIQKGESKPEGVDYQKGPRYNLATLREAVFYRDNYTCQVCGRKVADGAILHMHHMFYWKGRHGDSLNELLTVCEKCHTPANHQKSGKLYGFGENVKFADLSGAAFMNTVRWQIVNELYAAFGKPFVTITYGAMTKEKRIALRLEKSHNNDAYAMGEFHPNCRCTFEHYEKVRRNNRILEKFYDSHYIDIRTGEIATGKELFNGRINRNHKKDSENFHKYRSKKVSKGRRSIRRQRYAIQPYDTVRLEGKTYITSGCHNKGTRLLIPANGKSKSVAISKVQVVCHAGAWIQII

SEQ ID NO: 14977 - protein, 447 aa, unidentified; identical to SEQ ID NO: 3915

SEQ ID NO: 14978 - protein, 442 aa, unidentified; identical to SEQ ID NO: 2903

SEQ ID NO: 14979 - protein, 493 aa, unidentified; identical to SEQ ID NO: 11733

SEQ ID NO: 14980 - protein, 431 aa, unidentified; identical to SEQ ID NO: 7992

SEQ ID NO: 14981 - protein, 249 aa, unidentified
MVYVQDIDSKPMMPTTRHGKVRRLLKDNKAVVVNTCPFTIKLTYKTSDYKQEIVLGVDAGTKHVGLSATTKSKELYSGEVILRNDVVELLSTRRESRRARRNRLRYRKPRFENRVKSKRLGWVAPSVRHRIDAHIRVIDNVCSILPISRIIIEVAQFDTQKINNPNISGNEYQKGDQLGFWNVREYVLARDGHKCQHCKGKSKDSILNIHHVESRKTGGDSPSNLITLCETCHKEYHKGNIDLTRQVTS

SEQ ID NO: 14982 - protein, 423 aa, unidentified; identical to SEQ ID NO: 4024
  source 1..423: note = Lachnospiraceae bacterium UBA7730

SEQ ID NO: 14983 - protein, 426 aa, unidentified
MVYVQNHLGQPLMPTQDHRKVRLLLKAGAAVVVRRMPFTIRLTTRTKTYVQPVILGVDTGSKTVGMSAATHEEEVFAAELTPRNDVVKNLADRRKFRSSRRGRTTRYRQPRFNNRVHSKHKGWLAPSVEVKIQEHITSIKRACELLPIGKVVVETAEFDLQLLKSIADGMPVPQGENYQKGEMYGFYNVRQYVFFRDGYTCQCCGAHGKGIKFHTHHLESRKTGGNAPDDLVTVCDKCHKAFHAGLITDAKLKKRRRKSTRDAAFMGIMRKTLLQRLRAELPIPVVETRGYITKATRERLLKLPKSHTNDALAIAMGRHGFGIEEVTYMPQSDRIYQIKPVRHHNRQLHKAIPKKGGRRQRSQGPKYVQGFRRFDKVLYRGQECFIWGLRTRGYFQLKLLNGTKVHESAKASELILLEHRSGYLIA

SEQ ID NO: 14984 - protein, 418 aa, unidentified; identical to SEQ ID NO: 2816

SEQ ID NO: 14985 - protein, 451 aa, unidentified; identical to SEQ ID NO: 5875

SEQ ID NO: 14986 - protein, 424 aa, unidentified
MSTNFVFVLDTNRKPLAPCKPGVARSLLKAGKAKVFRRYPFTIILNKQINDKRKTLQLKIDPGSLQTGFALVTQGKEVIWAMVLTHRGQQTKDAMLRRCGIRRGRRNRGTRYRKPRFLNRRRPKGWLAPSLKHRVLTIETWVNRLRKLTPICSLAMELVKFDTQKMENPEVSGVEYQQGELFGYEVREYLLEKWERKCAYCGAKDTPLEVEHIYPISRGGSNRVSNLTLACQPCNQGKGNQDIRDFLCGKPDLAARILKQAKVPLKDAAAVNSTRWRLFETFKATDLPVTTGSGAHTKFNRRRFDLPKEHWIDAACVGEMKSLTLLTRQPLLVKATGHGCRQVIPMNKYGFPRQGYKPKKPVPGWKTGDIVNVVTGKNAGLKAVRIKTVRAKGSFDIKPGDKILSVSRNHIQPVHRQDGYGYSF

SEQ ID NO: 14987 - protein, 364 aa, unidentified; identical to SEQ ID NO: 13431

SEQ ID NO: 14988 - protein, 365 aa, unidentified
KKRHHALAFFVIEHRGGAIRDALKARSAFRRRRRSQNLRCRSPRFLNRVKPKGWLPPSLRHRVETTLSFVRRMCRYLPVSGIATELVKFDSQKLQNPEVSGVEYQQGTLFKYEVREYLLEKFGRKCVYCGAEGVLLNIDHVVPRAKGGSNRVSNLVLACMSCNQKKGARSLEDFLKGKPKVLARVRRELKTLLRDAAAVNATRWVLFNELKATGLPVETGSGALTKLNRHAFGVEKEHWLDALCVGRLNGVVTRKGLNVLEIRCMGRGSRQRTRLTKYGFPRGYLMRQKCVHGFATGDMVEANVPKGKKAGLWRGRVAVRVSGSFNIQTPKGVIQGVGWKHCRLISHNDGYGYAWLGHAPHSSPA

SEQ ID NO: 14989 - protein, 453 aa, Erysipelotrichaceae sp.; identical to SEQ ID NO: 11367

SEQ ID NO: 14990 - protein, 460 aa, Scytonema sp.
MSNYVFLIDQNKTPLNPVHPAQARKLLDSGKAAVFRRYPFVLILKRVIENPNVYPLTLKIDPGSKVTGIVLVTNQGDVIWAMELQHRGQQIKDALEHRRAVRRGRRNRNTRYRQTRFLNRKRPSGWLAPSLRHRVLTTETWVKRLQRFVPIGSIVQELVKFDTQAIQNPEISGTEYQQGTLHGYECREYLLEKWNRQCAYCGVKDVPLEIEHIQSKSKGGSDRISNLCLACHKCNQRKGNKDIKDFLKGKPDVLNRVQKLGLAPLKDAASVNSTRWSLFNTLKSFGLPIITSTGGQTKFNRTRFNLPKAHWIDAACVGDALSPKNERNPINPTINRAASELTEEGSAHFLRVRPRVVETIKLVITKILKVRATGFGGRQRCQTDKFGYPQKHRPLRPILGFSTGDIVRADVPKGKYAGTFTARVCPMSHGYGEFVIDKKRRSVKLEYLTPVHRKDGYDYA

SEQ ID NO: 14991 - protein, 493 aa, unidentified; identical to SEQ ID NO: 2644

SEQ ID NO: 14992 - protein, 420 aa, unidentified
MQYAYVLNKRGEPLMPCSPGKARILLKQQKACVVKRTPFTIKLLHGSAGYKQPITLGVDAGSKHVGLSASTEKRELYSEEFTPRNDVVELLSTRRQNRRSRRNRKTRYRAPRFNNRVHSKHKGWLAPSVEVKIQEHITVIKRICRILPITLVRVETAEFDTQRLKAMLAGKPLPVGTDYQLGEMYDEYNVRQYVLKRDNYTCQCCGAHTTAKKTVKLHVHHLESRKVGGNAPSNLITLCTTCHNNLHKGKITLDGKKRGKTLRDAAFMGIMRNTLLTRLRNELNIPVQNTYGYITKLLREQNDIKKSHVNDASCISKHPLAKPCSVCYRTKAIRHHNRQIHKAKILKGGIRKANQAPYIVKGFRLWDKVLYNEQECFISGRRSSGYFALRKFDGTTITNSISFKKLRLLEPATNYLIERK

SEQ ID NO: 14993 - protein, 416 aa, unidentified
MVYVLDKNGQPLMPTDRHRKVRLMLQSGQAKVIKRCPFTIQLNYDSGHQTQEISLGIDAGSKHIGVSTTTKIKVLYEVDVELRNDIVDLLSSRRELRRGRRNRKTRYRQAKFNNRRRGNGWLAPSIRQKIGTHLTVVENICKMLPISRIMVETASFDIQKIKNPDIQGAEYQQGDQLEFWNVREYVLFRDGHICQCCKGKSKDKILNVHHIESRKTGGNAPNNLITLCETCHTGYHKGTVQLPKAIKRGMRFKDAAFMGIMRWAFYEALKQQYEPVGTPVHNTYGYITKHTRIAYNLPKEHYVDARCISGNPEASSNGEYYYQKKVRCHNRQIHKLTVLKGGIRKQNQATYLVKGYRLFDKVSYQGKGYFVFGRRQSGFFDIRTLSGEKVNKGSLNCKKLKFIATRTYYLTERRAV

SEQ ID NO: 14994 - protein, 536 aa, unidentified; identical to SEQ ID NO: 2718

SEQ ID NO: 14995 - protein, 416 aa, unidentified; identical to SEQ ID NO: 3007

SEQ ID NO: 14996 - protein, 385 aa, unidentified
RRLLKSKKATVVNLCPFTIRLLYDTTGYKQEITLGVDTGTKHVGLSATTKSKELYASEVILRSDVVDLLSTRRELRKIRRYRLRYRKPRFMNRIKSKKRGWIAPSIRQKIDPHIRIIGFVYSILPVSKLIIEVAQFDTQKIKNPEISGKEYQEGEQLGFWNVREYVLARDEHKCQHCKGKSKDPVLNVHHIESRKTGGDSPSNLITLCKTCHKEFHKGNIKLKVNRGESLRDAAVMSIMKWELYDELKSLYPNVKMTFGYITKYNRINHGIEKSHVSDAFVISRNFDSERLGYYYKRKLVRRHNRQIHKMKAPKGGNKRMNQSPFKVFGFRLFDKVMFQGKERFIYARRLRGIFNIRDINGENKKDISYKKLEYVSHGLISIVAG

SEQ ID NO: 14997 - protein, 464 aa, unidentified; identical to SEQ ID NO: 6330

SEQ ID NO: 14998 - protein, 465 aa, unidentified
MSTCACVLSKNGERLMPTIRLGKVRHLLKDGKAEIVKHHPFTIQLLYESDTNTQPIEICEDVGYNYIGISVKSESHEYVSAQYDTLQDEKKCHDDCRRMRRTRRNRLRHRQARFDNRKRDKGWLAPSLEHKKELNINVIKMYCEVMPITHATVEAGSFDTMLVKAIQEGKAAPEGAGYQKGPRYNLATLREAVFYRDNYTCQVCGRKANEGAILHVHHMFYWKGRHGNSLSELLTVCEKCHTPANHQKGGKLYRFGENIKFANLSGAAFMNAVRWQIVNELYTAFGKPFVTFTYGAMTKEKRIALHLEKSHNNDAFAMGSFHPADRCAFEHYEKVKRNNRILERFYDSQYIDIRTGEVTTGKSLFNGRINRSHKKDSENLHKYRGKRIRKGYRALRRKKVALNRGDLVSLNGEFLVVYGTHTRKNGSVNVEFKTPSRGGKKSADLKKLKIINASNPMHSAWKKAS

SEQ ID NO: 14999 - protein, 336 aa, unidentified
MIKSLFKILYIFILFFSSIINCFSQKKENYTSLSYEEIEKRIDDPNTSQNEDSYLINLYINKSKSEKNNESLFYAYRYASKFYNPPISFKYADSALITGIKSKNKKLHVHHIIFRSQGGTNLPNNLITLCETCHQDLHKGLIDSKFKKVAIYKEPPFMNTLKLRLQNYYTDATFCYGYNTKEKRQEMQLPKSHINDAIAISFYNCDKITNLKYPEVNEYVIQVRIKKRSLHEQTSRKGIKEKNITQKRNCKNVFQVNQFKIGTKVSFVNQVGFISGFTGKSAYIKDINDNYITEDNKSYKQISLKKLNLICYNNGWVKFNHNSSLHLAKPDVGDFL

SEQ ID NO: 15000 - protein, 263 aa, unidentified; identical to SEQ ID NO: 10317

SEQ ID NO: 15001 - protein, 413 aa, unidentified; identical to SEQ ID NO: 3924

SEQ ID NO: 15002 - protein, 448 aa, unidentified
MNTCVCVLSNNGERLMPTFRLGKVRRLLKDGKAKIVKHHPFTIQLLYDSKTNKQPIEICEDVGYNYIGISVKSESHEYVSAQYDTLQDEKEHHDDCRKMRRARRNRLRYRKPRFDNRKRSEGWLAPSLEHKKQLNISLVERYVSVIPITHATVEVGSFDTMLLQAIQKGETKPEGADYQEGPRYNLATLREAVFYRDNYTCQVCGRKITDGAILHMHHMFYWKGRHGYKLDELVTACEKCHTPANHQKGGKLFGFGEDKEFADLSGAAFMNAVRWQIVNALHTTYSKEFVTITYGAMTKEKRIALQLEKSHNNDAYAMGDFHPVHRCGFRHYQKRRRNNRVLEKFYDATYIDARTGNKAKGKELFNGRISRNHKKDSENLHKYRSEKVSKGRRSIRKRRYAIQPYDTVRLKGKTYITSGCHNKGTRLLIPVNGKSKSVTISKVQVVCH

SEQ ID NO: 15003 - protein, 436 aa, unidentified; identical to SEQ ID NO: 10538

SEQ ID NO: 15004 - protein, 465 aa, unidentified; identical to SEQ ID NO: 3070

SEQ ID NO: 15005 - protein, 369 aa, unidentified
LQFYRKEHGIMQYVYVLNRHGEPLMPCSPGKARLLLKQQKACVVKRTPFTIKLLYGSAGYKQPITLGVDAGSKHVGLSASTEKRELYREEFTPRNDVAELLSTRKQNRRSRRCRKTRYRAPRFDNRVHSKHKGWLAPSVEVKIQEHITVIKHICKILPISLVRVETAEFDTQRLKAMLAGKPLPVGTDYQLGEMYDEYNVRQYVLKRDHYTCQCCGTHNTAKKVVKLHVHHLESRKTGGNAPSNLVTLCTTCHKNLHKGRVTLDGKERGKPLRDAAFMGIMRKTLMARLKEELPIPVQGTYGYITKMRREQNDIKKSHTNDARCISKHPLAEPCSVCYRTKAIRHHNRQTHKANFSKKGIRKRLSLIHI

SEQ ID NO: 15006 - protein, 451 aa, unidentified
VTTILKTCFAASNLAKIVVLMDAWDIIVILNKRGKPLMPCSPAKARLLLKEKKAIVKRRTPFTIQLTIATGEAKQPVSLGIDAGYKHVGLPASTEKAELYASEVELRQDITDLLSARRALRQSRRNRKTRYRAPRFDNRISTKRKGWLAPSVENRINAHLSRIEAVLRLLPVTKITVETASFDLQLLKNPDISGKEYQEGEQLGFGNIREYVLCRDGHVCQHCYGGSKDPVLNVHHLESRRTGGDSPDNLLTLCETCHKALHRGEITLKTKRGQSFRAETFMGIMRWEVLNRLKASHSELKVHNTYGYLTKHARIENGIAKSHGADAFCIAGNLGAERLGEFFFQKQTRRNNRQIHKLSILKGALRKRNQAPFEVKGFRLFDKVACQGEEGFIFGRRSSGFFDVRKLDGTRISAGISYKKLHLLEKRQTYLIEIRKEEAFPPLPEGRGLRA

SEQ ID NO: 15007 - protein, 428 aa, unidentified
LKVFVLNMRGRPLMPCSPAKARHLLKAGKAVVRRRTPFTIQLRIATGETKQNVTLGVDAGAKHVGLSAATEKEEVFASEVELRQDITGLLAARLSLRRDRRHRKTRYRAPRFLNRVRSKHKGWLAPSVENRIQAHMSRIDAVCRLLPVTKIVIETASFDIQKIKDPSVEGTDYQQGDQLGFWNVREYVLFRDGHVCQHCHGHAKDKILNVHHLESRQTGGDAPNNLITLCERCHKACHAGKIKLKVKRGQSFREEAFMGIMRWTLLDRVRKAHPGLPVENTYGYLTKNTRITQGLPKAHCVDAYCIAGNLKAVRRGVHLYQRQVRKHNRQIHKCTVLSKTLKDGTKIGYRKLNQTPHLVKNFRLFDKVRCLGQTGFIFGRRSSGYFDVRRLDGVKISSCINYRKLTLLEKRGTCLTELRKEDGASSPV

SEQ ID NO: 15008 - protein, 429 aa, Arthrospira sp.; identical to SEQ ID NO: 14671

SEQ ID NO: 15009 - protein, 451 aa, Ruminococcus sp.; identical to SEQ ID NO: 2424

SEQ ID NO: 15010 - protein, 414 aa, unidentified
MPCSPAKARLLLKEKKAIVKRRTPFTIQLTIATGETKQPVSLGVDAGYEHVGLSASTEKAELYASEVELRQDITDLLSARRALRQSRRNRKTRYRAPRFDNRIRTKRKGWLALSLENRINAHLSRIEAVLRLLPVTKITVETASFDLQLLKNPDISGKEYQEGEQLGFWNIREYVLCRDGHVCQHCYGRSKDPVLNVHHLESRRTGGDSPGNLITLCETCHKALHRGEITLKAKRGQSFRAEAFMGIMRSEVLNRLKASHPELEVNNTYGYRTKHARIANDIAKSHCADAFCIAGNLGAERLGEFFFQKQTRRNNRQIHKLSILKGGIRKRNQAPFEVNGFRLFDKVACKGEEGFIFGRRSSGFFDVRKLDGTCISAGISYKKLHLLEKRRTYLTEIRKEEALPPLPEGRGLRA

SEQ ID NO: 15011 - protein, 437 aa, unidentified
VGGVKAHLKSRNKEIPKLMQDRKRARRARRTNGRRHRRQRRAKANGTISKKCVKQTTAQNGSVSKRAKDIGVIKRRLPGCEKDVLCIGIKNKETKFTNRTRPEGWLTPTANQLLQTHINLVKKIQKFLPISDVVLEVNKFAFMRLDNPNIQKWQYQQGPLYKKESLESAVSEMQEHHCLFCKKPIDHYHHVVPQHKNGSNTIGNIVGLCAKHHDLVHKDSAWEKKLAQKSTGLNKKYGALGVLNQIIPTLTNELSSLFPKHSFVTNGKSTYDYRAAHGVSKDHWLDAYCIACSVLPSNVCDSNINNHMPYELKQFRRHDRRVLNNENMNRVYTLDNKAVAINRHKAKDQKTVSLEEFRKEHPDDVCKLKVKEHHPTYRNMNRNYPGSIFLVGKHVHIMQGIAGSKDGKATTYKDSNANSITASKCKFVAKNSGILFV

SEQ ID NO: 15012 - protein, 458 aa, Scytonema sp.
MMITNSVFVFSKNGKILKPTTPARARLLQCQGKARKLRLFPFTLILEKDVDENVEPYLELRLDPGSRSSGISLVDLNKNEVIWAMELEHRGLAIKMELITRAGVRRSRRSRRLRYRKKRFCRKKPDGWLAPSLRHRLLTTQTWIKRLLKLAPIKSIAIESVKFDLQKIETPDIEGIEYQQGTLWGYTLREALLEHWGRECVYCGRTDVPLQIEHINARSKGGSDRFSNLTLSCEKCNQKKENKPVEQFLKDKPEILQKIKSHQKKSLSDAAAVNSTRKAIFEMAHQFGLPVISGDGASTKMIRIKSGLPKLHWIDSACVGTSEIVKLRICQPLRVTCKGHGTKQVQRVNAKGFPAIASIKKNPITGKKEVKLVSKNQKYTHATAGDYVICNLLKDRKHIKAGIYRARVKTPTPKGVEVLISGHRIAVDRQYIKLIHRSDGYEYSFATIDQDLLRFSAI

SEQ ID NO: 15013 - protein, 515 aa, unidentified
MATVYVLNKDSKPLMPTTRCGHVRYLLKEKKARVVRANPFTIKLLYETDDVVQPLYLGIDPGRTNIGVAVAKGDGTAVFTAHLETRNKEIPKLMAKRKEYRQGRRHYRRCKRQRRAAAHGTLSKRCKKQDTAQGSNISERAQKIGVFERNLPGCEKPVLCIGIKNKEARFNNRVRPAGWLTPTANQLLLTHINFVKKICKFLPISDVVLEINKFAFMALDNPNIQKWQYQQGPLYQKGSLENAVSEQQDHHCLFCKKAIEHYHHVVPRSENGSNTIANIVGICIKHHDLVHKDTAWQKKLAKKKTGLNKKYGALSVLNQIIPALTKELSFLFPKHFFATNGKSTYDYRAAHGVSKDHWLDAYCIACSVLPYGCFDNTVNSRIPHELRQFRRHDRQVCHQQNAKRKYYLDRKLVAINRHKATEQKTDSLEEYRNNGGATDKLVVKEHKPTSKRLNRILPGALMTANGKLNVMVASKGLHNGIPDYYVFADNSEAKPTKYTLINKNKGIVFVLNSVS

SEQ ID NO: 15014 - protein, 476 aa, unidentified
LEVVGTEGVSHPGLPGKYKHKGGQLMSVAVISKTVERLMPTSEYRARKLLKSGKAIKHSYHPFTIQLTERETGDIQLIELCMDTGYIHIGISVKSKKHEYLAEQIDTLTDERGRHDACRMYRRQRRSRKRYRQARFNNRKRDQGWIAPSLEHKKKIHIQAISRINKVMPITDITMEMGNFDTQVLKAKEEGKPLPQGAEYQHGERYGIATLREAVFARDGYKCQCCGRTIKDGAILHVHHIKYRSQGGTNSMSNLATVCDKCHTPKNHKPGGKLYNWKPKLPSFKGATFMTTIRWQLYSEVKALFSDIDIYIAYGAATKERRRELDIDKSHVNDAFVMGQFHPKHRIKAVLYKKKRRNNRCLEKFYDAKYIDSRDGKKRSGQELFNGRINRNHKKDSENLHQYRLQKVTAGKRTVRKQHYKIQPHDIVIYENRKRETAGCHCNGTRMMLLPDKKSASIKKVKIYRYAGGYFKSAFN

SEQ ID NO: 15015 - protein, 430 aa, unidentified
  source 1..430: note = Spirochaetales bacterium UBA7552
MVYVLNIHGQPLMPTTRYGKVRRMLKEKQAKVIKRCPFTIQLLYENPNFVQEVSLGVDAGSKTIGISATTPTSELYAAEVKLRTDVVTNLSSRHECRRSRRNRKTRYRQKRFDNRKVNKQNGWLAPSICNKIVTHLTTVDKITKILPVSEIHVEVASFDIQKIKNPDITGIEYQQGEQLDFWNVREYVLFRDQYTCMCCKGRSKDKILNVHHIESRKTGGDAPNNLITLCETCHNDYHNGTIQLPKTIKRGMSFRDATFMGVMRWAFYNKVKEIYEAKGIPVSLTYGYITKNLRIKNNLPKTHYVDARCISGHSNVEPLGYYFLQKKVRCHNRQIHKLKFMKGHYRKRNKADYEIQGFKLFDKVLFQNIECFIFGRRSTGRMDLRKLDGTHINASANYKNLKLLENSKHILTERRTGRFLPAASNRVYTS

SEQ ID NO: 15016 - protein, 420 aa, unidentified; identical to SEQ ID NO: 11172

SEQ ID NO: 15017 - protein, 461 aa, unidentified
GKYKHKGGQLMSVAVISKTVERLMPTSEYRARKLLKSGKAIKHSYHPFTIQLTERETGDIQPIELCMDTGYIHIGISVKSEKHEYLAEQIDTLTDEKTKHGACRMYRTLRRGRKRYRQPRFNNRKRDKDWIAPSLEHKKDIHVQAISRINKVMPLTDITMEMGNFDTQVLKAKEEGKPLPQGADYQHGERYGIATLREAVFSRDGYKCQCCGRTISDGAILHVHHIKYRSQGGTNSMTNLATVCDKCHTPKNHKPGGKLYNWKPKLPDFKGATFMTTIRWQLYNEVKSLFPDINVHITYGAATKEQRRELNIDKSHVNDAFAMGKFHPKHRTNAALYKKKRRNNRCLEKFYDAKYIDSRDGSKRTGQELFNGRINRNHKKDSENLHRYRLQKITAGKRTVRKRHYNIQPHDIVMYENRKRETSGCQSNGTRVILLSDKKSVAVKKVKIYKYAGGYFKSAFN

SEQ ID NO: 15018 - protein, 431 aa, unidentified
MPNKVYVINKHGRPLMPCSPAKARHLLDAGKAKVKKRTPFTIQLVYGSSGYTQEVILGVDAGSKTIGVSASTKKEELFAANVIPRNDVVDLLSTRREFRRVRRNRKTRYRKPRFDNRVRSKHKGWLAPSVEVKIQEHITAIRRVCGILPVSKVVVETAEFDLQLLKAIADGKPVPQGEDYQKGEMYGHYNVRQYVLWRDNYTCQCCGAHATKKKEVRLHVHHLESRKTGGDASGNLVTLCESCHEKLHKGLITEDDFKKRKRKSTRDATFMGIMRATLLQRLRSELPIPVVETRGYITKATREKLLVLPKSHTNDALAIAQGKHGFNVGYLPGIAQIDKIYTIRPVRHHNRQLHKAAILKGGIRKSNQAEKYVFGYRLFDKVQFNGQDCFIWGRRTTGIFTIKTINGKMIKDGISFKKLKPVEKSTSYLIA

SEQ ID NO: 15019 - protein, 388 aa, Scytonema sp.; identical to SEQ ID NO: 2683

SEQ ID NO: 15020 - protein, 518 aa, unidentified; identical to SEQ ID NO: 7468

SEQ ID NO: 15021 - protein, 457 aa, unidentified; identical to SEQ ID NO: 5177

SEQ ID NO: 15022 - protein, 458 aa, Halomonas sp.; identical to SEQ ID NO: 5725

SEQ ID NO: 15023 - protein, 417 aa, unidentified
  REGION 1..417: note = Ga0307928_10011624
MQVYVQNKDGEPLMSCKPAKAKHLLRDNKAEVIELTPFTIRLNWDCENNTQEIIVGLDTGAVNVGCSAVSNNKVLYASETKLRTDIKKKMQRRAKYRRNRRIKLRYRQPRFNNRTRPKGWLPPSLRSKLESTIKIVNQLSKILSITKIRVEIAKFDIQKLQNPDIKGAEYQQGNTEGYDNVRAYVFERDNYICKLCRKREGILQTHHIIQRKDGGSDRPDNLATVHKKCHEDFHKGLIKYKFRKSKEYKVETQVTILKDFIVSELRKNFEVEVTFGHITKRNRMRLNLPKSHCFDAIAICNPNKLDRINYHYKIVCRPRGRYRLTQGIRSEQYLPTNRVYGYDIGDKVLCRKNRKQIGYIKSKMATGYFMLGDIDNKTIVKCTSHKFLEMVEYGKTLQSQFIPHRIQDSEREFLAES

SEQ ID NO: 15024 - protein, 416 aa, unidentified; identical to SEQ ID NO: 6549
  source 1..416: note = Firmicutes bacterium M10-2

SEQ ID NO: 15025 - protein, 462 aa, unidentified
LTKDENRPSGRTTGLRAEQAEPAGIRKGDTLKVFVLNMRGKSLMPCSPAKARHMLKAGKAVVVRRTPFTIKLTIATGETKQDVTLGVDAGARHVGISATTEKEEVFASEVALRQDITGLLADRLAFRRARRNRKTRYRAPRFNNRVRSKHKGWLAPSVENRIQAHMSRIEAVCRLLPVTKIVIETASFDIQKIRNPEVEGTGYQQGDQLGFWNVREYVLFRDGHVCQHCHGRSRDKILNVHHLESRKTGGDAPNNLITLCETCHKAYHAGKIKLKIKLKVKRGQSFRAEAFMGIMRWTLLDRVRKAHPGLPVENTYGYLTKNTRITPGLPKTHCVDAYCIAGNLKAVRRGVYLHQRQVRKHNRQIHKFTVLSKRLEDGTKIGYRKLNQSPYLVHGFRLFDKVRCLGQTGFIFGRRSSGYFDVRRLDGVKLSPSISWRKLTLLEKRSTYLTELRKQDGASSPV

SEQ ID NO: 15026 - protein, 428 aa, Macromonas sp.
MPCSEKRARLLLERGRARVHRVVPMVIRLVDRQVANCKLQPVRVKVDPGSKTTGLALVRDMESTDSVTGEIYRQVAVLNLMELVHRGRQISEALSARSSMRRRRRGNLRYRAPRFLNRSKPQGWLPPSLQHRVDTTMAWVKRLQCWAPVVAISSELVRFDTQALDNPEISGAEYQQGTLQGYEVREYLLEKWGRKCAYCDATEVPLQIEHIHPKARGGTNRVSNLTLACAPCNQRKAAQPLQNFLATEPQRLARITAQAQRPLKDAAAVNATRWALANALKCTGLPLELASGGQTKYNRVRLGLEKTHALDAVCVGHVDAATYGLQPTLAIKCTGRGSYQRTRLDKYGFPRGYLMRTKRVKGFGTGDMVKACVLTGKKVGTYTGRVAVRASGSFNIRTSTELVQGISYKHCQLVQRADGYGYFFHYRA

SEQ ID NO: 15027 - protein, 512 aa, unidentified; identical to SEQ ID NO: 5811

SEQ ID NO: 15028 - protein, 457 aa, unidentified; identical to SEQ ID NO: 4299

SEQ ID NO: 15029 - protein, 419 aa, unidentified
MIYIRSKDGKALMPSERGGRIGYFLRHGKAHVVSRVPFTVQLDYESTTYTQEVSLGVDAGSKHIGVSAGSEKKELLAAQVELRNDVVNLLSIRREQRRTRRNRKTRYRKIRFDNRKKKDDWLAPSVEQKVESHLKVIRLAHKLLPITKTTIEVAQFDVQKIKSPDIKGEEYQQGEQMGFWNVREYVFARDGHRCVHCKGKSKDPILNVHHLESRKTGGNSPSNLVTLCETCHKAYHRGEFTLKIKRGSSLRDAAVMNIMRWAVYERARLEFEKVHLTYGYVTKLTRIENGITKTHAADAFCIAKNVHAKRLRTFFQCRCVPRHTRALHVANPKRGGIRRSTIASHKIGKSHFQRFDMVRWKSKECFIFGSTNGRPVLRDIEGIKMHENVSVNIMTIKFLKRLRNNILVEEKDFRKLSII

SEQ ID NO: 15030 - protein, 398 aa, unidentified
LKVFVLNMRGQPLMPCSPAKARHLLKAGKAVVKRRTPFTIQLRIATGETKQNVTLGVDAGAKHVGLSATTEKEEVFASEVELRQDITGLLAARLSLRRDRRHRKTRYRAPRFLNRVRSKHKGWLAPSVENRIQAHMSRIDAVCRLLPVTKIVIETASFDIQKIKDPSVEGTDYQQGDQLGFWNVREYVLFRDGHVCQHCHGHAKDKILNVHHLESRQTGGDAPNNLITLCETCHKACHAGKIKLKVKRAQSFRAEAFMGIMRWTLLDRVRKAHPGLPVENTYGYLTKNTRITLGLPKAHCVDAYCIAGNLKAVRRGVYLHQRQVRKHNRQIHKCTVLSKTLKDGTKIGYRKLNQTPHLVKSFRLFDKVRCLGQTGFIFGRRSSGYFDVRRLDGVKISS

SEQ ID NO: 15031 - protein, 442 aa, unidentified; identical to SEQ ID NO: 2903

SEQ ID NO: 15032 - protein, 411 aa, unidentified; identical to SEQ ID NO: 8372

SEQ ID NO: 15033 - protein, 380 aa, Arthrospira sp.; identical to SEQ ID NO: 3156

SEQ ID NO: 15034 - protein, 406 aa, unidentified
MVYVQDINGKPMMPTTRHGKVRRLLKDKKAVVVNLCPFTIKLMYVTSDYKQEIVLGVDAGTKHVGLSATTKSKELYSSEVILRNDIVDLLSTRRELRKARRNRLRYRKPRFDNRVKSKRPGWTAPSVKYKIDAHIRVVENVCSILPISRIVIEVAQFDTQKIKNPEISGKEYQEGDQLEFWNTREYVLARDGHKCQYCKGKSKDSILNVHHIESRKTGGDSPSNLITLCETCHKEYHKGNIDLKIRRGKSLRDAAVMGIMKWRLYEELKSRYDRVFMTFGYITKHNRIKYGIEKSHTSDAFVISKNINAKRIERQYLKRLIRRHNRQIHKMKILKGGKKKNNQAPFEVFGFRLFDKVLYNNKIFFVYGRRKSGSFNIRDFNGENSKDVSRKKFKLIRGKRHPIILK

SEQ ID NO: 15035 - protein, 427 aa, unidentified; identical to SEQ ID NO: 5630

SEQ ID NO: 15036 - protein, 542 aa, unidentified
MSRLTPDAEVPFFCETALQQKTKEASELTALEELLSKTEYIYVIGTDGRPQMPTKRKRHVLKLLNTGKARIAEKVPFTIQLKYDNIPVLQPVILAADPGRTNIGVAALSPFGDLMFAAVIETRNKEIKKLMADRKAHRQASRRGERKACQRLAKKYGTMIKAGMIMRKLPQYAADKFVTCNVIRNTEARFCNRKRCSDWLTPTVNHLVQTHLNVIKKISRYLPVTDIAIEVNRFAFMQMENPNASGVDFQNGPLRGFDDVKAAIREQQNGKCLMCKNDIEHFHHMVPLSKGGSDTIQNQVGLCPKCHAKVHTDTSFRKKLEDKKSGLLKKYGALSALNQAIPFICKDLLAEYGKEHVHFCTGKETSLIRTSLGYEKTKDNQMHEVDAYCIGLASLELEDIKSQSFVNTYKIKQFRRQDRSIIHHQTERSYYLDEQKIATNRKPRFEQTGNALSDWYKKQVKACDKAKADKMLSTLKVKKSSRSYNSEGRLMSGAVFSYNGQRHVMSGQLTGGRYLRAYGDTKTNYPVSKCNILRSNEGLVFI

SEQ ID NO: 15037 - protein, 470 aa, unidentified; identical to SEQ ID NO: 2949

SEQ ID NO: 15038 - protein, 453 aa, Erysipelotrichaceae sp.; identical to SEQ ID NO: 4156

SEQ ID NO: 15039 - protein, 427 aa, Nostoc sp.; identical to SEQ ID NO: 2670

SEQ ID NO: 15040 - protein, 470 aa, unidentified; identical to SEQ ID NO: 2825

SEQ ID NO: 15041 - protein, 470 aa, unidentified
MSVFVVGLNGCRLMPVSERKARLLLKGGKASVYRKVPFTIKLNYKTGSTVQPGYLGIDTGSQHIGVSVVRKDGTVLHKEEIGLRDSMSKRKLLESRASSRRGRRYRKTRYRHPKWKPKTKRIYNEKADRKGRHWKKQKNTFTSKRQAGWLPPSLQSKTDHHIQWIRKLLDLLPEGYRLSIELGRFDPARMRDPEIHRELYQKGPQYDYENVRAYVLARDGYTCRVCKKKGGKLHVHHILYRSRGASDNPKYMAAVCSKCHTTENHLPGGILYQWMQDQKKFTRGLRDATFMNILKKRLRKAFPDAVFTYGNITKADREKLELPKSHGNDATAIALVNTEVKSVKDEEPVIHIQQVRRKKRSLHEETPRKGRKEPNRTASRSDKNTKSVTVAKGSGEKKASMTACLFDRVELDGKKGWITGFTGTSCYVKDKEDNYICTSSKYKQVSISRLRILHHCGNWAIGAEKPLGKG

SEQ ID NO: 15042 - protein, 485 aa, unidentified; identical to SEQ ID NO: 6696
  REGION 1..485: note = Ga0315284_10122845

SEQ ID NO: 15043 - protein, 512 aa, unidentified
MSTVYVLNKDGKPLMPTTRGGHVRHLLKEQKARVVRAKPFTIQLLYETNDVVQPLYLGIDPGRTNIGVAVVKANGTAVFTAHLETRNKEIPKLMQDRKKARRARRTNGRRCRRQRRAKANGTISKKCVKQTTAQNGSVSKRAKDIGVIKRRLPGCEKDVLCIGIKNKETKFTNRTRPEGWLTPTANHLLQTHINLVKKIQKFLPISDVVLEVNKFAFMRLDNPNIQKWQYQQGPLYKKESLESAVSEIQEHHCLFCKKPIDHYHHVVPQHKNGSNTIGNIVGLCAKHHDLVHKDSAWEKKLAKKSTGLYKKYGALGVLNQIIPTLTNELSSLFPKHSFVTNGKSTYDYRAAHGVSKDHWLDAYCIACSVLPSNVCDSNINNHMPYELKQFRRHDRRVLNNENMNRVYTLNNKAVAINRHKAKDQKTVSLEEFRKEHPDDVCKLKVKEHHPTYRNMNRNFPGSVFLVGKQIHVMQGIASSKDGKATKYNDTSATAIAAGKCKFVAKNTGILFV

SEQ ID NO: 15044 - protein, 431 aa, Enterobacter sp.; identical to SEQ ID NO: 3801

SEQ ID NO: 15045 - protein, 480 aa, unidentified
LYTKPLDNIGEGSLPPSGEINLKGMTFMVYVKSIDGKALMPTSNAKARKLLKQKKAKVVSLRPFVVKLTYKTKTEYTQKLNLGVDSGYSNIGFSVIDAKQEYIAGEVKLLEGMKKRLLEKASYRRIRRSRLRYRKARWNNRVKSKKKGWLAPSLKHKLDTHIKFIDYLKNILPIGKITIEVANFDIQKMKDDLISGIDYQNGDMFGFWNVREFVLHRDGHKCQNPNCKHKDKKEQILKVHHIRYRSEGGSDRPENLITLCSKCHTPANHKKGKFLYDWCVNGKKVRGFKDATFMSMIRWYLVNELKSKHNNVSITYGYITKNHRIQNGIEKSHLNDAFAIAKGTNQARTKDRFLVIQDRLKNRSLEKFYDSKIIDIRTEKKVSGGDLNCGRSTRNKNLNTENLRKYRGVKISKGQRRIRKQKYFYQPNDLVKYDGKVYTVKGTQNEGKYIALKEIKKVPKVELLIPYVFKKGLNWSYGLC

SEQ ID NO: 15046 - protein, 419 aa, unidentified; identical to SEQ ID NO: 6046

SEQ ID NO: 15047 - protein, 535 aa, unidentified; identical to SEQ ID NO: 14543

SEQ ID NO: 15048 - protein, 458 aa, unidentified; identical to SEQ ID NO: 4474

SEQ ID NO: 15049 - protein, 465 aa, unidentified
MSTCVCVLSNSDERLMPTIRLGKVRHLLKDGKAKIVKHHPFTIQLLYDSETNVQPIEICEDVGYNYIGISVKSESHEYVSAQYDTLQDEKEHHDDCRMHRRTRRNRLRYRKRRFDNRKRDKGWLAPSLEHKKQLNISLIEQYVSVIPITHATVEVGSFDTMLLQAIQKGEAKPEGVDYQKGPRYNLATLREAVFYRDDYTCQVCGRKITDGAILHMHHMFYWKDRHGNSLSELITVCEKCHTPANHQKGGKLYGFGEDIKFANLSGAAFMNTVRWQIVNVLYAAFGKSFVTFTYGAMTKEKRIALHLEKSHNNDAYAMGSFHPVNRCAFEHYEKVKRNNRILEKFYDSQYIDTRTGEKASGKALFNGRINRNHKKDSENLHKYRGKRLYKGHRALVRKKVNLNPGDLVSFNGEVLVVHGTHTNKKGAVNVEFKVPAKNGQKSASLKKLKIVKAADSIHPAWEKVS

SEQ ID NO: 15050 - protein, 407 aa, unidentified
LMPCSPGEARLLLKQQKACVVKRTPFTIKLLFGSAGYKQPITLGVDADSKHVGLSASTEKRELYSEEFTPRSDVVELLSTRRQNRRSRRNRKTRYRAPRFNNRVHSKHKGWLAPSVEVKIQEHITVIKRICRILPVTLVRVETAEFDTQRLKAMLAGKPLPVGTDYQLGEMYDEYNVRQYVLKRDNYTCQCCGAHTTAKKTVKLHVHHLESRKVGGNAPSNLITLCTTCHNNLHKGKITLDGKKRGKTLRDAAFMGIMRNTLLTRLRNELNIPVQNTYGYITKLLREQNDIKKSHVNDARCISKHPLAKPCSVCYRTKAIRHHNRQIHKAKILKGGIRKANQAPYIVKGFRLWDKVLYNEQECFISGRRSSGYFALRKFDGTTITNSISFKKLRLLEPATNYLIERK

SEQ ID NO: 15051 - protein, 430 aa, unidentified; identical to SEQ ID NO: 14056

SEQ ID NO: 15052 - protein, 529 aa, unidentified; identical to SEQ ID NO: 13154

SEQ ID NO: 15053 - protein, 512 aa, unidentified
MSTVYVLNKDGKPLMPTTRGGHVRHLLKEQKARVVRAKPFTIQLLYETNDVVQPLYLGIDPGRTNIGVAVVKANGTAVFTAHLETRNKEVPKLMQDRKKARRARRTNGRRCRRQRRAKANGTISKKCVKQDTAQSKNPSKRAKEIGIIKRRLPGYKKDVLCIGIKNKEAKYTNRTRPEGWLTPTANQLLQTHINLVRKMQKFLPISDVVLEVNKFAFMRLDNPDIQKWQYQQGPLYQKGSLENAVSEMQEHHCLFCDKPIDHYHHVVPQSENGSNTIANIVGLCAEHHNLVHKDAAWQKKLAEEKVGLNKKYGALSVLNQIIPALTNKLSVLFPKHFFVTAGKSTHDYRAAHGVSKDHWLDAYCIACSVLPSNVCDSNINNHMPYELKQFRRHDRRVLNNENMNRVYTLDNKAVAINRHKATEQEAASLEEFRKEHPNDVCKLKVKEHHPTYRNMNRNYPGSIFLVGKHVHIMQGIAGSKDGKATTYKDFNANSITASKCKFVAKNSGILFV

SEQ ID NO: 15054 - protein, 431 aa, Escherichia sp.; identical to SEQ ID NO: 3801

SEQ ID NO: 15055 - protein, 431 aa, unidentified
MPNKVYVINKHGRPLMPCSPAKARHLLDAGKAKVKKRTPFTIQLLFGSTGYTQEVILGVDAGSKTIGLSASAETEELLSAEVKPRNDVVDLLSTHREFRRARRNRKTRYRKPRFDNRVRSKHKGWLAPSVEVKIQEHITSIKRVCRILPVSKVVIETAEFDLQLLKAIADGKPVPQGEDYQKGEMYGHYNVRQYVLWRDDYTCQCCGAHATKKKEVRLHVHHLESRKVGGDAPDNQVTLCESCHEKLHKGLITAKDFKKRKRRSTRDATFMGIMRKTLMQMLCSELPIPVVKTRGYITKATREKLLVLPKSHTNDALAIAQGKRGFNVGYLPEIAQIDKICTIRPVRHHNRQLHKAAILTGGIRKSNQAEKYVFGYRLFDKVQFNGQDCFIWGRRTSGYFAVKTIDGKVIHNSASFKKLNLVERASNYLIA

SEQ ID NO: 15056 - protein, 414 aa, unidentified
MVYVINKQGQALMPTERFGKVRRLLKNSLAHVVCRIPFTIQLDYDTTDYTQPVSLGVDAGSKHIGISATTSDKELYAADVELRNDIVNKLSTRREQRRTRRSRLRYRKARFNNRVSSKRKGWLAPSVENKIQTHLTVVEKIHKFLPITNIVVETTSFDIQKINNPSISGSEYQQGEQLDFFNVREYVLFRDNHICQHCKGKSKDKVLNVHHIESRKTGGDSPKNLITLCETCHKAYHRGEFELNVKRGKSFRDAAFMGIMRWSLYDRLKNIYPDVSMTFGYITKNTRITNNLPKEHYVDARCISGNPVAKPLGYYFYQKKVRCQNRQIHKANFLKGGRKKLNQAPFLVKGFRLFDLVEYQKDLYYIFGRRSNGSFDIRKLDGTKVNKGSINCKYLRLISTRKSILIEKRTKVNL

SEQ ID NO: 15057 - protein, 462 aa, unidentified
MSVLVIGRNGRALMPTNPRKARLLLKKKTASVVCRHPFTIQLLYKTGCATQEGCIGIDTGSQHIGVGITCGDRVILKDEHTLRSSMEKRSLLATRAVMRRGRRYRKVRYRKPKWRHHTKRMYFEKANRRGQHWRKVKTTTQSPRSKGWLPPSLQSKCDHHFRIIDRYLKYLPDPITRNLVIETGRFDMARMNDPTIHGEMYQRGPMYDAENLRAYIFARDNYQCACCKAKAGTTRKADGTTVKLVAHHILFRSRGATDNPKYIISVCDHCHTTKAHQPGGILYSWMENNKKVARGLRDATFMNILRKRLFARYPQAAFTYGNITAADRKQLRLPKSHANDAVAISLFGKEASTVKNICQTMHYKQIRKSKRSLHEAIPRKGRKNPNTKAVRNKKNTTQVNGFKLWDSVLANGKKLFICSFTGTSVYLIDKNGCYISQPGKTYKQWPLSKLKRLHPNGNWLMA

SEQ ID NO: 15058 - protein, 359 aa, unidentified
GTIGTAVSKDNGDIVYMSEVVVRNDITDKMTQRAKYRRNRRNRKTRYRKARWLNRASSIKKDRFSPTMQSKLHSHVREIEYIQSILPVTEMVFETGQFDMQLMKNPSLANPKVRPWGYQKGANYGFENTKAMVLNRDNYTCQCCKGKHKDSKLEVHHIVFRSQGGSDEESNLLTLCHTCHKDLHSGKINPKLSGKVKGNLKYATQMNSIRKQLFRFYPNAIETFGYVTKANRLHLGVDKEHYYDACTIATQGNAFNVKSNLYKKKCVSDGDFQKTKGIRSEQPIVTDKICGFRKFDKVRYFGNDYFIKGRMSTGYAILMDIDGNKIDFSTMPRGYKTPKLSNCKRITARSTVMTQVKVV

SEQ ID NO: 15059 - protein, 415 aa, Ruminococcus sp.; identical to SEQ ID NO: 4916

SEQ ID NO: 15060 - protein, 499 aa, unidentified
MRYVYVLDMNGKPLMPTCRYGKVRRMLKSGQAKAVDTLPFTIQLLRPTKNRILQPVIAGQDPGRTNIGMAAVRSDGTELYRAHIETRNKEIVSLMNDRRSFRQASRRGERLARKRLAKKLHTTAKHLNGRILPGCKEPLAVKDIINTEARFNNRLRPEGWLTPTATQLLRTHLEAFRKLSGILPVTEVVLEVNRFAFMQLDHPDMEKRDIDFCRGPLHGTGGVKAAVSLQQDGLCLLCREREIEHYHHIVPRSKRGSNTISNIAGLCEKCHERVHKDQAAAEKLQSRKDGLSKKYGGTSVLNQIIPSLTEELGNWYPGHTHVTNGWNTKELREKHELEKDHDIDAYCIAASILKDVQPVMQTKPYEVKQFRRHNRARIHHQTERTYRYDGKIIAKNRKKRMDQKTDSLEDWVADMTKQYGQGTASRMLPKVTVQKSTRHYNTKGRMMPGTVFIYRGKRFVMTGQLTGGAYYRAYGQDKKNFPAKAVQVIQKNKGLVYVA

SEQ ID NO: 15061 - protein, 432 aa, unidentified
MPTFNFRKVRRLLKSGRADIFCHEPFTIRLLYAEKLDTQPVELCIDAGDRHIGISVKSEKHEFVHAQYDPLRDEKEKQTDRRMHRRTSRSRRRHRKSRFDNRKKPEGWLAPTVEHKKDLHISITQMYIRVCPVTSITVETASFDTQALEAIERGLPLPKGKDYQKGPRYRMNTLRDAVFYRDGHRCRLCGNNGVLRVHHIGYWKGDRSNRMGNLAAVCTGCNTPANHRKGGRLYGWEPEIKPLKGAAFINAVRKRLAEELRERTSLPVTETNGSATKTARKRFCIDKTHANDAFVMGKFHPRHRRQEQVWQKRRRNNRILSKFYDARYVDIRDGKVKSGQELSCGRLKRSESRNSEKNMRPFRGRKVRKGRVSTRRRRYAIRPGTIVVYDGQKQSVKGIHCGGTRAVLENGKSVSVKKIRGLRFPGAWMRIS

SEQ ID NO: 15062 - protein, 473 aa, unidentified; identical to SEQ ID NO: 3562
  source 1..473: note = uncultured beta proteobacterium

SEQ ID NO: 15063 - protein, 443 aa, Anoxybacillus sp.
MVEENMTCFMQRKGENPMVFVLDTNKCPLAPCHEAVARKLLKQGKAAIYKRYPFTIILKEIVDNFRPKTPYRLKIDHGSKHTGLAILRGQEVVWLGQLDHRTDIKERMDKRRAFRRARRNRKTRYRKPRFLNRRRKDGWLPPSLESRVQNIQTWVNRLKKLCPIGYISYENTKFDTQLMRNPEISGIEYQQGTLQGYEVREYLLEKFGRKCCYCGKENVPLEVEHIIPKSRGGTDRVDNLCLACHDCNQRKGSKTAEEFGYPHIQKQVKESLKDASAVNSTRWKVYEVLKQSGCEVECGTGARTKMNRIRLDLPKTHYFDACCVGESTPNHLYFKTKEVLFIKAKGRGSRSRTNLDRYGFPRGYLARQKFFFGFQTGDMVKAVIPRGKYQGVWFGEVACRKTGSFDIKGKDGKRIAQGINYRYVQVIQRFDGYAYGKGVAELA

SEQ ID NO: 15064 - protein, 442 aa, unidentified; identical to SEQ ID NO: 3161

SEQ ID NO: 15065 - protein, 339 aa, unidentified
VTTILKTCFAASNLAKIVVLMDAWDIIVILNKRGKPLMPCSPAKARLLLKEKKAIVVRRTPFTIQLTIATGEAKQPVSLGIDAGYKHVGLSASTEKAELYASEVELRQDITDLLSARRALRQSRRNRKTRYRAPRFNNRLCTKRKGWLAPSVENRINAHLSRIEAVLRLLPVTKITVETASFDLQLLKNPDISGKEYQEGEQLGFWNIREYVLCRDGHVCQHCYGRSKDPVLNVHHLESRRTGGDSPGNLITLCETCHKALHRGEITLKAKRGQSFRAEAFMGIMRWEVLNRLKASHPELEVNNTYGYRTKHARIANDIAKSHCADAFCIAGNLGAERL

SEQ ID NO: 15066 - protein, 444 aa, Halanaerobium sp.
MKGWIMLVRVVAKDGKTLQPTNRHGKVRRLLDNNMAEVICKDPFTIRLLYEVDFRKTQQVKIYFDTGGKYQGFAIIVNGKVIHKGTIELRDGVSDLLRQRRQYRRGRRYRNKRYRPPRFNNRKRKKGWLPPSVISKYKHILNWINKLTKYLPDYELTVEIANFDIHKIKNPEIEGEEYQKGDKYGYENVKQYLIFREDARCQLCSKFKGDDTWNVHHIVPKKNGGTDTPDNLALLHSKCHKKIHNNDLDNKLHQNVDKLLENRNSSTFKYTTFMNIIKNKLYSDLSKKYGDKVNFTYGHITNVNRRELGLSKTHYNDAIAMHQESVEDYITPIYIKQVRKKKRSLHEAIPRAGRGDKINHNQKRRPKNTKEIIKNGKKWALWDKVYISKIGKTGFISGFTGKWVYIQDIDGKYLQLTTKTYKQINPDNLKLKCRNNNWVKKQLA

SEQ ID NO: 15067 - protein, 465 aa, unidentified
MSTCACVLSKNGERLMPTIRLGKVRHLLKDGKAKIIKHHPFTIQLLYDSETNIQPIEICEDVGYNYIGISVKSQSHEYVSAQYDTLQDEKSCHDACRRMRRTRRNRLRYRQKRFDNHKRDKGWLAPSLKHKKELNVNVIKMYCEVVPITHATVEVGSFDTMLVKAIEEGKATPEGADYQKGPRYNLATLREAVFYRDNYTCQVCGREASEGAILHVHHMFYWKGRHDNSLSELITVCEKCHTPANHQKGGKLYGFGEDIKFANLSGAAFMNTVRWQIVNELYAAFGKPFVTFTYGAMTKEKRIALHLEKSHNNDAFAMGSFHPNCRCTFEHYEKVRRNNRILEKFYDSRYIDIRTGEIATGKELFNGRINRSHKKDSENLHKYRGKRIRKGYRALRRKKVALNPGDLVSLNGEILTVHGTHTKKNGSVNVEFKTPSKSGKKSTSLKKLKIIKTISPMRSAWDKVS

SEQ ID NO: 15068 - protein, 415 aa, unidentified; identical to SEQ ID NO: 6534

SEQ ID NO: 15069 - protein, 419 aa, unidentified; identical to SEQ ID NO: 2828

SEQ ID NO: 15070 - protein, 416 aa, unidentified
MVYVLDKNGQPLMPTDRHRKVRLMLQSGQAKVIKRCPFTIQLNYDSGHQTQEISLGIDAGSKHIGVSTTTKIKVLYEVDVELRNDIVDLLSSRRELRRGRRNRKTRYRQAKFNNRRRGNGWLAPSIRQKIGTHLTVVENICKMLPISRIMVETASFDIQKIKNPDIQGAEYQQGDQLEFWNVREYVLFRDGHTCQCCKGKSKDKILNVHHIESRKTGGNAPNNLITLCETCHTGYHKGTVQLPKAIKRGMRFKDAAFMGIMRWAFYEALKQQYEPVGTPVHNTYGYITKHTRIAYNLPKEHYVDARCISGNPDAFPSGEYYYQKKVRCHNRQIHKLTILKGGIRKQNQATYLVKGYRLFDKVSYQGKGYFVFGRRQSGFFDIRTLSGEKVNKGSLSCKKLKFIATRTYYLTERRAV

SEQ ID NO: 15071 - protein, 413 aa, unidentified; identical to SEQ ID NO: 6118
  REGION 1..413: note = Ga0315284_10047810

SEQ ID NO: 15072 - protein, 417 aa, unidentified
MPCSPAKARLLLKEKKAIVKRRTPFTIQLTIATGEARQPVTLGVDSGYKHIGLSATTEKAELYASEVELRQDITDLLSARLALRCSRRSRKTRYRAPRFDNRVASKREGWLAPSVENRIAAHMSRVEAVMRVLPVTAITVETAAFDTQLLKNPDIAEAAYQQGEQLGFWNVREYVLFRDGHVCQHCRGKSKDPILNVHHIESRRTGGDAPNNLITLCETCHKAFHRGEIKLKVKRGKSFKAETFMGIMRWTLFERLKKAHPELRVRNTYGYLTKHKRISHGIAKSHCADAYCIADNLGAKRLEGFFFQKQTRKHNRQIHKLSILKGGLRKKNQAPYEVKGFRLFDKVICKGEEAFIFGRRTSGSFDVRRLDGTRISAGINYKKLRLLEPRTTYLTEFRKEAALPHLHECRGFRAEFL

SEQ ID NO: 15073 - protein, 442 aa, unidentified; identical to SEQ ID NO: 3218

SEQ ID NO: 15074 - protein, 458 aa, unidentified
MLTYVLAKDDTRLMPTYSIRKVRRLLKSGRAVIVGHRPGLTIQLVYDLPDQQAAHVQPVEICEDTGYAHIGVSVKSEKHEFAHEQYDLLANEKQRRDDRRKYRHERRSRKRHRAPRFDNRTASKKPGWLAPSVMNKMFRHADLIDMYAKVLPLTSVALEMGSFDTQELEAIQTGAKLPEGTDYQRGKRYQISTLREAVFYRDGYTCQVCGKSIKDHTVLRVHHAGYWHGDHTDRMGNLVTVCTKCHTAANHKPGGRLYEWRPKVKPMTGAAFMNSVRWKLYEEVEHRFPGVGIHVTYGSHTKVERRALCLPKTHANDAYVMGKFHPTHRAHEVKYQKRRRGTRVLQKFYDAKYIDSRDGTKKSGSQLSCGRTNRSESRHSGRDLRQYRQGKVFKGRVSVRRKRYPWQPGDTAYLDGQRYTVVGTISCGKSVLLDPHRTSVPKRLGLIRKAESWCISSG

SEQ ID NO: 15075 - protein, 343 aa, unidentified
  VARIANT 343: note = X can be any naturally occurring amino acid
  source 1..343: note = Cyanobacteria bacterium UBA12227
MSKPNYVFVVDTNRKPLTPCKPSIARKLLTVGKAKVFRLYPFTIILNKEVVDTPEPLTLKIDPGSKVTGLAILLDSNLIWVESKSNRGQSIKASLESRRALRRGRRNRHTRYRQARFLNRTRSKGWLAPSLQHRVKTTITWVNRLLRCSPIKVVFQELVRFDLQQIENPEISGVEYQQGELAGYEVREYLLNKWDRKCAYCGAKNVPLQIEHIYPKAKGGSNRISNLCLACEPCNIRKGTKDIKVFLAKKPDVLKRVLAQAKHPLKDAAAVNSTRWTLFNQLKETGREISTGSGGLTKFNRTRLELPKTHFFDAACVGDTPELLVLANQPLNIKATGHGSRQX

SEQ ID NO: 15076 - protein, 470 aa, unidentified; identical to SEQ ID NO: 2825

SEQ ID NO: 15077 - protein, 512 aa, unidentified; identical to SEQ ID NO: 9909

SEQ ID NO: 15078 - protein, 456 aa, unidentified
MSTCVCVLSNSGERLMPTFRLGKVRHLLKDGKAKIVKHHPFTIQLLYDSKTNTQPIEICEDVGYNYIGISVKSQSHEYVSAQYDTLQDEKACHDSCRKLRRSRRNRLRYRKPRFDNRKRSEGWLAPSLRHKKELNVNVVKMYCAVMPITHATVEVGSFDTMLVKAIQEGKAIPEGADYQKGPRYNLATLREAVFYRDNYVCKVCGRKATEGAILHVHHMFYWKGRHGNSLSELITVCEKCHTPANHQKGGKLYGFGENVKFADLSGAAFMNTVRWQIVNELYAAFGKDFVTVTYGAMTKEKRIALHLEKSHNNDAYAMGNCHPAHRCEFGHYQKRCRNNRVLEKFYDATYIDTRTGDKAKGKELFNGRISRNHKKDSEDLHKYRSKKVSKGRRSIRRQRYAIQPYDTVRLESKSYITSGCHNKGTRLLIPANGKSKSVAISKVQVVCHAGAWIQII

SEQ ID NO: 15079 - protein, 413 aa, unidentified; identical to SEQ ID NO: 3616

SEQ ID NO: 15080 - protein, 430 aa, unidentified
MPNKVYVINKHGRPLMPCSPAKARHLLDAGKAKVKKRTPFTIQLVYGSSGYTQEVILGVDAGSKTIGMSASTTKEELLSAEVKPRNDVVDLLSTRREFRRARRNRKTRYRKPRIDNRVRSEHKGWLAPSVEVKIQEHITSIKRVCRILPVSKVVIETAEFDLQLLKAIADGKPVPQGEDYQKGEMYGHYNVRQYVLWRDNYTCQCCGAHATKKKEVRLHVHHLESRKVGGDAPDNQVTLCESCHEKLHKGLIAEKDFKKRKRKSTRDATFMGIMRKTLMQRLCSELPIPVIETRGYITKATREKLLVLPKSHTNDALAIAQGKQGFNVGYLPGIVQINKIYTIRPVRHHNRQLHKATILKGGIRKSNQAGKYVFGYCLFDKVQFNGQDCFIWGRTTGIFTIKTINGKMIKDGISFKKLKPVEKSTSYLIA

SEQ ID NO: 15081 - protein, 462 aa, unidentified
MSVLVIGRNGRALMPTNPRKARLLLKKKTASVVCRHPFTIQLLYKTGCATQEGCIGIDTGSQHIGVGITCGDRVILKDEHALRSSMEKRSLLATRTVMRRGRRYRKVRYRKPKWRHHTKRMYFEKANRRGQHWRKVKTTTQSPRLKGWLPPSLQSKCDHHFRIIDRYLKYLPDPITRNLVIEAGRFDMARMNDPTIHGEMYKRGPMYDAENLRAYIFARDNYQCACCKAKAGTTRKADGTTVKLVAHHILFRSRGATDNPKYIISVCDHCHTTKAHQPGGILYSWMENNKKVARGLRDATFMNILRKRLFARYPQAAFTYGNITAADRKQLRLPKSHANDAVAISLFGKEASTVKNICQTMHYKQIRKSKRSLHEAIPRKGRKNPNTKAVRNKKNTTQANGFKLWDSVLADGKKLFICSFTGTSAYLIDKNGCYISQPGKTYKQWPLSKLKRLHPNGNWLMA

SEQ ID NO: 15082 - protein, 416 aa, unidentified
MVYVLSQNGQPLMPTVNHAKVRVLLNQRKAKVIKRCPFTIQLQYESTTHTQKINLGIDAGSKTIGVSATTETKVLYESEVALRNDIVELISGRRALRSSRRNRKTRYRKPRFDNRKRPDGWLAPSVRQKIETHITVVENVMKILPVTKIIVETASFDIQKIKNPEIEGVGYQHGEQLDFWNVREYVLFRDGHTCQCCKGKSKDNILNVHHIESRKTGGNAPNNLITLCETCHKAYHKGIITLPKEIHRGVRFRDAAFMGIMRWAFYDRLKELYTPFGVTVVNTYGYITKNTRIEYGLPKEHYVDARCISGNPAAKPLDHYYFQKKVRCHNRQIHKNTILKGGYRKRNQVEYEVKGFRLYDQVLWKGQKCFIFGRRSTGRMDLRLLDGTHVNASVGYKNLKLLSMRKNYLIEQRKAG

SEQ ID NO: 15083 - protein, 543 aa, unidentified
PACNHAKASSSQGKHNLLLRQERFIVKEVANMSTVYVLNKDGKPLMPTTRGGHVRHLLKEQKARVVRAKPFTIQLLYETNDVVQPLYLGIDPGRTNIGVAVVKANGTAVFTAHLETRNKEIPKLMQDRKKARRARRTNGRRCRRQRRAKANGTISKKCVKQTTAQNGSVSKRAKDIGVIKRRLPGCEKDVLCIGIKNKETKFTNRTRPEGWLTPTANQLLQTHINLVKKIQKFLPISDVVLEVNKFAFMRLDNPNIQKWQYQQGPLYKKESLESAVSEIQEHHCLFCKKPIDHYHHVVPQHKNGSNTIGNIVGLCAKHHDLVHKDSAWEKKLAQKGTGLYKKYGALGVLNQIIPTLTNELSSLFPKHSFVTNGKSTYDYRAAHGVSKDHWLDAYCIACSVLPSNVCDSNINNHMPYELKQFRRHDRRVLNNENMNRVYTLNNKAVAINRHKAKDQKTVSLEEFRKEHPDDVCKLKVKEHHPTYRNMNRNFPGSVFLVGKQIHVMQGIASSKDGKATKYNDTSATAIAAGKCKFVAKNTGILFV

SEQ ID NO: 15084 - protein, 439 aa, unidentified; identical to SEQ ID NO: 3280

SEQ ID NO: 15085 - protein, 428 aa, unidentified
MLVYVVDKNGQPLMPTHNGAKVRVLLKQKRAKVISKCPFTIKLLYESTNFTQPLTLGIDTGSKYVGSAVINDTTSEILYESQTELRDDIKKKMERRKAFRRSRRNKLRYRPSRFDNRKASKRKNRYTPTLISKFQGHTREIEFIKSILPVTDVVLEVGEFDPQLLQDPTLAFHKWDYAKGELYQQENFKQAAKARDGYKCQRCGKKNCRLEVHHLLPRSRGGSDKLANLITLCSDCHHLAHSSEEQLLAFQKRFGKKSKGALRYATQMNILRSMLQKDYLDAEITYGFITKDVRRIFCLEKSHMVDACCIAGMGSKFHNENSNKYKKKCVPKGNYARTSVKGGRFVFLPSGKISGFKRYDKVLYNNKEYFVTGRMSNGYITLTDIDGNKSQVESVKRSTGEKYLSLAKIKVSLVKKISSAKTCICTSV

SEQ ID NO: 15086 - protein, 512 aa, unidentified
  source 1..512: note = Clostridia bacterium
MSTVYVFNKDGKPLMPTTRCGHIRYLLKEKKAQVVASKPFTIQLLYETSDVVQPLYLGIDPGRTNIGVAVVKTDGTAVFTAHLETRNKEIPKLMKKRKDSRRARRTNGRRCRRQRRAKANDTISKKCVKQATAQNGSVSKRAKEIGVIKRHLPGCEKEILCIGIKNKEAKFNNRTRPEGWLTPTANQLLQTHINLVKKIRKFLPISDVVLEINKFAFMQLDNPNIQKWQYQQGPLYQKASLEETVSEMQEHHCLFCKKPIAHYHHVVPQSENGSNTIGNIVGLCTQHHDLVHKDATWQEKLAKKKTGLNKKYGALSVLNQIIPALTKELSSLFPKHFFATNGKSTYDYRAAHGISKDHWLDAYCIACSVLPNDVCDSGINNRMPYELKQFRRHNRRALHKENMSRVYTLNDKAVATNRHKAIKQTTNSLEEFRKNHPDDVCKLKVKEHHPEYRNPKRNFPGCVFLVGKHTHVMQGTSGSHNGKADGYYNTNGNSYSSGKCKFVAKNEGIVFT

SEQ ID NO: 15087 - protein, 379 aa, unidentified
MRVFVFNMRGRPLMPCSQRKARLLLRENKAMIYKYHPFTIQLTYTTGETKQDCHIGIDTGSKYIGAAVRSEDKVFWKGEIELRQDIRSNLDTKRIYRRSRRNRKTRYRKPRFLNRKRRDEWLPPSLQSRINHTFHWIDTLSSLVPNPILHIEVGKFDVAKMINPEIHGVDYQHGQTYGFFDERYFVFARDNYTCQCCGKSKNKILNTHHIIYRSNGGTNRVDNLITVCTDCHTSQNHRKGGIFYQWQEQHKKVKQYKEPPFMNTLRKRIFVAYPDAEITYGSETTPKRKAMKLDKTHYNDAIVISGINEIKENPEEWLLIKQFRKKKRSLHEATARKGRKKPNRNQTRNSKNTPYYKGFYLNDKVSVDILQDLRAMRHI

SEQ ID NO: 15088 - protein, 438 aa, unidentified; identical to SEQ ID NO: 4848

SEQ ID NO: 15089 - protein, 447 aa, unidentified; identical to SEQ ID NO: 3915

SEQ ID NO: 15090 - protein, 462 aa, unidentified; identical to SEQ ID NO: 7335

SEQ ID NO: 15091 - protein, 429 aa, Petrotoga sp.; identical to SEQ ID NO: 5336

SEQ ID NO: 15092 - protein, 411 aa, Desulfosporosinus sp.; identical to SEQ ID NO: 8287

SEQ ID NO: 15093 - protein, 428 aa, unidentified
LKVFVLNMRGRPLMPCSPAKARHLLKAGKAVVRRRTPFTIQLRIATGETKQSVTLSVDAGAKHVGLSAATEKEEVFASEVELRQDITGLLAARLSLRRERRQRKTRYRAPRFLNRVRSKHKGWLAPSVENRIQAHMSRIDAICELLPVTKIVIETASFDIQKIKHPDVEGTDYQQGDQLGFWNVREYVLFRDGHVCQHCHGHAKDKILNVHHLESRQTGGDAPNNLITLCETCHKAYHAGKIKLKVKRGQSFRAEAFMGIMRWTLLDRVRKAHPDLPVENTYGYLTKNTRITLGLPKTHCVDAYCIARNLKAVRRGVCLHQRQVRKHNRQIHKSTVLSKTLKDGTKIGYRKLNQTPHLVKNFRLFDKVRCLGQTGFIFGRRSSGYFDVRRLDGVKISSCISYRKLTLLEKRGTCLTELRKEDGASSTV

SEQ ID NO: 15094 - protein, 412 aa, unidentified; identical to SEQ ID NO: 4364

SEQ ID NO: 15095 - protein, 418 aa, unidentified
MLNNQKEYSFVLDAEGKKLDPTIVQNAWRLVRQKKATLIAKRPMTIQLKKVIDSPNDDEIRMGIDDGAKHVGLALVQKCKTKNKVIFVATMEHRNDVHKKMEQRKNYRRYRRYWKRYRKARFSNRTSARRKGRVAPSILQKRQAVVRITDSLSKYIRIDSIYLEDVAIDVRVLTDEKRLYSWQYQQSNRLDENLRKATILRDNCKCQLCGKRNCRLEVHHITPRRMNGANTIGNLITLCSECHSNVTGREIEFAEQLYSKIGKKKNNVSLQYASHVMVGKTWLREELSKLVPVFLTTGGDTANKRIDWNLEKSHEIDAVCITNLEPESVGVKSWNVKPLRHQRKTMKVKEILGFRHRDIVCYTFKNGEYHEGYVTALYPSEGKQKEGLNFLSPTKHCKRVNPKKCQRLDRPDKFLWLV

SEQ ID NO: 15096 - protein, 438 aa, Streptomyces sp.
VGHGRGETGAVRTRTRRRHARRLDPGSKATGIAVTDERDEVGAKGRTALVRRGLVSIELRHRGRQIHSGMVRRAGHRRRRRSANLRYRAPRRDNRTRPDGWLPPSLRHRIDSTMSLVARLCRYAPVLEIHVEQVAFDTALIAAAVSSREQDFSERTHAGSEIREFLLAKWERSCAYCGATGVLLNIEHVRPRSRGGSDRVANLVIACVPCNQAKGAARIDGFLADRPARLERVIAQLRRPLHDVAAMNTTRLLLVKTLATHGVAVHTWSGGRTSWNRLAMGLPKSHTLDALATGVIDLERGDAVVRIPAQILVVRSTGRGSYARTTPDRYGFPRLQRPRRKVHHGFSTGDLVAAVVPKGKWAGRWVGRVSVRAGGQHRITTLTSRFDVSHRNLRLLQRADGYTYGFADEIRLSEEHGPAYSGRTLKGGDPGNVRTPDA

SEQ ID NO: 15097 - protein, 544 aa, unidentified
MKQKKQKVMVYILNKKGKPLMPTTRCGHVRKLLNSKKAVVVNSNPFTIRLKYDTPNGVQDVFAGIDSGRENIGSGASNEDGDCLYLGELKTSNKSIKLKMTERAGFRKERRRHDRQNKQRKARKDHTEIQNGKDDICRATISCKSVQISYPTAEESVTHKIIRGKEGKFANRHRDGDWITPSARQLVQMHMNDLKSICKILPISHVTLERVAFDFQKLENENIKAWEYGKGKLYGYDSPEEYIHDVQDGKCLVCGKPHIDYLHHIIPRSKGGSDKVSNIAGLCYDCHYGPIGVHNCQDTQDRLPELKNEVNKQYKVSLLNSVMPVLIEEIDKFCKANSIMFSICEGHDTAKVRDMYDLQKDHCIDGFAISLVDRNVKSVDVMPDRIYQKQRYKKKSKNIIQKRNCREYYDGKKLVAVNRHKGTDQKADSLEEYMNTYAETHTADECKMHFESLTVKPARRTYTFHKEGRICPLHIGDKVRYEKKNKIKGNTKVDTFICEGIYFSKDENKAEVEHNKTKSKKMKFCRTIESGCIPYIDYRKLALI

SEQ ID NO: 15098 - protein, 406 aa, unidentified; identical to SEQ ID NO: 11207

SEQ ID NO: 15099 - protein, 407 aa, unidentified
TNGRRCRRQRRAKANGTISKKCVKQATAQNGSVSKRANEIGVIKRHLPGCEKNVLCIGIKNKEAKFSNRTRPEGWLTPTANQLLQTHVNLVKKIQKFLPISDVVLEVNKFAFMRLDNPNVQKWQYQQGPLYQKASLEEAVSEMQEHHCLFCKNTIDHYHHVVPQHKNGSNTIGNIVGLCAKHHDLVHKDTSWQEKLAKKKTGLNKRYGALSVLNQIIPALTKELSSLFPKHFFATNGKSTYDYRAAHGVSKDHWLDAYCIAGSVLPNDACDNNINNRVPYELKQFRRHDRRALHKENMSRVYTLNGKSVATNRHKAIKQTTDSLEEFRQRQPNDVCKLKVKEHHPEYRNPKRNFPGCVFLVGKHTHVMQGTSGSHNGKADGYYDTNGNSYSSGKCKFVVKNEGIVFT

SEQ ID NO: 15100 - protein, 462 aa, unidentified
MSVLVIGLNGIPLMPTTERKARILLKDSKAFVVSRHPFAIRLLYKTGCAVQVGQLGVDTGSQNIGIGVVCGNRVILKEEHQLRASMEKRSLIESCASFRRNRRYRKTRYRHPKWKHHTKRVFSEQPDKKGRHWHKADASYQSSRKEGWLPPSLQSKCDHHIRIINRYIRFLPKCISDNLIIEAGRFDMARMQDPTVRGELYQKGPMYEAENLKAYIFTRDNYTCQCCGAKAGTARKDGTVVKLIAHHVLFRSRGATDNPKYMASVCTACHTAKAHEPGGILYEWMVKQKKFTRGLRDAAFMNILRKRLFAAFPDAIFTYGNITSADRKCLRMEKTHVNDAVAVACYGKEISRLRDNSRKVTCYKQVRRTKRSLHEAAPRKGRKTPNRIAARNNKNVVSVKGFRLWDTVLADGRKLYLTGFSGSSAYLVDKDGQYISPPGKMYRQWTLSKLTRLHPNGGWLMR

SEQ ID NO: 15101 - protein, 427 aa, Enterococcus sp.; identical to SEQ ID NO: 2410

SEQ ID NO: 15102 - protein, 518 aa, Anaerostipes sp.; identical to SEQ ID NO: 3878

SEQ ID NO: 15103 - protein, 475 aa, unidentified; identical to SEQ ID NO: 5744

SEQ ID NO: 15104 - protein, 415 aa, unidentified; identical to SEQ ID NO: 6534

SEQ ID NO: 15105 - protein, 413 aa, unidentified
MPNKVYVINKHGRPLMPCSPAKARHLLDAGKAKVKKRTPFTIQLLFGSTGYTQEVILGVDAGSKTIGLSASAETEELLSAEVKPRNDVVDLLSTHREFRRARRNRKTRYRKPRFDNRVRSKHKGWLAPSVEVKIQEHITSIKRVCRILPVSKVVIETAEFDLQLLKAIADGKPVPQGEDYQKGEMYGHYNVRQYVLWRDDYTCQCCGAHATKKKEVRLHVHHLESRKVGGDAPDNQVTLCESCHEKLHKGLITAKDFKKRKRRSTRDATFMGIMRKTLMQMLCSELPIPVVKTRGYITKATREKLLVLPKSHTNDALAIAQGKRGFNVGYLPEIAQIDKICTIRPVRHHNRQLHKAAILTGGIRKSNQAEKYVFGYRLFDKVQFNGQDCFIWGRRTSGIGNDGRYNKKRRKAE

SEQ ID NO: 15106 - protein, 431 aa, unidentified
MPNKVYVINKHGRPLMPCSPAKARHLLDEGKAKVKKRTPFTIQLVYGSSGYTQEVILGVDAGSKTIGMSVSTTKEELLSAEVKPRNDVVDLLSTRREFRRARRNRKTRYRKPRFDNRVRSKHKGWLAPSVEVKIQEHITSIKRVCRILPVSKVVIETAEFDLQLLKAIADGKPVPQGEDYQQGEMYGHYNVRQYVLWRDNYTCQCCGAHATKKKEVRLHVHHLESRKVGGDAPDNQVTLCESCHEKLHKGLIAEKDFKKRKRRSTRDATFMGIMRKTLMQMLCSELPIPVVKTRGYITKATREKLLVLPKSHTNDALAIAQGKQGFNVGYLPGIIQTDKIYTIRPVRHHNRQLYKAAILKGGIRKSNQAEKYVFGYCLFDKVQFNGQDCFIWGRRTTGIFTIKTINGKMIKDGISFKKLKPVEKSTGYLIA

SEQ ID NO: 15107 - protein, 457 aa, unidentified
VWLYQAVYNLGEGFLPSSEERTAFYWLLIYRKEHGIMQYVYVLNKHGEPLMPCSPGKARLLLKQQKACVVKRTPFTIKLLYGSAGYKQPITLGVDAGSKHVGLSASTEKRELYREEFTPRNDVVDLLSTRRQNRRSRRNRKTRYRAPRFDNRVHSKHKGWLAPSVEVKIQEHITVIKRICRILPITLVRVETAEFDTQRLKAMLKGKPLPVGTDYQLGEMYDEYNVRQYVLKRDNYTCQCCGAHPTEKKPVRLHVHHLESRHVGGNAPNNLITLCVACHKALHEGKITLDKGKKRGKPLRDAAFMGIMRNTLLARLKDELSIPVKQTYGYITKLLREKNKIPKSHVNDARCIAKAPNAKPCDTMLYTRALRHHNRQIHKAKILNGGIRKKNQAPYLVKGFRLWDKVRYNGEECFITGRRSSGYFDHKKYDGTVISNSASYKKLMLLEAATNYITERS

SEQ ID NO: 15108 - protein, 428 aa, unidentified; identical to SEQ ID NO: 5036

SEQ ID NO: 15109 - protein, 427 aa, unidentified; identical to SEQ ID NO: 4946

SEQ ID NO: 15110 - protein, 396 aa, unidentified
LRVLVWNKRGKPLMPCSPAKARLLLKEKKAIVVRRTPFTIQLTIATGESKQPVSLGVDAGYKHVGLSASTEKAELYASEVELRQDITDLLSARRALRQSRRNRKTRYRAPRFDNRIRTKRKGWLAPSVENRINAHLSRIETVIRLLPVTKISVETTSFDMQLLKNSDIAGKEYQESEQLGFWNVREYVLFRDGHVCQHCHGRSKDPVLNVHHLESRRTGGDSPGNLITLCETCHKELHRGEITLKAKRGQSFRAETFMGIMRWEVLDRLKASHPKLEVQNTYGYRTKHARIVNGIAKSHCADAFCIAGNLGAERLGEFLFQKQTRRNNRQIHKLSILKGGIRKRNQVPFEVKGFRLFDKVACKGEEGFIFGRRSSGYFDVRKLDGTRISAGIGYKK

SEQ ID NO: 15111 - protein, 472 aa, unidentified; identical to SEQ ID NO: 14259

SEQ ID NO: 15112 - protein, 418 aa, unidentified
MPCSPAKARLLLKEKKAIVKRRTPFTIQLTIATGEAKQPVSLGIDAGYKHVGLPASTEKAELYASEVELRQDITDLLSARRALRQSRRNRKTRYRAPRFDNRIRTKRKGWLAPSVENRINAHLSRIEAVLRLLPVTKITVETASFDLQLLKNPDISGKEYQEGEQLGFWNIREYVLCRDGHVCQHCYGRSKDPVLNVHHLESRRTGGDSPGNLITLCETCHKALHRGEITLKAKRGQSFRAEAFMGIMRWEVHNRLRALHPGIEVSNTYGYRTKHARIANGIAKSHCADAFCIAGNLGAERLCEFFFQKQTRRNNRQIHKLSILKGGIRKRNQAPFEVKGFRLFDKVACQGEEGFIFGRRSSGFFDVRKLDGTRISAGISCKKLHLLEKRRTYLTEIRKEEALPPLPEGRGSAPKCDE

SEQ ID NO: 15113 - protein, 434 aa, unidentified
MKVFVLNKHGNPLMPCNPRKARLLLKQQKAVVVKQMPFTIRLLYGSSGYKQPVSLGMDAGSKHVGIAAATEKEVLFAEELVPRNDVVNLISMRRQNRSSRRSRKTRYRKVRFDNRVHSKHKGWLAPSVEVKIQEHITAIKHVQQILPVTEIHVETAEFDTQRMKAMEEGKPLPVGIDYQLGEMYDSYNVRQYVLKRDNYTCQCYGKHGDGVKLHVHHLETRKTGGNAPGNLITLCEDCHKAIHAGTKALPARKAKRSTKSLRDAAFMGNMRKTLLESLRAQLGVPVTGTYGYITKLYRDLYHIEKSHINDAIVISKYFTAVPDDVWYFAKAVRRHNRQIHKSKILKGGIRKRNQAPHVVKGCRLFDSVKYAGNTYFVFARRASGGMGIRTLDGAKVNNGWLSYRKFNVQYCNAGALLERRKAIPPMDKFMGFLA

SEQ ID NO: 15114 - protein, 461 aa, unidentified; identical to SEQ ID NO: 6342

SEQ ID NO: 15115 - protein, 443 aa, Anoxybacillus sp.
MVEENMTCFMQRKGENPMVFVLDTNKRPLAPCHEAVARKLLKQGKAAIYRRFPFTIILKKSVDESEIKATYRLKIDYGSRHTGLAILRGQEVVWLGQLDHRTDIKERIDKRRAFRRARRNRKTRYRKPRFLNRKRKEGWLPSSLESRVQNIQTWVNRLKKLCPIGYISYENAKFDTQLMRNPEINGVEYQQGTLQGYEVREYLLEKFGRKCCYCGKENVPLEVEHIIPKSRGGTDRVDNLCLACHDCNQRKGSKTAEEFGYPHIQKQVKESLKDASAINSTRWKAYEVLKQTGLDVECGTGARTKMNRIRLDLPKTHYFDACCVGESTTNHLYFKTKEVLFIKAKGRGSRSRTNLDRYGFPRGYLARQKFFFGFQTGDMVKAVIPRGKYQGVWFGEVACRKTGSFDIKGKDGKRIAQGINYRYVQVIQRFDGYAYGKGVAELA

SEQ ID NO: 15116 - protein, 427 aa, Parasutterella sp.; identical to SEQ ID NO: 6030

SEQ ID NO: 15117 - protein, 379 aa, Arthrospira sp.; identical to SEQ ID NO: 2727

SEQ ID NO: 15118 - protein, 456 aa, unidentified; identical to SEQ ID NO: 8380

SEQ ID NO: 15119 - protein, 512 aa, unidentified
MSTVYVLNKDGKPLMPTTRGGHVRHLLKEQKARVVRAKPFTIQLLYETNDVVQPLYLGIDPGRTNIGVAVVKANGTAVFTAHLETRNKEIPKLMKKRKESRRARRTNGRRCRRQRRAKANGTISKKCVKNDTAQNGSVSKRAKEIGVIKRHLPGCEKDVLCIGIKNKEAKFSNRTRPEGWLTPTANQLLQTHINLVKKIQKFLPISDVVLEINKFAFMRLDNPNVQKWQYQQGPLYQKANLEETVSEMQEHHCLFCKKKIDHYHHVVPQHKNGSNTIGNIVGLCAKHHDLVHKDSAWEKKLAKKSTGLYKKYGALGVLNQIIPTLTNELSSLFPKHSFVTNGKSTYDYRAAHGVSKDHWLDAYCIACSVLPSNVCDSNINNHMPYVLKQFRRHDRRVLNNENMNRVYTLNNKAVAINRHKAKDQKTVSLEEFRKEHPDDVCKLKVKEHHPTYRNMNRNFPGSVFLVGKQIHVMQGIASSKDGKATKYNDTSATAIAAGKCKFVAKNTGILFV

SEQ ID NO: 15120 - protein, 434 aa, unidentified
MVYVINFEGKPLMPTTNAKARKLLNQKKATVKKVNPFIIQLLYKTDTEYIQTITLGIDSGYLNIGFSAITDSKELIVGEVKLLQGMKDRLLEKSQYRRIRRQRLRYRKPRWNNRKIRQGWLAPSLQHKLDTHVKFIDYLNTILPIRNIVLEVANFDIQKIKNPDISGVEYQQGEQMDFWNVREYVLHRDGHKCQNPNCKNKSKEQILEIHHIKYKSEGGSDAPSNLITLCNKCHTSPNHKKGKFLYDWCEKGKKVRGFRDATFMSMIRWYLLEQLKEKYTNIKATYGYLTKNHRIEHGIEKSHFNDAFAIAKGVNQVRNLEIFKVEQSRLNNRSLEKFYDAKYIDNRTGEKVSASELNCGRRTRNKNLNSENLRMFRGQKISKGQRRIRKQKSLYQPNDLIKYNGNVYTVKGSQNEGKYIALKRNQKSTKCKTN

SEQ ID NO: 15121 - protein, 281 aa, unidentified; identical to SEQ ID NO: 2941

SEQ ID NO: 15122 - protein, 452 aa, unidentified; identical to SEQ ID NO: 3042
  source 1..452: note = uncultured beta proteobacterium

SEQ ID NO: 15123 - protein, 397 aa, unidentified
IVKRRTPFTIQLTIATGESKQPVTLGVDAGYKHVGLSASTEKAELYASEVELRQDVSDLLSARRALRQSRRNRKTRYRAPRFNNRLRTKRKGWLAPSVENRINAHLSRIEAVLRLLPVTKISVETASFDMQLLKNPDIAGKEYPEGEQLGFWNVREYVLFRDRHVCQHCYGRSKDPVLNVHHLESRRTGGDSPGNLITLCETCHKALHRGDITLKAKRGKSFRAEAFMGIMRWEVHNRLRALHPGIEVSNTYGYRTKHARIANGIAKSHCADAFCIAGNLGAERLCEFFFQKQTRRNNRQIHKLSILKGGIRKRNQAPFEVKGFRLFDKVACQGEEGFIFGRRSSGFFDVRKLDGTRISAGISCKKLHLLEKRRTYLTEIRKEEALPPLPEGRGLRA

SEQ ID NO: 15124 - protein, 443 aa, Anoxybacillus sp.
MVEENMTCFMQRKGENPMVFVLDTNKRPLAPCHEAVARKLLKQGKAAIYRRFPFTIILKKSVDESEIKATYRLKIDYGSRHTGLAILRGQEVVWLGQLDHRTDIKERIDKRRAFRRARRNRKTRYRKPRFLNRKRKEGWLPPSLESRMQNIKTWVERLRKICPIEHISYENAKFDTQLMRNPEINGVEYQQGTLQGYEVREYLLEKFGRKCCYCGKENVPLEVEHIIPKSRGGTDRIDNLCLACRDCNQRKGSQTAEEFGYPHIQEMVKKTLKDASVVNATRWKVYEVLKQSGCEVECGTGARTKMNRIRLGLPKIHYFDACCVGKSTPLQLHFKTKEVLFIKAKGRGSRSRTNLDRYGFPRGYLARQKYFFGFQTGDMVKANVPKGKYQGVWFGEVACRKTGSFDIKGKDGKRIAQGINYRYVQVIQRFDGYAYGKGVAELA

SEQ ID NO: 15125 - protein, 439 aa, unidentified
MVFVLDKSKKPLNMISHAKARILLKNRLAVVHKIYPFTIRLKDNSCVSQDRAYTVKVDPGSKHTGIAIVDDKASVVMLAKIEHRGHVIKKSLDSRRMVRRSRRNRKTRYREARFLNRTKPQGWIAPSVKSRTDNVINFIKKYKKLLNINKVMIENVSFDTAQMTSDVNLVGTAYQQGPLYQQKLRSFIFSRSDGKCVYCGAVATEIDHVIPRAKGGTNSVYNLAASCKACNEKKSNQTLKDFGKLVGKDFSKLTPKKLPRDAAIVQSAKNYMVREISKLVSDTTLHDAWLTKYNRDELGLPKEHYYDALSVGNVQDYKFFVDKVLQISAKGRGSRQMCRVNKYGFPRTSAKVSKSVRGFQTGDMVKAIVPSGLKQGVYLGKVAVRSTGQFDIQTKTKTIEGIWHKHFHIIQRGDGYLYSYKSNDLTLQAKLSKKAKNPS

SEQ ID NO: 15126 - protein, 420 aa, unidentified
MQYAYVLNKRGEPLMPCSPGEARLLLKQQKACVVKRTPFTIKLLFGSAGYKQPITLGVDADSKHVGLSASTEKRELYSEEFTPRSDVVELLSTRRQNRRSRRNRKTRYRAPRFNNRVHSKHKGWLAPSVEVKIQEHITVIKRICRILPVTLVRVETAEFDTQRLKAMLAGKPLPVGTDYQLGEMYDEYNVRQYVLKRDNYTCQCCGAHTTAKKAVKLHVHHLESRKVGGNAPSNLITLCTTCHNNLHKGKITLDGKKRGKTLRDAAFMGIMRNTLLTRLRNELNIPVQNTYGYITKLLREQNDIKKSHVNDARCISKHPLAKPCSVCYRTKAIRHHNRQIHKAKILKGGIRKANQAPYIVKGFRLWDKVLYNEQECFISGRRSSGYFALRKFDGTTITNSISFKKLRLLEPATNYLIERK

SEQ ID NO: 15127 - protein, 391 aa, unidentified
MVRLGDCLKTKKAVVVNLCPFTIKLMYVTSDYKQEIVLGVDAGTKHVGLSATTKSKELYSSEVILRNDIVDLLSTRRELRRSRRNRLRYRKPRFDNRIKSKRPGWVAPSVKYKVDAHIRVIDNVCSILPISRIVIEVAQFDTQKINNPNISGKEYQEGDQLGFWNVREYVLARDGHKCQHCKGKSKDPVLNVHHIESRKTGGDSPSNLITLCETCHKEYHKGNIDLKIKRGSSLRDAAVMGIMKWRLYEELKSKYDNISMTFGYVTKYNRIKHGIEKSHVFDAFVISKNFDAIRLGYYYKVRLVRRHNRQIHKQKIPKGGIKRPNQSPFEVFGFRLFDRVMFENSYYFIFVRRKTGSFNIRDIDGKNQRDITYKKLKLSRCKRFMVQKEMD

SEQ ID NO: 15128 - protein, 518 aa, unidentified
MTPKKRKEASRMSEYIYVIGVDGDPQMPTKRKRHVEQLLQTGRARIFRQVPFTIQLTYENEPVLQPVTIAEDPGRSNIGMAVVSLSGELLSAAVVQTRNKEIAKLMEKRKQHRRASRNGERRARQRLAKKYHTMITAGFLMRKLPMYGKDKRVRCNVIKNTESRFCNRKRENGWLTPSAEHLVRTHINLIHKMQKFLPITDVAIEINRFAFLSLEDTSISGVDFQNGPLKGYDDLNAAVEDLQDGHCLMCNSPIEHRHHIVPRSMQGSNTIGNIAGLCCKCHERVHKDTRFEDRLKKKKAGLDKRYAAVSVLNQAIPFICKRLEQEFEKEHVHYCSGRDTGMVRRPFGYHKTKEEQLHEVDAWCIAVLALQHVPEKAPEFDHVHEILQFRRQDRSRIKAQTSRAYYHEGKKIAKNRKKAEGQRDDSLQEWRKRQVERYGKEQTRKMISQLEVKESIRRYNRLDRLMPGAVFYYQGVRYVMRGQHSNGQYLQAVGMGSKDFPAKKCKIVANNEGLVFVS

SEQ ID NO: 15129 - protein, 406 aa, unidentified; identical to SEQ ID NO: 2752

SEQ ID NO: 15130 - protein, 410 aa, Bacillus sp.; identical to SEQ ID NO: 12386

SEQ ID NO: 15131 - protein, 480 aa, unidentified; identical to SEQ ID NO: 2726

SEQ ID NO: 15132 - protein, 425 aa, unidentified; identical to SEQ ID NO: 5427

SEQ ID NO: 15133 - protein, 413 aa, Blautia sp.; identical to SEQ ID NO: 10403

SEQ ID NO: 15134 - protein, 428 aa, unidentified
MVYVSDKDGQPLMPTKRYGKVRHLLKEGKAKVVRCMPFTIQLLYDSGEHTQPVDLGVDAGSKYIGLSACSDKAELFAAEVEPRDDISKNLTSRKESRRTRRSRKTRYREPRFDNRTHHKKEGWLAPSVKCRCETHLTAIRKVMSLLPVSGITIEMAPFDTQKLKADIFDMKAPSGTDYQHGESEGYDNIKAYVRWRDGYKCAVCGREHIPLQVHHKKQRKDGGSNMPANLITVCVDCHKAYHAGLLPDGQAAVMQPDTDVKPMRDAAFMNIMRWAVWDRLKELGLPLHMSFGYITARQREKYGIEKSHHADARCISGHGDLPPAGEWFFCKKVRCHNRQIHKKNPGAGGYRKLAQQGHVIKGFKLNDTVLFGGKEWFIHGRREKGAFVLEDLDGNRIERAPSKLKFMHPNGTLLIERRKLIQGGSSHD

SEQ ID NO: 15135 - protein, 456 aa, unidentified; identical to SEQ ID NO: 3956

SEQ ID NO: 15136 - protein, 460 aa, unidentified
MPPENLVEATITLETGGSQEQTKERLVMSKVFVLDTDRRPLDPVHPGKARILLTQGKAAVFKRYPFTIILKVAIEKPGIHPFRLKIDPGSQTSGLALVNDTTGEIVFAAELAHRGDAIKKALAQRRAVRRGRRQRKTRYRKPRFANRRQKGGWIAPSLESRVANVLTWTKRLLRLCPISAISLELVKFDLQQMDHPEISGMEYQQGTLFGYELRQYLLEKWNRACSYCGAQHIALQVEHIQAKSNGGTDRVSNLCLACDSCNKAKGTQDIRVFLAEKPDLLAHILAQAKAPLKDAAAVNTTRWVLYEQLKALELPVECGSGGLTKFNRTVRNLPKEHWLDAACVGKSTPLQLKAAGVIPLLITATGHASRQKCNINEIGFPCSKPKAAKKVKGFQTGDIVRAVVTTGTKQGVYVGRVLVRASGSFDLRTRQGLVQGIGHRFCTLVHRCDGYSYQKGVPYA

SEQ ID NO: 15137 - protein, 419 aa, Anoxybacillus sp.
LFVYVINKHGNPLMPCSPRKARILLKNKKAKVVKRTPFTIQLLYGCSGYKQPISLGVDAGTKHVGLSATTKNQVLLEAEVQLRTDIQELLATRRQFRRSRRNRKTRYRKARFLNRKKPNGWLAPSIQHKMDSHIKLVKWVHSMLPITHITVEVAQFDTQKIKNPDIQGAAYQQGEQLGFWNVREYVLYRDGHTCQWCKGKSKDPVLNVHHMESRKTGGDSPSNLITLCKTCHDRIHREGLEHEIQRRFSSLKDASHMTAMRWFIWNGLKKVYPHVKHTYGYITKHTRIVHGLAKTHMVDARCISENPLATPSDTVFLLKFVRKNNRQLHKATISKGGKRKANKAERFIKGFQLFDKVLYNSQECFVFGRRSSGYFDLRLLDGTRIHASASYKKLKKVEHASTLLIERRKGDSSPTFALA

SEQ ID NO: 15138 - protein, 423 aa, Nostoc sp.
MSNFVFVLDTDRRPLNLTHPGAARHLLNTGKAAVFRRYPFTIILKEACPDVPVQDLELKLDPGSKVTGIAIKQGNKVIFGAELQHRGQQIKNALLSRRQLRRSRRNRKTRYRQARFLNRTRPDGWLAPSLQHRVDTILTWVNRLHRLAPISSITQELVRFDPQLMQNSEISGVQYQQGELQGYEVREYLLEKWNRRCAYCSIENVPFEIEHIQPKSRGGSDRVSNLTIACHACNQSKGNQDIRDFLSDKPDLLNRILKQAKSPLKDAAAVNSTRWALFHALKETGLLVTTGTGGQTKFNRTRLYLPKSHWLDAACVGQVESLEVLTSNPLLITTKGHGTRQMCGTDKFGFPNRHRTNQKSWFGFQTGDLVRAVVASGKFAGRWVGRISVRSRPSFKLASSKIFDVHPRYLQVIHRADGYSYTA

SEQ ID NO: 15139 - protein, 269 aa, unidentified
MVYVLDKNGQPLMPTDRHRKVRLMLQSGQAKVIKRCPFTIQLNYDSGHQTQEISLGIDAGSKHIGVSTTTKIKVLYEVDVELRNDIVDLLSSRRELRRGRRNRKTRYRQAKFNNRRLGNGWLPPSIRQKIGTHLTVVENICKMLPISRIMVETASFDIQKIKNTDIQGAEYQQGDQLGFWNIREYVLFRDNHTCQCCKGKSKDKILNVHHIESRKTGGNAPNNLITLCEICHTVVIIKVPYSYRRPSNAVCDLRMLHLWELCDGLSTKH

SEQ ID NO: 15140 - protein, 442 aa, unidentified; identical to SEQ ID NO: 2903

SEQ ID NO: 15141 - protein, 406 aa, unidentified
MVYVQDIDGKPMMPTTRHGKVRRLLKAKKATVVNLCPFTIQLTYKSTDHKQPVTLGIDAGAKHIGFSATTEKEELFACETTLRTDIVDLLSMRLQNRRTRRSRLRYRKSRFNNRGSSKKKGWVAPSVKQRIDSHLNEVNEIHKILPITKIVIEVAQFDTQKMKNHDISGADYQNGEQLGFWNVREYVLFRDGHKCSHCKGKSKDPVLNVHHLESRKTGGDSPSNLITLCESCHKAFHKGEIELKKKRGKSLRDAAVMGIMKWKLYEELKSRYDNVSMTFGYITKYNRIKYGIEKSHTSDAFVISRNFNAKRIERQYLKRLIRRHNRQIHKMKILKGGKKKNNQAPFEVFGFRLFDKVLYNNEIFFVYGRRKSGNFNIRDFNGENPKDVSHKKFKLIRGKRHPIILK

SEQ ID NO: 15142 - protein, 431 aa, unidentified
MDAWDIIVVLNKRGKPLMPCSPAKARLLLKEKKAIVKRRTPFTIQLTIATGESKQPVTLGVDAGYKHVGLSASTEKAELYASEVELRQDVSDLLSARRALRQSRRNRKTRYRAPRFNNRLRTKRKGWLAPSVENRINAHLSRIEAVLRLLPVTKITVETASFDMQLLKNPDIAGKEYQEGEQLGFWNVREYVLFRDRHVCQHCYGRSKDPVLNVHHLESRRTGGDSPDNLITLCETCHKALHRGDITLKAKRGKSFRAEAFMGIMRWEVHNRLRALHPGIEVSNTYGYRTKHARIANGIAKSHCADAFCIAGNLGAERLCEFFFQKQTRRNNRQIHKLSILKGGIRKRNQAPFEVKGFRLFDKVACQGEEGFIFGRRSSGYFDVRKLDGTCISAGISYKKLHLLEKRRTYLTEIRKEEALPPLPEGRGLRA

SEQ ID NO: 15143 - protein, 417 aa, unidentified
MPCSPAKARLLLKERKAIVKRRTPFTIQLTIATGEAKQPVTLGVDSGYKHIGLSATTEKAELYASEVELRQDITDLLSARLALRRSRRSRKTRYRVPRFDNRVASKRKGRLAPSVENRITAHMSRVEAVMRVLPVTAITVETAAFDTQLLKNPDITGAAYQQGEQLRFWNVREYVLFRDGHVCQHCRGKSKDPILNVHHIESRRTGGDAPNNLITLCETCHKAFHRGEIKLKVRRGKSFKAETFMGIMRRTLFERLKKAHPELNVRNTYGYLTKHKRISYGIAKSHCADAYCIADNLGAKRLEGFFFQKQTRKHNRQIHKLLILKGGLKKKNQAPYEVKGLRLFDKVICKGEEAFIFGRRTSGSFDVRRLDGTRISAGINYKKLRLLEPRTTYLTEFRKEAALPPLHKCRGVCAEFL

SEQ ID NO: 15144 - protein, 392 aa, unidentified
  VARIANT 85: note = X can be any naturally occurring amino acid
LRSSWAKFTTSRASNKNWTPAVRSVIAVAAATPATASSGSTTGTPKSAPLAARTPNMAAVTAGPAAKPKTSPTTATEIPGCRHRXVLAKLRKLLPITSVSSEHVKFDTQLLQNPDIQGVEYQQGTLFGYEVREYLLERDGHTCRYCSNLSNDPVLEVEHKIPKSRGGSNSIKNLVMACHTCNEKKDDLTPEEWLTALKGKDGPSAVNQKRIANLDEIVKNKVVPLKDAAMMNATRWKLYRKLQETGLPVECGTGTRTKKQRIDHGLPKEHYYDACCVGESTPERLEIATHYVEVWSAKGRGTRKMCNTDKFGFPISHRTRQKQFFGFQTGDLVKATVPKGKYTGIWTGRVMVRAKGNFDIKDASGNRMTISHRYIQLLQRNDGWQYEKTKIS

SEQ ID NO: 15145 - protein, 427 aa, unidentified; identical to SEQ ID NO: 6307

SEQ ID NO: 15146 - protein, 415 aa, Bacillus sp.
MRVFVKNLRGEPLMSCSPRKARLLLKQGKAKIVGYTPFTIQLQYATGETVQPVTIGIDSGAKYVGIAITTQERVLAKGTIALRQDVKENLILRATLRRGRRQRKTRYRKARFLNRKKKEGWLPPSIQSRIDNVIHWIEKFKSLVPSPKVIVEVGKFDAQKLKNPDIQGTKYQQGDTFGFWNTRYYVFARDQYTCQICKKKGGILHTHHIIERCNGGSDMADNLVTVHEECHQKFHQGKIKHNFKKPKQYKETAFMNILRLQIMNRLDCEITYGSCTTPKRKELGLAKTHANDAISITNPIQLQEYDQSGEFFIKQFRKKKRSLHEATARKGRKTKNTSAKRNNKNTPHVDQIYLGDKVKVFGQVGFVTGFTGKMVYVQDIHGHYVQNPDKSYKQVKISDIERIHHTNNWQFLEIS

SEQ ID NO: 15147 - protein, 423 aa, unidentified
  source 1..423: note = Microcoleaceae bacterium UBA11344
MSNLVFVLDTKKKPLTPCKPSRDHKLLTAGKAAVFRRYPFTIILKKAVTATPKLITLKLDPGSQTTGIALVQDDQVIFGAELSHRGQTIKASLESRSELRRSRRNRHTRYRQARFLNRTRTKGWLAPSLQHRVETTLTWVNKLIRFAPIGSIVQELVRFDLQQLENPEISGIEYQQGELAGYEVREYLLNKWDRKCAYCSVENVPLQIEHIHPKAKGGSDRISNLCLACEKCNLKKGTQDVEQFLAKKPDVLKCILAQAKRPLKDAAAVNSTRWALFNRLKETGLSVSTGSGGLTKFNRTRLKLPKTHWIDAACVGQIESLSVLTNKPLLIKTTGYGTRQMCRTDKFGFPSRYVPRLKFVKGFQTGDIVRATVTSGKKIGTYVGRVAVRSSGSFNISADTLVQGINFKYCKTIHQKDGYNYAF

SEQ ID NO: 15148 - protein, 476 aa, unidentified
LAASGTEGVSHPGLPGKYKHKGGQLMSVAVISKTGERLMPTSEYRARKLLKSGKAIKHSYHPFTIQLTERETGDIQPIELCMDTGYIHIGISVKSEKHEYLAEQIDTLTDERGRHDACRMYRRQRRSRKRYRQARFNNRKRDQGWIAPSLEHKKKIHIQAISRINNVMPITDITLEMGNFDTQVLKAKEEGKPLPHGADYQHGGRYGIATLREAVFSRDGYKCQCCGRTIKDGVILHIHHIKYRSQGGTNSMSNLATVCDKCHTPKNHKPGGKLYNWKPKLSSFKGATFMTAIRWQLYNEVKALFPDIDIHITYGAATKERRRKLDIDKSHVNDAFVMGQFHPKHRIKAILCKKKRRNNRCLEKFYDAKYIDSRDGKKRSGQELFNGRINRNHKKNSENLHQYRLQKVTAGKRTVSKQHYGIQPHDIIVYENRKRETAGCHCNGTRMMLLPDKKSASIKKVKIYKYAGGYFKSAFN

SEQ ID NO: 15149 - protein, 431 aa, unidentified
MPNKVYVINKHGRPLMPCSPAKARHLLDEGKAKVKKRTPFTIQLVYGSSGYTQEVILGVDAGSKTIGMSASTTKEELLSAEVKPRNDVVDLLSTRREFRRARRNRKTRYRKPRFDNRVRSKHKGWLAPSVEVKIQEHITSIKRVCRILPVSKVVIETAEFDLQMLKTIADGKPVPQGEDYQKGEMYGHYNVRQYVLWRDNYTCQCCGAHATKKKEVRLHVHHLESRKVGGDAPDNQVTLCESCHEKLHKGLIAEKDFKKRKRRSTRDATFMGIMRKTLMQRLCSELPIPVVETRGYITKATREKLLVLPKSHTNDALAIAQGKQGFNVGYLPEILQIDKIYTIRPVRHHNRQLHKATILKGGIRKSNQAEKYVFGYRLFDKVQFNEQDCFIWGRRTTGIFTIKTINGKMIKDGISFKKLKLVEKSTSYLIA

SEQ ID NO: 15150 - protein, 416 aa, unidentified
LRVFVLNKRGQPLMPCLPAKARLLLKERKAIVKRRTPFTIQLTIATGEAKQPVTLGVDSGYKHIGLSATTEKVELYASEVELRQDITDLLSARLALRRSRRSRKTRYRAPRFDNRVANKREGRLAPSVENRIAAHMSRVEAVMRVLPVTAITVETAAFDTQLLKNPDIAGAAYQQGEQLGFWNVREYVLFRDGHVCQHCRGKSKDPILNVHHIESRRTGGDAPNNLITLCETCHKAFHRGEIKLKVRRGKSFKAETFMGIMRWTLLERLKKAHPELRVRNTYGYLTKHKRISHGIAKSHCADAYCIADNLGAKRLEGFFFQKQTRKHNRQIHKLLILKGGLKKKNQAPYEVKGFRLFDKVICKGEEAFIFGRRTSGSFDVRRLDGTRISAGISYKKLRLLEPRTTYLTEFRKEAAL

SEQ ID NO: 15151 - protein, 413 aa, unidentified
MTSYAFVLDANGKQLAPTKEQKAWFFIRKKRASLVSKYPIVIQLMKEIPEKEICQDEIRCGIDDGGLHVGIALVQKCKTKNKVVFKGTMEQRNDVKHLMEVRRGYRRYHRYHKRYRQARFDNRKSSKREGRIAPSILQKRQATIRVIHWLNKWINITNYWLEDVSVDIRALTDGYQSYRWQYQKSNRLDENIRKAAILRDGGKCMECGKSNCRLEVHHIKPKRRNGSNTLDNLITLCESCHQKTEGQEELYMDRYFSLLKSSDNKNLNYAQHVMIGKMWLRKQLSGLGVLYLTSGGDTANKRIDWNIEKSHANDAVCITDLRPDTCDVKEWTMKPMRRQSKAKTDHVLGIHHRDLVEYTFKNGETHRGYVTALYPEQKAINFQSPTKHCKKVNARKCKLLWNYSKIYWFENAS

SEQ ID NO: 15152 - protein, 381 aa, unidentified
MQNYVFVIDTNKQPLNPISPKKARRLLDKGKAAVFRMYPFTIILKTAIRQSRRCANANPTISPCQIKIDPGSKVTGFALVQDDQVIWGMELEHRGGLIKKKLESRSAVRRGRRNRNTRYRKPRFLNRKRPEGWIAPSLEHRVLTIETWVKRLIKFCPINEIWVERVKFDTQKMQNPEINGIEYQQGDLAGYEVREYLLEKWGRECAYCGKQNIPLQIEHIHPKSKGGSDSAKPTLRERVNNLCLACEKCNQRKGNRPIEEFLKKKPGLLQKIKNKAKQPLSDAAAVNTTRNRIVKVLKEVKPVVTGTGAQTKYNRTKLGLSKQHWIDAACVGDIKTLVLRTSQPLLVTCKGQGGRQKAALNKYGYPIRHNPLKPIKGWKAW

SEQ ID NO: 15153 - protein, 418 aa, unidentified
MVYVLSQNGQPLMPTENHAKVRVFLKQGKAKVVQRCPFTIQLLYESTTHTQKINLGIDAGSKTIGISATTDSKVLYEAEVVLRNDIVELLSGRRALRRSRRNRKTRYRKPRLDNRRRPDGWLAPSIRQKIKTHVTVVENVMKILPVTKIIVETASFDIQKIKNPEIEGAEYQYGEQLDFWNVREYVLFRDGHTCQCCKGKSKDNILNVHHIESRKTGGNAPNNLITLCETCHQAYHKGIITLPKEIHRGMRFRDASFMGIMRWAFYDRLKELYTPLDVEVVNTYGYITKNTRIEHGLPKEHYVDARCISGNPAAKPLGHYYFQKKVRCHNRQIHKNTILKGGIRKRNQAAYLVNGYRLFDKVKYQNQEYFIFGRRSSGFFDIRTLDGTKVNKGSISCKKLQLVEKSKHYLTEQRKVAA

SEQ ID NO: 15154 - protein, 505 aa, unidentified; identical to SEQ ID NO: 4960

SEQ ID NO: 15155 - protein, 412 aa, unidentified
MENNIEYCFVVDKDNKPLAPTKVDRGWYLIRKGRAKLKSKYPMVIQLNKKVKPDENDKSYIVCGIDDGSAHVGLAVVQKCPTKNKVVFKGTIEQRQDVKHLIDVRRGYRRYHRYHKRYRPERFNNRSSSKRIGRLAPSIKQKKDAILRILYQLNKWVGIQEYYLEDVCIDIRAMTDGYKPYKWQYQKSNRLDENLRKATLIRDNYRCQECGKTDCRLEAHHIQARKCSGADTIGNLITLCSKCHQKTEGKEQDFEDKYFKIINSKPKRFDYAMHVMQGKNYLRNKISELGLLHLTNGGETANKRIEWDIEKSHSNDAICITDSIPDSCNIKEWIIRPMRRKSKAKTDNVLGIKHRDLVSYTYKNGETYKGYVTSLCPKRLALSFQSRDKRCDKVNARKCRLLWKFSKIYWLE

SEQ ID NO: 15156 - protein, 457 aa, unidentified; identical to SEQ ID NO: 14039

SEQ ID NO: 15157 - protein, 413 aa, unidentified
MTNYAFVLDANNKQLAPTKEQKAWFLIRKKRATLVSKYPMVIQLKKKIPDKKICKDEVRCGIDDGGLHAGIALVQKCQTRNKVVFKGTIEQRNDVKHLMDVRRGYRRYHRYHKRYRPARFNNRSSSKREGRIAPSILQKRQATIRVINQLNKWINITNYWLEDVAIDIRALTDGYKPYRWQYQKSNRLDENIRKAVILRDGCKCMECGESNCRLEVHHIKPKRLKGSSTLDNLITLCTKCHQKTEGVEELYMDRYFALLNSSDNKNLNYAQHVMIGKKWLREQLSNLGMLHLTNGGDTANKRIDWDIAKSHSNDAICITDLRPDTCEIKEWVIKPMRRQSKAKTDNVLGIKHRDLVEYTFRNGETYRGYVTALYPEQNAINFQSPIKHCKKVNARKCKVLWKYSKIYWLDNVS

SEQ ID NO: 15158 - protein, 405 aa, unidentified
DANGKQLAPTKEQKAWFLIRKKRAALVSKYPMVIQLKKEIQENEICKDEIRCGIDDGGLHVGIALVQKCKTKNKVVFKGTIEQRNDVKHLMEVRRGYRRYHRYHKRYRQARFNNRKSSKREGRIAPSILQKRQATIRVINQLNKWINITNYWLEDVSIDIRVLTDGYKSYRWQYQKSNRLDENIRKATILRDGGKCMECGKSNCRLEVHHIKPKRRNGSNTLDNLITLCESCHQKTEGQEELYMDRYFSLLKSSDNKNLNYAQHVMIGKMWLRKQLSGLGVLYLTSGGDTANKRIDWNIEKSHANDAVCITDLQPDTYDMKEWTMKPMRRQSKAKTDHVLGIKHRDLVEYTFKNGETHRGYVTALYPEQKAINFQSPTKHCKKVNARKCKLLWKYSKIYWFENAS

SEQ ID NO: 15159 - protein, 516 aa, unidentified
LMPTTRGGHVRHLLKEQKARVVQSNPFTIQLLYETDDAVQPLYLGIDPGRTNIGVAVVKADGTAVFTAHLKSRNKEIPKLMQDRKRARRARRTNGRRHRRQRRAKANGTISKKCVKQTTTQNGSVSKRAKEIGIIKRHLPGCEKDVLCIGIKNKEAKYTNRERPEGWLTPTANQLLQTHVNLVKKVQKLLPISDVVLEVNKFAFMRLDNPDIQKWQYQQGPLYKKESLESAVSETQEHHCLFCKKPIDHYHHVVPKSENGSNTIANIVGLCAEHHNLVHKDVAWQEKLAEEKTGLNKKYGALSVLNQIIPALTNKLSVLFPKHFFVTAGKSTHDYRAAHSVSKDHWLDAYCIACSVLPSNVCDSNINNHVPYELKQFRRHDRRVLHKANMSRVYTLNGKAVATNRHKAIKQTTDSLEEFRQNYPDDVYKLKVKEHHPAYRNLNRNYPGSVFLVGEQAHVMQGIASSKDGKTTKYNDTNATTIIAGKCKFVAKNSGILFVQCKFRKALSDGTTKKLQ

SEQ ID NO: 15160 - protein, 406 aa, unidentified
MVYVQDINGKPMMPTTRHGKVRRLLKDKKAVVVNLCPFTIKLMYVTSDYKQEIVLGVDAGTKHVGLSATTKSKELYSSEVILRNDIVDLLSTRRELRRTRRNRLRYRKPRFDNRIKSRRPGWVAPSVKYKVDAHIRVVENVCSILPISRIVIEVAQFDTQKIKNPNISGKEYQEGDQLGFWNVREYVLARDGHKCQYCKGKSKDHVLNVHHIESRKTGGNSPSNLITLCETCHKEYHKGNIDLKIKRGSSLRDAAVMGIMKWRLYEELRSKYDRVSMTFGYVTKYNRINHDIEKSHVSDAFVISKNFDAIRLGYYYKVRLVRRHNRQIHKQKIPKGGIKRLNQSPFEVFGFRLFDRVMFENNCYFIFARRKTGSFNIRDINGKNKRDITYKKLKLSRCKRFMIEKS

SEQ ID NO: 15161 - protein, 463 aa, unidentified
  REGION 1..463: note = Ga0315285_10094504
MQKLDVKPKNVPTDTPQVCSSTTCLLNREDTLSVGKKLLASNNPDVDNSSVQEVLKTYVYVLSKDGSPLMPCSNAKARKLLKSQRATIVRHRPFTIQLAFECENKTQEVVLGVDPGYKNIGLSARTESRELFSANVQLRNNVSKLLTERAMYRRNRRNRLWYRKPRFLNRKKKVGLLTPSVQHRLDSHIRLVNKVKEFLPISEIIVEVANFDIQKISNPDIEGAEYQQGNLYGYENMKAYLISREQGKCQLCSKKSIKSNPFKLHHIIQNKDGGTDKSDNLALLHLLCHEKLHREHLKHLIVKCRQFKAETFMSTIRWRIVERLKHICNNVVVTFGYITRIKLQRLNLGKEHHNDAFAISKGDNQPRTTAFTIIQKRGNNRCLQLNRKGYKPAIRRQRYLYQPKDEVKISGKWYEVKAITTYGRYIVVKDKTNKILVFPTRNIECHHYNNSWLFQNKESKTRR

SEQ ID NO: 15162 - protein, 325 aa, unidentified
LLRQGRLIVKEVAYMSTVYVLNKDGKPLMPTTRCGHVRRLLKEQKAQVVTSKPFTIQLLYETDDVVQPLYLGIDPGRTNIGVAVVKTDGTAVFTAHLETRNKEIPKLMQGRKKARRARRTNGRRCRRQRRAKANGTISKKCVKQATAQNGSVSKRAKKIGVIKRHLPGCEKEVLCIGIKNKEAKFSNRTRPEGWLTPTANQLLQTHINLVKKIQRFLPISDVVLEIIKFAFMRLDNPNVQKWQYQQGPLYQKASLEEAVSEMQEHHCLFCKKPIAHYHHVVPQSENGSDTIGNIVGLCTKHHDLVHKDTAWQKQLAKKKTGLNKK

SEQ ID NO: 15163 - protein, 422 aa, unidentified; identical to SEQ ID NO: 5457

SEQ ID NO: 15164 - protein, 428 aa, unidentified
LKVFVLNMRGQPLMPCSPAKARHLLKAGKAVVRRRTPFTIQLRIATGETKQSVTLGVDAGAKHVGLSATTEKEEVFASEVELRQDITGLLAARLSLRRDRRHRKTRYRAPRFLNRVRSKHKGWLAPSVENRIQAHMSRIDAVCRLLPVTKIVIEAASFDVQKIRNPEVEGTGYQQGDQLGFWNVREYVLFRDGHVCQHCHGHSKDKILNVHHLESRQTGGDAPNNLITLCETCHKACHAGKIKLKVKRAQSFRAEAFMGIMRWTLLDRVRKAHPGLPVENTYGYLTKHTRITHGLPKTHCVDAYCIAGNLKAVRRGVYLHQRQMRKHNRQIHKFTVLSKRLEDGTKIGYRKLNQSPYLVHGFRLFDKVRCLGQIGFIFGRRSSGYFDVRRLDGVKLSPSISWRKLTLLEKRSTYLTELRKQDGASSPV

SEQ ID NO: 15165 - protein, 429 aa, unidentified; identical to SEQ ID NO: 3068

SEQ ID NO: 15166 - protein, 406 aa, unidentified
MVYVQDINGKPMMPTTRHGKVRRLLKSNKAVVVNLCPFTIKLMYVTSDYKQEIVLGVDAGTKHVGLSATTKSKELYSSEVILRNDIVDLLSTRRELRKARRNRLRYRKPRFDNRVKSKRLGWIAPSVKYKVDAHIRVVENVCSILPISRIVIEVAQFDTQKIKNPEISGKEYQEGDQLEFWNTREYVLARDGHKCQYCKGKSKDSILNVHHIESRKTGGDSPSNLITLCETCHKEYHKGNIDLKIRRGKSLRDAAVMGIMKWRLYEELKSRYDRVFMTFGYITKHNRIKYGIEKSHTSDAFVISKNINAKRIERQYLKRLIRRHNRQIHKMKILKGGKKKNNQAPFEVFGFRLFDKVLYNNKIFFVYGRRKSGSFNIRDFNGENSKDVSRKKFKLIRGKRHPIILK

SEQ ID NO: 15167 - protein, 354 aa, unidentified
MSEIEIRNDISDKMDKRAKYRRTRRNRKTRYRKPRFDNRKNSIKKDRFSPTMTSKINSHLKEIEFVKSIMPIKNIIIETATFDPHALKNPAVLNNKWLYQKGTNYGFANTKAYVLSRDKYICQYCKGKSKDSRLEVHHIVFRKNGGSDDAENLITLCKTCHNSLHKGGIKLKKNGKIKGQLKHTTQMNSIRQQLLRQLPNAKETFGFITKEYRQLMGLPKEHYYDAVAIACLNNIEDIGLIDVSFKTEKVVLKKCIPKGDYQQTKGVRSHQKIPTGKIEGFRKFDKVRYIGNEYFIKGRMSTGYAILMGIDGEKIDFSNAPRGMKTPKISNMQRINARKSWIICEQNRANSSHD

SEQ ID NO: 15168 - protein, 415 aa, Bacillus sp.; identical to SEQ ID NO: 6255

SEQ ID NO: 15169 - protein, 502 aa, unidentified; identical to SEQ ID NO: 6049

SEQ ID NO: 15170 - protein, 429 aa, Leptolyngbya sp.; identical to SEQ ID NO: 8055

SEQ ID NO: 15171 - protein, 430 aa, unidentified
MPKVYVLNRHGRPLMPCTPAKARHLLDAGKAKVRHRTPFTIQLLYGSTGYTQEVILGVDAGSKTIGLSAATETEELFSAEVKPRNDVVELMSARRQFRRARRNRTTRYRKPRFDNRVRSKHKGWLAPSVEVKIQEHMTAIRRACAILPVSKVVVETAEFDLQLLKAVAEGKPVPQGEDYQKGEMYGHYNVRQYVLWRDSYTCRICGMHGSVRKGVPLHVHHLESRRVGGDAPDNLVTLCTACHDKLHKGIIMAADIKKRKRRSTRDATFMGIMRMTLLRRLREQLPVPVVETRGYITKATRENLLVLPKSHTNDALAIAHGPQGFRAEYLPNIRQADRLYTIRPVRHHNRQLHKATILKGGVRKTNQAEKYICGFRLYDKVLYNGIECFVWGRRTSGSFLLRQLNGEKVKDGVSYKHLKLLERSQSYLVA

SEQ ID NO: 15172 - protein, 412 aa, unidentified
MLNFKEYAFVLDANGQQLDPTRVNNAWRLVRQKKAKLVSKFPMVIQLNKVVDNPNKDKIFLGIDDGSSHVGIALVQKCLTRNKVLFKGVIEQRKDVHKLMEQRKAYRRYHRYHKWFRPQRFDNRASSKRTGRLAPSIKQKKQAILRVVDKLSQWIRVDQICLEDVKIDIRALVDGCKPYKWQYQKSNKLDENLRIATILRDGCCMECGKTKTKFEVHHITPRKNGGSDTLSNLITLCSHCHQKTFDRELSLAERYYSMIKGKNLKELKSAQHVMQGKTWLHEELSKRSKLILTTGCDTANKRFDWNIEKSHSNDAICITGLKPEEIEVFEYIIKPMRRQSKAKTDNALGIKHHDLVEYTFKNGETHRGYVTALYPELNALNFQSKTKHCKKVNAKKCKLLWKFNKIYWLKCA

SEQ ID NO: 15173 - protein, 493 aa, unidentified; identical to SEQ ID NO: 2644

SEQ ID NO: 15174 - protein, 436 aa, unidentified
MPCHPARARKLLKKGRARVHKIFPFTIRLTDRELENSSAQPMLIKIDPGSKETGIALVREEKNKGHHALYFINLQHRGQQIRNALCKRRCLRRSRRSRNLRYRSPRFLNRRRAEGWLAPSLQHRADSILSWVTRLRRIAPVERISQELVKFDTQLIQNSKIEGIEYQQGELVGYEIREYLLEKFGRKCIYCGADNVPLNIDHVIPKSKGGSNRVSNLVLACVQCNQKKGSRSIEGFLKDKPEVLQQIKNQLKQPLKDAASVNATRWKLFNKLKSTSFPFEVGSGALTKFNRKKFGIPKAHWLDALCVGNVPSVTNWRNLNVLNIKCCGRGAYQRTRTDKYGFSRGICMRQKKVYGFSTGDMVKAIIPKGKKKGVYVGKVAVRKTGSFNLQTSGQTIQGISYRYCRLITHSDGYSCSWKSCPIPPRVETRGILGEVR

SEQ ID NO: 15175 - protein, 400 aa, unidentified; identical to SEQ ID NO: 13068

SEQ ID NO: 15176 - protein, 428 aa, unidentified
LKVFVLNMRGQPLMPCSPAKARHLLKAGKAVVKRRTPFTIQLRIATGETKQNVTLGVDAGAKHVGLSATTEKEEVFASEVELRQDITGLLAARLSLRRDRRHRKTRYRAPRFLNRVRSKHKGWLAPSVENRIQAHMSRIDAVCRLLPVTKIVIETASFDVQKIRNPEVEGTGYQQGDQLGFWNVREYVLFRDGHVCQHCHGHAKDKILNVHHLESRQTGGDAPNNLITLCETCHKACHAGKIKLKVKRGQSFRAEAFMGIMRWTLLDRVRKAHPGLPVENTYGYLTKNTRITLGLPKAHCVDAYCIAGNLKAVRRGVYLHQRQMRKHNRQIHKFTVLSKRLEDGTKIGYRKLNQSPYLVHGFRLFDKVRCLGQTGFIFGRRSSGYFDVRRLDGVKISSCISYRKLTLLEKRSTYLTELRKEDGASSPV

SEQ ID NO: 15177 - protein, 493 aa, unidentified
MAVVYVISASGKPLMPTTRCGHVRGLLNAGKARVVERRPFTIQLNYETKEITQPLYLGIDPGRTNVGAAVVCEDGECVFTMQLTTRNKDVPKLMKARKQFRMAHRRLKRRCKRQRRAKGAGTLSQKGEFQRLLPGYEKPILCKGIRNKEARFNNRQHPVGWLTPTANHLLLTHLNMVKKLQKLLPITDVVLEVNRFAFMAMENSNIRRWQYQRGPLYGKGSVEDAVYAQQDGHCLFCGKPIAHYHHVVPQHKNGSDTLENRVGLCNEHHDLVHKDRAWEAKMKETKAGLNKKYHALSVLNQIIPALTEQLAELFPQHAFVTTGEDTADFREDHGIAKEHHLDAYCIACSVLAEPSTVAAPTAKPHRLMQFRRHDRQVCHKENIKRVYLLDGKAVATNRHKAIEQKDDSLEEFCKTHTQQEVSALTVKGHKPIYKEIQRFMPGGVFLFNGKVHTLQGSQGRYKGMPKYYIGTDGEKNHAKRCIFLQQNCGLRWA

SEQ ID NO: 15178 - protein, 428 aa, unidentified
LKVFVLNMRGQPLMPCSPAKARHLLKAGKAVVKRRTPFTIQLRIATGETKQNVTLGVDAGAKHVGLSATTEKEEVFASEVELRQDITGLLAARLSLRRDRRHRKTRYRAPRFLNRVRSKHKGWLAPSVENRIQAHMSRIDAVCRLLPVTKIVIETASFDIQKIKDPSVEGTDYQQGDQLGFWNVREYVLFRDGHVCQHCHGHSKDKILNVHHLESRQTGGDAPNNLITLCETCHKAYHAGKIKLKVKRGQSFRAEAFMGIMRWTLLDRVRKAHPGLPVENTYGYLTKHTRITHGLPKTHCVDAYCIAGNLKAVRRGVYLHQRQMRKHNRQIHKFTVLSKRLEDGTKIGYRKLNQSPYLVHGFRLFDKVRCLVQIGFIFGRRSSGYFDVRRLDGVKLSPSISWRKLTLLEKRSTYLTELRKEDGASSPV

SEQ ID NO: 15179 - protein, 406 aa, unidentified; identical to SEQ ID NO: 10294

SEQ ID NO: 15180 - protein, 515 aa, unidentified
MTALEEKLSKTEYIYVLGFDGKPQMPTRRKRHVLKLLKTGRARIAEDIPFTIRLTYRNSPVLQPVTLAEDPGRTNIGAAVLSPLGGLLFAAVIETRNKEIKKLMADRQKSRQASRRGERKARQRLAKRYGSMVKSGMVMRKLPMYAADKFVTCKFIRNTQARFCNRKRCPDWITPTVQHLVQTHLNIIRKISRYLPVTDIAFEVNRFAFMHMENPKAMGVDFQNGPLKGYDDVKEAICTQQHGKCLMCKKPISHFHHIVPRSRGGSDTIQNLAGLCPECHTKVHTDTTFRKDFDRKKSGQLKKYGALSALNQAVPFICKKLLEEYGEEHVHFCGGLDTSLIRTALGFEKTKKDQMHEVDAYCVGLAALEVNEVETPAFDHTFQIRQFRRQDRSIIHHQTGRSYYQGKEKVAQNRKPGFEQKTTALSQWYEEQVRIHGEKEAEKLRSQLRVEKSCRHYNDMDRFLPGAVFLYEGKRYVLSGRITNGKYLRACGQGMKNFPAAECTFIRHNAGLVFI

SEQ ID NO: 15181 - protein, 431 aa, unidentified; identical to SEQ ID NO: 6055

SEQ ID NO: 15182 - protein, 431 aa, unidentified; identical to SEQ ID NO: 6055

SEQ ID NO: 15183 - protein, 396 aa, unidentified; identical to SEQ ID NO: 3291

SEQ ID NO: 15184 - protein, 437 aa, Clostridium sp.; identical to SEQ ID NO: 14047

SEQ ID NO: 15185 - protein, 414 aa, unidentified
MVYVINKQGQALMPTERFGKVRRLLKNSLAHVVCRIPFTIQLDYDTTDYTQPVSLGVDAGSKHIGISATTSEKELYAADVELRNGIVDKLSTRRELRRTRRSRLRYCKARFNNRVSSKRKGWLAPSVENKIQTHLTVVEKINKFLPITNIVVEIASFDIQKINNPIISGSEYQQGEQLDFFNVREYVLFRDNHICQHCKGKSKDKVLNVHHIEGRKAGGDSPNNLITLCETCHKAYHRGEFELNVKRGKSFRDSAFMGIMRWSFYDRLKNIYPNVSMTFGYITKNTRITNNLPKDHYVDARCISGNPTAKPLGYYFYQKKVRCQNRQIHKANFLKGGRKKLNQAPFLVKGFRLFDLVEYQKELYYIFGRRSSGSFDIRKLDGTKVNKGSINCKYLRLIATRKSILTEKRMQVNL

SEQ ID NO: 15186 - protein, 420 aa, unidentified
MQYVYVLNKHGEPLMPCSPRKARLLLKQKKACVIKRTPFTVKLLHGSAGYKQPVTLGVDAGSKHIGISATTEKHELYREEATPRNDVVDLLSARRAFRRSRRNRKTRYRAPCFNNRVHSKHKGWLAPSVEVKIQEHITLIKHVFRILPVTLVRVETAEFDTQRLKAMLEGKPLPVGTDYQLGEMYDEYNVRQYVLKRDNYTCQCCGAHSTKTKGVKLHVHHIETRRTGGNAPNNLITLCKACHKALHAEKVTLDGKKRGKPLKDAAFMGIMRKTLMERLRKELKIPVQGTYGYITKYLREKNGIPKSHTNDARCISKNPLAIPCDTCYYTKAVRHHNRQLHKATILKGGIRKANQAPYIVKGYRLWDKVAYNGTECFITGRRTSGYFALKELDGTVVSNSISYKKLRLLEAATNYIIERK

SEQ ID NO: 15187 - protein, 504 aa, unidentified; identical to SEQ ID NO: 4686

SEQ ID NO: 15188 - protein, 430 aa, unidentified; identical to SEQ ID NO: 6536

SEQ ID NO: 15189 - protein, 427 aa, unidentified
  source 1..427: note = Cyanobacteria bacterium UBA11372
MQNHVFFVNQDGSPLNMLHPARARQLQSRGKAATLRTYPYVAMQGQQIENPVLKPYILKIDPGSQWTGFAIQCGDEVVFRMELTHRGAAISESLTKRRGFIRSRRSRNLRYRKKRFNRRKPEGWLAPSLMHRVLTVETWIKRFMRWCPIVTIEIEQVRFDTQKLQNPEISGVEYQQGTLFGFEVRQYLLEKWKHQCAYCGAENVRLEVEHIVPKSKGGSDRVSNLCIACRNCNQKKSDRDLADFLKKKPDVLKRVLTQTKVPLKDAAAVNSTRFAIVRVAKKLCSSINCWTGGRTKFNRCQQGLKKSHSIDAACVGESGASIQLKTHQPLIVVCKGHGTRQARRVNAAGFPAVQKAKTVYTHVKAGDVVRFALPADRKNVKAGIYTARVKTPTSKGFEVLLNGFRVKISSMKGVQFIQRQDGYSYGF

SEQ ID NO: 15190 - protein, 451 aa, Ruminococcus sp.; identical to SEQ ID NO: 2424

SEQ ID NO: 15191 - protein, 432 aa, Lactobacillus sp.; identical to SEQ ID NO: 6011

SEQ ID NO: 15192 - protein, 420 aa, unidentified
MFVYVLDKNGQPLMPTSRFGKVRRLLRDKKAKVVRSCPFTIKLLYEPKTKIVQEIVLGVDTGSKHVGVACVGNDKVLYQSQVELRDDIKKKIDSRRMYRRNRRSRKTRYRKCRFLNRRNSIKKDRLPPSVKHKVQAHIDEIEFCKKILPISDENIILEVSQFDTALMKNQSLTNEKIRHWGYQKGFNYGHSSRRKAVLHRDNYTCQCCGKKNCRLETHHIIYRSHGGSDDEGNMITLCEECHKGIHNGTIVLAKKPNKMNLKHATHMSIIRSRLLKKYPNAIETFGFVTTENRNHLKLEKDHYIDACVIASGGLRFEQSDTLYRKRRVSVQDRILTKGVRDEIKLPTGKVNGFKRYDKVQYFGEVCFIKGRRTKGDVVLMDIKNTVLDFRGVGGCKNPSYKKLQRVNARKSVLCVLGWGI

SEQ ID NO: 15193 - protein, 393 aa, unidentified
  REGION 1..393: note = Ga0307928_10035134
MSVFVIDVTGQPLLPTTERRARALLDNKRAIVYSVVPFTVQLTRCVDKPVGTFKVGIDDGAKTVGIAVSNPNSQIVFAANVELRQDVSRKMTQRAMYRRTRRTRKLRHRPARFLNRGKKGCLPPSVKYRKDVTLRVLADLGKRLNITSAIIEQGQFDTSSMAAGYKLTGKEYQQFEYEGNTFRQKVLWRDRYTCQKCESQEQLKAHHIIFKSKGGTDRVENGLTLCEDCHDALHRGEWFVEKKPKQFKYPTHLQQGKWYIFNKLKELFADVRVCFGWMTAGARRELGLEKDHHSDAAAMIGCGDYRTRVYSIKPRRTKVWENNPAKTCVEKNGFRHYDLIKATHRTKGVVVGSVRSLKKSVMTLRTTFNDNFAVSYKKSKVIQRSQGLIYGYR

SEQ ID NO: 15194 - protein, 424 aa, unidentified; identical to SEQ ID NO: 12629

SEQ ID NO: 15195 - protein, 456 aa, unidentified; identical to SEQ ID NO: 15078

SEQ ID NO: 15196 - protein, 429 aa, Parasutterella sp.; identical to SEQ ID NO: 3656

SEQ ID NO: 15197 - protein, 544 aa, Blautia sp.; identical to SEQ ID NO: 4004

SEQ ID NO: 15198 - protein, 460 aa, unidentified
VQLRQSDAGQSYVLCCLSDNQKGRHNHMYVYVINKHGQPVMPCRPRMARVLPQEGKAAVVKQVPFTIRLLYGSSGYKQPVSLGMDAGSRHIGIAATTGKKVLYAEELKPRNDVVKLLSVRRQNRRAGRSRKTRYRQARFDNRVSSKQKGWIAPSVEVKIQEHISAVLRIQKMLPVSEIHVETAEFDTQRLKAMEEGRPVPVGTDYQKGEMYDQYNVRQYVLFRDGYKCKCCGKHGDGVKLHVHHIESRQTGGNAPNNLITLCEDCLKALHAGTIQLPDGRAKRGRSHRDAAFMGIMRKAMVSQLRDIVDIPVTETYGYITKYYRELHHVEKSHISDAIMISRNFKAEPDDTYYASKAVRHHNRQLHKNTILKGGVRKRNQAPHVVKGFRLFDLVRYENSVYYVFGRRKSGFMDIRTLDGRKINKGSISSKKLKFVSTSKGTLVERRKAIPLADKSASFLA

SEQ ID NO: 15199 - protein, 513 aa, unidentified; identical to SEQ ID NO: 5221

SEQ ID NO: 15200 - protein, 470 aa, Anaerostipes sp.; identical to SEQ ID NO: 2825

SEQ ID NO: 15201 - protein, 419 aa, unidentified; identical to SEQ ID NO: 3670

SEQ ID NO: 15202 - protein, 420 aa, unidentified
MQYVYVLNKHGEPLMPCSPCKARLLLKQKKACVVKRTPFTIKLLYGSTGYKQPITLGVDAGSKHIGISATTEKCELYREEATPRNDAVDLLSARRAFRRNRRNRKIRYRAPRFNNRVHSKHKGWLAPSVEVKIQEHITLIKRVCRILPVTLVRVETAEFDTQRLKAMLEGKPLPVGTDYQLGEMYDEYNVRQYVLKRDKYTCQCCGAHPTKTKAVKLHVHHIETRRTGGNAPNNLITLCTACHKALHAGKVTLNGKKRGKPLKDAAFMGIMRKTLMERLLKELKIPVQETYGYITKYLREKHSIPKSHTNDARCISKNPLAIPCDTCYYTKAIRHHNRQLHKATILKGGIRKANQAPYTVKGYRLWDKVFYHGSECFITGRRTSGYFALKKMDGTVVSNSASYKKLRLLEVATNYIAERR

SEQ ID NO: 15203 - protein, 454 aa, Anoxybacillus sp.
ASVLHITSIYNMVEENMTCFMQRKGEYPMVFVLDTNKCPLAPCHEAVARKLLKQGKAAIYKRYPFTIILKEIVDNFRPKTPYRLKIDHGSKHTGLAILRGQEVVWLGQLDHRTDIKERMDKRRAFRRARRNRKTRYRKPRFLNRRRKDGWLPPSLESRVQNIQTWVNRLKKLCPIGYISYENTKFDTQLMRNPEINGVEYQQGTLQGYEVREYLLEKFGRKCCYCGKENVPLEVEHIIPKSRGGTDRVDNLCLACHDCNQRKGSKTAEEFGYPHIQKQVKESLKDASAVNSTRWKVYEVLKQSGCEVECGTGARTKMNRIRLDLPKTHYFDACCVGESTPNHLYFKTKEVLFIRAKGRGSRSRTNLDRYGFPRGYLARQKFFFGFQTGDMVKAVIPRGKYQGVWFGEVSCRKTGSFDIKGKDGKRIAQGINYRYVQVIQRFDGYTYRREGMNIA

SEQ ID NO: 15204 - protein, 431 aa, unidentified; identical to SEQ ID NO: 3801

SEQ ID NO: 15205 - protein, 445 aa, Burkholderia sp.; identical to SEQ ID NO: 14881

SEQ ID NO: 15206 - protein, 289 aa, Parasutterella sp.
IKAVLRLLPVTKITVETASFDLQLLKNPDISGKEYQEGEQLGFWNIREYVLCRDGHVCQHCYGRSKDPVLNVHHLESRRTGGDSPGNLITLCETCHKALHRGEITLKAKRGQSFRAEAFVGIMRWEVHNRLRALHPGIEVSNTYGYRTKHARIANGIAKSHCADAFCIAGNLGAERLCEFFFQKQTRRNNRQIHKLSILKGGIRKRNQAPFEVKGFRLFDKVACQGEEGFIFGRRSSGFFDVRKLDGTRISAGISCKKLHLLEKRRTYLTEIRKEEALPPLPEGRGLRA

SEQ ID NO: 15207 - protein, 447 aa, unidentified
VPAYRIKHITKKEVPYMVYVLDIDGQPLMPTSRHRKVRKLLNSHLAKVAKRCPFTIQLLYQSTKETQPVSLGVDAGSRHIGLAATTEQKVVYQEELVPRNDVVKLLSARRALRSSRRSRKTRYRKPRFNNRVHSKHKGWLAPSVEVKIQEHITAIKRICQILPISDIHVETAEFDLQRLKAMEEGRPLPVGTDYQLGEQYDFYNTRQYVLHRDEYTCQCCGTHDNNVKLHVHHVESRQTGGEAPNNLITLCEHCHKSIHAGKMMLPKGKKRGKSYRDAAFMGIMRNTLLERLRKEVNVPVTMTYGYITKYWREKAGLEKSHINDAICISKHPYARPLETYYLTKAVRHHNRQIHKTKFSKGGIRKRNQAPYLVKGFRLFDKVLYQGESYFIFGRRITGYFDIRTLDGTKVNKGSTSYKKLRIQDTAEAYLTEVRAIPHMNEFTCVLA

SEQ ID NO: 15208 - protein, 432 aa, unidentified
MSRVFVVSPERIPLAPCTPARARWLLTTKQAAVLRRYPLTLILLREPSGTVVPSFRLKIDPGSKTTGLAIVNDTTGQAVWAGELTHRGYDVTQALSKRRACRSSRRQRHTRYRPKRFLNRRRKPGWLPPSLESRLANVLTWVLRLQRWCPIRALSLELVTFDTQLLQDPEINGAAYQQGELAGYEIRQYLLEKFSRQCAYCGTSGVPLEVEHIVPTARGGSDRVANLTIACHACNQRKGHQTAEEFGHSEVQAQAKAPLRDAAAINATRWALYHRLEVLEVALETGSGGLTQYNRLQRGLPKAHWVDAACVGASTPPQLRLRGVVPWTIRAAGRHSRQMCRTNECGFPDKAPKATSVVGGFRTGDLVRAQVPASSKKAGTYVGRIAIRASGSCNIQRATGPIQGIHYRYCRPLQRADGYTYAKGARAVLPTP

SEQ ID NO: 15209 - protein, 442 aa, unidentified; identical to SEQ ID NO: 2807

SEQ ID NO: 15210 - protein, 431 aa, unidentified
MPNKVYVINKHGRPLMPCSPAKARHLLDEGKAKVKKRTPFTIQLVYGSSGYTQEVILGVDAGSKTIGMSVSTTKEELLSAEVKPRNDVVDLLSTRREFRRARRNRKTRYRKPRFDNRVRSKHKGWLAPSVEVKIQEHITAIRRVCGILPVSKVVVETAEFDLQLLKAIADGKPVPQGEDYQQGEMYGHYNVRQYVLWRDGYTCQCCGAHATKKKEVRLHVHHLESRKVGGDAPDNQVTLCESCHEKLHKGLIAEKDFKKRKRRSTRDATFMGIMRKTLMQRLCSELPIPVIETRGYITKATREKLLVLPKSHTNDALAIAQGKQGFNVGYLPGILQIDKIYTIRPVRHHNRQLHKATILKGGIRKSNQTEKYVFGYRLFDKVQFNGQDCFIWGRRTTGIFTIKTINGKMIKDGISFKKLKLAEKSTSYLIA

SEQ ID NO: 15211 - protein, 456 aa, unidentified
MSTCVCVLSNNGERLMPTFRLGKVRRLLKDGKAKIVKHHPFTIQLLYDSKANTQPIEICEDVGYNYIGISAKSKSHEYVSAQYDTLQDEKEHHDDCRKTRRTRRNRLRYRKPRFDNRKCDKGWLAPSLEHKKQLNISLIERYVSVIPITHATVEIGSFDTMLLQAIQKGKAKPESADYQKGPHYNLATLREAVFYRDNYTCQVCKRKIADGAILHMHHMFYWKGRHGYQLDELATVCEKCHTPANHQKGGKLFGFGEGKEFADLSGAAFMNAVRWQIVDALYTTYDKEFVTITYGAMTKEKRIALQLEKTHNNDAYAMGDYHPACRCKFRHYQKRRRNNRVLEKFYDATYIDARTGNKAKGKELFNGRINRNHKKDSENLHKYRSKKVSKGHRSIRRRRYAIQSYDTVRLEGKTYITSGCHNKGTRLLIPVNGKSKSVAISKVQVVCHAGAWIQIS

SEQ ID NO: 15212 - protein, 413 aa, Sutterella sp.; identical to SEQ ID NO: 7714

SEQ ID NO: 15213 - protein, 424 aa, unidentified
MASMQYVYVLNKHGEPLMPCSPGKARLLLKQQKACVVKRTPFTIKLLYGSAGYKQPVTLGVDAGSKHIGISATTEKRELYREEFTPRNDVVELLSTRRQNRRSRRNRKTRYRAPRFDNRVHSKHKGWLAPSVEVKIQEHITVIKRICRILPITLVRVETAEFDTQRLKAMLKGKPLPVGTDYQLGEMYDEYNVRQYVLKRDNYTCQCCGAHPTEKKPIRLHVHHIESRHVGGNAPNNLITLCVACHKALHEGKITLDKGKKRGKPLRDAAFMGIMRNTLLARLKDELNIPVKQTYGYITKLLREKNKIPKSHVNDARCIAKAPNAKPCDTMLYTRALRHHNRQIHKAKILKGGIRKKNQAPYLVKGFRLWDKVRYNGEECFITGRRSSGYFALKKYDGTVISNSASYKKLMLLEAATNYITERS

SEQ ID NO: 15214 - protein, 423 aa, unidentified; identical to SEQ ID NO: 4062

SEQ ID NO: 15215 - protein, 420 aa, unidentified; identical to SEQ ID NO: 13487

SEQ ID NO: 15216 - protein, 417 aa, unidentified; identical to SEQ ID NO: 14176

SEQ ID NO: 15217 - protein, 456 aa, unidentified
MNHYVFVLDHTGNPLMPTKRHGWVRRALRDGKATVVKRSPFTIKLTYESGKELQDISLHLDAGYANIGFSAQTKSRELLGGVLELLKGMSERIKERAMYRNNRRSNLRYRRPKFKKGGDFISNRPDGWLAPSIQHKMDSHLNLIRKIKQILPITSIQIETASFDIQKINNPDIEGAGYQQGEQLGFWNLREYILHRDNHTCQNPNCKNKSKEKILQVHHIGFWKQDRSDRPANLITLCTKCHTTKNHQKNGFLYGWEPRLKSFKPETFMTMVRRRLVSQARENFNLPVSETFGYLTKASRIAKELPKSHHYDAFAMGNAITLSRSYTINQTRRNNRSLENFNDAKYLHKETKEKVSGQKLSSGRRTRNKESHLNEPNVRHLRGHKISKGYRAIRRRRYPLQPNDTIRYEGKICKVTGTHSLGKTVRFKLPCGTTADKSVNKVTQIASCKGLAFKLD

SEQ ID NO: 15218 - protein, 438 aa, unidentified; identical to SEQ ID NO: 4848

SEQ ID NO: 15219 - protein, 420 aa, unidentified; identical to SEQ ID NO: 11172

SEQ ID NO: 15220 - protein, 431 aa, unidentified; identical to SEQ ID NO: 5220

SEQ ID NO: 15221 - protein, 465 aa, unidentified; identical to SEQ ID NO: 3856

SEQ ID NO: 15222 - protein, 456 aa, unidentified
MNHYVFVLDHTGTPLMPTKRHGWVRRALRDGKATVVKRSPFTIKLTYESGKELQDISLHLDAGYANIGFSAQTKSRELLGGVLELLKGMSERIKKRAMYRNDRRSRLRYRKPKFKKGGDFVSNRPDGWLAPSIQHKLDSHLNLIRKIQQILPITSIQIETASFDIQKINNPDIEGAGYQQGEQLGFWNLREYILHRDNHTCQNPNCKNKSKEKILQVHHLGYWKQDRSDRPANLITLCTKCHTTKNHQKNGFLYGWEPRLKSFKPETFMTTVRRRLVSQAREIFDLPVTETFGYLTKSSRIAKELPKSHHYDAFAMGNATKLSRSYTINQTRRNNRSLENFNDAKYLHKETKKKVLGRELTSGRRTRNKGSQLNSLNLRHLRGHKIRKGYRAIRRRRYPLQPNDTIRYEGKICKVTGTHSLGKTVRFKLPCGTTADKSVNKVTQIASCKGLAFKLD

SEQ ID NO: 15223 - protein, 411 aa, Clostridium sp.
MVEYSFVLDLAGNRLSPCNKNKAYYLIRNKKAKMLNKFPMVIQLFKIVKENNNNKTKTYLGIDDGSKHVGLGIIQDCNNKVKPIFKGTIELRDDVSKKMAIRKGYRTYHRYHKRYREKRFDNRQSSKRKGRLAPTIMQKKQSILRVVNKITKWIKIDSIYLENVLIDIRVLTEGRSLYKWQYQKSNRLDNNIRIAALMRDNFTCVDCGSKENLQEHHIKPRRAKGADSIHNVVTLCKSCHTKTFGREIELIDQYLAIIKGRKLNLSDALHVMQGKKNLQTELKKIAPLYLTTGGDTANHRNDWDIEKTHSNDALVICNVDIKKNNIDIKDWQISPLRKKSKGDAELIVKGFKHRDYVKYTKKNGTEYIGYITALYPSKNQFNMTRTNGEILKRYGLKSLKLLSRPKCIRWI

SEQ ID NO: 15224 - protein, 414 aa, unidentified
MVYVINKQGQALMPTERFGKVRRLLKNSLAHVVCRIPFAIQLDYDTTDYTQPVSLGVDAGSKHIGISATTSEKELYAADVELRNDIVDKLSTRREQRRTRRSRLRYRKARFNNRVSSKRKGWLAPSVENKIQTHLTVVEKIHKFLPITNIVVETASFDIQKINNPSISGSEYQQGEQLDFFNVREYVLFRDNHICQHCKGKSKDKVLNVHHIESRKTGGDSPNNLITLCETCHKAYHRGEFELNVKRGKSFRDAAFMGIMRWSFYDRIKNIYPDVSMTFGYITKNTRITNNLPKDHYVDARCISGNPVAKPLGYYFYQKKVRCQNRQIHKANFLKGGRKKLNQAPFLVKGFRLFDLVEYQKDLYYIFGRRDRGFFDIRKLDGIKVNKGSINYKHLRLIDKRKSILTEKRTQVNL

SEQ ID NO: 15225 - protein, 368 aa, unidentified
MKKRLLEKASYRRIRRSRLRYRKARWNNRVKSKKKGWLAPSLKHKLDTHIKFIDYLKNILPIGKITIEVANFDIQKMKDDLISGIDYQNWDMFGFWNVREFVLHRDGHKCQNPNCKHKDKKEQILKVHHIRYRSEGGSDRPENLITLCSKCHTPVNHRKGKFLYDWCVNGKKVRGFKDATFMSIIRWYLVNELKSKHNNVSITYGYITKNHRIQNGIEKSHLNDAFAIAKGTNQARTKDRFLVIQDRLKNRSLEKFYDSKIIDIRTEKKVSGGDLNCGRSTRNKNLNTENLRKYRGVKISKGQRRIRKQKYFYQPNDLVKYDGKVYTVKGTQNEGKYIALKEIKKVPKVELLIPYVFKKGLNWSYRLC

SEQ ID NO: 15226 - protein, 489 aa, unidentified
  source 1..489: note = uncultured beta proteobacterium
VRGPRSSDSRQAIGDVRNGSDSNAGLQHGRGEMFSKHVTAARRVERSNPMSRVFVIAKHGDPLMPCEPARARQLLRKGMAVVHRTFPFVIRLKQRETGDVQPIKLKLDPGSKTTGIALTREAPGKSVALKLIELEHRGRQISDALTSRSSLRRRRRGQLRYRAPRFLNRGNKKNGWLAPSLMHRVHSTMSWVERLRRWVPVSDIASELVRFDMQALENPEVTGVEYQQGTLAGYEVREYLLEKWARKCAYCDATGVPLQIEHIVARARGGTDRISNLTLACGCCNQRKGASSIQEYLAKDQSRLKKILASAKAPLKDAAAVNATRWRLANELKTTGLRIELASGGRTKFNRTQFGVPKSHALDAMCVGNVVGVERWNQPTLLARSTGRGGYQRAITDAYGFPKAHKTRTKMQFGFQTGDMVRALIPRGKYTGVHTGRVSVRATGKFDLKSDSRPRFGVGHKHCTIVQRADGYSYSWKPTPTADQKGTTA

SEQ ID NO: 15227 - protein, 414 aa, unidentified
MPCSPAKARLLLKEKKAIVKRRTPFTIQLTIATGETKQPVGLGVDAGYKHVGLSASTDKAELYASQVELRQDITDLLSARRALRRARRNRKTRYRAPRFNNRIRTKRKGWLAPSVENRINAHLSRIEAVLRLLPVTKITVETASFDMLLLKNPDIAGKEYQEGEQLGFWNVREYVLFRDGHVCQHCYGRSKDPVLNVHHLESRRTGSDSPDNLITLCETCHKALHRGEITLKAKRGQSFRAQAFMGIMRREVLNRLKASYPELKVHETYGYLTKHARIANGIVKSHGADAFCIAGNLGAERLGEFFFQKQTRRNNRQIHKLSILKGGIRKRNQAPFEAKGFRLFDKVACQGEEGFIFGRRSSGSFDVRKLDGTRISAGISCKKLRLLEKRRTYLTEIRKEEALPPLPEGRGLRA

SEQ ID NO: 15228 - protein, 431 aa, unidentified
MPDKVYVISRLGHPLMPCSPAKARHLLDDKKAKVVKRMPFTIRLLYGSTKYIQPIILGVDAGSKTIGLSASTAKEEVFAAEVMPRNDVVENLSTRREFRRARRNRTTRYRKPRSDNRVRSNHERWLAPSVKVKIQEHITSIKRVCTILPISKVVIETAEFDLQLLKAIQEGKPIPEGEDYQKGEMYGSYNVCQYVLWRDNYTCICCGVRGTPKNPVRLHVHHFESRKYGGNAPDNHGTLCDDCHKKFHLGIITDVKLKTRRQQSTRGAAFMGIMRKTLMWRLRTELFIPVAETKGYITKATREKLLVLPKSHTRDALAIAQGRHGFGIKEYAYVEPANHIYTVRPVRHHNRQLHKASILKGGIRKRNQASKYVFGFRLYDKVLYQGKACFVWGRRTSGTFLLRTIDGIKVKDGVSYRNLTLLERSSNYLIA

SEQ ID NO: 15229 - protein, 415 aa, unidentified
MENRIEYCFVVDKNNKLLAPTKVNKGWYLIRKGRAKLKSKYPMVIRLEKEVESDESDKSYMVCGIDDGSVHVGLAIVQKCLTKNKVVFKGIVEQRQDVKHLMDVRRGYRRYRRYHKRYRQARFNNRSSSKRICRLAPSIKQKKDAVLRVLYQLNKWINIQEYHLEDVCIDIRAMTDDYKPYRWQYQKSNRLDENLRKATILRDGCRCQECGKSNCMLEVHHIRARRYGGADTIGNLITLCEKCHDKTKGREKDFEERYFNMIKSKPKRFDYAMHVMQGKNYLREKISELGILHLTNGGETANKRIEWNIVKTHSNDAICIANGIPDTCNIKEWIIKPMRRKSKAKTDNVLGIKHRDLVSYTYKNGETYTGYVTALYPEQLALNFQSKTKHCKKVNIRKCRLLWKFNKIYWLDKCV

SEQ ID NO: 15230 - protein, 359 aa, Scytonema sp.
MSNYVFLIDQNKTPLNPVHPAQARKLLDSGKAAVFRRYPFVLILKRVIENPNVYPLTLKIDPGSKVTGIVLVTNQGDVIWAMELQHRGQQIKDALEHRRAVRRGRRNRNTRYRQTRFLNRKRPSGWLAPSLRHRVLTTETWVKRLQRFVPIGSIVQELVKFDTQAIQNPEISGTEYQQGTLHGYECREYLLEKWNRQCAYCGVKDVPLEIEHIQSKSKGGSDRISNLCLACHKCNQRKGNKDIKDFLKGKPDVLNRVQKLGLAPLKDAASVNSTRWSLFNTLKSFGLPIITSTGGQTKFNRTRFNLPKAHWIDAACVGDALSPKNERNPINPTINRAASELTEEGSAHFYVLDPVWLKP

SEQ ID NO: 15231 - protein, 396 aa, unidentified
MVYVQDIDGKPMMPTTRHGKVRQLLKDKKAVVINTCPFTIKLMYKTSDYKQEIVLGVDAGTKHVGLSATTKSKELYSSEVILRSDIVDLLSTRRELRRTRRNRLRYRKPRFDNRIKSKRTGWVAPSVRHRIDAHIRVIDNVCSILSISRIIVEVAQFDTQKIKNPNISGNEYQEGNQLGFWNVREYVLTRDGHKCQHCKGKSKDPILNVHHIESRKTGGDSPSNLITLCETCHKEYHKGKIDLRVKRGKSLRDAAVMGIMKWKLYEELRSRYDNVSMTFGYITKYNRIKYGIEKSHISDAFVISKNFNALMLEYHYKVRLIRRHNRQIHKQKVLKGGVKKPNQSSFEVFGFRLFDRVMFEGNCYFIFGRRKSGSFNIRDIDGGNPVSYTHLTLPTI

SEQ ID NO: 15232 - protein, 490 aa, unidentified; identical to SEQ ID NO: 3566

SEQ ID NO: 15233 - protein, 357 aa, unidentified
EKAELYASEVELRKDITDLLSARRALRQSRRNRKTRYRAPRFDNRISTKRKGWLAPSVENRINAHLSRIEAVLRLLPVTKITVETASFDLQLLKNPDISGKEYQEGEQLGFWNIREYVLCRDGHVCQHCYGRSKDPVLNVHHLESRRTGGDSPGNLITLCETCHKALHRGEITLKPKRGQSFRAEAFMGIMRWEVLGRLKASHPELEVNNTYGYRTKHARIANDIAKSHCADAFCIAGNLGAERLGEFFFQKQTRRNNRQIHKLSILKGGIRKRNQAPYEIKGFRLFDKVACQGEEGFIFGRRSSGFFDVRKVDGTRISAGISYKKLHLLEKRRTYLTEIRKEEVLPPLPEGRGLRA

SEQ ID NO: 15234 - protein, 431 aa, unidentified
MPNKVYVINKHGRPLMPCSPAKARHLLDAGKAKVKKRTPFTIQLVYGSSGYTQEVILGVDAGSKTIGLSASAETEELLSAEVKPRNDVVDLLSTRREFRRARRNRKTRYRKPRFDNRVRSKHKGWLAPSVEVKIQEHITSIKRVCRILPVSKVVIETAEFDLQLLKAIADGKPVPQGEDYQKGEMYGHYNVRQYVLWRDDYTCQCCGAHATKKKEVRLHVHHLESRKVGGDAPDNQVTLCESCHEKLHKGLITAKDFKKRKRRSTRDATFMGIMRKTLMQMLCSELPIPVVKTRGYITKATREKLLVLPKSHTNDALAIAQGKRGFNVGYLPEIAQIDKICTIRPVRHHNRQLHKATILKGGIRKSNQTEKYVFGYRLFDKVQFNGQDCFIWGRRTSGYFVVKTIDGKVIHNSASFKKLNLVERASNYLIA

SEQ ID NO: 15235 - protein, 426 aa, unidentified; identical to SEQ ID NO: 3604
  source 1..426: note = Cyanobacteria bacterium UBA9226

SEQ ID NO: 15236 - protein, 416 aa, unidentified
VLQAPNPVQHWRRMSTGLRAVQAEPAGIRKGDALKVFVLNMRGRPLMPCSPARARHLLKAGKAVVRRRTPFTIQLRIATGETKQSVTLGVDAGAKHVGLSAATEKEEVFASEVELRQDITGLLAARLSLRRDRRHRKTRYRAPRFLNRVRSKHKGWLAPSVENRIQAHMSRIDAVCRLLPVTKIVIETASFDIQKIKDPSVEGTDYQQGDQLGFWNVREYVLFRDGHVCQHCHGRSKDKILNVHHLESRQTGGDAPNNLITLCETCHKAYHAGKIKLKVKRGQSFRAEAFMGIMRWTLLDRVRKAHPGLPVENTYGYLTKHTRITHGLPKTHCVDAYCIAGNLKAVRRGVCLHQRQMRKHNRQIHKFTVLSKRLEDGTKIGYRKLNQSPYLVHGFRLFDKVRCLGQTGFIFGRRSS

SEQ ID NO: 15237 - protein, 490 aa, unidentified; identical to SEQ ID NO: 6170

SEQ ID NO: 15238 - protein, 545 aa, unidentified
VQFAWWLCHPKPSDNIEDVNHETALMLLRIKAGTETFGTAPCGSGPKAEGVSHERKSMNIVSVVTNTNKPLMPTSPYRARKLLSSGKAKIVKHRPFTILLVNRSDGNVQEIEYKSDTGYLHVGISVCSEKREFVREQRDLLPDEREKHNDRRKYRRTRRNRKRYRKARFDNRIGKIRKAEKNKHVWLPPSLDHKVDAQVQLFLRLYQVMPIKRAVFEMGQFDPALMKALEKGEAAPQGIDYQMGERYQIATRRAAAFTRDRYACVFCGRSIKDHAILHVHHIGFWKQDRSNRLDNLATCCEQCHTSENHRPGGILYGVEPKLESLASATYMNVVRFELLQRLKEAAPDVEFHISYGAKTSVIRKQRSISKSHTNDAYCLGQYFPKLRAEEIGFQKIRRNDRILQKFYDAEYLDSRDGTTKKGKELTNGRISRNHMKDHKNLHQYRGKKLSKGRVTIRRGRSSLKTGSLVRFDGEVLTVHGTHRSRRKNKAGHIKVSVNVEFERPSKTGRKSAALSKCQIISQSYNTGWKKIQLRKEEQGKIAAVV

SEQ ID NO: 15239 - protein, 423 aa, Arthrospira sp.; identical to SEQ ID NO: 2785

SEQ ID NO: 15240 - protein, 413 aa, unidentified
MTSYAFVLDANGKQLAPTKEQKAWFLIRKKRAALVSKYPMVIQLKKEIQENEICKDEIRCGIDDGGLHVGIALVQKCKTKNKVVFKGTIEQRNDVKHLMEVRRSYRHYHRYHKRYRPARFDNRKSSKRKKRIAPSILQKRQAIIRVIHWLNKWINITNYWLEDVSIDIRALTDGYKPYRWQYQKSNRLDENIRKAAILRDGGKCMECGKLNCRLEVHHIKPRRRNGSDTLDNLITLCKSCHQKTEGQEELYMDRYFSLLKSSDNKNLNYAQHVMIGKMWLRKQLSGLGVLYLTSGGDTANKRIDWNIEKSHANDAVCITDLQPDTYDMKEWTMKPMRRQSKAKTDHVLGIKHRDLVEYTFKNGETHRGYVTALYPEQKAINFQSPTKHCKKVNARKCKLLWKYSKIYWFENAS

SEQ ID NO: 15241 - protein, 418 aa, unidentified; identical to SEQ ID NO: 5724

SEQ ID NO: 15242 - protein, 457 aa, unidentified
MPTERYGKVRRMLKDGRAIVVTTMPFTIKLTYETTGYTQSVTLGIDSGYQTIGFSGVTAKKELIVGECRLITGQVERNTKRVMYRRQRRNQLRYRAPRFDNRKKPEGWLAPSIRHKLDSHIRLIEKIKTILPVTEIEVQVAGFDIQAIKNPGIQGKEYQQGEQAGYWNLREYILHRDGHQCQNPDCKNKSKEKVLEVHHIGYWKRDRTDRPGNLTTLCDKCHRSENHKEGRFLYGWEPCVKSFKPETFMTTVRWRLVNTLGCRHTYGYITKSRRIALRLEKSHINDAFCIAGGTNQARTIQFEVRQMRRNNRSLEYFYASKHIDIRTGERAGGQELNSGRRTRNRKLDGENLRQYRGEKLSRGRRSIRKQRYPIQPGDVVKYTGEKYISKGIQNLGAYIRLGGLSKPVRIDQIQPYRYAKGLFFGAWNQEKPGPPFIPALRSRFANKEGSGRGLPGG

SEQ ID NO: 15243 - protein, 375 aa, unidentified
VSEMTSYSFVLDANGKQLAPTKEPKAWFLIRKKRAALVSKYPMVIQLKKKIQENEICKDEIRCGIDDGGLHVGIALVQKCKSKNKVVFKGTIEQRNDVKHLMEVRRNYRRYHRYHKRYRQARFDNRKSSKRKGRIAPSILQKRQATIRVINRLNKWINITNYWLEDVSIDIRVLTDGYKSYSWQYQKSNRLDENIRKATILRDGGKCMECGKSNCRLEVHHIKPRRRNGSNTLDNLITLCESCHQKTEGQEELYMDRYFSLLKSSDNKNLNYAQHVMIGKMWLRKQLSGLGVLYLTSGGDTANKRIDWNIEKSHTNDAVCITDLQPDTCDIKEWAIKPMRRQSKAKTDHVLGIHHRDLVEYTFKNGETHRGYVTA

SEQ ID NO: 15244 - protein, 346 aa, unidentified
LRQDITDLLSARRALRQSRRNRKTRYRAPRFDNRIRTKRKGWLAPSVENRINAHLSRIETVIRLLPVTKISVETTSFDMQLLKNSDIAGKEYQESEQLGFWNVREYVLFRDGHVCQHCHGRSKDPVLNVHHLESRRTGGDSPGNLITLCETCHKELHRGEITLKAKRGQSFRAETFMGIMRWEVLDRLKASHPKLEVQNTYGYRTKHARIVNGIAKSHCADAFCIAGNLGAERLGEFLFQKQTRRNNRQIHKLSILKGGIRKRNQVPFEVKGFRLFDKVACKGEEGFVFGRRSSGYFDVRKLDGTRISAGISYKKLRLLQKRQTYLTEIRKEEALPPLPEGRDLRA

SEQ ID NO: 15245 - protein, 427 aa, Nostoc sp.
MSKIFVLDADKRPLDRIYPAQARQLLRNGKAAVFRRFPFTIILKESRPDSSVTPLRLKLDPGAKLTGIALVNDGTGEVVFAAELKHRGFAIRESLTSRRQLRRSRRNRQTRYRKPRFLNRTRPEGWLAPSLQSRVDNIKTWVERLRKLAQIAAISQELVRFDMQLMRNPEIRGKEYQQGTLAGYETREYLLEKWGRQCAYCGVKDVPLQIEHIHPRAKGGSNSITNLTLSCEKCNTKKGTKDIKEFLKQDPNKLQKILAQAKKPLADAAAVNTTRYVLLEVLKATGLTVECGSGGLTKLNRNNQNLEKTHWLDAACVGESTPILNIKGIKPLLITANGHGTRQMAGTDKFGFPTRHRSNKQIHYGFSTGDTVKAVVTNGKKVGEYLGRVLCRATGSFDIATSSGRVSGISYKYCSAIHRKDGYSYAF

SEQ ID NO: 15246 - protein, 456 aa, unidentified
MSTCVCVLSNSGERLMPTFRLGKVRHLLKDGKAKIVKHHPFTIQLLYDSKTNTQPIEICEDVGYNYIGISAKSKSHEYVSAQYDTLQDEKEHHDDCRKMRRTRRNRLRYRKPRFDNRKRGEGWLAPSLRHKKELNVNVVKMYCAVMPITYATVEVGSFDTMLVKAIQEGKVIPEGADYQKGPRYNLATLREAVFYRDNYVCKVCGRKATEGAILHMHHMFYWKGRHGNSLDELLTVCEKCHTPANHQKGGKLYGFGEDVKFTDLSGAAFMNTVRWQIVNELYAAFGKPFVTITYGAVTKEKRIALRLEKSHNNDAYAMGDYHPACRCKFIHYQKRRRNNRVLEKFYDATYIDTRTGNKAKGKELFNGRISRNHKKDSENLHKYRSKKVSKGRRSIRRRRYAIQPYDTVRLEGKTYITSGCHNKGTRLLIPVNGKSKSVAISKVQVVCHAGAWIQII

SEQ ID NO: 15247 - protein, 544 aa, unidentified
MKQKKQKVMVYILNKKGKPLMPTTRCGHVRKLLDSKKAVVVSSNPFTIRLKYDTPNGVQDVFAGIDSGRENIGSGASNEDGDCLYLGELKTSNKSIKMKMTERAGFRKERRSHDRQNKQRKARKDHTEIQNGNADICRTTISCKSVQISYPAAEKSVTHKIIRGKEGKFANRHRDEGWITPSARQLVQMHMNDLKSMCRILPISHVTLERVAFDFQKLENENIKAWEYGKGKLYGYDSPEEYIHDVQGGKCLICGKPHIDYLHHIIPRSKGGSNKVSNLAGLCYDCHYGPMGVHNCQDTQDRLPELKNEANKQYKVSLLNSVMPVLIEEMDKFCKANSIIFSICGGHDTAKVRDMYDLQKDHCIDGFAISLAGRNVKSVDVMPDRIHQKQRYKKKSKNIIQKRNCREYYDGKKLAAVNRHKGTDQKADSLEEYMNTYAETHTADECKKHFESLTVKPARRTYTFHKEGRICPFHIGDKVRYEKKNKIKGNTKVETFICEGIRFPKDENKAKVEHNKTKSKKMKFCRVLEPGCTPYIDYRKLVLI

SEQ ID NO: 15248 - protein, 346 aa, Arthrospira sp.; identical to SEQ ID NO: 6643

SEQ ID NO: 15249 - protein, 500 aa, Eubacterium sp.; identical to SEQ ID NO: 10437

SEQ ID NO: 15250 - protein, 465 aa, unidentified; identical to SEQ ID NO: 3603

SEQ ID NO: 15251 - protein, 441 aa, unidentified; identical to SEQ ID NO: 6900

SEQ ID NO: 15252 - protein, 431 aa, unidentified
MPNKVYVINKHGRPLMPCSPAKARHLLDDGKAKVKKRTPFTIQLIYGCSGYTEKVVLGVDAGSKTIGLSASTKKEELFAANVTPRNDVVDLLSTRREFRRTRRSRKTRHRKARFNNRVHSKHKGWLAPSVEVKIQEHITCIKRVCNILPISKVVVETAEFDLQLLKAVEEGKPVPQGEDYQKGEMYGHYNVRQYVLWRDGFTCQCCGAHSTKKKDVKLHVHHLETRKTGGDAPSNQITLCEDCHQKLHKGLIPAADFKKRKRKSTRDAAFMGIMRNTLMQRLRSELPIPVAETRGYITKATREKLLVLSKSHTNDALAIAQGRHGFNVGYLQSIPQNNRIYTIRPVRHHNRQLHKATVLKGGIRRVNQAGKYVYGFRLYDKVRYNGVECFVWARRVMGYFRLRHLGGKNVKCGANYKNLELLERSQNYLIA

SEQ ID NO: 15253 - protein, 512 aa, unidentified
MSTVYVLNKDGKPLMPTTRGGHVRHLLKEQKARVVQSNPFTIQLLYETNDAVQPLYLGIDPGRTNIGVAVVKADGTAVFTAHLKSRNKEIPKLMQDRKRARRARRTNGRRCRRQRRAKANGTISKKCVKQDTAQSKNPSKRAKEIGVIKRHLPGCKKDVLCVGIKNKEAKYTNRARLEGWLTPTANQLLQTHINLVKKIQKFLPISDAVLEVNKFAFMRLDNPNIQKWQYQQGPLYQKGSLENAVSEMQEHHCLFCEKPIEHYHHVVPKSENGSNTIANIVGLCAEHHNLVHKDVAWQEKLVEEKTGLNKKYGALSVLNQIIPALTKELSFLFPKHSFMTNGKSTHDYRAAHGISKDHWLDAYCIACSGLPIDVCDSTINNCVPYELKQFRRHDRRALNNENMNRVYTLNDKVVATNRHKATEQEAASLEEFRKEHPNDVCKLKVKEHHPTYRNMNRNYPGSVFLVGKQIHVMQGIASSKDGKATKYNDTRATTIAAGKCKFVAKNSGILFV

SEQ ID NO: 15254 - protein, 447 aa, unidentified; identical to SEQ ID NO: 3915

SEQ ID NO: 15255 - protein, 465 aa, unidentified; identical to SEQ ID NO: 4783

SEQ ID NO: 15256 - protein, 442 aa, unidentified; identical to SEQ ID NO: 2903

SEQ ID NO: 15257 - protein, 456 aa, Idiomarina sp.
MAIFVLDKKKQPLMPCSEKRARLLLQRGRAVVHKRYPFTIRLKDRVGGKTQPLRLGIDPGSKTTGLALMRETEGEQRHVLCLFELIHRGFQIKKALQQRAAFRRRRRSANLRYRAPRFNNRTKPKGWLAPSLQHRVDTVMAWANRLSRLAPVTAISQELVRFDTQKLENPEISGVEYQQGTLLGYEVREYLLEKWGRECAYCGTGDTPLEIEHVVPRSRGGSNRVSNLTLSCHPCNQSKDALPLAGFFAHDEGLRKRLKANGLSADAQLERVQRQLKQPMRDASAVNATRWALFSALKTTDLPVAVSSGGRTKYNRQRLNIPKTHALDAACVGAFEKLHDWTVPTLTIKAMGRGSYQRTRLTKHGFPRGYLMRQKQVHGFQTGDMVRAIVPTGKKAGTYTGRVAIRKTGSFNVQAEHGAVQGISHKYCTLIQRSDGYGYYITPFTNLTGGAGQAVA

SEQ ID NO: 15258 - protein, 431 aa, unidentified; identical to SEQ ID NO: 4463

SEQ ID NO: 15259 - protein, 373 aa, unidentified
LGVDAGYKHVGLSASTENAELYASEVELRQDVSDLLSARRALRQSRRNRKTRYRAPRFNNRLRTKRKGWLAPSVENRINAHLSRIEAVLRLLPVTKISVETASFDMQLLKNPDIAGKEYPEGEQLGFWNVREYVLCRDRHVCQHCYGRSKDPVLNVHHLESRRTGGDSPGNLITLCETCHKALHRGDITLKAKRGQSFRAEAFMGIMRWEVHNRLRALHPGIEVSNTYGYRTKHARIANGIAKSHCADAFCIAGNLGAERLCEFFFQKQTRRNNRQIHKLSILKGGIRKRNQAPFEVKGFRLFDKVACQGEEGFIFGRRSSGFFDVRKLDGTRISAGISYKKLHLLEKRRTYLTEIRKEEALPPLPEGRGLRA

SEQ ID NO: 15260 - protein, 408 aa, unidentified; identical to SEQ ID NO: 7570

SEQ ID NO: 15261 - protein, 442 aa, unidentified
MSTTVFVLDKKHRPLMPCRPARARRLLRAGRARVVKRFPFVIRLVDRTVEQSEVQPVLIKLDPGSRETGAAVVRDDGKKRHHALAFFVIEHRGGAIRDALKARSAFRRRRRSQNLRCRSPRFLNRVKPKGWLPPSLRHRVETTLSFVRRMCRYLPVSGIATELVKFDSQKLQNPEVSGVDYQQGTLFEYEVREYLLEKFGRKCVYCGAEGVPLNIDHVVPRAKGGSNRVSNLVLACMSCNQKKGARSLEDFLKGKPKVLARVRRELKTPLRDAAAVNATRWVLFNELKATGLPVETGSGALTKLNRHAFGVEKEHWLDALCVGRLNGVVTRKGLNVLEIRCMGRGSRQRTRLTKYGFPRGYLMRQKCVHGFATGDMVEANVPKGKKAGLWRGRVAVRVSGSFNIQTPKGVIQGVGWKHCRLISHNDGYGYAWLGHAPHSSPA

SEQ ID NO: 15262 - protein, 404 aa, unidentified
LLKEKKAIVKRRTPFTIQLTIATGETKQPGSLGVDAGYEHVGLSASTEKAELYASEVELRQDITDLLSARRALRQSRRNCKTRYRAPRFDNRIRTKRKGWLAPSVENRINAHLSRIKAVLRLLPVTKITVETASFDLQLLKNPDISGKEYQEGEQLGFWNIREYVLCRDGHVCQHCYGRSKDPVLNVHHLESRRTGGDSPGNLITLCETCHKALHRGEITLKAKRGQSFRAEAFVGIMRWEVHNRLRALHPGIEVSNTYGYRTKHARIANGIAKSHCADAFCIAGNLGAERLCEFFFQKQTRRNNRQIHKLSILKGGIRKRNQAPFEVKGFRLFDKVACQGEEGFIFGRRSSGFFDVRKLDGTRISAGISCKKLHLLEKRRTYLTEIRKEEALPPLPEGRGLRA

SEQ ID NO: 15263 - protein, 516 aa, unidentified
MTVLEELLSKTEYVYVLGTDGKPQMPSKRKRHILKLLNTGKARIVEKMPFTVQLKYKSTPILQPITLAEDPGRTNIGTTALSQLGDLIFSAVVETRNKEIKKLMSDRKAHRQASRRGERKARQRLAKKYNTMIKAGMIMRKLPQYAADKFVTCKFIRNTEARFCNRKRCQDWLTPTVNHLVQTHLNVVKKINKYLPITDIAIEVNRFAFIQMKNPDASGVDFQNGPLKGFDDVKAAIREQQHGKCLMCKNDIEHFHHIIQRSKGGSDTIKNLAGLCKKCHAKVHTDAEFQAKLKDKKEGLIKKYGALSALNQAVPLICKELLKIYGAEHVYFCTGKDTSLIRSSLGYEKTKENQMHEIDAYCIGLAALGVNHVKELPESINTYKIKQFRRQDRSAIHHQTERSYYLGKQKIATNRKPRFEQSGDALSDWYEKQVQRYGKREADKMLSAVTVKKSTRFYNVSNRLMPGTVFDYNGQRYVMSGQLTGGKYLRAYGDTKTNYPVLKCRVLRKNEGLVFI

SEQ ID NO: 15264 - protein, 431 aa, unidentified; identical to SEQ ID NO: 6055

SEQ ID NO: 15265 - protein, 396 aa, unidentified; identical to SEQ ID NO: 4508

SEQ ID NO: 15266 - protein, 420 aa, unidentified
MQYVYVLNKHGEPLMPCSPRKARLLLKQKKACVIKRTPFTIKLLYGSTGYKQPVTLGVDAGSKHIGISATTEKHELYREEATPRNDVVDLLSARRAFRRSRRNRKTRYRAPRFDNRVHSKHKGWLAPSVEVKIQEHITLIEHVCRILPVTLVRVETAEFDTQRLKAMLEGKPLPVGTDYQLGEMYDEYNVRQYVLKRDNYTCQCCGAHPTKTKAVKLHVHHIETRRTGGNAPNNLITLCTVCHKALHAEKVTLDGKKRGKPLKDAAFMGIMRKILMERLRKELKIPVQGTYGYITKYLREKYGIPKSHTNDARCISKNPLAIPCDTCYYTKAVRHHNRQLHKATILKGGIRKANQAPYIVKGYRLWDKVAYNGTECFITGRRTSGYFALKELDGTVVSNSISYKKLRLLEAATNYIIERK

SEQ ID NO: 15267 - protein, 420 aa, unidentified; identical to SEQ ID NO: 5136

SEQ ID NO: 15268 - protein, 447 aa, unidentified; identical to SEQ ID NO: 5316

SEQ ID NO: 15269 - protein, 518 aa, unidentified; identical to SEQ ID NO: 7282

SEQ ID NO: 15270 - protein, 466 aa, Cupriavidus sp.; identical to SEQ ID NO: 4436

SEQ ID NO: 15271 - protein, 447 aa, unidentified
LVSGQLIMVWEAIQTRRIKPHDIGEGTLRRHAAGTVSFPVLCKNRKETLMSVLVIGRNGRALMPTNPRKARLLLKKKTASVVCRHPFTIQLLYKTGCATQEGCIGIDTGSQHIGVGITCGDRVILKDEHALRSSMEKRSLLATRAVMRRGRRYRKVRYRKPKWRHHTKRMYFEKANRRGQHWRKVKTTTQSPRSKGWLPPSLQSKCDHHFRIIDRYLKYLPDPITRNLVIETGRFDMARMNDPTIHGEMYQRGPMYDAENLRAYIFARDNYQCACCKAKAGTTRKADGTTVKLVAHHILFRSRGATDNPKYMVSVCDHCHTTKAHQPGGILYSWMENNKKVARGLRDATFMNILRKRLFARYPQAAFTYGNITATDRKQLRLPKSHANDAVAISLFGKEASTVKNICQTMHYKQIRKSKRSLHEAIPRKGRKNPNTKAVRNKKNTTQ

SEQ ID NO: 15272 - protein, 413 aa, unidentified; identical to SEQ ID NO: 3119

SEQ ID NO: 15273 - protein, 529 aa, unidentified; identical to SEQ ID NO: 5528

SEQ ID NO: 15274 - protein, 244 aa, unidentified
LKVFVLNMRGQPLMPCSPAKARHLLRDKKAVVKRRTPFTIQLTIATGETKQDVTLGVDAGAKHIGLSASTEKEEVFASEVELRQDITELLSARRAFRRARRHRKTRYRAPRFSNRVHSKHTGWLAPSVENRIQAHMSRIDAVCGLLPVTKFVIETASFDIQKIKNPDIEGTDYQQGDQLGFWNVREYVLFRDGHVCQHCRGRSKDKILNVHHIESRQTGGDAPNNLITLCETCHKAYHAGKIKL

SEQ ID NO: 15275 - protein, 477 aa, Lactobacillus sp.
MASMDNIVEGQQRNFALGLPMRIAAGSMIAGKGGKMEYENANRVFLLNKDGKPLMPCRPRKARLLLKSGKAFVVKKYPFTIQLKYGSYGYKQKVSLGVDTGQRHIGFAVTSQDKVLYQSEVELRQDVHKNLSTRRVYRRSRRNRKTRYRQARFLNRVHGKRDGLWLPPSVKGKASHNIAWIKRYLAVLPNPDLHIEVGKFDMAKMVNPAISGKQYQEGSLHGWKNYEYYVLARDEYTCQLCHKHGEGVKLVVHHIVYRSQGGTDRVDNLITLCTNCHTTKNHQPGGKLYKWMKAKKKVTRQLKGATFMNILRKRIMTAFPEASYQYGYQTFFDRKKFNLPKGHFTDAIAISGIKSVGQMPETVAMISQFRKKKRSLHEATARKGRKEANRTSKRNAKNTKYARGLWLNDYVHVIGTNLRGYVQSYLSKGAYVRLSDGLGNYVIKDGKNYISTKLCKLITHNGNWQKAEQKLLLYEFK

SEQ ID NO: 15276 - protein, 473 aa, unidentified; identical to SEQ ID NO: 3562
  source 1..473: note = uncultured beta proteobacterium

SEQ ID NO: 15277 - protein, 424 aa, Caldicoprobacter sp.; identical to SEQ ID NO: 2397

SEQ ID NO: 15278 - protein, 496 aa, unidentified; identical to SEQ ID NO: 2063

SEQ ID NO: 15279 - protein, 421 aa, unidentified
MQYVYVLNKHGESLMPCSPGKARLLLKQQKAHVIKRTPFTIKLLYGSTGYKQPITLGVDAGSKHVGLSASTEKRELYCEEFTPRNDVVDLLSTRKQNRRSRRNRKTRYRAPRFDNRVHGKHKGWLAPSVEVKIQEHITVIKRICRILPVTLVRVETAEFDTQRLKAMLEGKPLPVGADYQLGEMYDEYNVRQYVLKRDNYTCQCCGAHPTEKKPVRLHVHHLESRHVGGNAPNNLITLCVACHKALHEGKITLDKGKKRGKPLRNAAFMGIMRNTLLARLKDELNIPVKQTYGYITKLLREKNKIPKSHVNDARCIAKAPNAKPCDTMLYTRALRHHNRQIHKAKILNGGIRKKNQAPYLVKGFRLWDKVRYNGEECFITGRRSSGYFALKKYDGTVISNSASFKKLMLLEAATNYITERS

SEQ ID NO: 15280 - protein, 415 aa, unidentified; identical to SEQ ID NO: 11963

SEQ ID NO: 15281 - protein, 531 aa, unidentified
LYIKMTSCTCTVFPACNHAKASSSQGKHNLLFRQERLIVKKVTYMSTVYVLNKDGKPLMPTTRGGHVRHLLKEQKARVVRTKPFTIQLLYETNDVVQPLYLGIDPGRTNIGVAVVKTDGTAVFTAHLETRNKEIPKLMKKRKESRRARRTNGRRCRRQRRAKANDTISKKCVKQPTAQNGSISKRAKEIGIIKRRLPGCEKDVLCIGIKNKEARFNNRTRPEGWLTPTANQLLQTHINLVKKIQKFLPISDVVLEVNKFAFMQLDNPNIQKWQYQQGPLYKKESLERAVSEMQEHHCLFCDKPIDHYHHVVPQSENGSNTIANIVGLCAEHHNLVHKDAAWQKKLAEEKVGLNKKYGALSVLNQIIPALTKELSFLFPEHSFVTNGKSTYDYRATHGVSKDHWLDAYCIACSVLPSDVCDSNINNHMPYELKQFRRHDRRVLHKANTSRVYTLNGKKVATNRHKAAKQTADSLEEFRQSHPDDVCKLKVKEHHPAYRNLNRNYPGSVFFVGKQVHVMQGIASSKDGKATKY

SEQ ID NO: 15282 - protein, 488 aa, unidentified; identical to SEQ ID NO: 9276

SEQ ID NO: 15283 - protein, 408 aa, unidentified; identical to SEQ ID NO: 8232

SEQ ID NO: 15284 - protein, 473 aa, unidentified
MPLNSLDGVRTVGNPYKPWDNIGEGHITDLPVWAACSSIAAIQKEIQMVYVQNRSGQPLMPTEDHRKVRLLLKNGLAVVVKRTPFTIRLATGSKNYVQPVILGVDAGSRTAGLSASTKQRELFAAEVTLRNDVVNNLSARREFRKARRHRKTRYRQPRFHNRVHSKQKGWLAPSVEVKIQEHITVIKRVCRILPVSRVVVETAEFDLQLLKAIADGRPVPQGEDYQKGEQAGFYNVRQYVLWRDDYRCQCCRKHGKGIKLHTHHKESRKTGGDAPENLVTLCEVCHRKLHQGLIAEQSLKKRSRMSTRDAVFMGIMRRTLTERLCRELKVPVAGTKGYITKYTRVELLHLPKSHAGDALAIAQGRHGFGIGQATFIKPVERIYQIKPVRHHNRQLHKATILRGGIRKSNQAPKYVKGSRLYDKVLYQGRECFIWGRRTTGSFLLKLLDGTKVKDGVSCKHLKLLERSSQYLAA

SEQ ID NO: 15285 - protein, 416 aa, unidentified
MLVYVLNKHGKPLMPCKPSKARKLLKQGKAKITQREPFTIQLIYGSSGYKQPITLGIDAGSKFIGVSATTEKQELFSAEVELRNDIVQLLSERRQYRRSRRYRKTRYRKPRFSNRVRSKNKCWLAPSIENKIQTHLKIVEKVHKILPITKIITEVASFDIQKIKNPNIEGVEYQQGEQLGFWNVREYVLWRDNHTCQICKGKSKDNRLNVHHIESRQTGGNAPNNLITLCETCHNKYHKGELNVKLKRGQSFRDTAFMGIMRWTFYNRLKNIYPNVELTYGYITKNTRITHKLPKSHRIDALCISGNPKAKQLDYWYYIKQVRKHNRQIHKAKILKGGIRKLNQAPYLVKGFRLFDKVKYKGQECFIFGRRSSGYFDLRKLDGTVIHRSASYKDLQLLSKRKTLLWERREGVSSQT

SEQ ID NO: 15286 - protein, 427 aa, Nostoc sp.; identical to SEQ ID NO: 2670

SEQ ID NO: 15287 - protein, 291 aa, unidentified
VRRKGRIAPSILQKRQAVVRITDSLSKYIRIDSIYLEDVAIDVRVLTDEKKLYSWQYQQSNRLDENLRKATILRDNCKCQLCGNKNCRLEVHHITPRRMSGANTIGNLITLCSECHSNVTGREMEFAEQLYSKIGKKKNNVSLQYASHVMVGKTWLREELSKRVPVFLTTGGDTANKRIDWNLEKSHEIDAVCITNLEPESVGVKPWNVKPLRHQRKTMKVKEILGFRHRDIVCYTFKNGEYHEGYVTALYPSEGKQKEGLNFLSPTKHCKRVNPKKCQRLDRPDKFLWLV

SEQ ID NO: 15288 - protein, 406 aa, unidentified; identical to SEQ ID NO: 9803

SEQ ID NO: 15289 - protein, 470 aa, unidentified; identical to SEQ ID NO: 5320

SEQ ID NO: 15290 - protein, 544 aa, unidentified
MKQKKQKVMIYILNKKGKPLMPTTRCGHVRKLLDSKKAVVVNSNPFTIRLKYDTPNCVQDMFAGIDSGRENIGSGASNEDGDCLYLGELRTSNKLIKIKMTERAGFRRERRRHDRQNKQRKARKDHTEIQNGNIDICRTTISCKSVQISYPAAEESVTHKIIRGKEGKFANRHRDEGWITPSARQLVQMHMNDLKSMCKILPISHVTLERVAFDFQKLENENIKAWEYGKGKLYGYDSPKKYIHDVQDGKCLVCGKPHIDYLHHIIPRSKGGSDKVSNIAGLCYDCHYGPMGVHNCQDTQDRLPELKNEANKQYKVSLLNSVMPVLIEEMDKFCKANSIMFSICEGHDTAKVRDMYDLQKDHCIDGFAISLVDRNVKSVDVMPDRIYQKQRYKKKSKNIIQKRNCREYYDGKKLVAVNRHKGTDQKADSLEEYMNTYAETHTADECKKHFDSLTVKPARRTYTFHKKGCICPFHIGDKVRYEKKNKIKGNTKVETFICESIHFYKDENKAKVEHNKTKSKRMKFCRVLEAGCTPYIDYRKLALM

SEQ ID NO: 15291 - protein, 448 aa, Clostridium sp.; identical to SEQ ID NO: 4254

SEQ ID NO: 15292 - protein, 431 aa, unidentified
MPDKVYVISRLGHPLMPCSPAKACHLLDDKKAKVVKRMPFTIRLLYGSTKYIQPIILGVDAGSKTIGLSASTAKEEVFAAEVMPRNDVVENLSTRREFRRARRNRTTRYRKPRSDNRVRSNHERWLAPSVKVKIQEHITSIKRVCNILPISKVVIETAEFDLQLLKAIQEGKPIPEGEDYQKGEMYGSYNVCQYVLWRDNYTCICCGVRGTPKNPVRLHVHHFESRKYGGNAPDNHGTLCDDCHKKFHLGIITDVKLKTRRRQSTRDAAFMGIMRKTLMWRLRTELFIPVAETMGYITKATREKLLVLPKSHTRDALAIAQGRHGFGIKEYAYVEPANHIYTVRPVRHHNRQLHKASILKGGIRKRNQASKYVFGFRLYDKVLYQGKACFVWGRRTSGTFLLRTIDGIKVKDGVSYRNLTLLERSSNYLIA

SEQ ID NO: 15293 - protein, 443 aa, Anoxybacillus sp.; identical to SEQ ID NO: 4041

SEQ ID NO: 15294 - protein, 414 aa, unidentified; identical to SEQ ID NO: 14215

SEQ ID NO: 15295 - protein, 427 aa, unidentified; identical to SEQ ID NO: 5062

SEQ ID NO: 15296 - protein, 382 aa, unidentified
MVYVINKDGQALMPTERFGKVRRLLKNGLAHVVCRIPFTIQLDYETTHFVQPISLGVDAGSKHIGISATTSEKELYAADVELRNDIVEKLSTRRERRRTRRSRLRYRKARFNNRVSSKHKGWLAPSVENKIQTHLTVVEKIHKFLPITKIIVETASFDTQKIKNPSISSKEYQQGEQLGFFNVREYVLFRDNHTCQHCKGKSKDHILNVHHIESRKTGGNSPSNLITLCESCHKAYHNGKIDIKVKRGASFRDAAFMGIARWTTYERLKNIYPNVSMTFGYITKNTRITNGLPKEHHVDARCISGNPKSKPLGYYFYQKKVRCQNRQIHKANFLKGGRKKLNQSPFLVKGYRLFDLVEYQKELYYIFGRRDRGFFDIRKLDG

SEQ ID NO: 15297 - protein, 456 aa, unidentified; identical to SEQ ID NO: 13864

SEQ ID NO: 15298 - protein, 416 aa, unidentified
MVYVLSQNGQPLMPTENHAKVRALLKHGKAKVIQRCPFTIQLLYESTTHTQKINLGIDAGSKTIGISATTDSKVLYESEVVLRNDIVELLSGRRALRRSRRNRKTRYRKPRLDNRRRPDGWLAPSIRQKIKTHVTVVENVMKILPVTKIIVETASFDIQKIKNPEIEGAEYQYGEQLDFWNVREYVLFRDGHTCQCCKGKSKDNILNVHHIESRKTGGNAPNNLITLCETCHKAYHKGVITLPKEIHRGMRFRDAAFMGVMRWAFYDRLKELYNPLGVEVINTYGYITKNTRIEHGLPKEHYVDARCISDNPAAKPLDHYYFQKKVRCHNRQIHKNTILKGGIRKRNQASYEVKGFRLYDQVLWKGQKCFIFGRRSTGRMDLRLLDGTHVNASVGYKNLKLLSMRKNYLIEQRKAG

SEQ ID NO: 15299 - protein, 420 aa, unidentified; identical to SEQ ID NO: 10196

SEQ ID NO: 15300 - protein, 543 aa, unidentified; identical to SEQ ID NO: 2371

SEQ ID NO: 15301 - protein, 465 aa, unidentified; identical to SEQ ID NO: 6840

SEQ ID NO: 15302 - protein, 418 aa, unidentified
MVYVLGQDGHPLMPTCRHGKVKRMLKSRMAKVVKKCPFTIQLQYESTTHTQKINLGIDAGSKTIGVSATTESKVLYESEVVLRNDIVELLSGRRALRRSRRNRKTRYRKPRLDNRRRPDGWLAPSIRQKIKTHVTVVENVMKILPVTKIIVETASFDIQKIKNPEIEGAEYQYGEQLDFWNVREYVLFRDGHTCQCCKGKSKDNILNVHHIESRKTGGNAPNNLITLCETCHKAYHKGVITLPKEIHRGMRFRDAAFMGIMRWAFYDRLKELYTPFGVEVINTYGYITKNTRIEHGLPKEHYVDARCISGNPAAKPLGHYYFQKKVRCHNRQIHKNTILKGGIRKRNQAAYLVNGYRLFDKVKYQNQEYFIFGRRSSGFFDIRTLDGTKVNKGSISCKKLQLVEKSKHYLTEQRKVTA

SEQ ID NO: 15303 - protein, 432 aa, unidentified; identical to SEQ ID NO: 13730

SEQ ID NO: 15304 - protein, 418 aa, unidentified; identical to SEQ ID NO: 6784

SEQ ID NO: 15305 - protein, 355 aa, Arthrospira sp.; identical to SEQ ID NO: 11186
  VARIANT 169: note = X can be any naturally occurring amino acid
  VARIANT 350: note = X can be any naturally occurring amino acid

SEQ ID NO: 15306 - protein, 557 aa, unidentified; identical to SEQ ID NO: 5269

SEQ ID NO: 15307 - protein, 414 aa, unidentified
MPCSPAKARLLLKEKKAIVKRRTPFTIQLTIATGEAKQPVSLGIDAGYKHVGLPASTEKAELYASEVELRQDITDLLSARRALRQSRRNRKTRYRAPRFDNRIRTKRKGWLAPSVENRINAHLSRIEAVLRLLPVTKITVETASFDLQLLKNPDISGKEYQEGEQLGFGNIREYVLCRDGHVCQHCYGGSKDPVLNVHHLESRRTGGDSPDNLLTLCETCHKALHRGEITLKTKRGQSFRAETFMGIMRWEVLNRLKASHSELKVHNTYGYLTKHARIENGIAKSHGADAFCIAGNLGAERLGEFFFQKQTRRNNRQIHKLSILKGALRKRNQAPFEVKGFRLFDKVACQGEEGFIFGRRSSGFFDVRKLDGTRISAGISYKKLHLLEKRQTYLIEIRKEEAFPPLPEGRGLRA

SEQ ID NO: 15308 - protein, 415 aa, Eubacterium sp.; identical to SEQ ID NO: 6925

SEQ ID NO: 15309 - protein, 378 aa, unidentified
VIRLTFACEDQTQPITLGVDAGSKHVGLSATTEKEELYAAEVELRTDIVDLLSTRRQNRRTRRNRLRYRPARFDNRVHSKNKGWLAPSIEQKIQSHLKAVEDVHKLLPISKIIVETASFDIQKIKNPDISGKEYQEGEQLGFWNVREYVLWRDGHVCQNCKGKSKDKILNVHHIESRKTGGNAPNNLITLCDTCHDKCHKGEIELRIKRGQSFRDAAFMGVMRWAFYARLKEQYSDVHKTYGYITKHVRISNHLEKDHCVDARCISGNLQAKPLGYYYYQKKVRCHNRQFYKVNFLKGGKKKRNQAPYLVHGFRLFDKVLFAGRECFIFGRRATGYFDLRLLTGEKVHVSASCKKLQLLEPKRPFLTERRTRQFLSSL

SEQ ID NO: 15310 - protein, 444 aa, unidentified
MSTTVFVLDKKHRPLMPCRPARARRLLRAGRARVVKRFPFVIRLVDRTVEQSEVQPVLIKLDPGSRETGAAVVRDDEKKRHHALAFFVIKHRGGAIRDALKARSAFRRRRRSQNFRCRSPRFLNRVKPKGWLPPSLRHRVETTLSFVRRMCRYLPVSGIATELVKFDSQKLQNPEVSGVDYQQGTLFEYEVREYLLEKFGRKCVYCGAEGVPLNIDHVVPRAKGGSNRVSNLVLACMSCNQKKGARSLEDFLKGKPKVLARVRRELKTPLRDAAAVNATRWVLFNELKATGLPVETGSGALTKLNRHAFGVEKEHWLDALCVGRLNGVVTRKGLNVLEIRGEPSTHAPHEVRLPARVPDAAEVRPRLRDRGHGGGERPQGKEGRTVARPRCGPRLGLIQHSDAEGRHSRRRLEALPTDFTQRRIWVRVARPRTSFLPCLKAGVS

SEQ ID NO: 15311 - protein, 460 aa, Fischerella sp.; identical to SEQ ID NO: 14715

SEQ ID NO: 15312 - protein, 416 aa, unidentified
  REGION 1..416: note = Ga0307928_10003494
MQRVYIQSKDGEPLMPTIRCGAVRRWLRDGKAVVVKLCPFTIRLNWDCETNTQKIIVGVDTGAVNVGCSAVSENKVLYASETKLRTDIHKKMQRRANYRKTRRSKLRHRQPRFNNRTKPKGWLSPSLKSKAESTIKIVKQLSKILPITKVRVEIAKFDTQKLQNPNIKGKEYQQGKLEGYDNIRSYVFERDNYTCQICKKQLGILQTHHIIQKKDGGSDKPDNMVTVHKKCHEDYHKGLIQHKFRKPKEYKIESHITTLKDYIVKGLKKDFEVETTFGYTTKRIRLRLNLPKTHYFDAVAICNPNKIERINYYYKILCRPHGRYKLTQGIRSEQYNPTKKVCGYDTGDKVLCTKNEKQVGYIQGKMATGYFMLSDINNKTILKCTSHRFLNLLEYKKTLQSQLIPIISNGNFLMKS

SEQ ID NO: 15313 - protein, 403 aa, unidentified
MPTTPCKARKLLKQGKAKVVKREPFTIQLLYATGETKQDITLGVDAGSKIIGLSATTDKQELFSAEVELRNDIVDLLSTRREFRRTRRNRLRYRKPRFLNRVYSKNKGWLAPSVGNKIQTHLNVISKIHRILPISKIIVEVASFDIQKIKNPDIQGEQYQQGEQLGFWNVREYVLFRDGYKCQGKKGCKNKILNVHHIESRKTGGNTPNNLITLCEDCHKEYHAGKLKLNIKRGQSFRDAAFMGIMRWTFYNRLKEIYSNVKITYGYITKNTRIQNNLPKEHRIDALCISGNPNVKKLDYWYYIKQVRRHNRQIHKANILKGGKKKLNQAPYLVKGFRLFDKVKYKGEECFIFGRRSSGYFDLRKLDGTVIHRSANCKDLKLISKAKTLLWERRIDVAVSSRD

SEQ ID NO: 15314 - protein, 465 aa, unidentified; identical to SEQ ID NO: 8033

SEQ ID NO: 15315 - protein, 427 aa, Eubacterium sp.; identical to SEQ ID NO: 3021

SEQ ID NO: 15316 - protein, 413 aa, unidentified; identical to SEQ ID NO: 2605

SEQ ID NO: 15317 - protein, 428 aa, Lactobacillus sp.; identical to SEQ ID NO: 11642

SEQ ID NO: 15318 - protein, 465 aa, unidentified
MSTCACVLSKNGERLMPTIRLGKVRHLLKDGKAKIIKHHPFTIQLLYDSETNIQPIEICEDVGYNYIGISVKSQSHEYVSAQYDTLQDEKDCHDSCRKMRRTRRNRLRYRKPRFDNRKHDKGWLAPSLEHKKELNVNVIKMYCEVMPITHATVEVGSFDTMLVRAIEEGKATPESTDYQKGPRYNLATLREAVFYRDNYTCQVCGRKANEGAILHVHHMFYWKGRHGNSLNELVTVCEKCHTPANHQKGGKLYGFGENIKFANLSGAAFMNTVRWQIVNELYAAFGKPFVTFTYGAMTKEKQIALHLDKSHSNDAYAMGSFHPADRCAFEHYEKVKRNNRILEKFHDSRYIDIRTGKEAKGKELFNGRISRSHKKDSENLHKYRGKRIRKGYRALRRKKVALNSGDLVSLNGETLIVHGTHTNKKGNVRVEFKTPSKSGKKSANLKKLKVVKTSNPMHSAWTKVP

SEQ ID NO: 15319 - protein, 442 aa, unidentified
MVTVQQSTHHLPFGRVFIRRNLFMVYVISQDGKPLMPCSDPIARLLLKQGKAKVKKREPFTIKLTYETTNHTQGLTLGVDTGSGTIGTAVSKDNGDIVYMSEVVVRNDITDKMTQRAKYRRNRRNRKTRYRKARWLNRASSIKKDRFSPTMQSKLHSHVREIEYIQSILPVTEMVFETGQFDMQLMKNPSLANPKVRPWGYQKGANYGFENTKAMVLNRDNYTCQCCKGKHKDSKLEVHHIVFCSQGGSDEESNLLTLCHTCHKDLHSGKINPKLSGKVKGNLKYATQMNSIRKQLFRFYPNAIETFGYVTKANRLHLGVDKEHYYDACTIATQGNAFNVKSNLYKKKCVSDGDFQKTKGIRSEQPIVTDKICGFRKFDKVRYFGNDYFIKGRMSTGYAILMDIDGNKIDFSTMPRGYKTPKLSNCKRITARSTVMTQVKVV

SEQ ID NO: 15320 - protein, 500 aa, unidentified
MATVYVLNKDGKPLMPTTRCGHIRHLLKEKKARVVRTNPFTIKLVYETDDVVQPLYLGIDPGRTNIGVAVVKVDGTAVFTAHLETRNKEIPKLMVKRKEHRQGRRHYRRCKRQRRAAAHGTLSKKCKKQDTAQGGNISKRAQTIGVFERNLPGCENSVLCIGIKNKEARFNNRVRPARWLTPTANQLLLTHVNFVKKICKFLPISDVVLEINKFAFMALDNPNIQKWQYQQGPLYQKGSLENAVSEQQDHHCLFCEKTIEHYHHVILRSENGSDTIANIVGLCAEHHDLIHKDDKLKEELAKKKQGLNKKYGALSVLNQIIPALTYELGSRFQGHFYVTTGKSTYDYRAAHSVSKDHWLDAYCIACSVLPDGCFDNTINSRVPYELKQFRRHDRQVCQQQNVKRKYYLDKKLVATNRHKAIKQETDSLEEYRNNGGTTDKLVVKEHKPTNKRLNRILPGALMAANGKLNVMVASRGLHNGIPDNYVFDNNSKAKPSKCTL

SEQ ID NO: 15321 - protein, 426 aa, unidentified
MSNYVFLIDANKTPMNPIHPAQARKLMEAGKAAVFRRYPFTLIMNRVVENIITYPLTLKIDPGSKTSGIALVNNRDEVVWGMELEHRGQQIKDALLTRRAVRQGRRGRNTRYRQARFLNCKRSKGWLAPSLMHRVLTIETWVKRLCQFAPIAEIRQELVRFDMQQMENPEISGVQYQQGTLFGFEVREYLLEKWGRKCTYCSKKGVPLQVEHIISRAKGGSDRVSNLCLACEKCNQKKGTSYLKDFLKGKPELENRILKQAKTPLKDAAAVNVTRSKLFETLKAMELPVTTGTGGQTKYNRTRLGLDKAHWLDAACVGVTEMLTVLTNKILQVKATGQGGRQRCQTDRLGYPHKYRPLRPIHGFCTGDIVKTIIPKGVNTGTYVARLCPYSNGRGEIYPTTGKKRIGIKLEYVEKPIHRKDGYSYG

SEQ ID NO: 15322 - protein, 426 aa, Lactobacillus sp.; identical to SEQ ID NO: 3294

SEQ ID NO: 15323 - protein, 416 aa, unidentified; identical to SEQ ID NO: 4565

SEQ ID NO: 15324 - protein, 411 aa, unidentified; identical to SEQ ID NO: 3762

SEQ ID NO: 15325 - protein, 443 aa, unidentified
NIGEGSQPVERPRRQNLRVFVLNKRGKPLMPCSPAKARLLLKEKKAIVKRRTPFTIQLTIATGETKQPVGLGVDAGYKHVGLSASTDKAELYASQVELRQDITDLLSARRALRRARRNRKTRYRAPRFNNRIRTKRKGWLAPSVENRINAHLSRIEAVLRLLPVTKITVETASFDMLLLKNPDIAGKEYQEGEQLGFWNVREYVLFRDGHVCQHCYGRSKDPVLNVHHLESRRTGGDSPGNLITLCETCHEALHRGEIALKTKRGHSFRAEAFMGMMRWEVLNRLKASHSELEVNNTYGYRTKHARIVNGIDKSHCADAFCIAGNLGAERLCEFFFQKQTRRNNRQIHKLSILKGGIRKRNQAPFEIKGFRLFDKVACKGEESFIFGRRSSGYFDVRKLDGTRISAGISYKKLRLLEKRRTYLTEIRKEEALPPLPEGRGLRA

SEQ ID NO: 15326 - protein, 431 aa, unidentified; identical to SEQ ID NO: 6055

SEQ ID NO: 15327 - protein, 229 aa, Anabaena sp.; identical to SEQ ID NO: 3266

SEQ ID NO: 15328 - protein, 224 aa, unidentified
VRGTPKNPVRLHVHHFESRKYGGNAPVNHGTLCDDCHKKFHLGIITDVKLKTRRRQSTRDAAFMGIMRKTLMWRLRTELFIPVAETKGYITKATREKLLVLPKSHTRDALAIAQGRHGFGIKEYAYVEPANHIYTVRPVRHHNRQLHKASILKGGIRKRNQASKYVFGFRLYDKVLYQGKACFVWGRRTSGTFLLRTIDGIKVKDGVSYRNLTLLERSSNYLIA

SEQ ID NO: 15329 - protein, 415 aa, Bacillus sp.; identical to SEQ ID NO: 2431

SEQ ID NO: 15330 - protein, 420 aa, unidentified; identical to SEQ ID NO: 11791

SEQ ID NO: 15331 - protein, 523 aa, Ammonifex sp.; identical to SEQ ID NO: 3090

SEQ ID NO: 15332 - protein, 490 aa, unidentified; identical to SEQ ID NO: 3566

SEQ ID NO: 15333 - protein, 396 aa, unidentified; identical to SEQ ID NO: 3291

SEQ ID NO: 15334 - protein, 442 aa, unidentified; identical to SEQ ID NO: 3234

SEQ ID NO: 15335 - protein, 431 aa, unidentified
MPNKVYIINKHGRPLMPCSPAKARHLLDAGKAKVKKRTPFTIQLVYGSSGYTQEVILGVDAGSKTIGLSASAETEELLSAEVKPRNDVVDLLSTRREFRRARRNRKTRYRKPRFDNRVRSKHKGWLAPSVEVKIQEHITSIKRVCRILPVSKVVIETAEFDLQLLKAIADGKPVPQGEDYQKGEMYGHYNVRQYVLWRDDYTCQCCGAHATKKKEVRLHVHHLESRKVGGDAPDNQVTLCESCHEKLHKGLITAKDFKKRKRRSTRDATFMGIMRKTLMQMLCSELPIPVVKTRGYITKATREKLLVLPKSHTNDALAIAQGKHGFNVGYLPGILQIDKIYTIRPVRHHNRQLHKATILKGGIRKSNQTEKYVFGYRLFDKVQFNGQDCFIWGRRTSGYFVVKTIDGKVIHNSASFKKLNLVERASNYLIA

SEQ ID NO: 15336 - protein, 448 aa, unidentified
MSTGLRAVQAEPAGIRKGDALKVFVLNMRGRPLMPCSPARARHLLKAGKAVVRRRTPFTIQLRIATGETKQSVTLGVDAGAKHVGLSAATEKEEVFASEVELRQDITGLLAARLSLRRDRRHRKTRYRAPRFLNRVRSKHKGWLAPSVENRIQAHMSCIDAVCRLLPVTRIVIETASFDVQKIRNLEVEGTGYQQGDQLGFWNVREYVLFRDGHVCQHCHGYSKDKILNVHHLESRQTGGDAPNNLITLCETCHKACHAGKIKLKVKRAQSFRAEAFMGIMRWTLLDRMRKAHSGLPVENTYGYLTKNTRITLGLPKTHCVDAYCIAGNLKAVRRGVCLHQRQVRKHNRQIHKCTVLSKTLKDGTKIGYRKLNQTPHLVKNFRLFDKVRCLGQTGFIFGRRSSGYFDVRRLDGVKLSSGISYRKLTLLEKRSTYLTELRKEDGASSPV

SEQ ID NO: 15337 - protein, 419 aa, unidentified; identical to SEQ ID NO: 4877

SEQ ID NO: 15338 - protein, 442 aa, unidentified; identical to SEQ ID NO: 3218

SEQ ID NO: 15339 - protein, 514 aa, unidentified
  source 1..514: note = uncultured delta proteobacterium
MLQRAHKTDGTILPQLCPLEDRGADKPRVPARNGSCQTAALQPSRGETVGQASPAASPAQAESGVSRVFVLAKDGHPLMPCAPGRARVLLKKLRARVVKVYPFTIRIVDRIEGEAQPVRLKLDPGSKTTGLALVREIPGGQDQAVLHLSEVAHRGATVKKHMAQRSAYRRGRRTRNLRYREPRFNNRTRPKGWLSPSLVSRLDNCLSWTRKYMRLCPVQAISVERVRFDMQLMENPEISGVEYQQGTLAGYEVREYLLEKWGRRCSYCDTPNVPLEVEHIHPKGRGGSNRVSNLTLACRECNEKKDDRYIQDFLADDQSRLARILSQLKKPLHDAAAVNATRNAIFFGLRNFGLPVEASTGGRTKFNRCRQDIPKSHCLDAACVGAVGNLLGWNQPFLHIKAMGRGSYQRTRLTADGFPRGYLTRQKAVHGFQTGDMVVAVVLKGKKAGTHKGRVAVRKSGSFNIQTKVGVVQGISWKWCSLLQRQDGYGYRPEKAAALFPNLREGVSTEGESQ

SEQ ID NO: 15340 - protein, 241 aa, unidentified
QLGEMYDEYNVRQYVLKRDNYTCQCCGAHTTAKKLVKLHVHHLESRKTGGNAPSNLVTLCTTCHKNLHKGKVTLDGKERGKPLRDAAFMGIMRKTLMARLKEELPIPVQGTYGYITKMRREQNDIKKSHTNDARCISKHPLAEPCSVCYRTKAIRHHNRQTHKANFSKKGIRKRSQMPYLVEGYRLWDKVLYKEQECFVSGRRSSGSFTLKKLDGTSVSKGVTFKKLRLLEPATNYLIERM

SEQ ID NO: 15341 - protein, 442 aa, unidentified; identical to SEQ ID NO: 6360

SEQ ID NO: 15342 - protein, 417 aa, unidentified
MPCSPAKARLLLKEKKAIVKRRTPFTIQLTIATGEAKQPVTLGVDSGYKHIGLSATTEKAELYASQVELRQDITDLLSARLALRRSRRSRKTRYRAPRFDNRVASKHKGWLAPSVENRIAAHLSRVEAVMRVLPVTAITVETAAFDTQLLKNPDVAGAAYQQGEQLGFWNVREYVLFRDGHVCQHCRGKSKDPILNVHHIESRRTGGDAPNNLITLCETCHKAFHRGEIKLKVRRGKSFKAETFMGIMRRTLFERLKKAHPELNVRNTYGYLTKHKRISHGIAKSHCADAYCIADNLGAKRLEGFFFQKQTRKHNRQIHKLLILKGGLKKKNQAPYEVKGFRLFDKVICKGEEAFIFGRRTSGSFDLRRLDGTRISAGINYKKLRLLEPRTTYLTEFRKEAALPPPHECRGFRAEFL

SEQ ID NO: 15343 - protein, 420 aa, unidentified; identical to SEQ ID NO: 6507

SEQ ID NO: 15344 - protein, 424 aa, unidentified; identical to SEQ ID NO: 3434

SEQ ID NO: 15345 - protein, 554 aa, Acidithiobacillus sp.; identical to SEQ ID NO: 7890

SEQ ID NO: 15346 - protein, 309 aa, Oscillatoria sp.; identical to SEQ ID NO: 13770

SEQ ID NO: 15347 - protein, 406 aa, unidentified; identical to SEQ ID NO: 2703

SEQ ID NO: 15348 - protein, 426 aa, unidentified
MVYVISKDGKPLMPTKRHGKVRRLLKQGLAKVVRREPFTIQLLYDTTTYTQPVTVGVDIGSKTVGISAITNKQELLSMEVELRQDIKKLLLKRREHRRFRRYRKRRYRKPRFLNRRRPEGWLAPSVKWKADAHIRLVNFVAKILPVTKVVVEVAPFDIHKIVNPEVSGKEYQEGPQKDFWDVREYCLWRAGYKSELSGKKGVLEVHHIVPRSQGGTDNPSNLIVLTAEEHKAIHEGKIKIPRSKLKKVKILKDASHVSTIGWYIVNTLKGRYDINITYGSITKAKRVEMGLEKTHRNDAFVIAGGNKNVNRAPEWYFGKFFRRQNRSLHKANPIKGGKRPVNTVKEVRGFRRFDKVRYKNQIGIIYGLRISGYFDMRSLSGEKIHSSVKWSNLKLLEKAKTLILERGEQRIPLHLKEDGVSCAGLR

SEQ ID NO: 15349 - protein, 465 aa, unidentified
MSTCVCVLSNNGERLMPTIRLGRVRHHLKDGKAKIIKHHPFTIQLLYDSKTNTQPIEICEDVGYNYIGISVKSQSHEYVFAQYDTLQDEKACHDSCRKLRRTRRNRLRYRKPRFDNRKRGEGWLAPSLKHKKELNVNVVKMYCTVMPITHATVEVGSFDTMLVKAIQEGKVIPEGADYQKGPRYNLATLREAVFYRDNYVCKICGRKATEGAILHMHHMFYWKGRHGNSLNELLTVCEKCHTPANHQKSGKLYGFGEKIKFADLSGAAFMNTVRWQIVNELYVAFGKPFVTITYGAMTKEKRIALQLEKSHNNDAYVMGEFHPNLRCMFEHYEKARRNNRILEKFYDSRYIDIRTGEIATGKELFNGRINRNHKKDSENLHKYRGKRTYAGHRALLRKKVNLNPGDLVSLNGENLIVHSTHTKKNGAVNVEFETPAKSGQKSASLKKLKIVKAANSIHPAWEKIS

SEQ ID NO: 15350 - protein, 409 aa, Geobacillus sp.
LFVYIINKHGKPLMPCSPRKARLLLKQKKAKVVRRTPFTIQLLYGSSGYKQPVSLGVDMGTRHVGISATTKKDVLFEAEAQLRTDIVELLAIRRQFRRSRRNRKTRYREARFLNRRKPEGWLPPSIQHKINSHIKLIDLVHNILPVTSVTIEVAAFDTQKLKNLNIRGVEYQQGEQMGFWNVREYVLYRDNHTCQYCKGKKKDPVLQVHHIESRKTGGDSPDNLITLCKTCHHEIHEKGLEHIFQRKRPPMRDASQMTAMRWAMFSRIREKYSHANITYGYITKCIRIANGLSKSHMVDARCISGDPLAKPSGTVYLLKFVRKNNRQLHKATILKGGKRKSNKAPRFVKGFQLFDKVVYERKECFIFGRRSSGYFDLRLLDGTKVHASASWKKLKRVEHASTLLIERSI

SEQ ID NO: 15351 - protein, 512 aa, unidentified; identical to SEQ ID NO: 9077

SEQ ID NO: 15352 - protein, 456 aa, unidentified
MQRVFVLGKNKERLSPCTPARARKLLSKNKAAVFRQFPFTIILKERETGNTQPLYFKIDQGSKTTGISLVSINKNSNKVIYACNLVHRGHAISESLTKRRAIRSSRRSRKTRYRKPKWTNTMSKKQFEHINKRPKGWLAPSIKSRLDNTVNLFNKLNKLTPITNVSIENVRFDMQKINNPTISEIGYQQGDLFGFEVKEYLLYQHKHTCAYCHGLSKDPILEIEHILCKSKGGTNRLSNLSLACRKCNQDKGSLLPEEWLQKLSKSKSALNKKRFTLFSKVLKGVKPSLKDAAAVNSIRNALVNSFNLPIELGSGGLTKYNRKQNNYPKEHWIDAACIGLSGEEIHIPTSLIPVEIKANGRGSRQMCRVDKNGFPRTSAKKASNKFNFKTGDIVIAKVKKGKKQGTYLGRVAVRESGYFNITKKSGVVQGISYQYCRLLHKNDGYSYSNLVNLITT

SEQ ID NO: 15353 - protein, 470 aa, unidentified
MSVFVVGLNGCRLMPVSERKARLLLKGGKASVYRKVPFTIKLNYKTGSTVQPGYLGIDTGSQHIGVSVVRKDGTVLHKEEIGLRDSMSKRKLLESRASSRRGRRYRKTRYRHPKWKPKTKRTYNEKADRKGRHWKKQKNTFTSKRQAGWLPPSLQSKTNHHIQWIRKLLDLLPEGYRLSIELGRFDPARMKDPEIHGELYQKGPQYDYENVRAYVLARDGYTCRVCKKKGGKLHVHHILYRSRGASDNPKYMATVCSKCHTTENHLPGGILYQWMQDQKKFTRGLRDATFMNILKKRLRKAFPDAVFTYGNITKADREKLELPKSHGNDATAIALVKTEVKSVKDEEPVIHIQQVRRKKRSLHEETPRKGRKEPNRTASRSDKNTKSVTVTKGSGEKKASMTACLFDRVELDGKKGWITGFTGTSCYVKDKEDSYICTSPKYKQVSISRLRILHHCGNWAIGAEKPLGKG

SEQ ID NO: 15354 - protein, 415 aa, Bacillus sp.; identical to SEQ ID NO: 2431

SEQ ID NO: 15355 - protein, 465 aa, unidentified; identical to SEQ ID NO: 5741

SEQ ID NO: 15356 - protein, 492 aa, unidentified
MTPVWEGRTFAYLPLSKKGEPAMSVFVVGLNGCRLMPVSERKARLILNDGKASVYRKVPFTIKLNYKTGSTTQPGYLGIDTGSPHIGVSVVREGGTVLHKEEIGLRDSMTKRKLLEAKASLRRGRRCRKTRYRHPKWRPKTKRVYCEVPDKKGRHWQKQKNTFTSGRPEGWLPPSLQSKTDHHIRWIKKLQGLLPEWYRLSIELGRFDPARMKDPEIHGNLYQKGPQYDYENVRAYVLDRDRYTCQVCRRKGGKLHVHHVLYRSQGASDNPQYMATVCSSCHTTENHLPGGILYQWMQEQKKFTRGLRDATFMNILRKRLRKAFTDAVFTYGNITKVDREKLKLPKNHGNDATAIALVRTGILSVKDKEPVLYIQQVRRKKRSLHEETPRKGRKKPNRTATRNSKNTKAVTVTKRRDGKKVSVTACLFDRVELNGKKGWITGFTGKACRIVDTEGNYVAATDKYTQVNISSIRILHHTGNWVTGLKRNVGKR

SEQ ID NO: 15357 - protein, 476 aa, unidentified
LEVVDTEGVSHPGLPGKYKHKGGQLMSVAVISKTGERLMPTSEYRARKLLKSGKAIKHSYHPFTIQLTEKGTGDIQPIELCMDTGYIHIGISVKSEKHEYLAEQIDTLTDERNRHDACRMYRRQRRGRRRYRQDRFNNRKRDQGWITPSLEHKKEIHIQAISRINKVMPITDITMEMGNFDTQVLKAKEEGKPLPQGAEYQHGERYGIATLREAVFARDGYKCQCCGRTIKDGAILHVHHIKYRSQGGTNSMSNLATVCDKCHTPKNHKPGGKLYNWKPKLPSFKGATFMTTIRWQLYNEVKALFSDIDIYITYGAATKERRRELDVDKSHVNDAFVMGQFHPKHRSKPLCYKKKRRNNRCLEKFYDAKYIDIRDGKKRSGQELFNGRISRNRKKDSENLHQYRQQKVSTGRRTIRKNHYVIQPHDIVIFNGEQFETSGCHNNGTRAILLPQKKSVSIKKLNIHRYAGGYFKSAFN

SEQ ID NO: 15358 - protein, 438 aa, unidentified
MNQVFVLDTTKQPLNPVHPGYARLLLKQGKAAVYRRYPFTIRLSCRVEQPILSPLRIKVDPGSKTSGLALVNDASGDVVWAAELTHRGEQIKRDLDRRRAIRRKRRQRKTRYRKPRFTNRRKRRGTLPPSLESRVCNVLTWVCRLMKVCPVTNISQELVRFDTQALETPDIEGAQYQRGQLSGYEVREYVLLKWKHQCAYCDARDVPLELDHIDPRSRHGSNRVSNLTLACTPCNQRKSNQDVRQFLRDEPERLARILAQMKAPLRDAEAVNATRWMLNARLKTLGLPVECGSGGRTKCNRITRELPKTHWLDAVCVGRSTPESLIIKNIVPLQIRATGHGSRQMCRMDKYGFPRTGSKQHKRVQGFQTGDLVRAVVTSGTKQGTYVGKVAVRSRGTFNISTAHGVVTDIPHRFCVLVARSDGYSYQQGKEAAFPPFA

SEQ ID NO: 15359 - protein, 423 aa, unidentified
MLVYVLKQNGQPFMPTERFGKVRRLLKERKAKVVRREPFTIRLLYESETDVVQECYCGVDTGSKHIGVAVVGNDKVLYQSQTELRSDIKKKMNRKRASRRNRRNRKTRYRKPRFLNRRNSIREDKLPPSVKHKIQAHIDEIEFCKKILPISDLILEVSQFDTTLMKSPSLINEKIKHWGYQQGFNYGYSSRRSAILHRDNYTCQCCGKKNCRLEVHHIKFKSNGGTDDEENLITLCEECHKGVHAGIVVLNKKPKRSKGLKHATHMSTIRSRLLREYPDAIETFGFVTSENRNHLKLKKDHYIDACVIAGGGLEFKELDVIFYKRRVSKGDYRLTRGIRGEQKLPTGKLCGFRKFDKVKYFGEKYFIKGRVSCGSVLLMDIFGNKVDFSSMPRGYKTPKMSNCERISARRSILCITRELENEE

SEQ ID NO: 15360 - protein, 470 aa, unidentified; identical to SEQ ID NO: 8916

SEQ ID NO: 15361 - protein, 525 aa, unidentified
VSLPVKQVNRDKTSTGNSFKAPQRARRRTCRSAGAEQGRNCHLERNIIMIIALDKNKRPLGFLTERRCRILMERKRAVLYRVFPTVVILMDMDVRKLRDLPSYRIKIDPGSKYTGIAIVRNDTDELVYAMQIEHRGDAVRAGLQKRKMARRNRRSRETGYRRAKWGNRCLSDGDKKSYNSSRKDGWLPPSILSVADNVLTWVQRLSRWVNITDCSLEAVRFDTQLLENPNIKGEEYQHGTLFGYEIREYLLEKFGHTCQYCGGESGDPVLEWEHIHPKSRGGSNRVKNALLSCSSCNRDKDNQTPEEWIGQVSFRLSHEKGKKRELDSKRIELIQKVIDGKPEGQPMRYAAWVSSSRRYLENHLFQIFRDVECSSGGRTKYNRTKLGYPKEHHYDALCIGTVPEKGYHDRTNGYYLYAKATGRGTRLRGTLNKCGIIVTKWTSRKKNFFGFQTGDIVVAEVPHKIPRPYKYEGRFVGRVMVRASGSFDIRTTGGRLATVKAGFCRLLQANSGCAYSMERTIPLDH

SEQ ID NO: 15362 - protein, 474 aa, unidentified; identical to SEQ ID NO: 9173

SEQ ID NO: 15363 - protein, 463 aa, unidentified; identical to SEQ ID NO: 3502

SEQ ID NO: 15364 - protein, 424 aa, Succinivibrio sp.
LQDLAYSKKLQLFKGLNMVYVLNCKGVPIMPTTRHGMVRRLLKEHKAKVVKRCPFTIQLSYECANITQPITLGVDTGYENVGISACTEKKVLFEAKAKIRTDIVKLLSARKEARRTRRNKKTRYRKARFLNRGIEKGWLPPSIRAKVESHLGLVAKAHEILPIGKIVVEIASFDIQKNKNPDIKGAEYQQGDQLGFKNVKAYVLARDGCTCRCCKGRSKDKILRVHHLESRLIGGDAPNNLVTLCNSCHTKFHKGLISLDDIKRGKSFKAETFMGLMRNFFFKEFCNKYPCVKSTYGYITKHLREKYHLKKDHHVDARCICGVPQALPSNVYLIKKVRCHNRQIHKCTTLKGARRRLNQAPYTVKGFRLFDKVKVGEQVGFIYGRRQSGSFDVRTVYGERINGSISYKKLQLIETRKSWLIERC

SEQ ID NO: 15365 - protein, 416 aa, unidentified; identical to SEQ ID NO: 6135

SEQ ID NO: 15366 - protein, 413 aa, unidentified; identical to SEQ ID NO: 3220

SEQ ID NO: 15367 - protein, 430 aa, unidentified; identical to SEQ ID NO: 4817

SEQ ID NO: 15368 - protein, 465 aa, unidentified
MSTCVCVLSNSGERLMPTFRLGKVRRLLKDGKAKIVKHHPFTIQLLYDSKTNTQPIEICEDVGYNYIGISVKSQSHEYVSAQYDTLQDEKDCHDDCRRMRHTRRNRLRYRQARFDNRKRDDGWLAPSLEHKKELNVNVIKMYCEVMPIAHATVEVGSFDTMLVKAIEEGKVTPEGADYQKGPRYNLATLREAVFYRDNYTCQVCGRKANEGAILHVHHMFYWMSRHGNSLSELVTACEKCHTPANHQKGGKLYGFGENIKLANLSGAAFMNTVRWQIVNELYAAFGKPFVTFTYGAMTKEKRIALHLEKSHNNDAYAMGSFHPADRCAFEHYEKVKRNNRILERFYASQYIDIRTGEVTTGKSLFNGRINRSHKKDSENLHKYRGKRIRKGYRALRRKKVALNPGDLVSLNGETLIVHGTHTNKKGTVRVEFKTPSKGGKKSASLKNVEIVKTANSMHSAWKKVS

SEQ ID NO: 15369 - protein, 468 aa, unidentified; identical to SEQ ID NO: 2405

SEQ ID NO: 15370 - protein, 442 aa, unidentified; identical to SEQ ID NO: 7529

SEQ ID NO: 15371 - protein, 414 aa, unidentified
MPCSPAKARLLLKEKKAIVKRRTPFTIQLTIATGETKQPVTLGVDAGYKHVGLSASTEKAELYASEVELRQDVSDLLSARRALRQSRRNRKTRHRAPRFNNRLRTKRKGWLAPSVENRINAHLSRIEAVLRLLPVTKITVETASFDLQLLKNPDISGKEYQEGEQLGFWNIREYVLCRDGHVCQHCYGRSKDPVLNVHHLESRRTGGDSPGNLITLCETCHKALHRGEIKLKAKRGRSFRAETFMGIMRWGVLNRLKASHPKLEVHNTYGYRTKHARIANGIAKSHCADAFCIAGNFGAKRLGEFFFQKQTRRNNRQIHKLSILKGGIRKRNQAPFEVNGFRLFDKVACQGEEGFIFGRRSSGFFDVRKLDGTRISAGISCKKLHLLEKRRTYLTEIRKEEALPPLPEGRGLRA

SEQ ID NO: 15372 - protein, 420 aa, unidentified; identical to SEQ ID NO: 5809

SEQ ID NO: 15373 - protein, 461 aa, unidentified
VQPLYLGIDPGRTNIGVAVVKANGTAVFTAHLETRNKEVPKLMQDRKKARRARRTNGRRCRRQRRAKANGTISKKCVKQDTAQNGSVSKRAKEIGIIKRRLPGCEKDVLCIGIKNKEAKYTNRARLEGWLTPTANQLLQTHINLVKKIQKFLPISDAVLEVNKFAFMRLDNPDIQKWQYQQGPLYQKGSLENAVSEMQEHHCLFCDKPIDHYHHVVPQSENGSNTIANIVGLCAEHHNLVHKDAAWQKKLAEEKVGLNKKYGALSVLNQIIPALTNKLSVLFPKHFFVTAGKSTHDYRATHGVSKDHWLDAYCIACSVLPSDVCDSNINNHMPYELKQFRRHARRALNNENMNRVYTLNDKAVAINRHKATEQEAASLEEFRKEHPNDVCKLKVKEHHPTYRNMNRNYPGSVFLVGKQIHVMQGIASSKDGKATKYNDTRATTIAAGKCKFVAKNSGILFV

SEQ ID NO: 15374 - protein, 380 aa, Arthrospira sp.; identical to SEQ ID NO: 3196

SEQ ID NO: 15375 - protein, 442 aa, unidentified; identical to SEQ ID NO: 4467

SEQ ID NO: 15376 - protein, 414 aa, unidentified
MPCSPAKARLLLKEKKAIVKRRTPFTIQLTIATGETKQPVSLGVDAGYKHVGLSASTEKAELYASEVELRQDVSDLLSARRALRQSRCNRKTRYRAPRFDNRIRTKRKGWLAPSVENRINAHLSRIKAVLRLLPVTKITVETASFDMQLLKNPDISGKEYQEGEQLGFWNVREYVLFRDGHVCQHCHGRSKDPVLNVHHLESRRTGGDSPGNLITLCETCHKALHRGEIKLRAKRGQSFRAETFMGIMRWEVLNRLKASHSKLEVNNTYGYLTKHARIKSGITKSHCSDAFCIAGNLGAKRLGEFLFQKQTRRNNRQIHKLSILKGGIRKRNQAPFEIKGFRLFDKVVCKGEEGFIFGRRSSGYFDVRKLDGTRISAGISYKTLHLLEKRQTYLTEIRKEEALPPLPEGRDLRA

SEQ ID NO: 15377 - protein, 414 aa, unidentified; identical to SEQ ID NO: 2588

SEQ ID NO: 15378 - protein, 513 aa, unidentified
LKKEAAGHRQGKDCRPVRYGPPYRAGMPDGRRKPERKHMVAVVTSTGKPLMPTSAYRARKLLKKGRAVIFKYRPYFTIQLVDRADGEVQEVEYKSDTGSVHVGISVCTEKKELLSEQRDLLENEPEHHNDRKKNRRTRRNRKRYRKPRFDNRKKKPQEGHEKWLPPTLLHKMEVQVRLFREFCRVVPVTSACFEMGKFDTQALKAVSKGEPVPEGEGYQKGERYGTDTLRAAIFLRDGHTCRFCGRSVKDGAILHVHHVGYWKGDRTNRPANLASACEQCHTPANHGKNGLLYGKEPEFKTLKDASYMTSVRWIMLDEIKKAAPGVQVSVTYGVTTKRKRQELHLPKSHVNDAFSMASFHPKKRSDTEYWKKIPRHDRVLQKFYDAVYLDTRDGSEKKGSELSNGRISRNHKKDSENLHQYRGHKVSKGHNSIRRGASSLKPGSIVMYKGEKMTVHGTHTRYVKGKDGKTAKKVNVQFTCPASDGKKSASLEKCTPVSRVYNTGWKRYWPDKK

SEQ ID NO: 15379 - protein, 416 aa, unidentified; identical to SEQ ID NO: 11239

SEQ ID NO: 15380 - protein, 431 aa, unidentified; identical to SEQ ID NO: 4463

SEQ ID NO: 15381 - protein, 430 aa, unidentified; identical to SEQ ID NO: 13519

SEQ ID NO: 15382 - protein, 280 aa, Lamprocystis sp.
MAVFVLDRRGKPLMPCSEKRARLLLTRGRARVHRVVPLQNPQISGVAYQQGTLAGYEVREYLLEQWGRRCAYCTGDGVPLEIDHITPRSRGGSDRVTNLTLACHPCNQAKGNRSAAEFGHPEIEAKAKQSLGDAAAVNSTRWSLLNALTATGLAVETGTGGRTKWNRTRLGVPKTHALDAACVGVVEGVTGWVAPVLSIRCTGRGAYQRTRVTQDGFPRGYLMRHKQVRGFQAGDLVRATVPSGKKAGVHMGRVAVRATGSFNIQTPQGVVQGIGYRHCC

SEQ ID NO: 15383 - protein, 414 aa, unidentified; identical to SEQ ID NO: 4492

SEQ ID NO: 15384 - protein, 406 aa, unidentified; identical to SEQ ID NO: 6897

SEQ ID NO: 15385 - protein, 431 aa, unidentified
MPNKVYVINKHGRPLMPCSPAKARHLLDAGKAKVKKRTPFTIQLVYGSSGYTQEVILGVDAGSKTIGVSASTKKEELFAANVIPRNDVVDLLSTRREFRRARRNRKTRYRKPRFDNRVRSKHKGWLAPSVEVKIQEHITTIRRVYGILPVSKVVVETAEFDLQLLKAIADGKPVPQGEDYQKGEMYGHYNVRQYVLWRDDYTCQCCGAHATKKKEVRLHVHHLESRKVGGDAPDNQVTLCESCHEKLHKGLIAEKDFKKRKRRSTRDATFMGIMRKTLMQRLCSELPIPVVKTRGYITKATREKLLVLPKSHTNDALAIAQGKRGFNVGYLPEIAQIDKIYTIRPVRHHNRQLHKAAILKGGIRKSNQAGKYVFGYRLFDKVQFNGQDCFIWGRRTSGYFAVKTIDGKVIHNSASFKKLNLVERASNYLIA

SEQ ID NO: 15386 - protein, 512 aa, unidentified; identical to SEQ ID NO: 14331

SEQ ID NO: 15387 - protein, 630 aa, Nocardiopsis sp.; identical to SEQ ID NO: 11878

SEQ ID NO: 15388 - protein, 396 aa, unidentified
MPNKVYVINKHGRPLMPCSPAKARHLLDAGKAKVKKRTPFTIQLVYGSSGYTQEVILGVDAGSKTIGMSASTTKEELLSAEVKPRNDVVDLLSTRREFRRARRNRKTRYRKPRIDNRVRSEHKGWLAPSVEVKIQEHITSIKRVCRILPVSKVVIETAEFDLQLLKAIADGKPVPQGEDYQKGEMYGHYNVRQYVLWRDDYTCQCCGAHATKKKEVRLHVHHLESRKVGGDAPDNQVTLCESCHEKLHSELPIPVVETRGYITKATREKLLVLPKSHTNDALAIAQGKRGFNVGYLPEIAQIDKICTIRPVRHHNRQLHKATILKGGIRKSNQTEKYVFGYRLFDKVQFNGQDCFIWGRRTTGIFTIKTINGKMIKDGISFKKLKPVEKSTSYLIA

SEQ ID NO: 15389 - protein, 528 aa, unidentified
  REGION 1..528: note = Ga0373628_0055400
MFTRESQLSLGKVLETGYVGEKAKVAPVDASSVHGNVSARSRQAGSSTKRARTDGLSLTVPRGDAAPAQSGASPAKAEKASGNARVFVLSKHKAPLMPTTSARARELQKKGRAVVVRLFPYTIRLKDRDGGKLQPIVLKFDPGSKYTGIALIREADGTVHPLWLSELQHRGRQISEALTGRKGCRKGRRSRNLRYREPRFDHRTKPIGWLAPSLRHRVESTMSWVNRLHQFVPLIRIDCELVRFDMQLLENSEISGIEYQRGELAGYEVKEYLLEKWGRACVYCGKEDVPLQREHIQAKARSGSNRSSNLTLSCGPCNQKKGAQPIEIFLKKKPTLLAKILATAKKPLRDAAAVNATRWALVAALQETGIPVCTYSGGRTKWNRSRLGIPKTHALDAVCVGVVTKIGRWELSTLCIKSMGRGAYQRTRVTSEGFPRGYLTRQKRIFGFQTGDMVRADVVKGKKIGRYTGRVAVRSTGSFNIQTSASVVEGISHKACRLLARGDGYFYALRTEFLHAVNDGVSTPLEKT

SEQ ID NO: 15390 - protein, 406 aa, unidentified
MVYVQDINGKPMMPTTRHGKVRRLLKDKKAVVVNLCPFTIKLMYVTSDYKQEIVLGVDAGTKHVGLSATTKSKELYSSEVILRNDIVDLLSTRRELRRARRNRLRYRKPRFDNRIKSRRPGWVAPSVKYKVDAHIRVIDNVCSILPVSRIVIEVAQFDTQKIKNPNISGKEYQEGDQLGFWNVREYVLARDGHKCQYCKGKSKDHVLNVHHIESRKTGGNSPSNLITLCETCHKEYHKGNIDLKIKRGSSLRDAAVMGIMKWRLYEELRSKYDRVSMTFGYVTKYNRINHDIEKSHVSDAFVISKNFNAIRLGYYYKVRLVRRHNRQIHKQKIPKGGIKRLNQSPFEVFGFRLFDRVMFENNCYFIFARRKTGSFNIRDINGKNKRDITYKKLKLSRCKRFMIEKS

SEQ ID NO: 15391 - protein, 460 aa, unidentified
MSKVFVLDAKKRPLVPTHPARARQLLNKGKAAVYRRYPFSIILNREVKQVDFQPFRLKIDPGSKTTGLAILSACVANVRCVDTTPSPSNFPNDNTGEVIWAAELQHRGQQVKASLGSRRAVRRSRRNRKTRYRKPRFNNRKRPNGWLPPSLMSRIFNIETWVTRLRKLCSITAISLELVKFDTQVMQNPEISGVSYQQGELFGYEVREYLLEKFGRKCAYCGRENIPGLEVEHIIPKTRGGSDRVSNLTIACKKCNDKKGTQTAEEFGYPQVQAQANKPLRDAAAINATRWEIYRRLVATNLPIEVGTGGRTKFNRIKRGLDKTHWLDAVCVGKSTPQTIKIEAIQPLGIVATGHGSRQMCRISKFGFPRTTAKRFKRVHRFQTGDMVKAVVLTGKKVGTYVGRVAVRASGSFNIKTKNGTIQGISYRYCQLLQRADGYSYEEGGTALPPTPLNGAGFRA

SEQ ID NO: 15392 - protein, 238 aa, unidentified
MVYVQDIDGKPMMPTTRYGKVRQLLKDKKAVVINTCPFTIKLMYKTSDYKQEIVLGVDAGTKHVGLSATTKSKELYSSEVILRSDIVDLLSTRRELRRTRRNRLRYRKPRFDNRIKSKRTGWVAPSVRHRIDAHIRVIDNVCSILPISRIIVEVAQFDTQKIKNPNISGNEYQEGNQLGFWNVREYVLTRDGHKCQHCKGKSKDPILNVHHIESRKTGGDSPSNLITLCETCHKEYHK

SEQ ID NO: 15393 - protein, 462 aa, unidentified
MSVLVIGRNGRALMPTNPRKARLLLKKKTASVICRHPFTIQLLYKTGCATQEGSIGIDTGSQHIGVGITCGDRVILKDEHALRSSMEKRSLLATRAVMRRGRRYRKVRYRKPKWRHHTKRMYFEKANRRGQHWRKVKTTTQSPRPKGWLPPSLQSKCDHHFRIIDRYLKYLPDPITRNLVIETGRFDMARMNDPTIHGEMYQRGPMYDAENLRAYIFARDNYQCACCKAKAGTTRKADGTTVKLVAHHILFRSRGATDNPKYIISVCDHCHTTKAHQPGGILYSWMENNKKVARGLRDATFMNILRKRLFARYPQAAFTYGNITAADRKKLCLPKSHANDAVAISLFGKETSTVKNICQTMHYKQIRKSKRSLHEAIPRKGRKNPNTKAVRNKKNTTQVNGFKLWDSVLADGKKLFICSFTGTSAYLIDKNGCYISQPGKTYKQWPLSKLKRLHPNGNWLMA

SEQ ID NO: 15394 - protein, 428 aa, unidentified
LKVFVLNMRGQPLMPCSPAKARHLLMDKKAVVKRRTPFTLQLTIATGETKQDVTLGVDAGAKHIGLSASTEKEEVFASEVELRQDITGLLAARLAFRRARRHRKTRYRAPRFLNRVHSKHRGWLAPSVENRIQAHMSRIDAICGLLPVTKIVIETASFDIQKIKNPDVEGTDYQQGDQLGFWNVREYVLFRDGHVCQHCRGRSKDKVLNVHHLESRQTGGDAPNNLITLCETCHKAYHAGKIKLKVKRGQSFREEAFMGIMRWTMLDRVRKAHPDLPVENTYGYLTKNTRITLGLPKTHCIDAYCIAGNLNARRRGVYLYQRQMRKHNRQIHKCKVLSKTLKDGTKVGYRKLNQTPYLVKNFRLFDKVRCFGQTGFIFGRRTSGHFDVRALNRTRLSDCVNSKKLTLLEKRRTFLTELRKEDGASSPV

SEQ ID NO: 15395 - protein, 460 aa, unidentified
VQLRQSDAGQSFVLCYLSDNQKGRHNHMYVYVINKHGQPVMPCRPRMARVLLQDGKATVVKQVPFTIRLLYGSSGYKQPVSLGMDAGSRHIGIAVTTEKKVLYAEELKPRNDVVKLLSVRRQNRRARRSRKTRCRQARFDNRVSSKPKGWIAPSVEVKIQEHISAVMRIQKMLPVSEIHVETAEFDTQRLKAMEEGRPVPVGTDYQKGEMYDQYNVRQYVLFRDDYRCQCCGKHGDGVKLHVHHKESRQTGGNAPNNLITLCEDCHKALHAGTVQLPDGRAKRGRSHRDVAFMGIMRKAMVSQLRNIVDIPVTETYGYITKYYRELYHVEKSHISDAIMISRNFKAEPDDTYYVSKAVRHHNRQLHKNTILKGGVRKRNQAPHIVRGFRLFDLVRYENGVYYVFGRRKSGFMDIRTLDGKKINKGSISNKRLKFVSTSKGMLVERRMAIPLADKSASFLA

SEQ ID NO: 15396 - protein, 451 aa, unidentified
MSVAVISKTGERLMPTSEYRARKLLKSGKAVKHSYHPFTIQLTERKTGDVQPIELCMDTGYIHIGISVKSEKHEYLAEQIDTLTDERIRHDACRMYRRQRRGRKRYRKPRFNNRKRDKGWIAPSLKHKKDIHVQAISRINKVMPLTDITMEMGNFDTQVLKAKEEGKPLPQGACYQHGERYGTATLREAVFSRDGYKCQCCGRTIRDGAMLHVHHVKYRSQGGTNSMANLATVCDKCHTPKNHKPGGKLYNWKPKLPDFKGATFMTTIRWQLYNEVKSLFPDINVHITYGAATKEQRRELNIDKSHVNDAFAMGKFHPKHRANAVLYKKKRRNNRCLEKFYDAKYIDSRDGSKKTGQELFNGRINRNHKKDSENLHQYRLQKIKAGKRTIRKQHYSIQPHDIIMYKNRKRETSGCHCNGTRVVLLPDKKQQLIQKVKIYKYAGGYFKSAFN

SEQ ID NO: 15397 - protein, 436 aa, Acrocarpospora sp.
VHPVVFVLDAQGRPLDPCHPARARKLLASGRAVVARHTPFIIRLKDRTVDQSTVGGAHVGIDPGSRHTGIAVFTSHDGRRSGLYAIQLDHRGAAIRDKLARRAAYRRGRRSRNLRYRARRFNNRTRPQGWLAPSLRHRLDTTLSWIDRLTRWVPLRAVHVERVAFDTHQLSAGKPLSGVEYQQGTLAGYEIRQYLLAKGGRRCAYCGAGGVPLNIDHIRPRSRGGSDRVSNLTLACVPCNQAKDNLPVQEFLAGKPDALARVEAQAKAPLRDAAAVNATRWALWHALTATALPVHTGSGGRTKWNRSRTGAPKSHSLDALHVGHLDQVTGWPGTVLIVTATGRGSYARTRTDKYGFPRLRLPRLKQVHGFRTGDLVRARVPSGTNAGVHTGRVAVRTSGRFNLTTAHGTRQGIGYRHVHLLQRADGYAYTVRGEES

SEQ ID NO: 15398 - protein, 465 aa, unidentified; identical to SEQ ID NO: 12101

SEQ ID NO: 15399 - protein, 435 aa, unidentified
MFVLVLDTNKKPLSPCHPAIARKLLKQGRAAIFRRFPFMIILKEAKSDARPIGLRLKIDPGAKTTGFALLLENGNTGTVLWAAELNHRGFAIKKLLAKRRGLRRGCRNRKTRYRACRFLNRRRPKGWLPPSLQSRVENITTWVNRLCRLAPIGAISMELVRFDTQKLQNPEISGIEYQQGELFGYEIREYLLEKWGRKCAYCGKVDVPLEVEHIVPKSRGGTNRVSNLTLACHACNWKKDNRTAEEFGFPDIQKQAKKPLRDAAGVNVTRWQLYERLKATGLPVETGTGGQTKYNRAQRNLPKTHWLDATCVGKSTPGRIVIPARPILVIAAAGHGKRQRCITDKYGFPIKHAPKAKFFIGFQTGDIAKAMIPKGKYAGTHTGRIAIRFRPSFKLNGFDVHPKYLKIIQRADAYEYQLGAQVSSPRMNPGAPTCA

SEQ ID NO: 15400 - protein, 423 aa, unidentified
MVYVLNIDGQPLMPTDRHGKVRHLLKDGRAEVVKRCPFTIRLLYDSTHYTQDIVLGVDAGSKHIGLSGTTETKELYASDVELRNDIVDLISTRRQNRRFRRNRKTRYRKARFLNRLSDKKDWLAPSIRQKVDTHMTVVSRVCKILPVTKIIVETASFDIQKIKDPDISGTGYQHGEQLDFWNVREYVLFRDGHTCQCCKGKSKDPVLNVHHIESRKTGGDAPNNLITLCETCHKGYHSGAVQLPKAIHRGMRFKDAAFMGIMRWAFYNKLKEVYEPQDIEVSMTFGYLTKNTRIRHYLPKEHYIDARCISGHPEAIPSNEVFYQKKVRCHNRQIHKNTILKGGIRKRNQAGYLVKGFRLFDKVAYEGREYFIFGRRQSGFFDLRNLSRCKVNKGSLSYRKIRFLEPRQYYLCERRVMDTQGCA

SEQ ID NO: 15401 - protein, 415 aa, unidentified; identical to SEQ ID NO: 3582

SEQ ID NO: 15402 - protein, 278 aa, unidentified
MVYVVANDGQPLMPTERHGKVCRMLKSGMAKVVKKCPFTIQLQYESERNVQPVSLGVDAGSKHIGISATTKTKVLYESDVELRDDIVKLLATRRQLRLSRRSRKTRYRPVRFDNRKRKEGWLVPSIRQKIGSHLTVVANVCKILPINQIIVETASFDIQKIKDPEIQGIEYQQGEQMDFWNIREYVLFRDGHTCQCCKGRSKDKILNVHHIESRKTGGNAPNNLITLCETCHKGYHNGTVILPKNIKHGMQFKDAAFMGIMRWTFYNTLKEQYEPDIP

SEQ ID NO: 15403 - protein, 408 aa, unidentified; identical to SEQ ID NO: 6548

SEQ ID NO: 15404 - protein, 523 aa, unidentified
VEETYRKGGGYMSTIYVLNKDGKPLMPTTRGGHVRHLLKEQKARVIRTKPFTIQLLYATDDVVQPLYLGIDPGRTNIGVAVVKADGAAVFTAHLGTRNKEVPKLMKKRKESRRARRTNGRRHRRQRRAKANGTLSTKCVKQDTAQNGSVSKRAKEIGVIKRHLPGCEKEILCIGIKNKEAKFNNRTRPEGWLTPTANQLLQTHVNLIKKIQKFLPISDVVLEVNKFAFMQLDNPNIRKWQYQKGFLYQKENLENGVSEMQEHHCLFCKKPIDHYHHVVPQHKNGSNTIGNIVGLCTKHHDLVHKDTAWQEKLAKKKTGLNKKYGALSVLNQIIPALTKELGSLFSKHFFVTTGKSTYDYRAAHNVSKDHWLDAYCIACSVLPNDVCDSNINNHVPYELKQFRRHDRRALHKENMSRVYTLNGKKVATNRHKAIEQTTDSLEEFRQSHSDDVCRLKVQEHHQTYRNTNRNYPGSVFLVGKRVHVMQGTSGSHNGKADGYYDTKGNSYPSSKCKFVAKNEGIVFA

SEQ ID NO: 15405 - protein, 469 aa, Nitrospira sp.
MCRMAHVTAERREQRSNPIQSQVFVLNREGQTLMPCHPARARQLLKEGRAVVHRAVPLVIRLKNRTEAIVQPVRLKVDPGSKATGMALVRHQPPASITVLSLFELQHRGRQISESLTARRHMRRRRRGNLRYRAPRILNRVRSAGWLPPSLQHRIDTTLAWVKRLQRFAPIKDISCELVRFDMQAMQNPEISGTEYQQGTLAGYEVREYLLEKFGRQCVYCEAKDTPLQIEHLQPKALGGSNRISNLVLACQCCNQKKAAQPIEIFLAHQPETLRRIQDQAKRPLKDAAAVNTTRWALAQALHSTGLPVELASGGLTKYNRQRLNVPKTHALDAACVGEFSVLKGWQRNTLELRCTGRGRYQRTRLSKNGFPRCHLMRHKLVNGFQTGDLVKANVPSGKKSGTYQGRVAVRVSGSFNIWTGKEFIQGISYRYCKLVQRGDGYGYFMQTLITHPKEARARSTHIVLSPTL

SEQ ID NO: 15406 - protein, 512 aa, unidentified
MSTIYVLNKDGKPLMPTTRGGHVRHLLKEQKARVARTKPFTIQLLYETDDAVQPLYLGIDPGRTNIGIAVVKADGTAVFTAHLETRNKEVPKLMQDRKKARRARRTNGRRCRRQRRAKANGTISKKCVKQDTAQSKNPSKRAKEIGIIKRRLPGYKKDVLCIGIKNKEAKYTNRTRPEGWLTPTANQLLQTHINLVKKVQKLLPISDVVLEVNKFAFMRLDNPDIQKWQYQQGPLYKKESLESAVSEIQEHHCLFCKKPIDHYHHVVPQHKNGSNTIGNIVGLCSEHHNLVHKDAAWQKKLAEEKVGLNKKYGALSVLNQIIPALTNKLSVLFPKHFFVTTGKSTHDYRESHSVSKDHWLDAYCIACSVLPSNVCDSNINNHVPYELKQFRRHDRRALHKENMSRVYTLNGKAVATNRHKAIKQTTDSLEEFRQSHPGDVCKLKVKEHHPAYRNLNRNHPGSAFFVGEQAHVMQSIVASKDGKATRYKDTNVNKIAAGQCRFVAKNEGIVFT

SEQ ID NO: 15407 - protein, 448 aa, unidentified
MSTGLRAVQAEPAGIRKGDALKVFVLNMRGRPLMPCSPARARHLLKAGKAVVRRRTPFTIQLRIATGETKQSVTLGVDAGAKHVGLSAATEKEEVFASEVELRQDITGLLAARLLLRRERRQRKTRYRAPRFLNRVRSKHKGWLAPSVENRIQAHMSRIDAICGLLPVTKIVIETASFDIQKIKHPDVEGTDYQQGDQLGFWNVREYVLFRDGHVCQHCHGHAKDKILNVHHLESRQTGGDAPNNLITLCETCHKACHAGKIKLKVKRGQSFRAEAFMGIMRWTLLDRVRKAHPGLPVENTYGYLTKNTRITPGLPKTHCVDAYCIAGNLKAVRRGVCLHQRQVRKHNRQIHKCTVLSKTLKDGTKIGYRKLNQTPHLVKSFRLFDKVRCLEQTGFIFGRRSSGYFDVRRLDGVKLSSGISYRKLTLLEKRSTYLTELRKEDGASSPV

SEQ ID NO: 15408 - protein, 422 aa, unidentified; identical to SEQ ID NO: 9550

SEQ ID NO: 15409 - protein, 420 aa, unidentified; identical to SEQ ID NO: 6693

SEQ ID NO: 15410 - protein, 466 aa, unidentified
MPVCSTLARGIAPPARAEHVTGISPKNRKVHFFMSTTVFVLDKKHRPLMPCRPARARRLLRAGRARVVKRFPFVIRLVDRTVEQSEVQPVLIKLDPGSRETGAAVVRDDGKKRHHALAFFVIEHRGGAIRDALKARSAFRRRRRSQNLRCRSPRFLNRVKPKGWLPPSLRHRVETTLSFVRRMCRYLPVSGIATELVKFDSQKLQNPEVSGVEYQQGTLFEYEVREYLLEKFGRKCVYCGAEGVPLNIDHVVPRAKGGSNRVSNLVLACMSCNQKKGARSLEDFLKGKPKVLARVRRELKTPLRDAAAVNATRWVLFNELKATGLPVETGSGALTKLNRHAFGVEKEHWLDALCVGRLNGVVTRKGLNVLEIRCMGRGSRQRTRLTKYGFPRGYLMRQKCVHGFATGDMVEANVPKGKKAGLWRGRVAVRVSGSFNIQTPKGVIQGVGWKHCRLISHNDGYGYAWL

SEQ ID NO: 15411 - protein, 504 aa, unidentified; identical to SEQ ID NO: 3854

SEQ ID NO: 15412 - protein, 425 aa, unidentified; identical to SEQ ID NO: 3148

SEQ ID NO: 15413 - protein, 512 aa, unidentified
MSTIYVLNKDGKPLMPTTRGGHVRHLLKEQKARVVRTKPFTIQLLYETDDVVQHLYLGIDPGRTNIGVAVVKTDGTAVFTAHLETRNKEIPKLMKKRKDSRRARRTNGRRCRRQRRAKANGTISKKCVKQTTAQNGSVSKRAKEIGVIKRHLPGCEKEVLCIGIKNKEAKFSNRVKPEGWLTPTANQLLQTHINLVKKIQKFLPISDVVLEVNKFAFMQLDNPNIQKWQYQQGPLYQKASLEEAVSEMQEHHCLFCKKPIDHYHHVVPQHKNGSNTIGNIVGLCAKHHDLVHKDTTWQKKLAKKKTGLNKKYGALSVLNQIIPTLTKELSSLFLKHFFVTNGKSTYDYRAAHGVSKDHWLDAYCIACSVLPNDTCDKTINSRVPYEFKQFRRHDRRALNNENMSRVYTFNGKMVATNRHKATEQTTDSLEEFRQRQPNDVCNLKVKEHHPTYRNMNRNYPGSVFLIGKQVHVMQGIAGSKNGEATTYKDTNANSIAAGKCKFVAKNSGILFV

SEQ ID NO: 15414 - protein, 414 aa, unidentified; identical to SEQ ID NO: 7107

SEQ ID NO: 15415 - protein, 312 aa, unidentified
KFLPISDVVLEINKFAFMRLDNPNVQKWQYQQGPLYQKASLEEAVSEMQEHHCLFCKNTIDHYHHVVPQHKNGSNTIGNIVGLCAKHHDLVHKDTSWQEKLAKKKTGLNKRYGALSVLNQIIPALTKELSSLFPKHFFATNGKSTYDYRAAHGVSKDHWLDAYCIAGSVLPNDACDNNINNRVPYELKQFRRHDRRALHKENMSRVYTLNGKKVATNRHKAVEQATDSLEEFCQNHPDDVCKLKVKEHHPEYRNPKRNFPGCVFLVGKHTHVMQGTSGSHNGKADGYYDTNGNSYSSGKCKFVVKNEGIVFT

SEQ ID NO: 15416 - protein, 406 aa, unidentified; identical to SEQ ID NO: 6526

SEQ ID NO: 15417 - protein, 451 aa, unidentified
MQKLLVELKNTLGDAPQVPCSVSEVLNRDKSLSVPYKVLANNSSDEDQHSGKSRQDLRVPVLNMRGKPLMPTTPGKARILLQQRKATVIQRSPFTIQICYLTGNYTQNIKLGIDAGYSTIGFSTVTEKSELLSGELTLRKRVSKFIEQKRHYRRARRNRLWHRKPRFNNRSKLEGWFAPSIQHKLETHLRLIKKLAKILPITKIRVEVASFDTHKLQNPEIKGVEYQQGELQGYEVREYLLEKWGRKCAYCGKSNLPLEIEHIVPKIRGGTDRVSNLTLACHKCNQKKGDKTASEFGYPEIQKKAKQTLKATAFMNIVRWRLVNTLKCDWTYGYITKHDRIKFGMEKSHVNDAFVIAGGTTQSRSKPYRLTQTRRNNRSIQTNRRGYKPSIRRQMYRLHPNDLVRYIKTLYNVKGVHSYGKYVILVDKVGKLIDINVKKVELVKYGKGIQF

SEQ ID NO: 15418 - protein, 476 aa, Ferroplasma sp.; identical to SEQ ID NO: 4267

SEQ ID NO: 15419 - protein, 423 aa, Erysipelotrichaceae sp.
MLTYVLNKDGQPLMPTGRSGAKVIRRCPFTIQLLYEPETAVVQDITLGVDAGSKYIGLSATTEDRVLYESEVELRNDIVELISTRREARHARRNRKTRYRAPRFDNRTSSKKEDWLAPSIRQKIHSHLKVIADVHEILPVSKVIIEVASFDTQLLKAAEEGRPLPQGTDYQFGEQLGFYNTREYVLFRDNHTCQCCKGKSKDKVLNVHHIESKKVGGNAPNNLITLCETCHTGYHKGVVKFPSSIRRGMKFNDASFMGIMRWPVYSRLKEIYPSVELTYGYKTKNMRIENQLPKEHYIDARCISGNPKAKSDGIVYYQKKVRCHNRQIHKFKVNKDGLRKLNQAPYLVKGFRLWDKVLYNSEECFVQGRRSSGFFQLKKLDGTMISASASCKKLSLVETGKHFITERKRAIPPTVEECGFSCL

SEQ ID NO: 15420 - protein, 470 aa, Ruminococcus sp.; identical to SEQ ID NO: 2433

SEQ ID NO: 15421 - protein, 420 aa, unidentified
MQYVYVLNKHGEPLMPCSSGKARLLLKQQKARVVKRTPFTIKLLYGSTGYKQPITLGVDAGSKHVGLSASTEKRELYCEEFTPRNDVVELLSTRRQYRRSRRNRKTRYRAPRFDNRVHSKHKGWLAPSVEVKIQEHITVIKRICRILPVTLVRVETAEFDTQRLKAMLAGKPLPVGTDYQLGEMYDEYNVRQYVLKRDNYTCQCCGAHTTAKKTVKLHVHHLESRKIGGNAPSNLITLCTTCHNALHKGKVSLDSKERGKPMRDAAFMGIMRKTLMSRLREELPIPVQGTYGYITKMRREQNDIKKSHINDARCISKHPLAEPCSVCYRTKAIRHHNRQTHKANFSKGGIRKRSQMPYVVEGYRLWDKVLYKGQECFVSSRRASGSFTLKKLDGTRISKGVTFKKLRLLEPATNYLIERM

SEQ ID NO: 15422 - protein, 469 aa, unidentified; identical to SEQ ID NO: 8572

SEQ ID NO: 15423 - protein, 451 aa, unidentified; identical to SEQ ID NO: 13082

SEQ ID NO: 15424 - protein, 406 aa, unidentified
MRGKPLMPCSPAKARHMLKAGKAVVVRRTPFTIKLTIATGETKQDVTLGVDAGARHVGISATTEKEEVFASEVALRQDITGLLADRLAFRRARRNRKTRYRAPRFNNRVRSKHKGWLAPSVENRIQAHMSRIEAVCRLLPVTKIVIETASFDIQKIRNPEVEGTGYQQGDQLGFWNVREYVLFRDGHICQHCRGRSKDPILNVHHLESRKTGGDAPNNLITLCETCHKAYHAGKIKLKVKRGQSFRAEAFMGIMRWTLLDRVRKTHPELPVENTYGYLTKHKRIALGLPKTHCADAFCIAGNLKALRRGDFLFQQQTRKHNRQIHRCSILKGGVRKLNQAPFLVKGFRLFDKVRIGGQIGFVFGRRVRGTFNIRRLDKTVIGTDINCKKLSLLETRKTFLTELRKE

SEQ ID NO: 15425 - protein, 539 aa, Streptomyces sp.
MGHGPPLPAPAITFREVDPPMATFSAGQQIHRAVPPQRRALESAGADTPRIGHETARGRHVPPVAPSGEHVREETVGGSPAADGDTFRPAEAGETPRERHPSVFVLDRHGAPLQPCHPARARKLLGKGRAVVARHTPFVIRLKDRTIAESTVEGVELGIDPGSRHTGIAVFTATGGERRGRFAVRLDHRGAQIRRKLQQRSDFRRGRRTRNLRYRAPRHDNRARREGWLAPSLRHRVDTTVAWVDRLARWAPVTAVHVESVAFDTHAISSGGPLEGAEYQHGTLHGTEVREYLRTKWKRACGYCGATGVPLNVDHVRPTSRGGSDRVSNLVLACVPCNQEKTNRPVEEFARAKTRAARILAQAKVPLRDAAAVNATRWALRRALEARLPTHGASGGRTRWNRIRNHLPKTHTLDALAVGELGAVTETVNRVLIAGCTGRGTHARTRSDAYGFPRLRLPRRKRFFGFMTGDLVRACVPDGKNAGTHTGRVAVRASGSFAVRTQSGLFTARHTRFRLLQRADGYAYQATSEGQPGYLVPRP

SEQ ID NO: 15426 - protein, 452 aa, unidentified; identical to SEQ ID NO: 14057

SEQ ID NO: 15427 - protein, 456 aa, unidentified
MAIFVLDKKKQPLMPCSEKRARLLLARGRAVVHKRYPFTIRLKDRVGGETQPLRLGIDPGSKTTGLALMREPDSQQRHVLCLFELIHRGFQIKKALQQRAAFRRRRRSANLRYRAPRFNNRIKPKGWLAPSLQHRVDTVMAWVNRLSKSAPITGISQELVRFDTQKLESPEISGVEYQQGTLLGYEVREYLLEKWGRECAYCGTADTPLEIEHVVPRSRGGSNRVSNLTLSCHPCNAEKDSQTLTDFFATNKGLKKRLKANGHAADARLDRVQRQLKQPMRDASAVNATRWALFSALKTTDLPVAVSSGGHTKYNRQRLNIPKTHALDAACVGAFEKLHDWTVPTLTIKAMGRGSYQRTRLTKHGFPRGFLMRQKQVHGFQTGDMVRAIVPTGKKAGTHTGRVAIRKTGSFNIQAEYGAVQGISHKYCTLIQRSDGYGYYVTLFSNLTGEAGRAVA

SEQ ID NO: 15428 - protein, 384 aa, unidentified
MVKSGMVMRKLPMYAADKFVTCKFIRNTQARFCNRKRCPDWITPTVQHLVQTHLNIIRKISRYLPVTDIAFEVNRFAFMHMENPKAMGVDFQNGPLKGYDDVKEAICTQQHGKCLMCKKPISHFHHIVPRSRGGSDTIQNLAGLCPECHTKVHTDTTFRKDFDRKKSGQLKKYGALSALNQAVPFICKKLLEEYGEEHVHFCGGLDTSLIRTALGFEKTKKDQMHEVDAYCVGLAALEVNEVETPAFDHTFQIRQFRRQDRSIIHHQTGRSYYQGKEKVAQNRKPGFEQKTTALSQWYEEQVRIHGEKEAEKLRSQLRVEKSCRHYNDMDRFLPGAVFLYEGKRYVLSGRITNGKYLRACGQGMKNFPAAECTFIRHNAGLVFI

SEQ ID NO: 15429 - protein, 403 aa, unidentified
RLGIDPGSKTTGLALMREPDSQQRHMLCLFELVHRGLQIKKALQQRAAFRRRRRSANLRYRAPRFNNRTKPKGWLAPSLQHRVDTVMAWANRLSRLAPVTAISQELVRFDTQKLENPEISGVEYQQGTLLGYEVREYLLEKWGRECAYCGTADTPLEIEHVVPRSRGGSNRVSNLTLSCHPCNQSKDALPLTDFFATDKGLKKRLKANGHTANARLERVQRQLKQPLRDASAINATRWALFNALNATGLPVTVASGGRTKYNRQRLGIPKTHALDAACVGAFDALHAWQVPTLTIKAMGRGSYQRTRLTKHGFPRGYLMRQKQVHGFQTGDMVRAMVPTGKKAGTHTGRVAVRKTGSFNIQTEQGAVQGISHKYCTLIQRGDGYGYHFTPFTHLTGGAGQAVA

SEQ ID NO: 15430 - protein, 468 aa, unidentified; identical to SEQ ID NO: 7616
  REGION 1..468: note = Ga0373628_0100117

SEQ ID NO: 15431 - protein, 417 aa, unidentified
MPCSPAKARLLLKERKAIVKRRTPFTIQLTIATGEAKQPVALGVDSGYKHIGLSATTEKAELYASEVELRQDITDLLSARLALRRSRRSRKTRYRAPRFNNRVASKHKGWLAPSVENRIAAHLSRVEAVMRVLPVTAITVETAVFDTQLLKTPDIAGAAYQQGEQLGFWNVREYVLFRDGHVCQHCRGKSKDPILNVHHIESRRTGGDAPNNLITLCETCHKAFHRGEIKLKVRRGKSFKAETFMGIMRRTLFERLKKAHPELNVRNTYGYLTKHKRISYGIAKSHCADAYCIADNLDAKRLEGFFFQKQTRKHNRQIHKLLILKGGLKKKNQAPYEVKGFRLFDKVICKGEEAFIFGRRTSGSFDVRRLDGTRISAGINYKKLRLLEPRTTYLTEFRKEAALPLLHECRGFRAEFL

SEQ ID NO: 15432 - protein, 406 aa, unidentified
VVYVQDIDGNPLMPTTRHGKVRRLLKAKKATVVNLCPFTIRLLYDTTGYKQEITLGVDAGTKHVGLSATTKSKELYASEVILRSDVVDLLSTRRELRRARRYRLRYRKPRFNNRIKSKKDKWIAPSIRQKIDSYIRIIGFVYSILPVSKLIIEVAQFDTQKIKNPEISGKEYQEGEQLGFWNVREYVLARDGHKCQHCKGKSKDSILNVHHIESRKTGGDSPSNLITLCETCHKEFHKGKIKLKVKRSASLRDAAVMGIMKWELYDELKSLYPNIKMTFGYITKHDRINHGIEKSHVSDAFVISRNFDSYRLGYYYKQKLVRRHNRQIHKMKILKGGIKKPNQAPFKVFGFRLFDKVRYQDNVYFVYGRRTSGCFNIRDINGNNNKNPTFKKLTYISHGLISVETV

SEQ ID NO: 15433 - protein, 424 aa, unidentified; identical to SEQ ID NO: 8578

SEQ ID NO: 15434 - protein, 494 aa, unidentified
MDMVYVLNKDGKPLMATTRGGRVRYLLKEKKARVVSSTPFTIQLNYDTPDATQDLILGIDPGRTNIGVAVVKEDGQCVFSAHLETRNKDVPLLMKKRAAFRRNHRTLDRRRKRQRRAKAAGTTIDEGSVERLLPGYEKPIMCHHIRNKEARFNNRSRPAGWLTPTANHLLQTHINLIAKVAKFLPITKVVVELNRFAFMAMDNPNIRRWEYQQGSLCGLGSVEDAVYAQQDGHCLFCKKPIDHYHHVIPRHKRGSETLANRCGLCAKHHDLVHTDKAWADKLVTRKEGMNKKYHALSVLNQIIPHLMEYIGSETLYDAYATDGRSTKGFRIAKNVPKEHYTDAYCIACSILDADTKVSTPVEPFELKQFRRHDRQACIRQMVDRKYLLHGKVVAANRHKAIEQKSDSLEEFREAHGNAAVSQLTVKPHHSQCKDMARIMPGAMMDFDGIVGVFKGSSGRNNGTPNYYNSTKGERFLTRSCVLLAQNAGMVFIPA

SEQ ID NO: 15435 - protein, 417 aa, Parasutterella sp.
LMPCSPAKARLLLKEKKAIVVRRTPFTIQLTIATGESKQPVSLDVDAGYKHVGLSASTEKAELYASEVELRQDITDLLSARRALRESRRNRKTRYRAPRFDNRIRTKRKGWLAPSVENRINAHLSRIESVLRLLPVTKITVETASFDTQLLKNPDISGKEYQEGEQLGFWNIREYVLCRDRHVCQHCYGRSKDPVLNVHHLESRRTGGDSPGNLITLCETCHKALHRGEITLKAKRGQSFRAEAFMGIMRSEVPNRLKASHPELEVNNTYGYRTKHARIANDIAKSHCADAFCIAGNLGAERLCEFFFQKQTRRNNRQIHKLSILKGGIRKRNQAPFEVKGFRLFDKVACQGEEGFIFGRRSSGFFDVRKLDGTRISAGISCKKLHLLEKRRTYLTEIRKEEALPPLPEGRGLRAKM

SEQ ID NO: 15436 - protein, 424 aa, unidentified; identical to SEQ ID NO: 3232

SEQ ID NO: 15437 - protein, 460 aa, unidentified; identical to SEQ ID NO: 14615
  REGION 1..460: note = Ga0315285_10018821

SEQ ID NO: 15438 - protein, 430 aa, Desulfobacter sp.
LNVFVLDTNKKPQNPVHPAKARLLLTEGKAAVFRQFPFTIILKETVLDVASNPLRIKIDPGSRETGIAVINDDTGEIVFAMGLRHRGQQIKNNLESRRAIRRSRRNRKTRYRKPRFDNRTRAEGWLPPSLKSRVHNIETWVNRLCRFCNIQAISMELVRFDMQKIQNPEISGVAYQQGELMGYEVREYLLEKWDRTCAYCGKTDIPLEIEHIVPKSKGGSNRVSNLTLACTACNRKKGNKSLEQFLSKKPRLLKRIQKQSKVPLKDAGAVNTTRWDLFRTLKKTGLPVETGSGGLTKFNRTTRGLHKTHWLDAACVGKSTPEKIFQIDKTVLIVKADGHGSRQMCRVNKFGFPRTTAKSTEKKVKGFQTGDIVKAVVTSGKKVGTYIGRVAVRKSGSFNIKTVDKTVQGISWKYCRLLHASDGYSYNTTC

SEQ ID NO: 15439 - protein, 424 aa, unidentified; identical to SEQ ID NO: 3434

SEQ ID NO: 15440 - protein, 442 aa, Lactobacillus sp.; identical to SEQ ID NO: 14540

SEQ ID NO: 15441 - protein, 424 aa, unidentified; identical to SEQ ID NO: 3434

SEQ ID NO: 15442 - protein, 512 aa, unidentified
MSTVYVLNKDGKPLMPTTRGGHVRHLLKEKKARVVTSKPFTIQLLYETDDVVQPLYLGIDPGRTNIGVAVVKTDGTAVFTAHLETRNKEIPKLMQGRKKARRARRTNGRRCRRQRRAKANGTISKKCVKQTTAQNGSVSKRAKKIGVIKRHLPGCEKKVLCIGIKNKEAKFSNRTRPEGWLTPTANQLLQTHINLIKKIRKFLPVNDVVLEINKFAFMQLDNPNIQKWQYQQGPLYQKASLEEAVSEMQEHHCLFCKQSIVHYHHVVPQSENGSDTIGNIVGLCTKHHDLVHKDTAWQKKLAKKKTGLNKKYGALSILNQIIPALTKELSSLFPKHFFATNGKSTYDYRSAHGVSKDHWLDAYCIACSVLPNDVCDSGINNRVPYELKQFRRHDRRALNNENMSRVYTLNDNVVATNRHKATKQTTDSLEEFRQRQPNDVCKLKVKEHHPEYRNPERNFPGCVFLVGKQTHVMQGTSGSHNGKADGYYNTNGNSYSSGKCKFVAKNEGIVFA

SEQ ID NO: 15443 - protein, 450 aa, unidentified; identical to SEQ ID NO: 12674

SEQ ID NO: 15444 - protein, 459 aa, Ammonifex sp.
MVFVLDRKGRPLMPCSERRARKLLEQGRAVVVRLEPFVIRLKDRVAEEASLQPLRLKIDPGYEVTGISVVRVAGGKEVVVFFAEVHHRTDVPGKLLSRRQARRSRRSRKTRYREPRFDNRGRPEGWLPPGAVARVNQVLSVVGKLVRWLPVTEIVVESAKFDTQKLQNPEVSGVEYQRGELQGYEVREYLLEKYGRKCAYCGKENVPLEVDHVVPKSRGGTDRVSNLTLACRECNRAKGNKLPQEWLEELKNSGRAVDRKRAENIPKVLARLKEPLKAAACMNATRYVLVERLRALGPPVLTATAAQTKYNRARFNLPKTHYFDACCVGEVSGELEVAAGYVQVFRAVGRGTRQMANLDRHGFPRGHRARGKIHSGFMTGDLAVAEVPAGRYAGRYVGYVAVRRSGYFDLKDLSGRRVCQGIAFRHFKLVQRFDGWRYEKFKIAALSSPHLKVGASSAA

SEQ ID NO: 15445 - protein, 420 aa, unidentified
MQYVYVLNKHGEPLMPCSPRKARLLLKQKKACVIKRTPFTVKLLYGSAGYKQPVTLGVDAGSKHIGISATTEKHELYREEATPRNDVVDLLSARRAFRRSRRNRKTRYRAPRFNNRVHSKHKGWLAPSVEVKIQEHITLIKHACRILPVTLVRVETAEFDTQRLKAMLEGKPLPVGTDYQLGEMYDEYNVLQYVLKRDNYTCQCCGAHYTKTKGVKLHVHHIETRRTGGNAPNNLITLCKSCHKALHAEKVTLDGKKRGKPLKDAAFMGIMRKTLMERLRKELKIPVPGTYGCITKYLREKNGIPKSHTNDARCISKNPLAIPCDTCYYTKAVRHHNRQLHKATILKGGIRKANQAPYIVKGYRLWDKVAYNGTECFITGRRTSGYFALKELDGTVVSNSISYKKLRLLEAATNYIIERK

SEQ ID NO: 15446 - protein, 470 aa, unidentified; identical to SEQ ID NO: 2925

SEQ ID NO: 15447 - protein, 430 aa, unidentified; identical to SEQ ID NO: 3328

SEQ ID NO: 15448 - protein, 518 aa, unidentified; identical to SEQ ID NO: 3878

SEQ ID NO: 15449 - protein, 338 aa, unidentified; identical to SEQ ID NO: 4723

SEQ ID NO: 15450 - protein, 430 aa, unidentified; identical to SEQ ID NO: 6608

SEQ ID NO: 15451 - protein, 425 aa, Ktedonobacter sp.; identical to SEQ ID NO: 6721

SEQ ID NO: 15452 - protein, 424 aa, Microcoleus sp.
MSNFVFVIDTNRKPLSPCKPGIARSLLKAGKAAVFRRYPFTIVLKKAVETNPEPLELKLDPGSKVTGVAIKQDNKIIFGAELQHRGQQIKDALLSRRQLRRGRRNRKTRYRKARFLNRTRPDGWLAPSGQHRVETTLTWVRKLIRLAPVASIVQELVRFDSQLMQNPEISGVMYQQGELQGYEVRQYLLEKWHRQCAYCSAENVPFEVEHIQPKSRGGSDRVSNLTLACHDCNQKKGNQDIRAFLAAKPDLLNRILKQAKLPLKDAAAVNSTRWALFNALKETGLPVTTGTGGQTKFNRHRLGLAKSHWLDAACVGSIDTLKVLTSKPLLIVAKGQGTRQICGTNQYGFPIRHKSRVQIHKGFQTGDIVSATVTAGKKVGSYTGRLLCRASGSFDIVTKAGRVTGISHKYCKAIHKKDGYSYGF

SEQ ID NO: 15453 - protein, 413 aa, unidentified; identical to SEQ ID NO: 3924

SEQ ID NO: 15454 - protein, 512 aa, unidentified; identical to SEQ ID NO: 6489

SEQ ID NO: 15455 - protein, 536 aa, unidentified
VLRPRYQYPTRWYPSREQGSGNGCLSGEENTDLEQEVSGTLSKGDHSHPGEQDFCVPAITIQGGPAMSVFVVGLNGCRLMPTSERKARLLLKHGKASVYRKVPFTIKLNYKTGSRTQSGYLGIDTGSQHIGVSVVREDGTVLHKEEIGLRDSMSKRKLMQSRASSRRGRRHRKTRYRHPKWRPKAKRVYCEIPDRKGRHWKKKEITFASKRAKGWLPPSLQSKTDHHIWWIKKLQDLLPEGYRLSIELGRFDPARLKDPEIHGELYQKGPQYDYENVRAYVLNRDRYTCQVCGKKGGKLHVHHILYRSHGATDDPQYMATVCSDCHNTENHQQGGILYQWMQKQKKFTRGLRDATFMNILRKRLIEAFPGATFTYGNITKADRERLRLPKSHGNDATAIAIVKTGIMTVKDKEPVIYIQQVRRKKRSLHEETPRKGRKEPNRKASRYDKNTKAVTVTKRKNKKKITITGCLFDRVELNGKKGWISGFTDKSCYVKDENDQYIRTSPKYKQVSLSKLKILHHCGNWAIGARQSLGKG

SEQ ID NO: 15456 - protein, 494 aa, unidentified
MTMVYVQNKDGKPLMPTTRYCYVRLLLKEKKARVVCTTPFTIRLNYDTPDITQDLILGIDPGRTNIGVAVVKEDGQCVFSAHLETRNKEVPLLMKKRAAFRRQHRTQDRRRKRQRRAIAAGTTVESNTIERLLPRYEKPIVCQHIRNKEARFNNRSRPAGWLTPTANHLLQAHINLIAKAAKLLPITKVVVELNRFAFMAMDNPNIRRWEYQQGPLYGLGSVKDAVYAQQDGHCLFCKKPIDHYHHVVPRHKGGSETLANRCGLCAKHHDLVHKDKAWAEKLVTRKSGMNKKYHALSILNQIIPHLMEYLGRETPYDVYATDGKSTKGFRVAKNVPKEHYTDAYCIACSILDTNIKVSTPVEPFELKQFRRHDRQSCIRQMVDRKYLLDGKVVVTNRHKAIEQKSDSLAEFREAYGDAAVSQLTVRPHSPQYKDMARIMPGAVMDFDGIVGVFKGSSGRNNGTPNYYNSTKGARVLTKRCALLAKNVGMVFIPA

SEQ ID NO: 15457 - protein, 451 aa, unidentified; identical to SEQ ID NO: 5203

SEQ ID NO: 15458 - protein, 420 aa, unidentified
MQYVYVLSKHGEPLMPCSPGKARLLLKEKKARVVRRTPFTIKLLYGSAGYKQPITLGVDAGSKHVGLSASTKKRELYREEFTPRNDVVKLLSKRKQYRRSRRNRKTRYRAPRFNNRVHSKHKGWLAPSVEVKIQEHITVIKRICRILPISLVRVETAEFDTQRLKAMLEGKSLPVGTDYQLGEMYDEYNVRQYVLKRDNYTCQCCGAHTTKKKTVKLHVHHLEGRQVGGNAPNNLITLCVDCHKALHAGKVKLDGKKRGKSFKDAAFMGIMRKTLMARLRDELPIPVQGTYGYITKMRREQNDIKKSHVNDARCISKHPLAEPCSVCYRTKAIRHHNRQTHKANFSKGGTRQRSQMPYVVEGYRLWDKVLYKGQECFVSGRRASGSFTLKKLDGTRISKGVTFKKLRLLEPATNYLIERM

SEQ ID NO: 15459 - protein, 419 aa, unidentified
MVYMISQDGKPLMPCSNSIARLLLKQSKAKVKKREPFTIKLTYETTNYTQDLTLGVDTGSGTIGTSVSKDNGDIIYMSEVVIRNDITGKMTQRAKYRRNRRNRKACYRKARWLNRANSIKNDRFSPTMQSKLHSHVKEIEYIKFILPITEMVFETGQFDTHLMKNPNLANPKIKHWGYQKGINYGFENTKAMVLNRDNYTCQYYKGKHKDSKLEVHHILFRSQGGSDEESNLITLCHTCHKDLHSGKINPKLSGKVKGNLKYATQMNSIRKQLFKLYPDAVETFGYVTKANRLLLGIDKEHYYDACTIATQGNIFTVKSNLYKKKCISDGDFQKTKGIRSEQPIITDKICGFRKFDKVRYFGNKYFIKGRMSTGYAVLMDIDGNKVDFSAMPKGYKTPKLSNCKRIMARSTEMIQTLVI

SEQ ID NO: 15460 - protein, 462 aa, unidentified
MSVLVIGRNGRALMPTTSRKARILLKKETASVVCRHPFTIQLLYKTGCATQEGCIGIDTGSQHIGVGITCGNRVILKEEHELRSSMEKRSLLVTRAAMRRGRRYRKVRYRKPKWRQHTKRMYFEKPNRRGQHWRKVKTTTQSPRSKGWLPPSLQSKCDHHFRIIDRYLKYLPDSITRNLVIEAGRFDMARMNDPMIHGEMYQRGPMYDAENLRAYIFARDNYQCACCKAKAGTTRKADGTTVKLVAHHILFRSRGATDNPKYMVSVCDHCHTTKAHQPGGVLYFWMENNKKVTRGLRDATFMNILRQRLFARYPQAAFTYGNITAADRKQLRLPKSHANDAVAISLFGKEVSAVRDTCQTVHYKQVRKSKRSLHEAIPRKGRKNPNTKAVRNKKNTTQVNGFKLWDSVLADGKKLFICSFTGTSAYLVDKNGCYVSQPGKTYKQWPLSKLKRLHHNGNWLMT

SEQ ID NO: 15461 - protein, 415 aa, Eubacterium hallii
MVYVVANDGQPLMPTNRYGKVYRMLRSGMAVVVKKCPFTIQLQYESERNVQPVALGIDAGSKHVGVSATTKAKVLYESDVELRGDIVKLLATRRQLRRSRRSRKTRYRPARFDNRKRKNGWLAPSIRQKIESHLTVVANVCKILPVSRIIVETASFDIQKIKNPDIQGTEYQQGEQMDFWNVREYVFFRDGHTCQCCKGRSKDKILNVHHIESRKTGGNAPNNLITLCETCHKGYHNGTVTLPKNIKRGMKFKDAAFMGIMRWTFYNTLKEQYEPDIPVHYTYGYITKNTRINHNLPKGHCIDARCISGNPDAVSDGTYYYQKKVRCHNRQIHKQTILKGGIRKSNQAEYLVRGFRLFDKVRYQGREYFIFGRRKSGFFDIRTLSGEKVNKGSINVKRLTFVDTRKNYLTERRTV

SEQ ID NO: 15462 - protein, 473 aa, unidentified; identical to SEQ ID NO: 3562
  source 1..473: note = uncultured beta proteobacterium

SEQ ID NO: 15463 - protein, 442 aa, Selenomonas sp.; identical to SEQ ID NO: 4776

SEQ ID NO: 15464 - protein, 411 aa, unidentified; identical to SEQ ID NO: 2867

SEQ ID NO: 15465 - protein, 447 aa, unidentified
  REGION 1..447: note = Ga0373625_0016929
VVYIISKTGKPLMPTNRLGKVRHLLKDGLAKVVQRTPFTIQLLYDSDEYTQPITLGVDAGSKTIGLSATLVPPSNGRTETDKKEVFSAEVQLRTDIVDLLSTRRQNRRTRRSHKTRYRKVRFLNRRIDKGWLVPSIRHKIATHLTMVDKIHKILPITKIIVEVAQFDIQKIKNPEISGVEYQQGVQLGFFNVREYVLYRDDHKCQLCKGKSKDKILNVHHIESRKTGGNAPNNLITLCETCHKKHHEGDIKLKIKRGTIFKDPAFMGIMRWALYNTLKEKYPNVLMTYGYITKNTRIANNLPKNHRTDALCITGNPTVVGLDTWYYCKKVRCQNRQIHKNTINKGGARKINQLPFIVFDIRLFDKVKYNNQECFVFGRRLSGSFDIRLLDGTTVNAGVGYKKVKVLEQRKTILIESRKAIPPTADIDQTQFETDQQPVGFLAEKDHE

SEQ ID NO: 15466 - protein, 430 aa, unidentified
MTKTLTTQTTQACVLDQQGKPLMPTTRLGKVYRLLKTQKAHIVSYEPFTIQLDYEPDTQVIQPMTLGVDSGAIHSGYSLANEHREYYSVEVVARNDISNRLSERHMYRRNRRTRKARYRKPRFKNRKNKKKGWLPPSLEQKVAVQVNEIDHLHRYFPIETIIVEVAEFDIQKIKNPDISGIEYQQGTLQGYNIRNYLLEKHGRKCFYCGKSVSDFEVEHMLPKSKGGSNRIDNLTLSCHDCNEKKGTLTAEEFIRQTLPATKAAAKLKQLPNEKRLFKYMAYMNATRWALYDAIKRTYPNVKMTYGYITKYNRIQAGLPKAHHIDAKCITGFATVPSTSQTVVKVKMRRHNRQLHRATFSKGHVRKAASLPTTVFGFQLYDLVCFDNHRYYIKGRRSSGAFALVSVEGLKNEERMYKKTNIISTYECLFN

SEQ ID NO: 15467 - protein, 419 aa, unidentified
MLNNQKEYAFVLDAEGKKLDPTIIQNAWRLVRQKKATLIAKRPMTIQLKKVVDTPNNDEIRMGIDDGAKYVGLALVQKCKTKNKVIFVATMEHRIDVHKKIVQRHEYRRYRRYLKRYRKDKSLNRANSRKQGWISPTIKQKRHAVIRIVDVLSKYICIDSIYLEDVAIDIRVLTEGHQIYGEQYQISNRLDENLRKATVLRDNCKCQLCGKKNCRLEVHHITPRRMNGSNTIGNLITLCSDCHSKVTGREMEFADQFYSKIGKKRNNYGLIYASHVMIGKTWLREELAKRAQLTLTTGGDTANKRINWNLEKSHEVDAVCITSLRPESVNVKKWRIKPLRHQIKKRKTIEVLGFRHRDIVSYVYRNGEYHEGYVTAIFPLSKRRKENLSFQSQTKHCCRVAINKCKFICRPNKFYWLSS

SEQ ID NO: 15468 - protein, 423 aa, unidentified; identical to SEQ ID NO: 13756

SEQ ID NO: 15469 - protein, 442 aa, unidentified; identical to SEQ ID NO: 3218

SEQ ID NO: 15470 - protein, 403 aa, Erysipelotrichaceae sp.
AKVIRRCPFTIQLLYEPETAVVQDITLGVDAGSKYIGLSATTEDRVLYESEVELRNDIVELISTRREARHARRNRKTRYRAPRFDNRTSSKKEDWLAPSIRQKIHSHLKVIADVHEILPVSKVIIEVASFDTQLLKAAEEGRPLPQGTDYQFGEQLGFYNTREYVLFRDNHTCQCCKGKSKDKVLNVHHIESKKVGGNAPNNLITLCETCHTGYHKGVVKFPSSIRRGMKFNDASFMGIMRWPVYSRLKEIYPSVELTYGYKTKNMRIENQLPKEHYIDARCISGNPKAKSDGIVYYQKKVRCHNRQIHKFKVNKDGLRKLNQAPYLVKGFRLWDKVLYNSEECFVQGRRSSGFFQLKKLDGTMISASASCKKLSLVETGKHFITERKRAIPPTVEECGFSCL

SEQ ID NO: 15471 - protein, 431 aa, unidentified
MPNKVYVINKHGRPLMPCSPAKARHLLDEGKAKIKKRTPFTIQLVYGSSGYTQEVILGVDAGSKTIGVSASTKKEELFAANVIPRNDVVDLLSTRREFRRARRNRKTRYRKPRFDNRVRSKHKGWLAPSVEVKIQEHITSIKRVCRILPVSKVVIETAEFDLQLLKAIADGKPVPQGEDYQKGEMYGHYNVRQYVLWRDDYTCQCCGAHATKKKEVRLHVHHLESRKVGGDAPDNQVTLCESCHEKLHKGLITAKDFKKRKRRSTRDATFMGIMRKTLMQMLCSELPIPVVKTRGYITKATREKLLVLPKSHTNDALAIAQGKRGFNVGYLPEIAQIDKIYTIRPVRHHNRQLHKAAILKGGIRKSNQAGKYVFGYRLFDKVQFNGQDCFIFGRRTTGIFTIKTINGKMIKDGISFKKLKPVEKSTSYLIA

SEQ ID NO: 15472 - protein, 411 aa, unidentified
MVYVQDIDGKPMMPTTRHGKVRRLLKDNKAVVVNTCPFTIKLTYKTSDYKQEIVLGVDSGTKHVGLSATTKSKELYASEVILRSDVVDLLSTRRGLRRTRRSRLRYRKQRFNNRVKSKKDGWIAPSVRHKIDSHIRIISFVYSILPVSKLIIEVAQFDTQKIKNPEISGKEYQEGEQLGFWNVREYVLARDGHKCQHCKGKSKDPILNIHHIESRKIGGDSPSNLITLCETCHKEFHKGNIKLKVSRGKSLRDAAVMGIMKWKLYEELKSRYDNVSMTFGYITKYNRINHGIEKSHVSDAFVISRNFNSCRLGYYYKRKLVRRHNRQIHKMKILKGGIRKRNQAPFKVFGFRLFDKVMFQGEEHFIYARRLSGQFNIRDINGENKKDVSCKKLKYVSHGLVSVKTNLFLSQ

SEQ ID NO: 15473 - protein, 443 aa, unidentified
LTKDENRPSGRTTGLRAEQAEPAGIRKGDTLKVFVLNMRSKSLMPCSPAKARHMLKAGKAVVVRRTPFTIKLTIATGETKQDVTLGVDAGARHVGISATTEKEEVFASEVALRQDITGLLADRLAFRRARRNRKTRYRAPRFNNRVRSKHKGWLAPSVENRIQAHMSRIEAVCRLLPVTKIVIETASFDIQKIRNPEVEGTGYQQGDQLGFWNVREYVLFRDGHVCQHCHGRSRDKILNVHHLESRKTGGDAPNNLITLCETCHKAYHAGKIKLKVKRGQSFRAEAFMGIMRWTLLDRVRKTHPKLPVENTYGYLTKHKRIALGLPKTHCADAFCIAGNLKALRRGDFLFQQQTRKHNRQIHRCSILKGGVRKLNQAPFLVKGFRLFDKVRIGGQIGFVFGRRVRGTFNIRRLDKTVIGTDINCKKLSLLETRKTFWVIGFNG

SEQ ID NO: 15474 - protein, 427 aa, unidentified; identical to SEQ ID NO: 5062

SEQ ID NO: 15475 - protein, 415 aa, unidentified; identical to SEQ ID NO: 5047

SEQ ID NO: 15476 - protein, 420 aa, unidentified
MQYVYVLNKHGEPLMPCSPRKARLLLKQKKACVIKRTPFTVKLLHGSAGYKQPVTLGVDAGSKHIGISATTEKHELYREEATPRNDVIDLLSARRAFRRSRRNRKTRYRAPRFNNRVHSKHKGWLAPSVEVKIQEHITLIKHVFRILPVTLVRVETAEFDTQRLKAMLEGKPLPVGTDYQLGEMYDEYNVRQYVLKRDNYTCQCCGAHSTKTKGVKLHVHHIETRRTGGNAPNNLITLCKACHKALHAEKVTLDGKKRGKPLKDAAFMGIMRKTLMERLRKELKIPVQGTYGYITKYLREKNGIPKSHTNDARCISKNPLAIPCDTCYYTKAVRHHNRQLHKATILKGGIRKANQAPYIVKGYRLWDKVAYNGTECFITGRRTSGYFALKELDGTVVSNSISYKKLRLLEAATNYIIERK

SEQ ID NO: 15477 - protein, 424 aa, unidentified; identical to SEQ ID NO: 11073

SEQ ID NO: 15478 - protein, 451 aa, unidentified
MSVAVMSKTGMRLMPTSEYRARKLLKSKKATVYRYNPFTIQLTERETGDVQTVELCMDTGYLHIGTSVKSEKHEYLGVQIDTLTDEKQKHDACRMYRRQRRSRKRYRQSRFNNRKRSDGWIAPSLEHKKDIHIQTISRICNAMPITNITLEMGNFDTQVLKALEENRPLPQGTDYQHGERYGIATLREAVFARDKYTCQCCRKTIADGAILHVHHIIYRSRGGTNRMSNLATVCDRCHTPANHKPDGRLYNWKPKIASFKGATFMTAVRWKMYNEVKSKFSDINIHITYGAETKEQRRAFDITKSHVNDALVMGQFHPKHRSRPVCYKKKRRNNRCLEKFYDAKYIDSRDGKKRSGQELFNGRINRNHKKDSENLHQYRQQKVSAGRRTIRKQHYSIQPHDIIVFNRQQFETSGCHCNGARAILLPQKKSVAIKKLSIHKYAGGYFKSDFT

SEQ ID NO: 15479 - protein, 420 aa, unidentified
VLVYILNNQGKPLMPCKPQKARKLLKQNKAKVIKKEPFTIQLLFGSSGYKQLITLGVDAGSKNIGVSATTDKKELFGAEIELRNDIVDLLSDRRQYRRSRRNRTTRYRKARFLNRVSTKKEGWLTPSILNKIQTHLNVIQIVNQILPITKTIVEVASFDIQKIKNPNISGEEYQQGEQSGFWNVREYVLFRDNHICQCCKGKSKDKILNVHHIESRKKGGNAPNNLITLCETCHNNYHLGKIKLPSNIKRGMSFKDSSFMGIMRWAFYNKLKELYANVSLTYGYITKNTRIENKLPKAHRIDAVCISGNPNVKLLDNYYYIKQVRRHNRQIHKAKILKGGKRKLNQASYEVKGFRLFDKVKYEGKECFIFGRRSSGYFDLRKLDGEVTHRSASYRKIELISRRKSLLWEKRYEIQEQKSF

SEQ ID NO: 15480 - protein, 277 aa, unidentified
CRILPITLVRVETAEFDTQRLKAMLAGKPLPVGTDYQLGEMYDEYNARQYVLKRDHYTCQCCGAHTTTMKSVKLHVHHLESRKVGGNAPSNLITLCTTCHDNLHKRKVTLDGKKRGKTLRDAAFMGIMRKALMARLKEELSIPVQETYGYITKMRREQNDIKKSHVNDARCISKHPLAEPCSVCYRTKAIRHHNRQIHKANFSKGGYRKRSQMSYIVEGYRLWDKVLYKGQECFISGRRASGRFALKKLDGTSISKSVTFKKLRLLEPATNYLIERM

SEQ ID NO: 15481 - protein, 442 aa, unidentified; identical to SEQ ID NO: 3218

SEQ ID NO: 15482 - protein, 443 aa, Anoxybacillus sp.; identical to SEQ ID NO: 10273

SEQ ID NO: 15483 - protein, 340 aa, unidentified
LLIYQKEHGIMQYVYVLNKHGEPLMPCSPCKARLLLKQKKACVVKRTPFTIKLLYGSTGYKQPITLGVDAGSKHIGISAATEKYELYCEEATPRNDVVDLLSARRAFRRNRRNRKTRYRAPRFDNRVHSKHKGWLAPSVEVKIQEHITLIKRVCRILPVTLVRVETAEFDTQRLKAMLEGKPLPVGTDYQLGEMYDEYNVRQYVLKRDNYTCQCCGAHPTKTKAVKLHVHHIETRRTGGNAPNNLITLCTACHKALHAGKVTLNGKKRGKPLKDAAFMGVMRKTLMERLLKELKIPVQETYGYITKYLREKHSIPKSHTNDARCISKNPLAIPCDTCYYT

SEQ ID NO: 15484 - protein, 406 aa, unidentified; identical to SEQ ID NO: 2752

SEQ ID NO: 15485 - protein, 431 aa, unidentified
MPNKVYVINKHGRPLMPCSPAKARHLLDAGKAKVKKRTPFTIQLVYGSSGYTQEVILGVDAGSKTIGVSALTKKEELFAANVIPRNDVVDLLSTRREFRRARRNRKTRYRKPRFDNRVRSKHKGWLAPSVEVKIQEHITSIKRVCRILPVSKVVIETAEFDLQLLKAIADGKPVPQGEDYQKGEMYGHYNVRQYVLWRDDYTCQCCGAHATKKKEVRLHVHHLESRKVGGDAPDNQVTLCESCHEKLHKGLIAEKDFKKRKRRSTRDATFMGIMRKTLMQRLCSELPIPVIETRGYITKATREKLLVLPKSHTNDALAIAQGKRGFNVGYLPEIAQIDKIYTIRPVRHHNRQLHKATILKGGIRKSNQTEKYVFGYRLFDKVQFNGQDCFIWGRRTTGIFTIKTINGKMIKDGISFKKLKPVEKSTSYLIA

SEQ ID NO: 15486 - protein, 279 aa, unidentified
VVVETAEFDLHLLKAIADGKPVPQGEDYQKGEMYGHYNVRQYVLWRDNYTCQCCGTHPSKKKEVRLHVHHLESRKVGGDAPDNQVTLCESCHEKLHKGLIAEKDFKKRKRRSTRDATFMGIMRKTLMQRLCSELPIPVIETRGYITKATREKLLVLPKSHTNDALAIAQGKQGFNVGYLPGIVQINKIYTIRPVRHHNRQLHKATILKGGIRKSNQTEKYVFGYCLFDKVQFNGQDCFIWGRRTTGIFTIKTINGKMIKDGISFKKLKPVEKSTGYLIA

SEQ ID NO: 15487 - protein, 442 aa, unidentified
MSVSVFVLDKRKKPLMPCRPARARKLLNAGRARVVKTYPFTIRLVDRLLENSAVQPVAVKVDPGSEQSGMAVVRDDGKAHHHALFFINLVHRGKVIRDRLTGRRAFRHRRRSANLRYRAPRFLNRKRRKGWLPPSLQHRVDTTMSWVKKLRKLVPVTALWVENVKFDTQKLQNPEVSGVEYQQGTLFGFEVREYLLEKFGRRCVYCGAENTPLNIDHVVPRAKGGSDRVSNLVLACTDCNQKKGAQPLEAFLKDKPQQFERIRRQLKAPLRDAAAVNATRWALFNALKQTGLPVATGTGAQTKFNRKAFGIPKEHWLDALCVGRIDSADHPEGMGILQVRCTGRGSYQRTLLNKYGFPRGYLMRQKRVHGFATGDMGRAVVPSGKKAGIHQGRVAVRGTGSFAIQKADGKVDGIHWRHCRLISRNDGYGYAWLRPAPHSSPV

SEQ ID NO: 15488 - protein, 415 aa, unidentified; identical to SEQ ID NO: 6534

SEQ ID NO: 15489 - protein, 517 aa, Leptospirillum sp.
MLPQSRALEAADADNREGQDETVGGKGAIPKPVDNIPEGRRFARSALRPQGQCNVRFDGGFVQVFVLDKKKKPLMPCHPARARELLREGRAVVHRIAPFTIRLKDRIGGETQPIRVKLDPGSKTTGLAVVREEETDGETTAHVLFQAEIHHRGSAIKKRLDQRRSFRRRRRSQLRYRTPRFDNRTRPDGWLPPSLRHRVDTTLAWVERLRRLVPVSELSQELVRFDMQKIENPEISGAEYQQGTLAGYEVREYLLEKWGRTCAYCGASDMPLEIDHIHPRSLGGSERVSNLTLACRSCNLKKGNRPVGEFLAKTPERLSTILARAKAPLKDAAAVNTTRLALFQALKATGLPVEVASGGRTKYNRTRLGIPKRHSLDAACVGKVDRIEGWNRPFLSVKATGRGSYQRTRLDAFGFPRGSLTRTKAHFGFQTGDRVMAIVTKGKKTGTYAGRVAVRSSGSFNIQTGSGVVQGISYKDCRLLQRADGYGYSIHPITEKGEAGEALSLPGMNAGLSRARG

SEQ ID NO: 15490 - protein, 396 aa, unidentified; identical to SEQ ID NO: 4508

SEQ ID NO: 15491 - protein, 417 aa, unidentified
MPCSPAKARLLLKEKKAIVKRRTPFTIQLTIATGEAKQPVTLGVDSGYKHIGLSATTEKAELYASQVELRQDITDLLSARLALRRSRRSRKTRYRAPRFDNRVASKREGWLAPSVENRIAAHMSRVEAVMQVLPVTAITVETAAFDTQLLKNPDITGAAYQQGEQLGFWNVREYVLFRDGHVCQHCRGKSKDPILNVHHIESRRTGGDAPNNLITLCETCHKAFHRGEIKLKVRRGKSFKAETFMGIMRWTLLERLKKAHPELRVRNTYGYLTKHKRISHGIAKSHCADAYCIADNLGAKRLEGFFFQKQTRKHNRQIHKLSILKGGLKKKNQAPYEVKGFRLFDKVICKGEEAFIFGRRTSGSFDVRRLDGTRISAGINYKKLRLLEPRTTYLTELRKEAALPPRHKCRGFCADFL

SEQ ID NO: 15492 - protein, 419 aa, unidentified; identical to SEQ ID NO: 3628

SEQ ID NO: 15493 - protein, 496 aa, Streptomyces sp.; identical to SEQ ID NO: 4777

SEQ ID NO: 15494 - protein, 462 aa, unidentified
MSRVAAQAATPVTGVRSRDAEIAVRKASIVTQRRVFVLGKSKHSLMPCHPARARALLKAGQAVIHRKYPTVIRLKTRTTGATQPVAFKLDPGAKTTGIALVRIHHLNPKIQSVLFTCELTHRGFAIRDSITQRASFRGSRRGRKTRYRAPRFLNRGGDKTGWLPPSLRHRLETILSWVARYRRWLPVTHIIVESVCFDMQLMQNPEISGVEYQQGELADVELREYLLEKWGRKCAYCDKDHVPLNLDHVVPKSRGGPRRASNFTLSCVPCNQAEGNQSIEAFLAKDPQRLAKILRHAKAPLAAAAAVNATRNAVVRALAATGLPVETGTGGRTKWNRTRFSLPKSHALDAACVGQVDGLFGADMAPLSIRCMGRGPHQRTRLTADGFPRGYLTRQKDHFGFRTGDIVRAIVPSGKRKGTHSGRVAVRATGNFNVQTKTGVVQGIAHRHCEIAQCADDYAYAG

SEQ ID NO: 15495 - protein, 420 aa, unidentified; identical to SEQ ID NO: 9464

SEQ ID NO: 15496 - protein, 349 aa, unidentified; identical to SEQ ID NO: 2731

SEQ ID NO: 15497 - protein, 452 aa, unidentified
  REGION 1..452: note = Ga0315279_10000169
MNMQTLQPKFKNVPTDASLVRSSTTLPLNRNESASVVEKVLSCNNPEVNLRKQVSGLTVIVPVLSLEGSPLMPCTPVKARHLLEKRRAHVVKLNPFIIRLNFKCESIVQEISFGMDAGYKNIGYSAITDTKEILSGEIALDNKTKSRMNERKMYRRNRRYRLRYRKPRFDNRVKPEGWLPPSIKRKFDTHINFIKGLKKMLPIKKVTVEIGNFDIQKIENPDISGVQYQQGDLYGYYNLKLYLLEREKGKCQLCGKKFTKENKPHMHHIKQRSEGGTSRAEGIALIHKSCHEDLHKKKLFHKLKPAKAYKAETFMSIVGGMFKKFLDCDVTYGYETCAKRKELGLEKSHVNDAFVIAGGTIQTRCLPSMIEQKRINNRTLQTNRKGFSSSIRKQRHKIQNRDFIWISGKKYLSGGVASRGTQVYYFDGSEKKLIPSKKIEKIYNTDNLIWLD

SEQ ID NO: 15498 - protein, 451 aa, unidentified
MTTFVFVLDRKGRSLMPCHPARARTLLKKGRARVHKVFPFTIRLTDRELENSSVQPMLIKIDPGSKETGIALVREEKNKGHHALCFINLQHRGQQIRNALYKRRCLRRSRRSRNLRYRSPRFLNRRRAEGWLAPSLQHRADSILSWVSRLRKIAPVERISQELVKFDTQLIQNSKIEGIEYQQGELVGYEIREYLLEKFGRKCIYCGADNVPLNIDHVIPKSKGGSNRASNLVLACVQCNQKKGSRSVEEFLKDKPEVLRQIKNQLKQPLKDAASVNATRWKLFNKLKSTSFPFEVGSGALTKFNRKKFGIPKAHWLDALCVGNVPSVTNWRNLNVLNIKCCGRGAYQRTRTDKYGFPRGICMRQKKVYGFSTGDMVKAIIPKGKKKGVYVGKVAVRKTGSFNLQTSGQTIQGISYRYCRLITHSDGYSYSWKSCPIPPRVETRGILGEVR

SEQ ID NO: 15499 - protein, 429 aa, Lactobacillus sp.
  VARIANT 429: note = X can be any naturally occurring amino acid
MKGKKAMQNRVFVINKHGKALMPCKPRKARILLRDGKAKVLKKEPFTIQLLYGSTGYKQDISVGIDSGQRYIGLAVTSQNKVLFQGEVELRQDVKKLIDTRRTYRRSRRNRKTRYRKSRFLNRIAKKKDNWLPPSVASKVNHNINWIKRLLSVLPKADLHIEVGKFDMQKMKNPEINGEGYQQGDLYGYQTVKQFVLARDNYTCQVCKKKGGKFKIHHIIYRSLGGTNTVDNLITVCSNCHTTKNHQTGILAKWCKDKKKVNKSYKGATFMNILKRRLFLAFPQAKFQYGAWTTLQRADLELTKSHYNDAVAISGIRKVKAKPTSIMMFKQFRKKKRSLHEATARKGRKTPNITSKRNAKNTKYAKGFWLNDYVKIKDSNKKGYISGFMSKGTNVRLRDIFGEYVSNSDKSYTSTKNISLINHSNNWQX

SEQ ID NO: 15500 - protein, 413 aa, unidentified; identical to SEQ ID NO: 14300

SEQ ID NO: 15501 - protein, 427 aa, unidentified; identical to SEQ ID NO: 5713

SEQ ID NO: 15502 - protein, 388 aa, Scytonema sp.; identical to SEQ ID NO: 2683

SEQ ID NO: 15503 - protein, 420 aa, unidentified
MQYVYVLNKHGEPLMPCSPGKARLLLKQQKACVVKRTPFTIKLLYGSTGYKQPITLGVDAGSKHVGLSASTEKRELYREEFTPRNDVVDLLSTRRQNRRSRRNRKTRSRAPRFDNRVHSKHKGWLAPSVEVKIQEHITVIKRICRILPVTLVRVETAEFDTQRLKAMFTGKPLPVGTDYQLGEMYDEYNVRQYVLKRDNYTCQCCGAHTTAKKTVKLHVHHLESRKIGGNAPSNLITLCTTCHNALHKGKVFLDGKERGKTLRDAAFMGIMRNTLLERLRNELHISVQNTYGYITKLLREQNDIKKSHVNDARCISKHPLAEPCSVCYRTKAIRHHNRQTHKANFSKGGIRKRSQMPYVVEGYRLWDKVLYKGQECFVSGRRASGSFTLKKLDGTRISKGVTFKKLRLLEPATNYLIERM

SEQ ID NO: 15504 - protein, 504 aa, unidentified; identical to SEQ ID NO: 3854

SEQ ID NO: 15505 - protein, 447 aa, unidentified; identical to SEQ ID NO: 2820

SEQ ID NO: 15506 - protein, 438 aa, unidentified; identical to SEQ ID NO: 4848

SEQ ID NO: 15507 - protein, 424 aa, unidentified
MVYVISQKNKPLMPCSSPIARLLLKLGRAKVKKREPFTIKLTYETTNYIQNLTLGVDTGSGTIGTAVSNDNSDIVYMSEVIVRNDIMDKMTQRRKYRKNRRGRKTRYRKARWLNRANSTKTDRFSPTMQSKLHSHVKEIEYIKSILPITTMVFETGQFDTHLMKNPNLANPKVKHWGYQKGVNYGFENTKAMVLNRDNYTCQCCKGKHKDSKLEVHHIIFRSQGGSDEESNLITLCHTCHKDLHSGTINFKLKGKLKGNLKYATQMNSIRKQLFRIYPDAIETFGYVTKANRLVLGIDKEHYYDACTIATQGNIFTVKSNLYKKKCVSDGDFQKTKGIRSEQPIVTDKICGFRKFDKVRYFGNDYFIKGRMSTGYAILMDIDGNKADFSAMPKGYKTPKMVKLKRIEARTTWMITTVEVTPNIA

SEQ ID NO: 15508 - protein, 442 aa, Sutterella sp.
MSTSVFVLDKRHRPLMPCRPARVRRLLRAGRARVVKRFPFVIRLVDRTVEQSEVQPVLIKLDPGSRETGAAVVRDDEKKRHHALAFFVIKHRGGAIRDALKARSAFRRRRRSQNFRCRSPRFLNRVKPKGWLPPSLRHRVETTLSFVRRMCRYLPVSGIATELVKFDSQKLQNPEVSGVKYQQGTLFEYEVREYLLEKFGRKCVYCGAEGVPLNIDHVVPRAKGGSNRVSNLVLACVSCNQKKGARSLEDFLKGKPEVLARVRRELKTPLRDAAAVNATRWVLFNELKATGLPVETGSGALTKLNRHAFGVEKEHWLDALCVGRLNGVVTRKGLNVLEIRCMGRGSRQRTRLTKYGFPRGYLMRQKCVHGFATGDMVEANVPKGKKAGLWRGRVAVRVSGSFNIQTPKGVIQGVGWKHCRLISHNDGYGYAWLGHAPHSSPA

SEQ ID NO: 15509 - protein, 413 aa, unidentified
MTDYAFVLDANNKQLAPTKEQKAWFLIRRKRATLVSKYPLVIQFKKKIPDKEICKDEIRCGIDDGGLHVGVALVQKCQTRNKVVFKGVIEQRNDVKHLMDIRRGYRSYHRYHKRYRPARFNNRSSSKREGRIAPSVLQKRQAIIRVINQLNRWINITNYWLEDVAIDIRALTDGYKPYRWQYQKSNRLDENIRKAVILRDGCKCMECGKSNCKLEVHHIKPRRLKGSNTLGNLITLCTKCHQKTEGVEELYMDRYFALLNSSDNRNLDYTQHVMIGKQWLREQLSNLGMLYLTNGGDTANKRIDWDITKSHSNDAICITDLRPDTCEIKEWVIKPMRRQSKAKTDNVLGIKHRDLVEYTFRNGETHRGYVTALYPEQNAINFQSPIKHCKKVNAGKCKVLWKYSKIYWLDNVS

SEQ ID NO: 15510 - protein, 413 aa, unidentified; identical to SEQ ID NO: 3220

SEQ ID NO: 15511 - protein, 493 aa, unidentified
MAAVYVISASGKPLMPTTRCGHIRGLLNAGKARVVEREPFTIQLKYETPDVTQPLYLGIDPGRTNVGSVVVREDGECVFTAQLTTRNKDVPKLMKARKQFRMAHRRLKRRCKRQRRAKAAETLSQKGEFQRLLPGYEESILCKGIRNKEARFNNRQRPAGWLTPTANHLLLTHLNMVKKLQKLLPITDVVLEVNRFAFMAMENPSIRRWQYQQGPLYGKGSVEDAVYAQQDGHCLFCGKPIAHYHHVVPQHKNGSETLENRVGLCNEHHDLVHKDRAWDAKMKETKAGLNKKYHALSVLNQIIPALTEQLTAMFPQHAFVTTGKDTADFREDYGIAKEHHLDAYCIACSVLAEPTKVAAPTGKPHRLMQFRRHDRQVCHKENIKRVYLSEGKAVATNRHKAIEQKDDSLEEFRKTHTQQEVSALTVKDHQPVYKDMRRFMPGGVFLFNGKVHTLQRSHGRYKGMPFYYIDTDGSKNHAKGCIFLQQNCGLRWV

SEQ ID NO: 15512 - protein, 423 aa, unidentified
MVYVISKSGKPLMPCENVIARLLLKSGRAKVKRKRPFTIKLTVETTEYTQPLTLGVDTGSGTVGSAVSDDEGHILYMSEVKLRNDIKDRMDQRRKYRRSRRQRKTRYRKRRFLNRGASIRRDRLPPTLVSKLHAHIREIEFIKSILPITRLVLECGQFDMQLMNDPFIRSKGKIHWAYQKGPNYGFANTKEMVLNRDNYICQCCKGKRKDSKLEVHHIVFQSQGGSDSQENLITLCHTCHSLLHSGKISLDKVGIKKGTLSHATQMNVLRSQLLKIYTNAIETFGYVTKENRQYLNLPKEHYIDACVIASCGNQITIESLLYKRVCINDGDFQQTKGITSEQRLNTKKIFGFRKFDLVKYFGNEYLIKGRMTNGGYAILSDIDGNTVNFRKTSRHGKTVKLKDCKRLFARKSIMTITTSASDD

SEQ ID NO: 15513 - protein, 502 aa, Flavonifractor sp.; identical to SEQ ID NO: 2616

SEQ ID NO: 15514 - protein, 270 aa, unidentified
LSIKTLINIGKGVIYSSICTGLSLQTYQKRKEVPYMVYVLDIDGQPLMPTTRHGKVRRLLNSHLAKVVKRCPFTIQLLYQSTKETQPVSLGVDAGSKHIGMAATTEKKVVYQEELFPRNDVVKLLSARRTLRRTRRNRKTRYRKPRFNNRVHSKHKGWLAPSVEVKIQEHITAIKRICQILPISEIQVETAEFDLQRLKAMKEGKTLPVGTDYQLGEQYDFYNTRQYVLHRDGYTCQCCGTHDNNIKLHMHHIESRQTGGDAPNNLITLC

SEQ ID NO: 15515 - protein, 421 aa, unidentified
MFVYVLDKNGQPLMPTQRFGKVRRLLRDKKAKVVKRCPFTIRLLYEPETKIVQDIVLGVDTGSKYVGVACVGNSKVLYQSQIELRDDIERKMDSRRMYRRSRRNRKTRYRKPRFLNRRNSIRKDRYCPTIVSKYYSHEREIEFCKKILPIKDIVLEAGKFDTQLMEKPWLQEHKWAYQKGVNYGYANAREHALVRDSYTCQCCGKKNCRLEVHHIKFRSEGGSDTLENLITLCEDCHKAVHLGKITLKLKGKHKSNLRHATQMSIIRSMLLKKYSDAIETFGFVTKANRENLSLKKDHYLDACVIASGGLEFELSDVLYRKRCVPVQNRVLTRGIRSERKIPTGKVHGFKRYDKVEYLGKVCFVKARRTKGDFVLMDIGNNSIDFRVIGGCQNPSHKKIKRLNTRRGVICIIQKVQNREER

SEQ ID NO: 15516 - protein, 458 aa, Lactobacillus sp.; identical to SEQ ID NO: 4474

SEQ ID NO: 15517 - protein, 431 aa, unidentified
MPNKVYVINKHGRPLMPCSPAKARHLLDDGKAKVKKRAPFTIQLVYGSSGYTQEVILGVDAGSKTIGMSASTTKEELLSAEVKPRNDVVDLLSTRREPRRARRNRKTRYRKPRFDNRVRSKHKGWLAPSVEVKIQEHITAIRRVCGILPVSKVVVETAEFDLQLLKAIADGKPVPQGEDYQKGEMYGHYNVRQYVLWRDNYTCQCCGAHATKKKEVRLHVHHLESRKVDGDAPDNQVTLCESCHEKLHKGLIAEKDFKKRKRKSTRDATFMGIMRKTLMQRLCSELPIPVVKTRGYITKATREKLLVLPKSHTNDALAIAQGKRGFNVGYLPEIAQIDKIYTIRPVRHHNRQLHKATILKGGIRKSNQTEKYVFGYRLFDKVQFNGQDCFIWGRRTTGIFTIKTINGKMIKDGISFKKLKLVEKSTSYLIA

SEQ ID NO: 15518 - protein, 431 aa, unidentified; identical to SEQ ID NO: 3235

SEQ ID NO: 15519 - protein, 430 aa, unidentified; identical to SEQ ID NO: 4504

SEQ ID NO: 15520 - protein, 442 aa, unidentified
MSTSVFVLDKKHRPLMPCRPARARRLLRAGRARVVKRFPFVIRLVDRTVEQSEVQPVLIKLDPGSRETGAAVVRDDGKKRHHALAFFVIEHRGGAIRDALKARSAFRRRRRSQNLRCRSPRFLNRVKPKGWLPPSLRHRVETTLSFVRRMCRYLPVSGIAAELVKFDSQKLQTPEVSGIEYQQGTLFEYEVREYLLEKFGRKCVYCGAEGVPLNIDHVVPRAKGGSNRVSNLVLACMSCNQKKGARSLEDFLKGKPEVLARVRRELKTPLRDAAAVNATRWVLFNELKATGLPVETGSGALTKLNRHAFGVEKEHWLDALCVGRLNGVVTRKGLNVLEIRCMGRGSRQRTRLTKYGFPRGYLMRQKCVHGFATGDMVETNVPKGKKAGLWRGRVAVRVSGSFNIQTPKGVIQGVGWKHCRLISHNDGYGYAWLGHAPHSSPA

SEQ ID NO: 15521 - protein, 423 aa, unidentified; identical to SEQ ID NO: 2741

SEQ ID NO: 15522 - protein, 507 aa, unidentified; identical to SEQ ID NO: 10455

SEQ ID NO: 15523 - protein, 442 aa, unidentified; identical to SEQ ID NO: 3791

SEQ ID NO: 15524 - protein, 346 aa, unidentified; identical to SEQ ID NO: 4983

SEQ ID NO: 15525 - protein, 484 aa, Streptomyces sp.; identical to SEQ ID NO: 9080

SEQ ID NO: 15526 - protein, 470 aa, unidentified; identical to SEQ ID NO: 2825

SEQ ID NO: 15527 - protein, 449 aa, unidentified; identical to SEQ ID NO: 4729

SEQ ID NO: 15528 - protein, 413 aa, unidentified
MVYVLNVNGQPLMPTENHAKVRILLRQGKAKVVNNCPFTIQLLYSSTNYTQPVTLGVDAGSKHIGLSATTEDKELYAADVELRNDIVKLLAARRTSRRSRRNRKTRYRKPRFNNRKRDKGWLAPSIKEKIGTHLKVVDDTCKLLPVSKIIVETASFDIQKIKNPDVSGTDYQQGEQLGFWNIREYVLFRDGHKCQCCKGKSKDKILNVHHIESRQTGGNAPNNLITLCETCHTGYHKGIIKLPAKIKRGMKFNDAAFMGIMRWAFYGELKKRYPDVSLTYGYITKNTRIKNGLPKEHYVDARCISSHPLARPLGTVFYIKKVRCHNRQIHKFTILKKGVRKRNQAEYEVYGFRLYDKVLWKGRICFVFGRRSTGRMDLRLLDGTHINASVGYKNIKLLRMRSNYLIEVRSAIG

SEQ ID NO: 15529 - protein, 430 aa, unidentified
MVYVLDKDGNPLMPTKRYGKVRHPLKEKKAKPVRRQPFVIQLMYDPGRHKQPVDLGVDAGSKHIGVSAVSGNRELLSAQIDIRGDIRGGLKTRRDARRSRRNRKTRYRKPRFLNRVKSKHKGWIAPSVEAKCAAHVKVIDDIRSFLPVTDITIEMAAFDTQMLKAEMNGDPLPSGEDYQHGESEGYDNIKAYVKWRDGYKCAVCNAKGPLQVHHRQQRKDGGTNTPANLITVCPECHKKYHAGLLPEAKAKKLGPNAKAPKLRDASFMGTMRWKVWNKVKESGIPLHMTCGYKTAEKRREYDLPKGHRIDARCISGHPDAEPADEWFMCQKVRDHNRQLHKRNPNEGGFRQKNQNANMIKGFCLNDTVRFDGHDYFIHGKRSPRKNPETGKMTDSAFTIVDLDGNKTDRAPSRLKLKHHNGHMLIERRNA

SEQ ID NO: 15530 - protein, 442 aa, unidentified; identical to SEQ ID NO: 3791

SEQ ID NO: 15531 - protein, 465 aa, unidentified; identical to SEQ ID NO: 6446

SEQ ID NO: 15532 - protein, 406 aa, unidentified
MVYVQDINGKPMMPTTRHGKVRRLLKDKKAVVVSLCPFTIKLMYVTSDYKQEIVLGVDAGTKHVGLSATTKSKELYASEVTLRSDIVDLLSTRRELRRTRRNRLRYRKPRFNNRIKSKRPGWVAPSVKYKIDAHIRVIDNVCSILPISRIVIEVAQFDTQKIKNPDISGKEYQEGDQLGFWNVREYVLARDGHKCQYCKGKSKDKILNVHHLESRKTGGDSPSNLITLCETCHKEYHKGNIKLKVKRGASLRDAAVMGIMKWKLLDKLKSLYSNVSMTFGYITKHNRIKHEIKKSHISDAFVISKNFEAKRPGYYFKEKLVRRHNRQIHKMKILKGGKKKMNQAAFKVFGFRLFDKVEFQGNEYFIYARRLSGYFNIRDINSENKKDVTYKKLTHIGHGLISVETG

SEQ ID NO: 15533 - protein, 465 aa, unidentified; identical to SEQ ID NO: 5576

SEQ ID NO: 15534 - protein, 414 aa, unidentified
MPCSPAKARHLLKEKKAIVVRRTPFTIQLTIATGESKQAVNLGVDAGYKHVGLSASTEKAELYASEVELRQDITDLLSARRALRRARRNRKTRYRAPRFDNRIRTKRKGWLAPSVENRINAHLSRIETVLRLLPVTKITVETASFDMQLLKNPDISGKEYQEGEQLGFWNVREYVFFRDGHVCQHCHGRSKDPVLNVHHLESRRTGGDSPGNLITLCETCHKALHRSEITLKAKRGQSFRAEAFMGIMRWEVLNRLKASHSELEVHNTYGYRTKHARIANGIDKSHCADAFCIAGNLGAKRPGEFLFQKQTRRNNRQIHKLSILKHGLRKRNQAPFEIKGFCLFDKVVCKGEEGFIFGRRSSGYFDVRKLDGTRISAGISYKKLRLLEKRRTYLTEIRKEEALPPLPEGRGLRA

SEQ ID NO: 15535 - protein, 305 aa, unidentified
RASSIKKDRFSPTMQSKLHSHVREIEYIQSILPVTEMVFETGQFDMHLMKNPSLANPKVRPWGYQKGANYGFENTKAMVLNRDNYTCQCCKGKHKDSKLEVHHIVFRSQGGSDEESNLLTLCHTCHKDLHSGKITPKLSGKVKGNLKYATQMNSIRKQLFRFYPNAIETFGYVTKVNRLHLGVAKEHYYDACTIATQGNAFNVKSNLYKKKCVSDGDFQKTKGIHSEQPIVTDKICGFRKFDKVRYFGNDYFIKGRMSTGYAILMDIDGNKIDFSTMPRGYKTPKLSNCKRITARSTVMTQVKVV

SEQ ID NO: 15536 - protein, 457 aa, Planktothrix sp.
MVLNNLKVQECQSRMMRKCHVRFVGEEDGAIHASLPDLKEVQNDNDNLKPLRIKIDPGAKFTGLALVSDKNIVWAAELEHRGFTIRDSLTSRRQIRRSRRQRKTRYRKPRFLNRRRKDGWLPPSLMSRVYNIQTWVNRLCKLAPIKAISLELVKFDTQKMVNPEINGVEYQRGEIWGYEVRQYLLEKFNHTCVYCGVTNKPFNLDHFHPKSKGGSDRVSNLVLSCVECNQAKGDKLPAEFLSDRLDILTKIDKQRKQPLADAAAVNATRWKLKDILESIGLPVELGSGGLTKYNRQRLNISKTHWTDAACVGLSTPNSLNIMGYQPLIIKAMGRGSRQMVKPDKYGFPRTSPKLRQKSFYGFMTGDIVKAVVSKGKKVGTYVGRIAVRKTGNFNIKTKTDTVQGISHKYCRQLHKSDGYAYSFGQVLSQKINQPKPPTQNTQVQRFKGIQGEQLSLF

SEQ ID NO: 15537 - protein, 513 aa, unidentified; identical to SEQ ID NO: 4541

SEQ ID NO: 15538 - protein, 412 aa, unidentified
MIYVLNQNGQPLMPTKNHAKVRILLKSKKAKVIRRCPFTIQLAYSSTNYTQNINLGVDAGSKHIGISATTKNKVLFESDVELRNDIVNLLSTRRQNRRTRRNRKTRYRKPRFDNRKRKDGWLAPSVQNKVDTHLMVIRKVHEILPVSKIIVEVASFDIQKIKNPTIGGTEYQQGSQLDFWNVREYVLFRDNHTCQCCKGKSKDKILNVHHIESRKTGGDAPNNLITLCETCHIGYHKGTVNLPKRIKRGMSFKDASFMGIMRWAFYNKLKEIYPNVSLTYGYITKNTRIENKLPKDHYIDARCISGNPKAVSDWGVYYQKKVRCHNRKIHKNAILKDGYRKRNQAPYEVMGFRLYDKVRWKQQNCFIFGRRSTGRMDLRLLDGTKVNASVGYKNLKMLEMCKNILIELRMEV

SEQ ID NO: 15539 - protein, 431 aa, unidentified
MPNKVYVINKHGRPLMPCSPAKARHLLDDGKAKVKKRAPFTIQLVYGSSGYTQEVILGVDAGSKTIGMSASTTKEELLSAEVKPRNDVVDLLSTRREFRRAQRNRKTRYRKPRFDNRVRSKHKGWLAPSVEVKIQEHITSIKRVCRILPVSKVVIETAEFDLQLLKAIEEGKPVPQGEDYQQGEMYGHYNVRQYVLWRDGYTCQCCGAHATKKKEVRLHVHHLESRKVGGDAPDNQVTLCESCHEKLHKGLIAEKDFKKRKRKSTRDATFMGIMRKTLMQRLCSELPIPVIETRGYITKATREKLLVLPKSHTNDALAIAQGKQGFNVGYLPEIAQIDKIYTIRPVRHHNRQLYKATILKGGIRKSNQTEKYVFGYCLFDKVQFNGQDCFIWGRRTTGIFTIKTINGKMIKDGISFKKLKPVEKSTGYLIA

SEQ ID NO: 15540 - protein, 327 aa, Sutterella sp.
MSTTVFVLDKKHRPLMPCRPARARRLLRAGRARVVKRFPFVIRLVDRTVEQSEVQPVLIKLDPGSRETGAAVVRDDGKKRHHALAFFVIEHRGGAIRDALKARSAFRRRRRSQNFRCRSPRFLNRVKPKGWLPPSLRHRVETTLSFVRRMCRYLPVSGIATELVKFDSQKLQNPEVSGVKYQQGTLFEYEVREYLLEKFGRKCVYCGAEGVPLNIDHVVPRAKGGSNRVSNLVLACVSCNQKKGARSLEDFLKGKPEVLARVRRELKTPLRDAAAVNATRWVLFNELKATGLPVETGSGALTKFNRHAFGVEKEHWLDALCVGRLNG

SEQ ID NO: 15541 - protein, 464 aa, unidentified; identical to SEQ ID NO: 3455

SEQ ID NO: 15542 - protein, 401 aa, unidentified; identical to SEQ ID NO: 10407

SEQ ID NO: 15543 - protein, 438 aa, unidentified
MVFVLDKSKKPLDMIPNAKARMLLKNKLAVVAKIYPFTIRLKDNRCGSKDRAYTVKLDPGSKTTGIAIIDDKNAVVMLAELEHRGRIIKKNLDSRRAVRRSRRQRKTRYREARFLNRIKPQGWLAPSVKSRADNVISFIRKYKKLLNIVKVEIERVSFDTAQMSSEIKLYGVDYRQGSLYQKKLREFIFSRSNGKCSYCGKQAQEIDHIVPRSKGGTDSSYNLVASCRSCNERKSNLTLKEFGKIMNKDYSHLEPKKLPKDAAIVQSARNYTVKEISKLVADTKSYDAWLTKYNRDELGLPKQHYYDALSVGNAQDYKFLTDKVLIISAKGRGSRQMCRMDKFGFPRTSPKGSKSVKGFQTGDIVKAVVPSGLKRGEYFGRVIIKSSGYFKINTEDALIEGIGYKYCRLIQRNDGYSYNYKERDFLSAINNRVSVVKI

SEQ ID NO: 15544 - protein, 447 aa, unidentified; identical to SEQ ID NO: 3138
  source 1..447: note = uncultured beta proteobacterium

SEQ ID NO: 15545 - protein, 450 aa, unidentified; identical to SEQ ID NO: 2935

SEQ ID NO: 15546 - protein, 413 aa, unidentified; identical to SEQ ID NO: 12513

SEQ ID NO: 15547 - protein, 478 aa, Pantoea sp.
VAVFVLDIHGKALMPCTEKRARLLLDRGRARVHRLLPMVVRLVDRQAGDCEFQPLRLKIDPGSKTTGLALVREVAAVDALTGEVQLGVAVLNLLELVHRGRQISEAMTARRQMRRRRRSNLRYRAPRFLNRGGDKTGRLAPSLQHRVDTTMTWVRRIQRWAPVRAISSELVRFDMQALQNPEIDGIEYQQGTLFGYELREYLLEKWGRQCAYCGARNLPLQIEHIRAKAHGGSNRASNLTLACACCNQKKAARSIEDFLAQDHKRLNAILAQVQKPLRDAAAVNATRWALANALQATGLPVELASGGRTKFNRSALGVPKTHALDAACVGQVHSIKNWNSPTLALKAMGRGSYQRTRLDKFGFPRGYLMRSKRVHDFATGDMVRADVPKGLKAGVHWGRVAIRATGRFNIQLNQAGVSAVVQGIHYRHCRIVQRNDGYGYFLNPANHTKRDQVRPKASDASHPALYLPGMNAEVSRAL

SEQ ID NO: 15548 - protein, 465 aa, unidentified; identical to SEQ ID NO: 3603

SEQ ID NO: 15549 - protein, 347 aa, unidentified
RNDVVDLLSTRREFRRARRNRKTRYRKPRFDNRVRSKHKGWLAPSVEVKIQEHITSIKRVCRILPVSKVVIETAEFDLQLLKAIEEGKPVPQGEDYQQGEMYGHYNVRQYVLWRDGYTCQCCGAHATKKKEVRLHVHHLESRKVGGDAPDNQVTLCESCHEKLHKGLITAKDFKKRKRRSTRDATFMGIMRKTLMQMLCSELPIPVVKTRGYITKATREKLLVLPKSHTNDALAIAQGKRGFNVGYLPEIAQIDKIYTIRPVRHHNRQLHKATILKGGIRKSNQAEKYVFGYRLFDKVQFNGQDCFIWGRRTTGIFTIKTINGKMIKDGISFKKLKLVEKSTSYLIA

SEQ ID NO: 15550 - protein, 424 aa, unidentified; identical to SEQ ID NO: 8578

SEQ ID NO: 15551 - protein, 431 aa, unidentified; identical to SEQ ID NO: 4306

SEQ ID NO: 15552 - protein, 400 aa, unidentified
AKVKKRTPFTIQLVYGSSGYTQEVILGVDAGSKSIEISASTKKEEVFAADVTPRNDVVDLLSTRREFRRARRNRKTRYRKPRFNNRVRSKHKGWLAPSVEVKIQEHITSIKMVCRILPVSKVVVETAEFDLQLLKAIEEGKPVPQGEDYQQGEMYGHYNVRQYVLWRDNYTCQCCGAHPTKKKEVRLHVHHLESRKTGGDAPGNLVTLCDSCHEKLHKGLITEDDFKKRKRRSTRDATFMGIMRKTLMQRLCSELPIPVIETRGYITKATREKLLVLPKSHTNDALAIAQGKHGFNVGYLPGIEQIDKIYTIRPVRHHNRQLHKATILKRGIRKSNQAEKYVFGYRLFDKVQFNGQDCFIWKRRTSGYFVVKTIDGKIIHNSASFKKLRIAERASNYLIA

SEQ ID NO: 15553 - protein, 415 aa, unidentified; identical to SEQ ID NO: 10543

SEQ ID NO: 15554 - protein, 364 aa, unidentified
MKVFVIGMTGKRLCPTSPSKAKKLLKAGKAHVYRRVPFTIRLDYKTGGSAPALKLGIDTGEQHIGTAVCNDATVFCKSEIELIKSMEKKKRLEKRKIYRRSRRYRKTRYRHPKFRFRTKRVYVEGGYRKRKGGKMVLRHWKKVPNSVMTNRHEGWLPPSIESKVKHHIDWINRYMDVLPDGTMLGIEVARFDIARMKDPSIRGELYQFGRMYGRENTKAYVLAKFDYTCPICKKKFDRDRKPRMHHVTMRKNAATDNPDEYAPVCVLCHSGEEHLPGGVLDKLAKECRRREYREPTFMNILRRRLFETYPEAEFTYGNITNADRKMLGLEKTHANDAVSIAMHSNRLRRYGLLPPGSQEETVPS

SEQ ID NO: 15555 - protein, 437 aa, unidentified
MVGGVSQIFQKKEVSALDTVAVISASGRKLMPTNSYKARRLLKSKRAVIYRYRPVFTIKLVDRTNGYTQPIEYKCDTGYQNIGISICSDTKEFVNEQRDLLKDEVKRHSDSRKYRRTRRNRLRYRKARWNNRKGMISKDGFAPSIRNKRDVHARLYEEYYKVFPITKAVFEMGQFDTQVLKAVEVGLPILDGTDYQRGEQYGYATLREAVFARDNYKCICCGKSAIKDGVKLRIHHIGYLSGDRSNRMANLGSVCENCHTSKNHKPGGKLYSLKPELKTFKGATFMTTVRYSMVKKLKVMTPTVDIKVTYGAATKLARKTLNVKKTHSNDAYCMGEFHPKHRSDFKHYRKCRRNSRVLSRFYDAKYRDLRDGSVKTGSQLSCGRTNRKISRHAELDERIYRAHKISKGRVSTRRQHYSLRPGDKVLYDGKVYFVTGM

SEQ ID NO: 15556 - protein, 412 aa, unidentified
MVYVINKQGQALMPTERFGKVRRLLKNSLAHVVCRIPFTIQLDYDTTDYTQPVSLGVDAGSKHIGISATTSEKELYAADVELRNDIVDKLSTRREQRRTRRSRLRYRKARFNNRVSSKRKGWLAPSVENKIQTHLTVVEKIHKFLPITNIVVETAAFDIQKINNPSISGSEYQQGEQLDFFNVREYVLFRDNHTCQHCKGKSKDKVLNVHHIESRKTGGDSPKNLITLCETCHKAYHRGDFELNVKRGKSFRDSAFMGIMRWSFYDRLKNIYPNVSMTFGYITKNARITNNLPKEHYVDARCISGNPMSKPLGYYFYQKKVRCQNRQIHKANFLKGGRKKLNQAPFFVKGFRLFDLVEYQKDLYYIFGRRSNGSFDIRKLDGTKVNKGSINCKYLRLISTRKSITTELNGKV

SEQ ID NO: 15557 - protein, 420 aa, unidentified; identical to SEQ ID NO: 3288

SEQ ID NO: 15558 - protein, 406 aa, unidentified; identical to SEQ ID NO: 2752

SEQ ID NO: 15559 - protein, 427 aa, Enterococcus sp.; identical to SEQ ID NO: 2410

SEQ ID NO: 15560 - protein, 422 aa, unidentified
ISACLRFWEKILKARHLLDDKKAKVVKRMPFTIRLLYGSTKYIQPIILGVDAGSKAIGLSASTAKEEVFAAEVMPRNDVVENLSTRREFRRARRNRTTRYRKPRSDNRVRSNHERWLAPSVKVKIQEHITSIKRVCTILPISKVVIETAEFDLQLLKAIQEGKPIPEGEDYQKGEMYGSYNVCQYVLWRDNYTCICCGVRGTPKNPVRLHVHHFESRKYGGNAPDNHGTLCDDCHKKFHLGIITDVKLKTRRRQSTRDAAFMGIMRKTLMWRLRTELFIPVAETKGYITKATREKLLVLPKSHTRDALAIAQGRHGFGIKEYAYVEPANHIYTVRPVRHHNRQLHKASILKGGIRKRNQASKYVFGFRLYDKVLYQGKACFVWGRRTSGTFLLRTIDGIKVKDGVSYRNLTLLERSSNYLIA

SEQ ID NO: 15561 - protein, 455 aa, unidentified; identical to SEQ ID NO: 11536

SEQ ID NO: 15562 - protein, 372 aa, unidentified
MVYVLNKNGEPLMPTERHGKVRRMLRDGKAHVVRLVPFTIQLDYSSEEVVQEVSLGVDAGSKHIGISATTEGRELFAMQVEERDDIVELIASRRETRRTRRSRKLRYRASRFDNRRRKDGWMTPSSEYRISAHLRMIRLVCSILPITKTTIEVAQFDAQKIKNDKISGVEYQQGEQLGFWNVREYVLARDGHVCQHCKGKSKDKILNVHHIESRKTGGNAPNNLITLCETCHKAYHDGEITLKLRRGTSLRDAAAMSIMRWEVYNRAKQEFKNVHLTYGYVTKHARIHNSIAKTHCADALCISGNVGAERLSWFYGVRLTRRHNRSLHLFKPKKGGIVFRAFFYLCTNLFRNKTFFIAKNFQKIPTYLHKAT

SEQ ID NO: 15563 - protein, 512 aa, unidentified
MSTVYVLNKDGKPLMPTTRCGHVRHLLKEQKARVVTSKPFTIQLLYEADDLVQSLYLGIDPGRTNIGVAVVKADGTAVFTAHLETRNKEIPKLMKKRKESRRARRTNGRRCRRQRRAKANGTISKKCVKHDTAQNGSVSKRAKEIGVIKRHLPGCEKDVLCIGIKNKEAKFSNRTRPEGWLTPTANQLLETHINLVKKIQKFLPISDVVLEINKFAFMRLDNPNVQKWQYQQGPLYQKANLEETVSEMQEHHCLFCKKKIDHYHHVVPQHKNGSNTIDNIIGLCTQHHDLVHKDATWQKRLAKKKTGLNKKYGALSVLNQIIPALTKELSSLFPKHFFVTNGKSTYDYRAAHGVSKDHWLDAYCIACSVLPNDTCDKTINSRVPYELKQFRRHDRRALNNENMSRVYTFNGKMVATNRHKATEQTTDSLEEFRQRQPNDVCNLKVKEHHPTYRNMNRNYPGSVFLVGNQVHVMQGIAGSKDGEATTYKDTNANSIAAGKCKFVAKNSGILFV

SEQ ID NO: 15564 - protein, 408 aa, unidentified
MVYVQDIDGKPMMPTTRHGKVRRLLKANKATVVNLCPFTIRLTYATSGYKQEIVLGVDSGTKHVGLSATTKSKELYSSEVILRSDIVELLSTRRELRRTRRNRLRYRKPRFGNRVKSKHHGWVAPSVRHKVDAHIRVIDNICSTLPISRIIVEIAQFDTQKIKNPDISGNEYQEGDQLGFWNVREYVLARDGHKCQHCKGKSKDPILNVHHIESRKTGGDSPSNLITLCETCHKEYHKGNIDLKVKRGKSLRDAAVMGIMKWKLYEELKSRYPNVSMTFGYITKYNRIKYGIEKYHISDAFVISKNFNALRLEYHYKVRLVRRHNRQIHKQKVLKGGAKKPNQSPFEVFGFRLFDRVMFEGNYYFIFGRRKSGSFNIRDINGGNQRNVTYKKLKLSIGKRFMIQKEMN

SEQ ID NO: 15565 - protein, 406 aa, Geobacillus sp.; identical to SEQ ID NO: 11768

SEQ ID NO: 15566 - protein, 476 aa, unidentified
MVFVLDKHKQPLMPCSEKRARLLLRRGRAVVHKLAPFTIRLKDRTVGQSEVQPLQVKLDPGSKISGVAVLRGDEVVFLGEIHHRTDIKDRLEKRRMIRRNRRNRKTRYRKPRFLNRRPEKCAGCGRNAKHGSRYCRKCGQQPKDNGYRETRLPPSLRARVDQVMNASRKIRVPIGGISMELIRFDMQKLENPEISGVEYQHGTLWGYEVKEYLLQKFGHRCAYCLGESGDPVLEVEHVVPRSRGGTDRVSNLAIACRTCNEEKDNLMPNEWLGTLQRSKRKLDQVRADNLPKVLGQLKAPLRDAAAVNTTRWALYRRLLSLCIPEEVGSGGRTKWNRERMELPKEHYWDAACVGESTPERFWNIPAWVQVWEAKGRGNRQVCRTDKHGFPIRHLSRQKRHYGFQTGDMVVAEIPRGKYAGKWRGRVTVRASGTFDVFVRAVRAVQGVNHKYCRVLQRGDGWAYEQTRTAIAAPPHD

SEQ ID NO: 15567 - protein, 456 aa, unidentified; identical to SEQ ID NO: 6138

SEQ ID NO: 15568 - protein, 423 aa, unidentified
MRVFVFNMRGEPLMPCTQRKARLLLKTGKAKIYKYNPFTIQLKYVTGENKQECHVGIDTGSKYIGLAVTSENKVLFKGEVELRQDVKSKIDTKRIYRRSRRNRKTRYRRCRFLNRKRFGKWLPPSLQNRINHTFKWIDKLCSFIPESILHIEVGKFDIAKMINPEVHSVDYSQGQTYGYQGERYFIFARDNYTCQVCGERNKPLQTHHIIYVSNGGTNRVDNQITVCKECHTSTNHKNGGIFYKWQKEHKKVKQYKEPPFMNVLRQQILNQYPQALITYGFETTIKRKNIGLEKTHYNDAIVISGVSTISENLHEWLLIRQFRKKKRSLHEGVPRKGRKEPNRIQKRNSKNTPYYRGFYLNDKVSVFGKSGYITGFTNSGAYVKGVDGEYIVLPNKSYKRVNIASLKFICHNNNWQYITKNAV

SEQ ID NO: 15569 - protein, 428 aa, unidentified; identical to SEQ ID NO: 5055

SEQ ID NO: 15570 - protein, 420 aa, unidentified
MQYVYVLNKHGEPLMPCSPGKARLLLKQQKAHVIKRTPFTIKLLYGSTGYKQPITLGVDAGSKHVGLSASTEKRELYREEFTPRNDVVDLLSTRKQNRRSRRNRKTRYRPPRFDNRVHSKHKGWLAPSVEVKIQEHITVIKRICRILPITLVRVETAEFDTQRLKAMLEGKPLPVGTDYQLGEMYDEYNVRQYVLKRDNYTCQCCGAHTTAKKAVKLHVHHLESCKMGGNAPGNLITLCITCHDALHKGKVSLDNKKRGKPMRDAAFMGIMRRTLMSRLREELPITVQGTYGYITKMQREQNDIKKSHVNDARCISKHPLAEPCSVCYRTKAIRHHNRQTHKANFSKGGIRKRSQMPYVVEGYRLWDKVLYKGQECFVSGRRTSGSFTLKKLDGTRISKGVTFKKLRLLEPATNYLIERM

SEQ ID NO: 15571 - protein, 517 aa, Leptospirillum sp.
MLPQSRALEAADADNREGQDETVGGKGAIPKPVANIPEGRRFERSALRPQGQNNVRFDGGFVQVFVLDKKKKPLMPCHPARARELLREGRAVVHRIAPFTIRLKDRIGGETQPIRVKLDPGSKTTGLAAAREEETDGEKTAHVLFQAEIHHRGSAIKKKLDQRRAFRRRRRSQLRYRTPRFDNRTRPDGWLPPSLRHRVDTTLAWVERLRRLVPVSELSQELVRFDMQKIENPEISGIEYQQGTLAGYEVREYLLEKWGRTCAYCGSENVSLEIDHIHPRSLGGSDRVSNLTLACRSCNLKKGNRPVGEFLAKTPERLSTILARAKAPLKDAAAVNTTRWALFQALKATGLPVEVASGGRTKYNRTRLGIPKGHSLDAACVGKVDRIEGWNRPCLSIKATGRGSYQRTRLDAFGFPRGSLTRTKAHFGFQTGDRVLAIVTKGKKTGTYAGRVAVRSSGSFNIQTGSRVVQGISYKDCRLLQRADGYGYSIHPITEKGGAGEAISLPGMNAGLSRARG

SEQ ID NO: 15572 - protein, 454 aa, unidentified; identical to SEQ ID NO: 8421

SEQ ID NO: 15573 - protein, 477 aa, unidentified; identical to SEQ ID NO: 8085

SEQ ID NO: 15574 - protein, 406 aa, unidentified; identical to SEQ ID NO: 2703

SEQ ID NO: 15575 - protein, 428 aa, Enterococcus sp.; identical to SEQ ID NO: 4335

SEQ ID NO: 15576 - protein, 490 aa, unidentified
MYVVYVLNRQGKPLMPTKRFGHVRRMLKTGKAKAISTKPFVIQLQYESTDFVQPLYGGTDPGRTNIGEAVLNNKGEVVYAAHVLTRNKEIPKLMADRATHRRASRRGERLRRKRRAKANGTMTCFPEGRKLPGYKDGVLELKDIINTESRFNNRKRPAGWLTPTARQCIQTHLNMVQNICKILPVTDWTLEYNRFAFMQLEDGSVRGWDLQNGRLKGYASKEDYVYALQGGVCVCCGASIEHYHHIKPRHKGGSNTHENLVGLCSVCHAEIHIGKRNLDKIGKYKKYAGTSIVNIAIPFIWDGIVKMFGDKAHICEGQETAELRRANNIPKEHFADAVCIAGIGSGITPQYDDNQPFKLRQFRCHDRSRINAQVERTYLDGKTIVAKNRKPRFEQKGDALSDLQSKIAKEHGELAARRAVSKLVVKKSYRRYNVPERIKPSAVFMFNNKKYLLRGQLTNGMYYRAFGEGTKNFPSRNCEVVSSGCSLTYM

SEQ ID NO: 15577 - protein, 462 aa, unidentified
MSVLVIGSNGRALMPTNPRKACLLLKKKTASVVCRHPFTIQLLYKTGCATQEGCIGIDTGSQHIGVGVTCGDRVILKEEHELRSSMEKRSLLATRAVMRRGRRYRKVRYRKPKWRHHTKRMYFEKPNRRGQHWRKVKTTTQSPRPKGWLPPSLQSKCDHHFRIIDRYLKYLPDSITRNLVIEAGRFDMARMNDPMIHGEMYQRGPMYDAENRRAYIFARDNYQCACCKAKAGTTRKTDGTTVKLVAHHILFRSRGATDNPKYIISVCDHCHTTKAHQPGGILYSWMENNKKVARGLRDATFMNILRKRLFARYPQAAFTYGNITAADRKQLRLPKSHANDAVAISLFGKEVSAVRDTCQTVHYKQVRKSKRSLHEAIPRKGRKNPNTKAVRNKKNTTQVNGFKLWDSVLADGKKLFICSFTGTSAYLVDKNGCYVSQPGKTYKQWPLSKLKRLHPNGNWLMA

SEQ ID NO: 15578 - protein, 512 aa, unidentified
MSTVYVLNKDGKPLMPTTRGGHVRHLLKEQKARVVRTKPFTIQLLYETDDVVQPLYLGIDPGRTNIGVAVVKADSTAVFTAHLETRNEEIPKLMQGRKKARRARRTNGRRCRRQRRAKANGTISKKCVKQTTAQNGSASKRAKEIGVIKRHLPGCEKDVLCIGIKNKEAKFSNRTRPEGWLTPTANQLLKTHINLVKKIRKFLPISDVVLEINKFAFMRLDNPNIQKWQYQQGPLYQKASLEEAVSEMQEHHCLFCKKSIAHYHHVVPQSENGSNTIGNIVGLCTKHHDFVHKDTAWQKKLAKKKTGLNKKYGALSVLNQIIPALTKELSSLFPKHFFATNGKSTHDYRIAHDVSKDHWLDAYCIACSVLPNDTCDRTINSRVPYELKQFRRHDRRALHKENMSRVYTLNGKSVATNRHKATEQTTDSLKEFRQRQPNDVCKLKVKEHHPTYRNMNRNYPGSVFLIGKQVHVMQGIAGSKNGEATTYKDTNANSIAAGKCKFVAKNSGILFV

SEQ ID NO: 15579 - protein, 422 aa, unidentified; identical to SEQ ID NO: 5333

SEQ ID NO: 15580 - protein, 414 aa, unidentified
MPCSPAKARHLLKEKKAIVVRRTPFTIQLTIATGESKQAVNLGVDAGYKHVGLSASTEKAELYASEVELRQDVSDLLSARRALRRARRNRKTRYRAPRFDNRIRTKRKGWLAPSVENRINAHLSRIEAVLRLLPITKITVETASFDMQRLKNPDISGKEYQEGEQLGFWNVREYVLFRDGHVCQHCHGRSKDPVLNVHHLESRRTGSDSPDNLITLCETCHKALHRGEITLKAKRGQSFRAQAFMGIMRREVLNRLKASYPELKVHETYGYLTKHARIANGIVKSHGADAFCIAGNLGAERLGEFFFQKQTRRNNRQIHKLSILKGGIRKRNQAPFEAKGFRLFDKVACQGEEGFIFGRRSSGYFDVRKLDGTRISAGISYKKLRLLEKRRTYLTEIRKEEALPPLPEGRGLRA

SEQ ID NO: 15581 - protein, 406 aa, unidentified; identical to SEQ ID NO: 3980

SEQ ID NO: 15582 - protein, 470 aa, unidentified; identical to SEQ ID NO: 2825

SEQ ID NO: 15583 - protein, 457 aa, unidentified
VWLYQAVYNLGEGFLPSSEERTAFYWLLIYRKEHGIMQYVYVLNKHGEPLMPCSPGKARLLLKQQKACVVKRTPFTIKLLYGSAGYKQPITLGVDAGSKHVGLSASTEKRELYREEFTPRNDVVDLLSTRRQNRRSRRNRKTRYRAPRFDNRVHSKHKGWLAPSVEVKIQEHITVIKRICRILPVTLVRVETAEFDTQRLKAMLKGKSLPVGTDYQLGEMYDEYNVRQYVLKRDNYTCQCCGAHPTEKKPVRLHVHHLESRHVGGNAPNNLITLCVACHKALHEGKITLDKGKKRGKPLRDAAFMGIMRNTLLARLKDELNIPVKQTYGYITKLLREKNKIPKSHVNDARCIAKAPNAKPCDTMLYTRALRHHNRQIHKAKILNGGIRKKNQAPYLVKGFRLWDKVRYNGEECFITGRRSSGYFALKKYDGTVISNCASYKKLMLLEAATNYITERS

SEQ ID NO: 15584 - protein, 423 aa, Microcoleus sp.
MSNFVFVLDTQKRPLNPIHPGIARKLLTNGKAAVLKRYPFTLILKVEVTATRKPITLKIDPGSRTSGFALVQGEKVIFGAELTHRGQAIKASLESRRSLRRVRRNRHTRYRPARFLNRTRPKGWLAPSLQHRVETTLTWVTRLMKLAPIASIVQELVRFDLQQLENPEISGIEYQQGVLCGYEVREYLLNKWDRKCAYCGVTNTPLQVEHIHPKAKGGSNRISNLCLACEKCNIKKGTQNIEQFLSKKPEVLKGVLSQAKRSLKDATAVNSTRWALFNRLSMTGLPVSTGSGGLTKFNRTRLSLAKTHWLDAACVGNVESLKILTNKALLIKATGQGTRQMCRTDKFGFPCRYVPRLKFVKGFQTGDIVKAIVTSGKKVGKYVGRVAVRTSGSFNISASELVSGVSHKYCSIIHRKDGYSYAA

SEQ ID NO: 15585 - protein, 422 aa, unidentified; identical to SEQ ID NO: 11861

SEQ ID NO: 15586 - protein, 451 aa, unidentified
  source 1..451: note = Archaeon sp.
MQKLLVEFKNTPGDAPQVPCSVSEALNREETLSVPHKVLANNSSDEDLRSSKSGQDLQVPVINMHGKPLMPTRSRKARILLKQRKATVVQRTPFIIKLNYPVGGNKQALTMGIDAGYSTIGFSTVTEKSELLSGELTMRKKISKLIEQRSNYRRTRRGKLWHRKPRFNNRSKPEGWFAPSIQHKLETHLRLIDKLKNILPITEIIVEVASFDTHKLQNPEIKGVEYQQGELQGYEVREYLLEKWERKCAYCGKSNLPLEIEHIIPKSRGGTDRVSNLTLACHKCNQKKGDKTASEFGYPEVQKKAKQTLKANAFMNIVRWRLVNTLKCDWTYGYITKHDRIKFGMEESHINDAFVIAGGTNQSRTKPYKLTQTRRNNRRLQNNRKGFKPAIRRQMYKLHPNNLVKYLKNLYKVKGVHSYGKYVILVDKVGELVDINVKKVELVKHGKGIQF

SEQ ID NO: 15587 - protein, 515 aa, unidentified
MTALEEKLSKTEYIYVLGFDGKPQMPTRRKRHVLKLLKTGRARIAEDIPFTIRLTYRNAPVLQPVTLAEDPGRTNIGAAVLSPLGGLLFAAVIETRNKEIKKLMADRQKSRQASRRGERKARQRLAKRYGSMVKSGMVMRKLPMYAADKFVICKFIRNTQARFCNRKRCPDWITPTVQHLVQTHLNIIRKISRYLPVTDIAFEVNRFAFMHMENPEAMGVDFQNGPLKGYGDVKEAIRTQQHGKCLMCKKPITHFHHIVPRSRGGSDTIQNLAGLCTECHTKVHTDTAFRKDFDEKKSGQLKKYGALSALNQAVPFICKKLLEEYGEEHVHFCRGLDTSLIRTAFGFEKTKKNQMHEVDAYCIGLAALEVNEVETPAFDHTFQIRQFRRQDRSIIHHQTGRSYYQGKEKVAQNRKPGFEQKTTALSQWYKEQIRIHGEKEAEKLRSQLRVEKSCRHYNDMDRFLPGAVFLYEGKRYVLSGRITNGKYLRACGQGMKNFPAAECTFIRHNAGLVFI

SEQ ID NO: 15588 - protein, 431 aa, unidentified; identical to SEQ ID NO: 13666

SEQ ID NO: 15589 - protein, 364 aa, Oscillatoria sp.
DPGSKVTGIALKQGNHIIFGAELQHRGEQIKEALLSRRQLRRGRRNRKTRYRPARFLNRTRREGWLPPSLQHRVDTLMTWVNRFRRLTPVGSIAQELVRFDLQLMKNPDISGVEYQQGALQGYEVREYLLEKWGRNCAYCGVQNVPLEVEHIQPRSKGGSDRVSNLTMACHSCNQAKGNGDIRDFLSGQPDLLGRILKQTQLPLKDAAAVNSTRWALFKALKATGLRVTTGTGGQTKFNRLRLNRPKAHWLDAACVGPVDSLDILTSKPLLIRAKGHGTRRMCGTNKYGFPIRHRSRRQIHKGFRTGDIVAATVTAGKKIGSYVGRVLCRASGSFDITTASGRVAGISHKYCKPIHRKDGYAYA

SEQ ID NO: 15590 - protein, 570 aa, Streptomyces sp.
MRHVRSLNSNVTHTTPLSPKSLRAPASGATCPRRPHVRVISPDPCSLGNPRCVASGTSREGRSLAPSYRVTSPGHHDLRISRGASMTTFFTGEQTHQAVLPQQPALESAGADTPGSRDETAHGLPDPKPGTGVGHGRGETGAVRTRTRRRHARRLDPGSKATGIAVTDERDEVGAKGRTALVRRGLVSIELRHRGRQIHSGMVRRAGHRRRRRSANLRYRAPRRDNRTRPDGWLPPSLRHRIDSTMSLVARLCRYAPVLEIHVEQVAFDTALIAAAVSSREQDFSERTHAGSEIRESLLAKWERSCAYCGATGVLLNIEHVRPRSRGGSDRVANLVIACVPCNQAKGTARIDEFLADRPARLERVIAQLRRPLHDVAAMNTTRLLLVKTLATHGVAVHTWSGGRTSWNRLAMGLPKSHTLDALATGVIDLERGDAVVRIPAQILVVRSTGRGSYARTTPDRYGFPRLQRPRRKIHHGFSTGDLVAAVVPKGKWAGRWVGRVSVRAGGQHRITTLTSRFDVSHRNLRLLQRADGYTYGFADEIRLSEEHGPAYSGCTLKGGDPGNVRTPDA

SEQ ID NO: 15591 - protein, 417 aa, unidentified
MPCSPAKARLLLKEKKAIVKRRTPFTIQLTIAMGEAKQPVTLGVDSGYKHIGLSATTEKAELYASQVELRQDITDLLSARLALRRSRRSRKTRYRAPRFNNRVASKHKGWLAPSVENRIAAHLSRVEAVMRVLPVTAITVETAAFDTQLLKDPDIAGGAYQQGEQLGFWNVREYVLFRDGHVCQHCRGKSKDPVLNVHHIESRRTGGDAPNNLITLCETCHKAFHRGEIELKVKRGKSFKAETFMGIMRWTLFERLKKAHPELSVRNTYGYLTKHKRISHGIAKSHCADAYCIADNLGAKRLEGFFFQKQTRKHNRQIHKLSILKGGLRKKNQAPYEVKGFRLFDKVICKSEEAFIFGRRTSGSFDVRRLDGTRISAGISYKKLRLLEPRTTYLTEFRKEAALPPLHKCRGFRAEFL

SEQ ID NO: 15592 - protein, 428 aa, unidentified
LEIILKVAVLSMRGQCLMPCSPRKARVLLREKKAVVKQKSPFTIQLTIPTGETKQEVTLGVDAGSKHIGISVTTAKTELFASEVELRQDVTGLLADRRALRRSRRARKTRYRATRFNNRVHSKHKGWLAPSIENHIQAHLSRIEAVLKLFPVTKIVVETASFDIQKIKNPAITGNGYQQGELLDFFNLREYILWRDNHTCQHCKGKSKDKVLQVHHLESRRTGGNATNNLITLCKTCHEKSHTGEITLNIKRGRSFKDAAFMNIMRPAFVARLRKAHPGMLIEETYGYITKYQRIKLKLPKTHCADAFCIAGNLHATRSDVYLYQKQTRKHNRQIHKVNAIKGGIRKLNQAPYIVKGFRLFDKVKCFGKKCYGKEGFIMGRRQDGGFDIRTIDGQHISKSVSPKKLKLIQKRKTFLTAIKKEGASSPV

SEQ ID NO: 15593 - protein, 431 aa, unidentified
MPNKVYVLNKHGRPLMPCSPAKARHLLDAGKAKVKKRTPFTIQLVYGSSGYTQEVILGVDAGSKTIGMSASTTKEELLSAEVKPRNDVVDLLSTRREFRRARRNRKTRYRKPRFDNRVRSKHKEWLVPSVEVKIQEHITSIKRVCRILPVSKVVIETAEFDLQLLKAIEEGKPVPQGEDYQQGEMYGHYNVRQYVLWRDDYTCQCCGAHATKKKEVRLHVHHLESRKVGGDAPDNQVTLSESCHEKLHKGLIAEKDFKKRKRRSTRDATFMGIMRKTLMQRLCSELPIPVIETRGYITKATREKLLVLPKSHTNDALAIAQGKQGFNVGYLPEIAQIDKIYTIRPVRHHNRQLHKAAILKGGIRKSNQAEKYVFGYRLFDKVQFSGQDCFIWGRRTTGIFTIKTINGKMIKDGISFKKLKLVEKSTSYLIA

SEQ ID NO: 15594 - protein, 424 aa, unidentified; identical to SEQ ID NO: 3351

SEQ ID NO: 15595 - protein, 518 aa, Anaerostipes sp.; identical to SEQ ID NO: 3878

SEQ ID NO: 15596 - protein, 436 aa, unidentified
MTKTLATQTTQACVLDRQGQPLMPTTRLGKVYRLLKAKKAHIVSYEPFTIQLDYEPDTQVIQPMTLGVDSGAIHSGYSVANEHREYYNAEVIARNDISNRLSDKRMYRQNRRSRKTRYRQPRFNNRKNKKKGWLPPSLEQKVAVQVNEIGHIHRYFPIETIIVETAEFDIQKIKNPDISDIEYQQGTLQGYNIRNYLLEKHGRKCFYCGKAVSDFEVEHMFPKSRGGTNRIDNLTLSCHNCNEKKGTLTAEEFIKQTLSAKKAASKLKQLPNEKRLFKYMAYMNATRWALYDAIKERYPNVKMTYGYITKYNRIQAGLPKAHHIDAKCITGFATVPSMSQTVVKVKMRRHNRQLHRATFSKGHVRKAASLPTTVFGFQLYDLVLFNNHRYYVKSRKSSGYFRLTSVEGLKNEERTYKKLTLLAHTNAYLTHRYVNA

SEQ ID NO: 15597 - protein, 493 aa, unidentified; identical to SEQ ID NO: 2644

SEQ ID NO: 15598 - protein, 407 aa, unidentified
MPCSPAKARLLLKEKKAAVVRRTPFTIQLTIATGESKQPVSLGVDAGYKHVGLSASTEKAELYASEVELRKDITDLLSARRALRRARRNRKTRYRAPRFNNRIRTKRKGWLAPSVENRINAHLSRIEAVLRLLPVTKITVETASFDMLLKNPDIAGKEYQEGEQLGFWNVREYVLFRDGHVCQHCYGRSKDPVLNVHHLESRRTGGDSPGNLITLCETCHKALHRGEITLKAKRGQSFRAEAFMGMMRWEVLNRLKASHPELEVHNTYGYRTKHARIVNGIDKSHCADAFCIAGNLGAERLCEFLFQKQTRRNNRQIHKLSILKGGIRKRNQAPFEIKGFRLFDKVACKGEEGFIFGRRSSGYFDVRKLDGTRISAGISYKKLRLLEKRRTYLTEIRKEEAIPNSPA

SEQ ID NO: 15599 - protein, 413 aa, unidentified; identical to SEQ ID NO: 2636

SEQ ID NO: 15600 - protein, 439 aa, unidentified; identical to SEQ ID NO: 8850

SEQ ID NO: 15601 - protein, 423 aa, Scytonema sp.; identical to SEQ ID NO: 2740

SEQ ID NO: 15602 - protein, 431 aa, unidentified
MPNKVYVINKHGRPLMPCSPAKARHLLDEGKAKIKKRTPFTIQLLFGSTGYTQEVILGVDAGSKTIGLSASAETEELLSAEVKPRNDVVDLLSTHREFRRARRNRKTRYRKPRFDNRVRSKHKGWLAPSVEVKIQEHITSIKRVCRILPVSKVVIETAEFDLQLLKAIADGKPVPQGEDYQKGEMYGHYNVRQYVLWRDDYTCQCCGAHATKKKEVRLHVHHLESRKVGGDAPDNQVTLCESCHEKLHKGLITAKDFKKRKRRSTRDATFMGIMRKTLMQMLCSELPIPVVKTRGYITKATREKLLVLPKSHTNDALAIAQGKRGFNVGYLPEIAQIDKICTIRPVRHHNRQLHKAAILTGGIRKSNQAEKYVFGYRLFDKVQFNGQDCFIWGRRPTGIFTIKTINGKMIKDGISFKKLKPVEKSTSYLIA

SEQ ID NO: 15603 - protein, 400 aa, unidentified
AKVKKRTPFTIQLVYGSSGYTQEVILGVDAGSKTIGVSALTKKEELFAANVIPRNDVVDLLSTRREFRRARRNRKTRYRKPRFDNRVRSKHKGWLAPSVEVKIQEHITAIRRVCGILPVSKVVVETAEFDLQLLKAIADGKPVPQGEDYQKGEMYGHYNVRQYVLWRDDYTCQCCGAHATKKKEVRLHVHHLESRKTGGDASGNLVTLCESCHEKLHKGLITEDDFKKRKRRSTRDATFMGIMRKTLMQRLCSELPIPVIETRGYITKATREKLLVLPKSHTNDALAIAQGKHGFNVGYLPGIEQIDKIYTIRPVRHHNRQLHKATILKRGIRKSNQAEKYVFGYRLFDKVQFNGQDCFIWKRRTSGYFVVKTIDGKIIHNSASFKKLRIAERASNYLIA

SEQ ID NO: 15604 - protein, 423 aa, unidentified
MSNFIFVVDTNKKPLTPCKSSMARKLLTAGKAAIFRRFPCTIILKKAVTATIESITLKLDPGSKTTGIALLQGEKVIFGAELTHRGQTIKASLESRRSLRRGRRNRHTRYRQARFLNRTRKKGWLAPSLQHRVETTLTWVEKLRRLAPIGLIVQELVRFDLQQLENPEISAIEYHQGELQGYEVRQYLLNKWNRKCAYCDAENVPLQVEHIHPKSQGGSNRISNLCLACQKCNQKKGTQNIEQFLAKKPDILSRILTQSKRPLKDAAAVNSTRWTLFGRLKETGLPVLTGSGGLTKFNRSRLQLPKTHWLDAACVGQVEALELLTNKPLLIKETGHGTRQMCRTDKFGFPSRYVPRNKFVKGFQTGDIVKAIVISGKKIGEYVGRVAVRTTGSFNISASELVQGISHKYCKIVHKKDGYSYAY

SEQ ID NO: 15605 - protein, 452 aa, Petrotoga sp.; identical to SEQ ID NO: 7138

SEQ ID NO: 15606 - protein, 462 aa, unidentified; identical to SEQ ID NO: 4520

SEQ ID NO: 15607 - protein, 443 aa, unidentified
VVKANGTAVFTAHLETRNKEVPKLMQDRKKARRARRTNGRRCRRQRRAKANGTISKKCVKQDTAQSKNPSKRAKEIGIIKRRLPGYKKDVLCIGIKNKEAKYTNRTRPEGWLTPTANQLLQTHINLVRKMQKFLPISDVVLEVNKFAFMRLDNPDIQKWQYQQGPLYQKGSLENAVSEMQEHHCLFCDKPIDHYHHVVPQSENGSNTIANIVGLCAEHHNLVHKDAAWQKKLAEEKVGLNKKYGALSVLNQIIPALTNKLSVLFPKHFFVTAGKSTHDYRAAHGVSKDHWLDAYCIACSVLPSNVCDSNINNHMPYELKQFRRHDRRVLNNENMNRVYTLDNKAVAINRHKATEQEAASLEEFRKEHPNDVCKLKVKEHHPTYRNMNRNYPGSIFLVGKHVHIMQGIAGSKDGKATTYKDSNANSITASKCKFVAKNSGILFV

SEQ ID NO: 15608 - protein, 515 aa, unidentified
MTALEERLSKTEYIYVLGFDGKPQMPTRRKRHVLKLLKTGRARITEDIPFTIRLTYRNAPVLQPVTLAEDPGRTNIGAAVLSPLGGLLFSAVIETRNKEIKKLMADRKKSRQASRRGERKARQRLAKRYGSMVKSGMVMRKLPMYAADKFVTCKFIRNTQARFCNRKRCPDWITPTVQHLVQTHLNIIRKISKYLPVTDIAFEVSRFAFMHMENPKAMGVDFQNGPLKGYDDVKEAIRTQQHGKCLMCKKPIAHFHHIVPRSRGGSDTIQNLAGLCPECHTKVHTDTAFRKDFDRKKSGQLKKYGALSALNQAVPFICKKLLEEYGEEHVHFCRGLDTSLIRTALGFEKTKKNQMHEVDACCIGLAALEVNEVETPAFDHTFQIRQFRRQDRSIIHHQTGRSYYQGKEKVAQNRKPGFEQKTTALSQWYEEQVRIHGEKEAEKLRSQLRVEKSCRHYNDMDRFLPGAVFLYEGKRYVLSGRITNGKYLRACGQGMKNFPAAECTFIRHNAGLVFI

SEQ ID NO: 15609 - protein, 330 aa, unidentified
MVYVVANDGQPLMPTERHGKVCRMLKSGIAKVVKKCPFTIQLQYESERNVQPVALGIDAGSKHVGVSATTKAKVLYESDVELRDDIVKLLATRRQLRRRRRSRKTRYRPARFDNRRRKEGWLAPSIRQKIESHLTVVANVCKILPVSQIIVETASFDIQKIKNPDIQGIEYQQGEQMDFWNIREYVLFRDGHTCQCCKGKSKDKVLNVHHIESRKTGGNAPNNLITLCETCHKGYHNGTVTLPKNIKRGMKFKDAAFMGIMRWTFYNTLKEQYEPDIPVHYTYGYITKNTRINHNLPKGHCIDARCISGNPDAVSDGTYYYQKKVRCHNR

SEQ ID NO: 15610 - protein, 420 aa, unidentified; identical to SEQ ID NO: 3153

SEQ ID NO: 15611 - protein, 442 aa, Lactobacillus sp.; identical to SEQ ID NO: 4549

SEQ ID NO: 15612 - protein, 378 aa, unidentified; identical to SEQ ID NO: 11223

SEQ ID NO: 15613 - protein, 417 aa, unidentified; identical to SEQ ID NO: 5520

SEQ ID NO: 15614 - protein, 465 aa, unidentified
MSTCACVLSKNGERLMPTIRLGKVRHLLKDGKAKIIKHHPFTIQLLYDSETNIQPIEICEDVGYNYIGISVKSQSHEYVSVQYDTLQDEKDCHDSCRKMRRIRRNRLRYRKPRFDNRKRNKGWLAPSLEHKKELNVNVIKMYCKVVPITHVTVEVGSFDTMLVKAIQEGKAIPEGADYQKGPRYNLATLREAVFYRDKYTCQVCGRKANEGAILHVHHMFYWKGRHGNSLSELLTVCEKCHTPANHQQGGKLYRFGENIKFANLSGAAFMNTVRWQIVNELYTAFGKLFVTFTYGAMTKEKRIAFHLEKCHNNDAYAMGNFHPVDRCAFEHYKKVKRNNRILEKFHDSQYIDIRTGKVANGRSLFNGRINRSHKKNSENLHKYRGKRTRKGYRALRRKKVALNPGDLVSLNGEILVVHSTHAGKNGYVGVEFKAPSKSGKKSASLKKLKIVKTSNSMRSAWTKVS

SEQ ID NO: 15615 - protein, 512 aa, unidentified; identical to SEQ ID NO: 3971

SEQ ID NO: 15616 - protein, 440 aa, unidentified
MPTNSYRARRLLKSKRAVIHKYRPVFTIKLVDRTNGYTQPIEYKCDTGYQNIGISICSDTKEFVNEQRDLLKDEVKRHSNSRKYRRTRRNRLRYRKARWNNRKGMISKDGFAPSTRNKRDVHIHLYEEYYKVFPITKAVFEMGQFDTQVLKAVEAGLPVPEGTDYQRGEQYGYATLREAVFVRDSYTCICCGKSAIKDGVKLRIHHIGYLSGDRSNRMANLGSVCESCHTSKNHKPGGKLYSLKPELKTFKGATFMTTVRYSMVKKLKVMTPTVDIKVTYGATTKLARRVLSVKKTHSNDAYCMGEFHPKHRSDFKHYKKCRRNSRVLSRFYDAKYRDLRDGSVKTGSQLSCGRTNRKISRHTKLDERIYRAHKISRGRVSIRRQHYSLRPGDRVLYDGKVYFVTGMQNSGTHVKLTNGKVCSLKKVHVLQHCNAWTAVI

SEQ ID NO: 15617 - protein, 470 aa, Thermoanaerobacterium sp.
VWQTQKAEITLARRDYLLIALLVLYRTPKGEFYMVFVLDKHKKPLMPCTEKRARLLLESGRAVIHKINPFVIRLKDVTVDNCIIQPCRIKIDPGSKVTGIAILQGEKVLLLVELYHKQGIKKSLDDRRNHRRFRRNKLRYREPRFDNRKREKGWLPLSLEARVQQVINTVKKLAKYIPIDNISIEHVKFDTQLMQNPEISGVEYQQGELQGYEVREYLLVKWGRKCAYCGKENVPLEVEHIVPKSRGGTDRVSNLTIACHECNQKKGNMTAEEFGYPDIQKQAKQPLKDAAMINATRWKTYNLLKEMYPVECGTGALTKKNRIDRNLPKEHYCDACCVGQSTPKEFVFKADYILEFHAKGRGTRQRTLLNKYGFPRAYLSRQKEYFGFQNGDYVKAEVPKGKYKGQYTGYVAVRKSGYFDIRDANGKNIAQGISYQYCHIIQRYDGYKYGRRKRHILLHPSDAMDGVSCA

SEQ ID NO: 15618 - protein, 431 aa, unidentified
MPDKVYVISRLGHPLMPCSPAKARHLLDDKKAKVVKRMPFTIRLLYGSTKYIQPIILGVDAGSKTIGLSASTAKEEVFAAEVMPRNDVVENLSTRREFRRARRNRTTRYRKPRSDNRVRSNHERWLAPSVKVKIQEHITSIKRVCTILPISKVVIETAEFDLQLLKAIQEGKPIPEGEDYQKGEMYGSYNVCQYVLWRDNYTCICCGVRGTPKNPVRLHIHHFESRKYGGNAPDNHGTLCDDCHKKFHLGIITDVKLKTRRRQSTRDAAFMGIMRKTLMWRLRTELFIPVAETKGYITKATREKLLVLPKSRTRDALAIAQGRHGFGIKEYAYVEPANHIYTVRPVRHHNRQLHKASILKGGIRKRNQASKYVFGFRLYDKVLYQGKACFVWGRRTSGTFLLRTIDGIKVKDGVSYRNLTLLEQSSNYLIA

SEQ ID NO: 15619 - protein, 440 aa, unidentified; identical to SEQ ID NO: 5150

SEQ ID NO: 15620 - protein, 431 aa, unidentified; identical to SEQ ID NO: 3801

SEQ ID NO: 15621 - protein, 424 aa, unidentified; identical to SEQ ID NO: 3434

SEQ ID NO: 15622 - protein, 425 aa, unidentified; identical to SEQ ID NO: 2429

SEQ ID NO: 15623 - protein, 458 aa, unidentified
VSYTARYVPAYRIKHITKKEVPYMVYVLDIDGQPLMPTSRHRKVRKLLNSHLAKVAKRCPFTIQLLYQSTKETQPVSLGVDAGSRHIGLAATTEQKVVYQEELVPRNDVVKLLSARRALRSSRRSRKTRYRKPRFNNRVHSKHKGWLAPSVEVKIQEHITAIKRICQILPISDIHVETAEFDLQRLKAMEEGRPLPVGTDYQLGEQYDFYNTRQYVLHRDEYTCQCCGTHDNNVKLHVHHIESRQTGGDAPNNLITLCEHCHKLLHAGKTILPKGKKRGKSYRDATFMGIMRKTLLERLRKEVDVPVSWTYGYITKYWREKTDLEKSHINDAICISKYPYAKPLDTYYLTKAVRHHNRQIHKSNFSKGGIRKRNQAPYLVKGFRLFDKVLYQGKSYFIFGRRATGYFDIRTLDGTKINKGSIGYRKLRIQDTAKAYLTETKKEARAIPHMNEFTCVLA

SEQ ID NO: 15624 - protein, 408 aa, Bacillus sp.; identical to SEQ ID NO: 4228

SEQ ID NO: 15625 - protein, 201 aa, unidentified
NAPDNHRTLCDDCHKKFHLGIITDVKLKTRRRQSTRDAAFMGIMRKTLMWRLRTELFIPVAETKGYITKATREKLLVLPKSHTRDALAIAQGRHGFGIKEYAYVEPANHIYTVRPVRHHNRQLHKASILKGGIRKRNQASKYVFGFRLYDKVLYQGKACFVWGRRTSGTFLLRTIDGIKVKDGVSYRNLTLLERSSNYLIA

SEQ ID NO: 15626 - protein, 413 aa, unidentified
LKVFVLNMRGKPLMPCSPAKARHMLKAGKAFVVRRTPFTIKLTIATGETKQDVTLGVDAGARHVGISATTEKEEVFASEVALRQDITGLLADRLAFRRARRNRKTRYRAPRFNNRVRSKHKGWLAPSVENRIQAHMSRIDAVCRLLPVTKIVIEAASFDVQKIKNPTIEGTDYQQGDQLGFWNVREYVLFRDGHICQHCRGRSKDPILNVHHLESRKTGGDAPNNLITLCETCHKAYHAGKIKLKVKRGQSFRAEAFMGIMRWTLLDRVRKTHPKLPVENTYGYLTKHKRIALGLPKTHCADAFCIAGNLKALRRGDFLFQQQTRKHNRQIHKCSILKGGVRKLNQAPFLVKGFRLFDKVRIGGQIGFVFGRRVRGTFNIRRLDKTVIGTDINCKKLSLLETRKTFLTELRKE

SEQ ID NO: 15627 - protein, 442 aa, unidentified; identical to SEQ ID NO: 2903

SEQ ID NO: 15628 - protein, 453 aa, Erysipelotrichaceae sp.; identical to SEQ ID NO: 12267

SEQ ID NO: 15629 - protein, 531 aa, Acidithiobacillus sp.
MLAKGKAPKVPAASARLSAGTDGAGYKPSRGDIDRKVRVTSVRKDIGEKMAVFVLDRRKKPLMPCSEKRARMLLERGRARVHHMVPFTIRLVDRLVENSALQPVRLKLDPGSKTTGLALVREKETVDVSTGEIIRTLTVLMLLELKHRGHAIRDALTSRGAFRRRRRGNLRYRPARFDNRTKPEGWLAPSLQHRVGTTLAWVERLMRWAPVTALSQELVRFDTQQMQNPEISGTEYQQGTLLGYEVREYLLEKWGRECVYCGVENVPLEIDHIHPRSKGGSDRVSNLTVSCHDCNQAKSNMPVEQFLAKRPERVRKILAQAKAPLRDAAAVNSTRWALFQRLKATGLDVESASGGRTKWNRHQLDIPKEHCLDGACVGHVDAIERWQQPVLSIKATGRGSYQRTRLTKYGFPRGYLTRSKSAFGFHTGDMVKAVVTKGKKSGTWLGRVAIRASGSFNIQTAVCKTGNGLVQGIHHRFCTLIQRADGYGYSWTKIASTSARTNTQGDAEMGRSVTAALSLPGLNPGVSRATG

SEQ ID NO: 15630 - protein, 242 aa, unidentified
MPNKVYVINKHGRPLMPCSPAKARHLLDEGKAKVKKRTPFTIQLVYGSSGYTQEVILGVDAGSKSIEISASTKKEEVFAADVTPRNDVVDLLSTRREFRRARRNRKTRYRKPRFNNRVRSKHKGWLAPSVEVKIQEHITSIKMVCRILPVSKVVVETAEFDLQLLKAIEEGKPVPQGEDYQQGEMYGHYNVRQYVLWRDNYTCQCCGAHPTKKKEVRLHVHHLESRKVGGNAPGNLVTLWRC

SEQ ID NO: 15631 - protein, 448 aa, unidentified
MIYVISKDGKPLMPTKRRGKVRHLLKDGKAIIVKYEPFTIQLLYETTDYTQKIILGVDPGSKNLALTAITEKGNILYQAEVTLRTDIKENIRKKRTLRRARRQRKTPYRKRRFLNRKKPQGWLPPSIRARLHTHYQMVKSVASILPVTMIILEVGQFDTQAIINPDIEGTEYQNGQMAGFDSVKEFVKLRDKFTCHYKELRPDIICNDTLVVDHIIPQSKGGTSRPDNLITSCESHNIKKSNLSYKEFTGKKRPVPLSLKETPFMNILKDYLLMELQKIAPSRYTFGLYTRRKRKEFFLEKSHLNDSIAITGIKPVETPHCGVSTIYHIKQVRKKKRSLHEEIPRKGRSKPNRTARRNRKNIKSIEQKGVKWSLWDKVYIPQLHKTGFISGFTDRWAYIQELDGSYLQLSRKYRQNNPKKIRLISRNNNYIYMEEKSNHRKESSFISH

SEQ ID NO: 15632 - protein, 431 aa, unidentified; identical to SEQ ID NO: 4463

SEQ ID NO: 15633 - protein, 436 aa, unidentified
MTKTTTQKVTQVCVLDQNGQPLMPTQRLGKVYRLLKTKKAHIVAYEPFTVQLDYEPKTHIIQPMTLGVDSGAIHSGYSLANEHREYYSAEVIARDDISKNISDKRMYRRSRRSRKTRYRKPRFNNRKNKGKGWIPPSLEQKVSVQVKEIKHLHQYFPIKDIIIEVAEFDIQKIENPDISGKEYQQGTLQGYNIRNYLLEKYHHKCFYCDKDVSTFEVEHMIPKARNGSNRIDNLTLSCHNCNQKKGTLTAEEFIRQTLSPQKAAQKLRQLPETKQLLKYMAHMNVTRWVLYNTIKETYDSVSLTYGYITKHNRINAGLPKAHHIDAKCITGLSTVPSFDVTVVKTKMRRHNRQLHRATFSKGHIRRAATLPKHVHGFQLYDIVMFNKHRYYIKSRRSSGSFTLVSLEGLKGTERTYKKLTFLTHTNAYLTNRYVND

SEQ ID NO: 15634 - protein, 431 aa, unidentified
MPNKVYVINKHGRPLMPCSPAKARHLLDDGKAKVKKRTPFTIQLIYGSSGYTEDVILGVDAGSKTIGLSASTEQEELFAANVTPRNDVVDLLSTRREFRRTRRSRKTRHRKARFNNRVHSKHRGWLAPSVEVKIQEHITCIKRVCNILPISKVVVETAEFDLQLLKAVEEGKPVPQGEDYQKGEMYGHYNVRQYVLWRDGYTCQCCGAHSTKKKDVKLHVHHLETRKTGGDAPSNQITLCEDCHQKLHKGLIPAADFKKRKRKSTRDAAFMGIMRNTLMQRLRSELPIPVAETRGYITKATREKLLVLSKSHTNDALAIAQGRHGFNVGYLQSIPQNNRIYTIRPVRHHNRQLHKATVLKGGIRRVNQAVKYVYGFRLYDKVRYNGVECFVWARRVMGYFRLRHLGGENVKCGANYKNLELLERSQNYLIA

SEQ ID NO: 15635 - protein, 419 aa, unidentified; identical to SEQ ID NO: 6355

SEQ ID NO: 15636 - protein, 423 aa, unidentified
MVYVLNIDGQPLMPTDRHGKVRHLLKDGRAEVVKRCPFTIRLLYDSTHYTQDIVLGVDAGSKHIGLSGTTETKELYASDVELRNDIVDLISTRRQNRRSRRNRKIRYRKARFQNRVSGKKNWLAPSIRQKVDTHMTVVSRVCMILPVTKIIVETASFDIQKIKDPDISGTGYQQGEQLDFWNVREYVLSRDGHTCQCCKGKSKDPVLNVHHIESRKTGGDAPNNLITLCETCHKGYHSGAVQLPKAIHRGMRFKDAAFMGIMRWAFYNKLKEVYEPQDIEVSMTFGYLTKNTRIRHYLPKEHYIDARCISGHPEAIPSNEVFYQKKVRCHNRQIHKNTILKGGVRKRNQAGYLVKGFRLFDKVAYEGREYFIFGRRQSGFFDLRDLSGCKVNKGSLSYRKIGFLEPRQYYLCERRVMDTQGCA

SEQ ID NO: 15637 - protein, 278 aa, unidentified
VVVETAEFDLHLLKAIADGKPVPQGEDYQKGEMYGHYNVRQYVLWRDDYTCQCCGAHATKKKEVRLHVHHLESRKVGGDAPDNQVTLCESCHEKLHKGLIAEKDFKKRKRKSTRDATFMGIMRKTLMQRLYSELPIPVIETRGYITKATREKLLVLPKSHTNDALAIAQGKQGFNVGYLPGIVQINKIYTIRPVRHHNRQLHKAAILKGGIRKSNQVGKYVFGYCLFDKVQFNGQDCFIWGRTTGIFTIKTINGKMIKDGISFKKLKPVEKSTSYLIA

SEQ ID NO: 15638 - protein, 465 aa, Calothrix sp.; identical to SEQ ID NO: 5126

SEQ ID NO: 15639 - protein, 443 aa, Anoxybacillus sp.; identical to SEQ ID NO: 2702

SEQ ID NO: 15640 - protein, 242 aa, unidentified
LQFYRKEHGIMQYVYVLSKHGEPMMPCSPGKARLLLKQQKACVVRRTPFTIKLLYGSAGYKQPITLGVDAGSKHVGLSASTEKRELYREEFAPRNDVVELLSTRRQNRRSRRNRKTRYRAPRFDNRVHSKHKGWLAPSVEVKIQEHITIIKRICKILPISLVRVETAEFDTQRLKAMLAGKPLPVGTDYQLGEMYDEYNVRQYVLKRDNYTCQCCGAHTTAKKLVKLHVHHLESRKTGGNAP

SEQ ID NO: 15641 - protein, 416 aa, unidentified
MVYVLDKNGQPLMPTDRHRKVRLMLQSGQAKVIKRCPFTIQLNYDSGHQTQEISLGIDAGSKHIGVSATTKIKVLYEADVELRNDIVDLLSSRRELRRGRRNRKTRYRQAKFNNRRRGNGWLAPSIRQKIGTHLTVVKNICKILPISRIMVETASFDIQKIKNPDIQGAEYQQGDQLGFWNVREYVLFRDGHTCQCCKGKSKDKILNVHHIESRKTGGNAPNNLITLCETCHTGYHKGTVQLPKAIKRGMRFKDAAFMGIMRWAFYEALKQQYEPVGTPVHNTYGYITKHTRIAYDLPKEHYVDARCISGNPEASSNGEYYYQKKVRCHNRQIHKLTVLKGGIRKQNQATYLVKGYRLFDKVSYQGKGYFVFGRRQSGFFDIRTLSGEKVNKGSLSCKKLKFIATRTYYLTERRAV

SEQ ID NO: 15642 - protein, 283 aa, unidentified
  source 1..283: note = uncultured cyanobacterium
LRKYSPVTAISQELVRFDTQIMQNPEISGKEYQQGTLAGYETREYLLEKWGWKCAYCDLKDVPFQIEHIHPRAKGGSDRISNLTLSCEKCNIKKGTKDIKDFLKKDPERLKKIQFQAKQPLGDAAAVNSTRFKLLEVLKATGLPIETGSGGLTKFNRTTQNLEKTHWIDAACVGKSTPEKLNIKGVKPLIIKAAGHGTRQSCRTDKQGFPIRHCAREKIHFGFQTGDIVKAVVDKGKKIGTHVGRIATRATGSFNISTVKGLVEGISHRFCKAIHRKDGYGYQ

SEQ ID NO: 15643 - protein, 480 aa, unidentified; identical to SEQ ID NO: 7001

SEQ ID NO: 15644 - protein, 572 aa, unidentified
LFLQIPQAFGCLLRLSIFPVDSSARVALSRTIPLTANTQPRETQPPVSAGETYSKRRVAYMPTVYVLNKDGKPLMPTTRCMHVRHLLKNGKARVVKSKPFTIQLLYETDDVVQPLYLGIDPGRTNIGVAVVKADGAAVFTAHLETRNKEVPKLMKKRKESRCARRTNGRRCRRQRRAKTNGTISKKCVKQTTAQNGSVSKRAKEIGVIKRHLPGCEKDVLCIGIKNKEAKFTNRARPEGWLTPTANQLLQTHINLVKKIQKFLPISDVVLEVNKFAFMQLDNPNIQKWQYQQGPLYQKGSLENAVSEMQEHHCLFCEKPIEHYHHVVPKSENGSNTIANIVGLCTEHHNLVHKDATWQKKLAKEKVGLVKKYSALSVLNQIIPALTKEMNSLFPKHFFVTNGKSTYDYRTAHGVSKDHWLDAYCIACSVLPNDVCDSNINSHVPYELKQFRRHDRRVLHKANMSRVYTLNGKTVATNRHKAIKQTTDSLEEFRQSHPGDVCKLKVKEHHPAYRNLNRNYPGSVFLVDGQVHVMQGVSGSHNGKADGYYNTNGNAYPYYKCKFVVKNEGIVFA

SEQ ID NO: 15645 - protein, 417 aa, unidentified
MPCSPAKARLLLKEKKAIVKRRTPFTIQLTIATGEAKQPVALGVDSGYKHIGLSATTEKAELYASEVELRQDITDLLSARLALRRSRRSRKTRYRAPRFDNRVASKREGWLAPSVENRIAAHMSRVEAVMQVLPVTAITVETAAFDTQLLKNPDIAGEAYQQGEQLGFWNVREYVLFRDGHVCQHCRGKSKDPILNVHHIESRRTGGDAPNNLITLCETCHKAFHRGEIKLKVKRGKSFKAETFMGIMRWTLFERLKKAHPELRVRNTYGYLTKHKRISHGIAKSHCADAYCIADNLGAKRLEGFFFQKQTRKHNRQIHKLSILKGGLRKKNQAPYEVKGFRLFDKVICKGEEAFIFGRRTSGSFDVRRLDGTRISAGINYKKLRLLEPRTTYLTEFRKEAALPPLHECRGFRAEFL

SEQ ID NO: 15646 - protein, 431 aa, unidentified; identical to SEQ ID NO: 6230

SEQ ID NO: 15647 - protein, 475 aa, Ferroplasma sp.
MEKNMKEKQKLDRRDTYTPADAPQVRGNCDHALNREETLSVHGLKTPSNNPDVDIQSGMTGQDLRVPVINMRNEPLMPTSPGKARRLLKHNRARVISSNPFTIQLLYATGETKQPATLGIDAGYKHIGFSVVTEKRELISGEAVMRTDMPKLNVEKSMYRRNRRNRLWYRQPRFMNRRNNSKGWFAPSIAHKLQTHIRLIEKLKRILPVSKVIIEVASFDQQKMKNPEISGIEYQQGELQGYEVREYLLEKFHRTCVYCGKTNVPLEIEHLTPRSRNGPDTVDNLAISCHECNQKKNNLTAEEFGYPEVRKRALKSLKDAAFMNIVRWKLTQLTGSAYTFGYITKKNRISLGLDKSHANDAFVIAGGTTQARSTVFNVTQRRRNNRSLQINRKGFRPSIRRRRYPLQPGDVVEFGESRYGVVGVHSYGNYVIIRNGEKKMEVNIKKVKLVKYGKGLRFTTQFLPTLSHVVSLEGS

SEQ ID NO: 15648 - protein, 472 aa, unidentified
  REGION 1..472: note = Ga0315284_10114450
MLSSSWHCRARSCYGRWGDREGFACKKPFGPGRGKHYRRKPRGLFPVQLVFVLDTCRRPLAPVRPAEARILLSAGKAAVLRRFPFTIILKEEKPDEPVNTVIVKIDPGSKTTGLALVDLEGKVLFCAELQHRGLAIKARMEARRVVRRSRRNRKTRYRKPRFLNRRRSVGWLPPSTRHPILTIMTWVNRFRKLCNVVGISVERVKFDMQAMMNPETSGIEYQQGTLAGYTVREYLLEKWNRTCGYCGAKDVPLQVEHILAKHNHGTDRVSNLTLACEPCNRKKDKILVEVFLKDKPAVLKRILAQAQQPLRDAAAVNATRNALFAVLVATGLPVETGTGAQTKFNRVRLGYPKVHWIDAACVGDSGGVVILNPETKPLLIKATGHGNRQMCGTDRFGFPKQHRTRQSSHFGFHTGDIVMAVVPKGKFIGTHVARVSTRASGNFKLAGIGDVNHRYCAAVHRQDGYAYDQTTG

SEQ ID NO: 15649 - protein, 436 aa, Lactobacillus sp.; identical to SEQ ID NO: 14681
  VARIANT 49..52: note = X can be any naturally occurring amino acid

SEQ ID NO: 15650 - protein, 419 aa, Anaerostipes sp.
  VARIANT 419: note = X can be any naturally occurring amino acid
MVYVISQDGKPLMPCSDPIARLLLKQGKAKVKKREPFTIKLTYETTNHTQGLTLGVDTGSGTIGTAVSKDNGDIVYMSEVVVRNDITDKMTQRAKYRRNRRNRKTRYRKARWLNRASSIKKDRFSPTMQSKLHSHVREIEYIQSILPVTEMVFETGQFDMQLMKNPSLANPKVRPWGYQKGANYGFENTKAMVLNRDNYTCQCCKGKHKDSKLEVHHIVFRSQGGSDEESNLLTLCHTCHKDLHSGKINPKLSGKVKGNLKYATQMNSIRKQLFRFYPNAIETFGYVTKANRLHLGVDKEHYYDACTIATQGNAFNVKSNLYKKKCVSDGDFQKTKGIRSEQPIVTDKICGFRKFDKVRYFGNDYFIKGRMSTGYAILMDIDGNKIDFSTMPRGYKTPKLSNCKRITARSTVMTQVKVX

SEQ ID NO: 15651 - protein, 557 aa, unidentified; identical to SEQ ID NO: 10483

SEQ ID NO: 15652 - protein, 477 aa, unidentified
MIIALDKYKRPLGFLTERRCRILMERKRAVLYRVFPTVVILMDVDARTIPDLPSFRIKIDPGSKYTGIAIIRNDTDEFVYAMQIEHRGDAVRAALNKRKNARRNRRSRETGYRRAKWGNRCLSEKDKRSYDSSREDGWLPPSIRSAADNVISWVRRLGRWINLTECSFEAVRFDTQLMEDPDIEGEEYQHGTLFGLEIKEYLMEKFGHTCQYCGGKSGDPVLEWEHMRPKSRGGSDRVKNALLSCSSCNKDKGNRTPEEWLEQIKARLPREKGKRKELDEERVKLIQKVIDGKPQGSALRYAAWVSSSRRYLEKALFGIFGDVECSSGGRTKYNRTELGYPKEHHYDALCVGTVPEKGYHDRTNGYYLYAKAAGRGTRLRGHLNKCGMIVTKWTDRKNGFFGFQTGDIVVAEVPHKTPKPYKYEGRFVGRVMVRATGSFDIKTTDGKLVTVKEQYCRLLQANSGYQYTMKRAIPLGH

SEQ ID NO: 15653 - protein, 420 aa, unidentified; identical to SEQ ID NO: 3685

SEQ ID NO: 15654 - protein, 434 aa, unidentified
MQNYVFVIDTNKQPLNPIPPKKARRLLNKGKAAVFRMYPFTIILKTAIRQSRRCANNNPSISPCQIKIDPGSKVTGFALVQNNQVIWGMELEHRGGLIKKKLESRGAVRRGRRNRNTRYRKPIFLNRKRPEGWLPPSLEHRILTIQTWVKRLIKFCPVNEIWVERVKFDTQKMQNPEISGIQYQQGELAGYEVREYLLEKWGRECTYCGKQSVPLQIEHIHPRSLGGSDSALPTLRERVSNLCLACEKCNQRKGNKPIEDFLKKKPSLLQKIKSKAKQPLKDATAVNATRNKLVKVLQLIKVVVTGTGAQTKYNRTRLELPKQHWIDAACVGDIETLVLRTSQPLLVTCKGQGGRQKAALNKYGYPIRHNPLKPIKGWVTGDIAKHQKLGIGKVTPRSKGSFGFTPLGTKGYKSCKPQDISAIYRKDGYTYSFC

SEQ ID NO: 15655 - protein, 419 aa, unidentified; identical to SEQ ID NO: 4877

SEQ ID NO: 15656 - protein, 515 aa, unidentified
VTDVSTIYVLNKDGKPLMPTTRCGHVRYLLKEKKARVAASKPFTIQLLYETNDVVQPLYLGIDPGRTNIGVAVVKTDGTAVFTAHLETRNKEIPKLMKKRKDSRRARRTNGRRCRRQRRAKANGTISKKCVKQTTAQNGSVSKRAKEIGVIKRHLPGCEKEVLCIGIKNKEAKFSNCVKPEGWLTPTANQLLQTHINLVKKIRKFLPISDVVLEINKFAFMQLDNPNIQKWQYQQGPLYQKASLKEAVSEMQEHHCLFCKKPIAHYHHVVPQSENGSDTIGNIVGLCTKHHDLVHKDTSWQEKLAKKKTGFNKRYGALSVLNQIIPALTKELSSLFPKHFFATNGKSTYGYRAAHGVSKDHWLDAYCIAGSVLPNDAYDSNINNRVPYELKQFRRHDRRALHKENINRVYTLNGKKVATNRHKAIEQTTDSLEEFRQNHPNDVCKLKVKEHHPEYRNPKRNFPGCVFLVGKHTHVMQGTSGSHNGKADGYYDTNGNSYPFGKCKFVAKNEGIVFA

SEQ ID NO: 15657 - protein, 438 aa, unidentified
LKQTLLLGTNAKMLKPNFVLVIDTNLKPLIPCTPCIARKLLEAGKAAIYRQYPFTIVLKKAVTANPEPIELKLDPGSKVTGIALVQGQKVVFGAELTHRGQAIKMSLESRRAVRMGRRARHCRYRQARFLNRTRPKGWLAPSLAHRVKTTITWVKRFIKLAPIGSIVQELVRFDLQQHENPEISGTEYTQGTLAGFEVREYLLNKWDRKCTYCGIENVPLQIEHIHPKAKGGSNRISNLCLACEKCNLKKGTQDIEQFLSKKPDLLKRIKAQQKRPLKDAAAVNSTRWALFNQLQEAGLPVSTGSGGKTKFNRTRLKLEKTHWLDAACVGDLESLSVLTSQPLRIKATGHGSRQMCRINKYGFPCSKPKQSFTHCKTGDIVSITLTKPKVRFEVGTHKGRVKTPTEHGLEIKIGEYRLVVGDMTSVKFIHKQDGYSYQ

SEQ ID NO: 15658 - protein, 417 aa, unidentified
  source 1..417: note = Spirochaetales bacterium UBA6368
MVYVHNCFGLPLMPCTEAKAKHLLKAHKAKVVNLTPFTIRLNFVVDDITQPVTLGVDAGYKTIGLSASTENKVLFEGEVKLREDITTLLEGRRSLRRGRRNRKTRYRAPHFDNRVRSKNKGWLSPSVENRIGTHLSVIDKVYRLVPVSRIVVEVASFDIQKINNPDIEGEGYQKGEQLGFWNVREYVLWRDVHKCRNCSGKTKDTVLEVHHLVQRKEGGSDRPDNLITLCKTCHDAYHRGEIKLDKPKKGFKDATFMGVMRKTLVKRLRELYGSDMAKVTYGYITKNTRIENNLDKTHYIDARCIANHPTATSSETVYSLLKRRSHNRQIHKLTLLKGGVRKNNQCPRKIFGFRLFDTVLYNREICSVQGRRTSGYFDIRKPNGEKVSEGASYKKLKLISRSKNIDIWKCNATLTAY

SEQ ID NO: 15659 - protein, 421 aa, unidentified; identical to SEQ ID NO: 7637

SEQ ID NO: 15660 - protein, 406 aa, unidentified; identical to SEQ ID NO: 6079

SEQ ID NO: 15661 - protein, 544 aa, unidentified; identical to SEQ ID NO: 9768

SEQ ID NO: 15662 - protein, 456 aa, unidentified
MSTCVCVLSNSGERLMPTFRLGKVRRLLKDGKAKIVKHHPFTIQLLYDSKTNTQPIEICEDVGYNYIGISVKSESHEYVSAQYDTLQDEKEHHDDCRKYRRTRRNRLRYRKPRFDNRKRSEGWLAPSLEHKKQLNIRLIERYVSVIPITRATVEVGSFDTMLLQAIQKGESKPEGVDYQKGPRYNLATLREAVFYRDNYTCQVCGRKIADGAILHMHHMFYWKGRHGYQLDELVTACEKCHTPANHQKGGKLFGFGENKEFANLSGAAFMNAVRWQIVNALYATYGKEFVTITYGAMTKEKRIALQLEKTHNNDAYAMGDYHPACRCKFRHYQKRRRNNRVLEKFYDATYIDARTGNKAKGKELFNGRINRNHKKDSENFHKYRSKKVSKGRRSIRRQRYAIQPYDTVRLEGKTYITSGCHNKGTRLLIPANGKSKSVAISKVQVVCHAGAWIQII

SEQ ID NO: 15663 - protein, 318 aa, Parasutterella sp.; identical to SEQ ID NO: 12461

SEQ ID NO: 15664 - protein, 431 aa, unidentified
MPNKVYVINKHGRPLMPCSPAKARHLLDAGKAKVKKRTPFTIQLVYGSSGYTQEVILGVDAGSKTIGMSASTTKEELLSAEVKPRNDVVDLLSTRREFRRARRNRKTRYRKPRFDNRVRSKHKGWLAPSVEVKIQEHITSIKRVCRILPVSKVVIETAEFDLQLLKAIEEGKPVPQGEDYQQGEMYGHYNVRQYVLWRDDYTCQCCGAHATKKKEVRLHVHHLESRKVGGDAPDNQVTLCESCHEKLHKGLIAEKDFKKRKRRSTRDATFMGIMRKTLMQRLCSELPIPVVKTRGYITKATREKLLVLPKSHTNDALAIAQGKQGFNVGYLPGIVQINKIYTIRPVRHHNRQLHKATILKGGIRKSNQTEKYVFGYCLFDKVQFNGQDCFIWGRRTTGIFTIKTINGKMIKDGISFKKLKLLEKSTSYLIA

SEQ ID NO: 15665 - protein, 442 aa, Lactobacillus sp.; identical to SEQ ID NO: 3826

SEQ ID NO: 15666 - protein, 414 aa, unidentified
MVYVINKQGQALMPTERFGKVRRLLKNSLAHVVCRIPFTIQLDYDTTDYTQPVSLGIDAGSKHIGISATTSEKELYAADVELRNDIVDKLSTRRELRRTRRSRLRYRKARFNNRVSSKRKGWLAPSVENKIQTHLTVVEKIHKFLPITNIVVETASFDIQKINNPSISGVEYQQGEQLDFFNVREYVLFRDNHTCQHCKGKSKDKVLNVHHIESRKTGGDSPKNLITLCKTCHKAYHRGEFKLNIKRGKSFRDAAFMGIMRWKLYDRLKNIYPNVSMTFGYITKNTRITNNLPKEHYVDARCISGNPVAKPLGYYFYQKKVRCQNRQIHKANFLKGGRKKLNQAPFLVKGFRLFDLVEYQKELYYIFGRRSNGSFDIRKLDGTKVNKGSINCKYLRLIDKRKSILTEKRTQVNL

SEQ ID NO: 15667 - protein, 416 aa, unidentified
MVYVLDKNGQPLMPTDRHRKVRLMLQSGQAKVIKRCPFTIQLTYDSGHQTQDISLGIDAGSKHIGISATTKTKVLYEADVELRNDIVDLLSSRRELRRGRRNRKTRYRPARFDNRRRRDGWLAPSIRQKIGTHLSIMTNVCKIIPISRITVETASFDIQKIKNPDIRGAEYQQGDQLGFWNVREYVLFRDGHTCQCCKGKSKDKILNVHHIESRKTGGNAPNNLITLCETCHTGYHKGTVQLPKAIKRGMRFKDAAFMGIMRWAFYEALKQQYEPIGIPVHNTYGYITKHTRIEHNLPKEHYVDARCISGNPGASPNGEYYYQKKVRCHNRQIHKLTILKGGVRKQNQAAYLVKGYRLFDKVSYQGKEYFVFGRRQSGFFDIRTLSGEKVNKGSLSCKKLKFIATRTYYLTERRAV

SEQ ID NO: 15668 - protein, 512 aa, unidentified
MSTVYVLNKDGKPLMPTTRGGHVRHLLKEQKARVVRTKPFTIQLLYETDDVVQLLYLGIDPGRTNIGVAVVKTDGTAVFTAHLETRNKEIPKLMKKRKNSRRAKRTNGRRCRRQRRAKANGTISKKCVKQDTAQNGSVSKRAKKIGVIKRHLPGCEKEVLCIGIKNKEAKFSNRVRPEGWLTPTANQLLQTHINLVKKIQKFLPISDVVLEINKFAFMQLDNPNIRKWQYQQGPLYQKANLEEAVSEMQEHHCLFCKNTIDHYHHVVPKHKNGSNTIGNIVGLCAKHHDLAHKDISWQEKLAKKKTGLNKKYGTLSILNQIIPALTKELSSLFPKHFFATNGKSTYDYRAAHGVSKDHWLDAYCIACSVLPNDVCDSDINNRVPYEFKQFRRHDRRALHKENMSRVYTLNGKKVATNRHKAVEQTTDSLEEFRQCQPNDVCKLKVKEHHPEYRNPKRNFPGCVFLVGKRTHVMQGTSGSHNGKADGYYDTNGNSYSSGKCKFVAKNEGIVFT

SEQ ID NO: 15669 - protein, 406 aa, unidentified
MVYVQDIDGKPMMPTTRHGKVRRLLKANKATVVNLCPFTIQLTYKSTDHKQPVTLGIDAGAKHIGFSATTEKEELFACETILRTDIVDLLSTRSQNRRTRRSRLRYRKPKFNNRVFSKKKGWVAPSVKQRIDSHLNEVNEIHKILPITKIVIEAAQFDTHKMKNPNISGIDYQNGEQLGFWNVREYVLFRDGHKCSYCKGKSKDPILNIHHIESRKTGGDSPSNLITLCETCHKEYHKGNIDLKVRRGKSLCGAAIMGIMKWRLYDELKSRYSNVSMTFGYITKYNRIKYGIEKSHTSDAFVISKNFNAKRIEYQYLKRLVRRHNRQIHKMKILKGGKKKNNQAPFEVFGFRLFDKVLYNNEINFIYGRRKSGNFNIRDFNGENPKDVSYKKLKLIRGKRHPIILK

SEQ ID NO: 15670 - protein, 415 aa, unidentified
MVYVLANDGQPLMPTERHGKVCRMLKSGIAKVVKKCPFTIQLQYESERNVQPVALGIDAGSKHVGVSATTKAKVLYESDVELRDDIVKLLATRRQLRRRRRSRKTRYRPARFDNRRRKEGWLAPSIRQKIESHLTVVANVCKILPVSQIIVETASFDIQKIKNPDIQGIEYQQGEQMDFWNIREYVLFRDGHTCQCCKGKSKDKVLNVHHIESRKTGGNAPNNLITLCEPCHKGYHNGTVTLPKNIKRGMKFKDAAFMGIMRWTFYNTLKEQYEPDIPVHYTYGYITKNTRINHNLPKGHCIDARCISGNPDAVSDGTYYYQKKVRCHNRQIHKQTILKGGIRKSNQAEYLVRGFRLFDKVRYQGREYFIFGRRKSGFFDIRTLSGEKVNKGSINVKRLTFVDTRKNYLTERRTV

SEQ ID NO: 15671 - protein, 465 aa, unidentified; identical to SEQ ID NO: 7154

SEQ ID NO: 15672 - protein, 512 aa, unidentified; identical to SEQ ID NO: 3493

SEQ ID NO: 15673 - protein, 433 aa, Hydrocoleum sp.
MSNTNYVFVIDTNKKPLQPCKPTVARRLLNSGKAAVWRRFPFTLILEKAVEPVEKSLIIKIDPGSKFTGIALLDGFKVIWMLEIQHRGSLISEKLQKRSQRRRARRTKNLRYRKPGNPNKKKPFGWLAPSVMHRVETIMTWVKRLIKFCPVKSISMELVRFDTQLIQNPEITGYQYQQGELAGYELREYLLEKWGRQCAYCGKTNTPLEIEHIHPKSKGGSDRVSNLTVACNKCNQLKSNRDVKEFLSAKPELLKRIQTQAKLPLKDAAAVNSCRWKLFNTLKTTGLTVITSSGGQTKFNRRKHKLPKAHCIDAACVGEVNQLNFHTTQALVAICKGQGGRQKAAVNKYGYPIRYNPLKPIKGWNSGDLALNIETGEVGRVNPRSKSNSFNFTVPGQKAKSVHVSKLKVVHKKDGYTYTFCPQLSINVEENSV

SEQ ID NO: 15674 - protein, 340 aa, Aneurinibacillus sp.; identical to SEQ ID NO: 10078

SEQ ID NO: 15675 - protein, 490 aa, unidentified; identical to SEQ ID NO: 3566

SEQ ID NO: 15676 - protein, 415 aa, Ruminococcus sp.; identical to SEQ ID NO: 2438

SEQ ID NO: 15677 - protein, 453 aa, unidentified
MSVAVVSKTGMLLMPTSEYRARKLLKSKKAIILGYHPFTIQLTEREAGYIQPVELCMDTGYIHIGTSVKSEKHEYLGEQIDTLTDERQKHDACRMYRRQRRNRKRYRQPRFNNRERDDGWIAPSLEHKKTIHIQAISRICKVMPVTDITLEMGNFDTQVLKAREEGRPLPQGLDYQHGERYGIATLREAVFTRDGYTCQCCGRAIKDGAILHVHHIVYRSQGGTNRMSNLITVCDKCHTPANHKPGGKLYGWKPKVASFKGATYMTTIQWKLYNEVKVLFPDIDIHITYGAETKERRRAFDITKSHVNDAFVMGQFHPKHRSKPVCYKKKRRNNRCLEKFYDAKYIDSRNGKTRTGQELFNGRISHNHKKDSENLHQYRRQKISTGKRTIRKQHYAIQPHDIVIFNGEKFETSGCHNNGTRVILLPQKKSVAIKKLNIYRYAGGYFKSAFNQK

SEQ ID NO: 15678 - protein, 418 aa, unidentified
MVYILNKHNEPLMPCSERKARLLLKDGMAIVYRKDIFTIKLINGSYGYKQHITLGIDCGSKHIGVSATTDKQELFSANAELRNDVVKLLSDRRMLRRNRRSRKTRYRKPRFNNRIVKNGWIAPSIKQKIQSHFNLVGFLHKLLPITNIVVETAAFDIQKINNPIISGSEYQQGEQLDFFNVREYILFRDGHICQHCKGKSKDKVLNVHHIESRKTGGDSPNNLITLCETCHKAYHRGEFELNIKRGKSFRDSAFMGIMRWKLYDELKLRYDNVSMTFGYITKYKRIKLGLDKEHYNDAYCICGNLAAKMLSTHHLIRFIPRHSRVLHIHKFSKGGVRRSASAPYWLNGGKPSKSGAMFTMFDKVKFNGVVCFISGSSNGYAALRDINWNKIDECKTVVTVNKLLLISRKYGGFIVEKK

SEQ ID NO: 15679 - protein, 454 aa, unidentified
MQKFKVKLKYVPTDAPQVCSSTNFVLNRDQSLSVQDKVLTLNNLDVDPLQHKGGQSLRISVNAYVFNQRGKPLMPCSARKARILLKKGEAKVIKNYPFIIQLKKATGEQTQKCFLGIDPGHANIGFSVISDKKEIVCGVLKLDNRTTKKLIERKMYHRNRRNRLWHRQKRFNNRFKKEGWLSPSTQRKFDTHISFINKIKKIIPIFSVIIEAGNFDIQKIENPDIANIQYQRGSLFEYNNIRNFLMTKEHGRCQLCQKEFSRGNSSHIHHIISKNNGGTDREKNLSLLHKKCHKRLHKQKLFHLLNVNRNYKAATFMNIVSIRFRSALPGCNITYGNETFVKRNFLGLEKSHYNDAFIIAGGNRQKKIYPIYLNQKHRNNRKLQIDRKGFRPSIRRKRYSIQPCDIISVNSKKYLVKGCFNYGTAVRCTDGVDNFDFGIKKIGNIFHSKSIYVA

SEQ ID NO: 15680 - protein, 445 aa, Petrotoga sp.; identical to SEQ ID NO: 7625

SEQ ID NO: 15681 - protein, 451 aa, unidentified; identical to SEQ ID NO: 2910

SEQ ID NO: 15682 - protein, 465 aa, unidentified; identical to SEQ ID NO: 8068

SEQ ID NO: 15683 - protein, 442 aa, unidentified; identical to SEQ ID NO: 2903

SEQ ID NO: 15684 - protein, 375 aa, unidentified
ANRHRDEGWITPSARPLVQMHMNDLKSMCKILPISHVTLERVAFDFQKLENENIKVWEYGKGKLYGYDSPEEYIHDVQNGKCLVCGKPHIDYLHHIIPRSKGGSDKVSNIAGLCYDCHYGPMGVHNCQNTQDRLPELKSEANKQYKVSLLNSVMPVLIEEMDKFCKANSIMFSICEGHDTAKVRDMYDLQKDHCIDGFAISLVDRNVKSVDVMPDRIYQKQRYKKKSKNIIQKRNCREYYDDKKLVAVNRHKGTDQKADSLEEYMNTYAETHTTDECKKHFDSLVVKPARRTYTFHKEWRICPFHIGDKVRYEKKNKIKGNTKVDTFICEGIRFVKDENKAEVKHNKTKSKKMKFCRVLESGCTPYVDYRKLALM

SEQ ID NO: 15685 - protein, 557 aa, unidentified; identical to SEQ ID NO: 11277

SEQ ID NO: 15686 - protein, 524 aa, unidentified
MEILRIDWKDICPTGQSGLPQKELFMRPVYVLDMNGKPLMPTCRFGKVRRMLKSGEAKVVDTLPFTIQLDRPTKTHVVQSVTLGCDPGRTNIGLAAVRSDGTDLYRSHCETRNKEIVDLMDTRRAARRASRRGERLTRKRLAAKHETATTFPDGRKLPGYEKPIMLKDIINTEARFNNRVRPAGWLTPTATQLLRTHLNLIKRISRILPVSDIALEINKFAFMQLDEPDKNKWNIDFQHGPLYGTGGLKATVRQLQDDTCLLCQENVIEHFHHLIPRSKRGDNTINNIAGLCQRCHEAVHKSADTAEKLSTLKKGQTKRYGGTSVLNQIIPKLVEELGKTYHEHLHLTYGWQTKEFRTKHKLEKTHDTDAYCIAAGTMQTVKPNIRTDVYEIKQFRRHNRANIHHQTERTYKLNGQTVARNRRKRTDQKTDSLAEWFENTVKQYGQQKAEHLRAGLKVRKSTRYYNSKDRVMPGAVFQYEGNRYVVTGQLSGGQYYRAYGKGNHNFPVKKIRIISLNRGLVYVA

SEQ ID NO: 15687 - protein, 431 aa, unidentified; identical to SEQ ID NO: 7992

SEQ ID NO: 15688 - protein, 423 aa, Anoxybacillus sp.
VLDTNKRPLAPCHEAVARKLLKQGKAAIYRRFPFTIILKKSVDESEIKATYRLKIDYGSRHTGLAILRGQEVVWLGQLDHRTDIKERIDKRRAFRRARRNRKTRYRKPRFLNRKRKEGWLPPSLESRMQNIKTWVERLRKICPIEHISYENAKFDTQLMRNPEINGVEYQQGTLQGYEVREYLLEKFGRKCCYCGKEGVPLEVEHIIPKSRGGTDRIDNLCLACRDCNQRKGSQTAEEFGYPHIQEMVKKTLKDASVVNATRWKAYEVLKQTGLDVECGTGARTKMNRIRLDLPKTHYFDACCVGESTPNHLYFKTKEVLFIKAKGRGSRSRTNLDRYGFPRGYLARQKFFFGFQTGDMVKAVVPRGKYQGVWFGEVACRKTGSFDIKGKDGKRIAQGINYRYVQVIQRFDGYAYGKGVAELA

SEQ ID NO: 15689 - protein, 406 aa, unidentified; identical to SEQ ID NO: 6031

SEQ ID NO: 15690 - protein, 424 aa, unidentified; identical to SEQ ID NO: 8578

SEQ ID NO: 15691 - protein, 406 aa, unidentified; identical to SEQ ID NO: 3980

SEQ ID NO: 15692 - protein, 424 aa, unidentified
MRVFVLDNNKKPLDPCKPARARILLKGGRAKVFRRYPFTIIMQDLEGSECVTHEHQLKIDPGSKTTGLAIVQNNVVVWGAELTHRGSEIRESLTSRRQVRRDRRNRKTRYRKPRFLNRKKPDSWLAPSLMSRVHNIMTWVKKLIRICPVVGISQELVRFDTQKMQNPDISGMEYQQGELSGYEVREYLLEKWNRKCAYCETTNTQLEIEHIKPKSKGGSNRVSNLTLACRKCNQAKGNKEIEQFLSKKQDVLKFIRSFARQSLADTAAVNSTRWRLFHELKATGLCIETGSGGLTKYNRCRQNLPKTHWLDAANVGQVETLYVESYQPLLIVAKGHGTRQMCRTDKFGFPSRYLPRFKFVKGFQTGDIVKAIVTKGKKIGTYTGRIATRKTGSFNITTKNGLIQGISHKYCSIVHRKDGYSYSF

SEQ ID NO: 15693 - protein, 431 aa, Escherichia sp.; identical to SEQ ID NO: 3801

SEQ ID NO: 15694 - protein, 427 aa, Parasutterella sp.; identical to SEQ ID NO: 4733

SEQ ID NO: 15695 - protein, 412 aa, unidentified
MNVVYVLNKHGNPLMPCGPRKARVLLKEGKARVVRRVPFTIQLLYGSSGYRQRVYAGRDRGLTQGVFACREGGKTLLRLQVTGRRDVSELLYLRATLRRGRRYRKTGYRPCRNQNRRRPEGWLPSSVAHLWYEHQKVRCLVESILPVTAWVEEVNKFDTRKMWDRNVQGKGYQEGPLKGKKDVRQYVLERDSHRCVLCGDPEDLETHHIVWRFRGGSDHPKNLVTLCKKCHDKVTAGEIEVKAVAESYRWPARLNALNPLFDALEAVKVAPGETKKARAGLDLGKEHWADAAALVYAAFGAKPDLADLPSLLQGRFVRTKNRQLHRANPSKGGRRAKAQGNRYLVSKSGVRFMRNDLVECEARGAKVVGYVNSLRSSGSVRICDWQGKELANVSANKLKKLQNRDSIAWEVS

SEQ ID NO: 15696 - protein, 430 aa, unidentified
LETRNKEIPKLMQDRKKARRARRTNGRRCRRQRRAKANGTISKKCVKQTTAQNGSVSKRAKDIGVIKRRLPGCEKDVLCIGIKNKETKFTNRTRPEGWLTPTANQLLQTHINLVKKIQKFLPISDVVLEVNKFAFMRLDNPNIQKWQYQQGPLYKKESLESAVSEIQEHHCLFCKKPIDHYHHVVPQHKNGSNTIGNIVGLCAKHHDLVHKDSAWEKKLAQKSTGLNKKYGALGVLNQIIPTLTNELSSLFPKHSFVTNGKSTYDYRAAHGVSKDHWLDAYCIACSVLPSNVCDSNINNHMPYVLKQFRRHDRRVLNNENMNRVYTLNNKAVAINRHKAKDQKTVSLEEFRKEHPDDVCKLKVKEHHPTYRNMNRNFPGSVFLVGKQIHVMQGIASSKDGKATKYNDTSATAIAAGKCKFVAKNTGILFV

SEQ ID NO: 15697 - protein, 430 aa, unidentified
MVFVLNRSKKPLNMITNAEARILLKKKLAVIHKIYPFTIRLRDNSCGSQDRAYTVKIDPGSRHTGIAIVDDKDQVAMLAEIEHRGHLIKKDLDSRRAVRRKRRSRKTRYRPVRFLNRTRPQGWLPPSIKSRAENVINFIRKYKKLINIDKVMIESVSFDVAQMVSDDCLIGTGYQQGNLYQNKLRSFIFSRSNGKCVYCGAKATEIDHVIPRAKGGTNSTYNLVASCRSCNKKKSNLSLKDFGKLMGKDYSHLKTKKLHKDAAIVQIARNYTIRKIKEIISNTISYVPWMTKCNRDQLGLPKEHYYDALSVGNVENYKFLTDKVLTLSAKGRGSRQMCRVDRYGFPRTSAKASKSVEGFQTGDIVKAVVTKGARQGEYLGRVAVRSKKSFNIETKNGLVKDIGYKYCHLIQRNDGYSYNYKKRNCDGKNK

SEQ ID NO: 15698 - protein, 442 aa, unidentified; identical to SEQ ID NO: 2903

SEQ ID NO: 15699 - protein, 457 aa, unidentified
VWLYQAVYNLGEGFLPSSEERTAFYWLLIYRKEHGIMQYVYVLNKQGEPLMPCSPGKARLLLKQQKACVVKRTPFTIKLLYGSAGYKQPITLGVDAGSKHVGLSASTEKRELYREEFTPRNDVVDLLSTRRQNRRSRRNRKTRYRASRFDNRVHGKHKGWLAPSVEVKIQEHITVIKRTCRILPVALVRVETAEFDTQRLKAMLEGKPLPVGTDYQLGEMCDEYNVRQYVLKRDNYTCQCCGAHPTEKKPVRLHVHHLESRHVGGNAPNNLITLCVACHKALHEGKITLDKGKKRGKPLRDAAFMGIMRNTLLARLKDELNIPVKQTYGYITKLLREKNKIPKSHVNDARCIAKAPNAKPCDTMLYTRALRHHNRQIHKAKILNGGIRKKNQAPYLVKGFRLWDKVRYNGEECFITGRRSSGYFALKKYDGTVISNSASYKKLMLLEAATNYITERS

SEQ ID NO: 15700 - protein, 493 aa, unidentified; identical to SEQ ID NO: 2644

SEQ ID NO: 15701 - protein, 570 aa, unidentified
MALRDFSSPEHCRADTKSWKTVLPLCTGLPPTQGYRLSLRNCMTHQERRHLMPEFIYILGMDGKPQMPTTRRRHVQKLLNTGRARIAEHVPFTIQLLYKNDPILQPVMLAEDPGRTNIGLTVLSLKGDLLLSAVTETRNKEITKLIDKRRACRRTSRNGERKARQRRAKRFGTTLKAGMLMRKLPKYDTDKFVTCKLIRNTESKFCNRKRPDGWLTPSARQLADTHINLIHKMQKYLPITDVAFEVNRFAFMLLKDPSVSGVDFQNGPLKGFDDLHDAVCELQDGTCLLCNRKIEHYHHIIPKSKNGSDTIDNIAGLCMCCHDKVHKNEKEAQRLQKKKKGLNKKYGALSVLNQAIPFICKRLEEEFGAEHVFYCTGRETAAVRNSFGYQKTKDNQLHEVDAWCIGILALGKIPKTLPDFSYTCRIRQFRRQDRSRIKAQTERTYKLEGKIVAKNRKKRTEQKTDSLEDWYQKQTALYGQKEADRMRSRLTAAKSQRRYNAPSRILPGTVFLYDGKRHVLSGQLTGGKYFRAVGDAKTNYPASKCRIVRKNEGLVFISQVITERVAVSHG

SEQ ID NO: 15702 - protein, 408 aa, unidentified; identical to SEQ ID NO: 6548

SEQ ID NO: 15703 - protein, 408 aa, unidentified; identical to SEQ ID NO: 8232

SEQ ID NO: 15704 - protein, 462 aa, unidentified; identical to SEQ ID NO: 15460

SEQ ID NO: 15705 - protein, 254 aa, unidentified
MLAGKPLPVGTDYQLGEMYDEYNVRQYVLKRDNYTCQCCGAHTTAKKAVKLHVHHLESRKVGGNAPSNLITLCTTCHNNLHKGKITLDGKKRGKTLRDAAFMGIMRNTLLTRLRNELNIPVQNTYGYITKLLREQNDIKKSHVNDARCISKHPLAEPCSVCYRTKAIRHHNRQIHKAKILKGGIRKANQAPYIVKGFRLWDKVLYNGQECFISGRRSSGYFALRKFDGTTITNSISFKKLRLLEPATNYLIERK

SEQ ID NO: 15706 - protein, 422 aa, unidentified; identical to SEQ ID NO: 5457

SEQ ID NO: 15707 - protein, 451 aa, unidentified; identical to SEQ ID NO: 13438

SEQ ID NO: 15708 - protein, 432 aa, unidentified; identical to SEQ ID NO: 6070

SEQ ID NO: 15709 - protein, 515 aa, unidentified; identical to SEQ ID NO: 8359

SEQ ID NO: 15710 - protein, 421 aa, unidentified; identical to SEQ ID NO: 4220

SEQ ID NO: 15711 - protein, 473 aa, unidentified; identical to SEQ ID NO: 3562
  source 1..473: note = uncultured beta proteobacterium

SEQ ID NO: 15712 - protein, 406 aa, unidentified; identical to SEQ ID NO: 4902

SEQ ID NO: 15713 - protein, 407 aa, unidentified
MPCSPAKARRLLRAKKATIVDYRPFTIQLCWQCEGYTQDVTCGIDKGSRVTGLTCVGNATALLAAEIHHRQDVKAKMEDRRERRKSRRSRLWYRPRRFLNRASSKRSGRLPPSIKTNVEEIIRVVRQLPLPINALVIEDVQVDIARLNNPELRGSQYQDRTRLDENLRIACLMRDGYACQHCHKRGVRLEAHHIIYRERGGKDTLSNLLTLCEQCHQRLHQGKITLNVIGVSGRLDQTAQRTMQGKTYLYATLHALVPLNTVYGYETATYRKYRELPKTHIIDALCIATLGTGKVVAPPESNVYSIGFRPRQTRKQYHSLPQMGKGRVRYQVNEKLQGFRKGDLVLVKGKYVKLVNSIYSNGYLAFPRVKGEPNAARPHDCRILEREKTILWERIPVKDTQEKSNIR

SEQ ID NO: 15714 - protein, 411 aa, unidentified; identical to SEQ ID NO: 2663

SEQ ID NO: 15715 - protein, 549 aa, Streptomyces sp.; identical to SEQ ID NO: 14428

SEQ ID NO: 15716 - protein, 415 aa, unidentified
MIVYVLNKYGKPLMPCKPSKARKLLKQGKAKVVKKSPFTIQLLYGSSGYKQPITLGVDAGSKFIGLSATTDKQELFSAEVDLRNDIVRLLSDRRQYRKSRRSRTTRYRKPRYNNRVKSKNKGWLAPSVENKIQAHFNIIDKTHQILPISKIIVEVASFDIQKIKNPDIQGKEYQQGEQLNFWNTREYVLWRDGHKCQGKKGCKGNILNVHHIESRKTGGNSPDNLITLCENCHKDYHNGKLKLNLKRGQSFKDATFMGIMRWTFYNRLKEIYPNVNMTYGYITKNTRINNKLGKAHRIDARCISGNPTVKPLNYWYRIKQVRKHNRQIHKAKILKGGLRKLNQAPYEVKGFRLFDKVKYNGKECFIFGRRSSGYFDLRRLDGEVIHRSANYKNLKLVDRRKSMLWERGEHGCSLT

SEQ ID NO: 15717 - protein, 544 aa, unidentified
MKQKKQKVMVYILNKKGKPLMPTTRCGHVRKLLNSKKAVVVNSNPFTIRLKYDTPNGVQDVFAGIDSGRENIGSGASNEDGDCLYLGELKTSNKSIKLKMTERAGFRKERRRHDRQNKQRKARKDHTEIQNGNADICRTTISCKSVQISYPAAEKSVTHKIIRGKEGKFANRHRDEGWITPSARQLVQMHMNDLKSMCKILPISHVTLERVAFDFQKLENENIKVWEYGKGKLYGYDSPEEYIHDVQNGKCLVCGKPHIDYLHHIIPRSKGGSDKVSNIAGLCYDCHYGPMGVHNCQNNTDRLPELKSEANKQYKVSLLNSVMPVLIEEMDKFCKANSIMFSICEGHDTAKVRDMYDLQKDHCIDGFAISLVDRNVKSVDVMPDRIYQKQRYKKKSKNIIQKRNCREYYDDKKLVAVNRHKGTDQKADSLEEYMNTYAETHTTDECKKHFDSLVVKPARRTYTFHKEWRICPFHIGDKVRYEKKNKIKGNTKVDTFICEGIRFVKDENKAEVKHNKTKSKKMKFCRVLESGCTPYVDYRKLALM

SEQ ID NO: 15718 - protein, 437 aa, unidentified
MNSHGHWREGQFSERKAAEMLNNQKEYAFVSDAEGKKLDPTIVQNAWRLVRQKKVTLIAKRPMTIQLKKVIDNPNDDEIRMGIDDGAKHVGLALVQKCKTKNKVIFIATMEQRNDVHKLMEQRKNYRRYRRYWKRYRKARFSNRVSVRRKGRIAPSILQKRQAVVRITDSLSKYIRIDSIYLEDVAIDVRVLTDEKRLYSWRYQQSNRLDENLRKATILRDNCKCQLCGNKNCRLEVHHITPRRMNGANTIGNLITLCSECHSNVTGREMEFAEQLYSKIGKKKNNVSLQYASHVMVGKTWLREELSKRVPVLLTIGGDTANKRIDWNLEKSHEIDAICITNLEPESVGVKSWNIKPLRHQRKTMKVKEILGFRHRDIVCYTFKNGEYHEGYVTALYPSEGKQKEGLNFLSPTKHCKRVNPKKCQRLDRPDKFLWLV

SEQ ID NO: 15719 - protein, 494 aa, unidentified; identical to SEQ ID NO: 4543

SEQ ID NO: 15720 - protein, 470 aa, unidentified
MSVFVVGLNGCRLMPVSERKARLLLDGGKASVYRKVPFTIKLNYKTGSTTQPGYLGIDTGSQHIGVSVVREDGTVLHKEEVSLRDSMTKRKLLETKASLRRGRRYRKTRYRHPKWRPKTKRVYCEVPDKKGRHWKKQKGTFTSGRPEGWLPPSLQSKTDHHIRWIRKLQGLLPEGYRLSIELGRFDPARMKDPGIHGDLYQNGPQYDYENVRACVLDRDRYTCQVCKKKGGKLHVHHILYRSQGASDNPQYMATVCSSCHTMENHLPGGILYQWMLEQKKFTRGLRDATFMNILGKRLRKAFPDAVFTYGNITKVDREVLNLPKSHGNDATAIALVRTGVASVKDKEPVLYIQQVRRKKRSLHEETPRKGRKEPNRKAARNSKNTKAVTFTKRRGGKKTSVTACLFDRVELNGKKGWISGFTGTSCYMKDAEDNYIRTSGKYNQVSLSKLRILHHCGNWVIGARKPLGKG

SEQ ID NO: 15721 - protein, 419 aa, unidentified
MVYVISQENKPLMPCSNPVARLLLKQGRAKVKKREPFTIKLTYETTNYTQDLTLGVDTGSGTIGAAVSKDNGDIVYMSEVVVRNNIADRMIRRSKYRRNRRSRKTRYRKARWLNRKNSIKSGRFSPTTISKFHSHVKEIEYIKSILPITTMVLETGQFDTHLMKNPSLANPKLKHWGYQKGTNYGFENTKAMVLNRDDYTCQHCKGKRKDSKLEVHHIIFRSQGGSDEESNLITLCHACHKALHSGKIKLKLNGKAKGNLKYATQMNSIRKQLFRYYPDATETFGYITKANRLNLGTDKEHYYDACVIATQGKPFTVKTNLYKKKCVPDGDFRKTKGIRSEQAITTDKICGFRKFDKVKYFGKEYFIKSRKSTGYATLMDIDGNTVDFSSMPRGNKTPKLRNCKRVSARTSQMVQIVSV

SEQ ID NO: 15722 - protein, 427 aa, Parasutterella sp.; identical to SEQ ID NO: 6030

SEQ ID NO: 15723 - protein, 427 aa, unidentified; identical to SEQ ID NO: 14853

SEQ ID NO: 15724 - protein, 420 aa, unidentified
MVYVISKENKPLMPCSNAIARLLLKQGKAKVKRREPFTIKLTFETTNYTQDLTLGVDTGSGTIGTAVSKNNGDIIYMSEVIVRNDITDKMTQRAKYRRNRRNRKTRYRKARWLNRANSIRTNRFSPTMQSKLHSHVKEIKYIKSILPITTLVLETGQFDTHLMKNTTLANPKVRHWGYQKGVNYGFENTKAMVLNRDNYTCQCCRGKHKDSKLEVHHVIFRSNGGSDEQENLITLCHTCHKALHDGKLNISLTGKIKGTLKYATQMNSIRLQLLKQYPEAIETFGMVTKANRLKLGIEKDHHLDACVIANQGNPITFKTRSVYVKKCVSDGDFQKTKGVRSEQPITTGKICGFRKFDKVKYYGNEYFIKGRMSTGYVILMNIYGKKADFSHLPKGFKTPKLSNCKRISARNNWIIDELAI

SEQ ID NO: 15725 - protein, 512 aa, unidentified
MSTVYVLNKDGKPLMPTTRCGHVRHLLKEQKARVVASKPFTIQLLYKTNDVVQPLYLGIDPGRTNIGVAVVKADGTAVFTAHLETRNKEIPKLMKKRKDSRCARRTNGRRCRRQRRAKANGTISKKCVKHDTAQNGSVSKRAKEIGVIKRHLPGCEKEVLCIGIKNKEAKFNNRTRPAGWLTPTANQLLQTHINLIKKIQKLLPISDVVLEVNKFAFMQLDNPNIQKWQYQQGPLYQKANLEEAVSEMQEHHCLFCKKKIDHYHHVVPQHKNGSNTIDNIVGLCTKHHDLVHKDTAWHEKLTKKKTGLNKKYGALSVLNQIIPALTKELSSIFPKHFFVTTGKSTYDYRAAHGVSKDHWLDAYCIACSVLPNDVCDSSINNRVPYELKQFRRHDRRALHKENMSRVYTLNGKKVATNRHKATEQTADSLEEFRQNHPDDVCKLKVKENHSEYRNPKRNFPGCVFLVGKRTHVMQGTNGSHNGKADGYYDTNGNSYSSGKCKFVAKNEGIIFA

SEQ ID NO: 15726 - protein, 446 aa, unidentified
MQKLRKRNTYTPTDAPQVRGNCGLQLNKEETLSVASSKTSLNNPEVDLSQHTAKRKVVVYVVSIDGNGLMPCTPAKAKKLMNKGLADVYKMYPFTIQLKFECENVVQEVDLGIDEGYSNIGFSAISPIKELISGTVILENKTSDRLTEKRMYRKGRNSKKWYRKPRFLNRKKRIGMLSPSVERKYQAHLKIIRLCQEILPISSITLESGNFDIQKINNPEIVGEGYQQGDMYCYQNMRSYLMARENGKCQLCGKEFSKGHPSHIHHILERSKKGSDMPKNLAILHKKCHIKLHKKGLKLSAPKTMKSETFMSTISKRFYRDLPDFKETFGYITFIKRNELGLEKTHFNDAFVIANGTNQERITPIIIRQKRRNNRALQMNRRGFKPSIRKQRYKIQPKDLVWIDGKKNVSLGTHNNGTRVIVEENKKSYSIKKIEKIYNFGTFTFY

SEQ ID NO: 15727 - protein, 415 aa, unidentified; identical to SEQ ID NO: 6843

SEQ ID NO: 15728 - protein, 424 aa, unidentified; identical to SEQ ID NO: 3434

SEQ ID NO: 15729 - protein, 244 aa, unidentified
MVYVQDIDGKPMMPTTRHGKVRRLLKDSKAVVVNTCPFTIKLMSKTSGYKQEIVLGVDAGTKHVGLSATTKSKELYSSEVILRSDIVELLSTRRESRRTRRNRLRYRKPRFNNRIKSKRTGWVAPSVRHRIDAHIRVIDNICSILPVSRVIVEVAQFDTQKIKNPDISGDEYQEGDQLGFWNVREYILARDGHKCQHCKGKSKDPILNVHHIESRKTGGDSPSNLITLPAPFCPFHLIISLMQT

SEQ ID NO: 15730 - protein, 443 aa, Anoxybacillus sp.; identical to SEQ ID NO: 10273

SEQ ID NO: 15731 - protein, 403 aa, unidentified
  source 1..403: note = Clostridiaceae bacterium UBA4969
RLLLKQHKAKVIKKYPFTIKLLYKTKTEYTQPLALGIDTGSSKIGSAVVDENNNVLYLSQVEVRNDITDKMKQRAKYRRNRRNRKTRYRKARWLNRKNSIKEDRFSPTIVSKINSHLKEINFVKSILPIQNVILETATFDPHALKNPAVLHNKWLYQKGVNYGFANTRAYVLDRDNYTCQYCKGKSKDSKLEVHHIIFRSQSGSDESKNLITLCKTCHGKLHNGKINLKKNGKVKGQLKHATQMNSIRQQLLRLLPEATETFGFITKEHRQLMKLPKEHYYDAVAIACLNNIGNTGLIGVNFKTKNILFKRCIADGDFQQTKGVRSEKRITTGKIQGFRKFDKVEYQGKEYFIKGRMSTGYAILMDIEGNKINLKPIPKFEKMKRMQARKSWIISQETIQNIC

SEQ ID NO: 15732 - protein, 426 aa, unidentified; identical to SEQ ID NO: 3614

SEQ ID NO: 15733 - protein, 420 aa, unidentified; identical to SEQ ID NO: 3288

SEQ ID NO: 15734 - protein, 438 aa, Clostridium sp.; identical to SEQ ID NO: 4933

SEQ ID NO: 15735 - protein, 443 aa, unidentified
MTKTLTKQTTQACVLDQHGKPLMPTKRLGKVYRLLKTKKAHIVSYEPFTIQLDYEPDTHIIQPMTLGVDSGAIHSGYSVANEQREYYSSEVIARDNISYRISDRHMYRQNRRSRKTRYRKPRFNNRKNKKKGWLPPSLEQKVAVQLNEIDHLHRHFPIETIIVEVAEFDIQKIKNPNISGKDYQQGTLQGYNIRNYLLEKHGRKCFYCDKEVSNFEVEHMIPKAKGGSNRIDNLTLSCHSCNQKKGTLTADEFIKRTLPVENAAKKLKQLSKEKRLFKYMAHMNATRWTLYNAINDKYSNVKITYGYVTKYNRIQAGLPKAHHIDAKCITGFSQVPSFDTTVVKTKMRRHNRQLHRATFSKGHVRKAASLPTVMFGFRLYDIVMYNNHQYYIKGRRSNGSFALVSVEGLKEENRTYKKLTFLAHTNAYLTNRYVNNEIVNANN

SEQ ID NO: 15736 - protein, 477 aa, Acidithiobacillus sp.; identical to SEQ ID NO: 5650

SEQ ID NO: 15737 - protein, 431 aa, Escherichia sp.; identical to SEQ ID NO: 3801

SEQ ID NO: 15738 - protein, 536 aa, Anaerostipes sp.; identical to SEQ ID NO: 2718

SEQ ID NO: 15739 - protein, 412 aa, unidentified
RRARRTNGRRHRRQRRAKANGTISKKCVKQDTAQSKNPSKRAKEIGIIKRRLPGYKKDVLCIGIKNKEAKYTNRTRPEGWLTPTANQLLQTHINLVRKMQKFLSISDVVLEVNKFAFMRLDNPDIQKWQYQQGPLYQKGSLENAVSEMQEHHCLFCDKPIDHYHHVVPQSENGSNTIANIVGLCAEHHNLVHKDAAWQKKLAEEKVGLNKKYGALSVLNQIIPALTNKLSVLFPKHFFVTAGKSTHDYRAAHGVSKDHWLDAYCIACSVLPSNVCDSNINNHMPYELKQFRRHDRRVLNNENMNRVYTLDNKAVAINQHKATEQEAASLEEFRKEHPNDVCKLKVKEHHPTYRNMNRNYPGSIFLVGKHVHIMQGIAGSKDGKATTYKDSNANSITASKCKFVAKNSGILFV

SEQ ID NO: 15740 - protein, 466 aa, unidentified
LSIKPLINIGEGVIYSSICTGLSLQTYQKRKEVPCMVYVLDINGQPLMPTTRHGKVRRLLNSHLAKVVKRCPFTIQLLYQSTKEIQPVSLGVDAGSKHIGMAATTEKKVVYQEELSARNDVVKLLSARRTLRRTRRNRKTRYRKPRFNNRVHSKHKGWLAPSVEVKIQEHITTIKRICQILPISEIQVETAEFDLQRLKAMEEGRTPPVGTDYQLGEQYDFYNTRQYVLHRDGYTCQCCGTHDNNIKLHVHHIESRQTGGDAPNNLIILCEHCHKALHEGKLELPKGKKRGKSYRDATFMGVMRKTLLERLKKEIDVPVEGTYGYITKYWRERAGLEKSHIHDAVCISQYPYAKPLDIYYLTKTVRHHNRQIHKSNFSKGGIRKRNQAPYLVKGFRLFDKVLYQGKEYFIFGRRATGYFDIRTLDGTKVNKGSISYKKLRIQDTAKAYLKEARAIPHMNKFTCVLA

SEQ ID NO: 15741 - protein, 408 aa, unidentified; identical to SEQ ID NO: 3192

SEQ ID NO: 15742 - protein, 512 aa, unidentified; identical to SEQ ID NO: 13347

SEQ ID NO: 15743 - protein, 430 aa, unidentified
MTWARRKILQKWKVAEMPNIKKYAFVLDAEGKQLDPTIEQNAWRQVRQHKAKLVSRFPMVIQLNKVVDIPNTDEIRCGIDDGANHVGIALVQKCQTRNKVLFKGIIEQRKDVKKKIEQRRSYRRYHRYHKHYRPARFNNRASSRRSGRLMPSIIQRKQATLRVIDRLRQWIRMDGYWLEDVKIDIRALTDGYKPYHWQYQKSNRLDTNLRIATIFRDNCKCMECGKENTRFEVHHITPKKKGGADTISNLITLCPKCHARTFGREMQFADKYYKMIGPSGHIGGLDDAQRVMQGKHWFREQLQSRATLVLTTGGDTANKREDWNIIKTHSNDAICIADLEPESVDIEEWSIKPMRRKSKAGVDEVCGFHHRDYVSYTYRNGETHAGYVTAMYPEIHALNFQAPTKHCKKANALKCRLIWRFNKIYWFKCA

SEQ ID NO: 15744 - protein, 411 aa, unidentified; identical to SEQ ID NO: 6901

SEQ ID NO: 15745 - protein, 390 aa, unidentified
MRGKPLMPCSPAKARHMLKAGKAVVVRRTPFTIKLTIATGETKQDVTLGVDAGARHVGISATTEKEEVFASEVKFRQDITGLLADRLAFRRARRNRKTRYRSPRFNNRVRSKHKGWLASSVENRIQAHMSRIDAVCRLLPVTKIVIEAASFDVQKIKNPTIEGTDYQQGDQLGFWNVREYVLFRDGHVCQHCHGRSRDKILNVHHLESRKTGGDAPNNLITLCETCHKAYHAGKIKLKVKRGQSFRAEAFMGIMRWTLLDRVRKTHPKLPVENTYGYLTKHKRIALGLPKTHCADAFCIAGNLKALRRGDFLFQQQTRKHNRQIHRCSILKGGVRKLNQAPFLVKGFRLFDKVRIGGQIGFVFGRRVRGIFNIRRLDKTVIGKDINCKKN

SEQ ID NO: 15746 - protein, 494 aa, unidentified; identical to SEQ ID NO: 2450

SEQ ID NO: 15747 - protein, 443 aa, unidentified
LTKDENRPSGRTTGLRAEQAEPAGIRKGDTLKVFVLNMRGKPLMPCSPAKARHMLKAGKAVVVRRTPFTIKLTIATGETKQDVTLGVDAGARHVGISATTEKEEVFASEVALRQDITGLLADRLAFRRARRNRKTRYRAPRFNNRVRSKHKGWLAPSVENRIQAHISRIEAVCRLLPVTKIVIETASFDIQKIRNPEVEGTGYQQGDQLGFWNVREYVLFRDGHICQHCRGRSKDPILNVHHLESRKTGGDAPNNLITLCETCHKAYHAGKIKLKVKRGQSFRAEAFMGIMRWTLLDRVRKTHPKLPVENTYGYLTKHKRIALGSPKTHCADAFCIAGNLKALRRGDFLFQQQTRKHNRQIHKCSILKGGVRKLNQAPFLVKGFRLFDKVRIGGQIGFVFGRRVRGTFNIRRLDKTVIGTDINCKKLSLLETRKTFLTELRKE

SEQ ID NO: 15748 - protein, 406 aa, unidentified; identical to SEQ ID NO: 4082

SEQ ID NO: 15749 - protein, 513 aa, Leptospirillum sp.
MLPQSRALEVPDADNREGQDETVRDNTPVRNIPEGRCFARSALRPQGQNNVRFDGGFVQVFVLDKKKKPLMPCHPARARELLREGRAVVHRIAPFTIRLKERIGGETSPFGVKLDPGSKTTGLAAAREEETDGEKTAHVLFQAEIHHRGSAIKKKLDQRRAFRRRRRSQLRYRTPRFDNRTRPDGWLPPSLRHRVDTTLAWVERLRRLVPVSELSQELVRFDMQKIENPEISGAEYQQGTLAGYEVREYLLEKWGRTCAYCGASDMPLEIDHIHPRSLGGSDRVSNLTLACRSCNLKKGNRPVGEFLAKTPERLSTILARAKAPLKDAAAVNTTRWALFQALKATGLPVETASGGRTKWNRTRLVLPKTHALDAACVGKVDRIEGWNRPCLSIKSTGRGSYQRTRLDAFGFPRGSLTRTKAHFGFQTGDQVMAIVTKGKKNGTYAGRVAVRSSGSFNIQTGSRVVQGISCKDCRLLQRADGYGYSIHPITEKGEAGEALSLPGMNAGLSRARG

SEQ ID NO: 15750 - protein, 414 aa, unidentified; identical to SEQ ID NO: 4264

SEQ ID NO: 15751 - protein, 480 aa, unidentified
LYTKPLDNIGEGSLPPSGEINLKGMTFMVYVKSIDGKALMPTSNAKARKLLKQKKAKVVSLRPFVVKLTYKTKTEYTQKLNLGVDSGYSNIGFSVIDAKQEYIAGEVKLLEGMKKRLLEKASYRRIRRSRLRYRKARWNNRVKSKKKGWLAPSLKHKLDTHIKFIDYLKNILPIGKITIEVANFDIQKMKDDLISGIDYQNGDMFGFWNVREFVLHRDGHKCQNPNCKHKDKKEQILKVHHIRYRSEGGSDRPENLITLCSKCHTPANHKKGKFLYDWCVNGKKVRGFKDATFMSMIRWYLVNDLKSKHNNVSITYGYITKNHRIQNGIEKSHLNDAFAIAKGTNQARTKDRFLVIQDRLKNRSLEKFYDSKIIDIRTGKKVSGGDLSCGRSTRNKNLNTENLRKYRGAKISKGQRRIRKQKYFYQPNDLVKYDGKVYTVKGTQNEGKYIALKEIKKVPKVELLIPYVFKKGLNWSYGLC

SEQ ID NO: 15752 - protein, 410 aa, unidentified
VTTILKTCFAAFNLAKVVVLMDAWDIIVVLNKRGKPLMPCSPAKARLLLKEKKAIVKRRTPFTIQLTIATGETKQPVSLGVDAGYKHVGLSASTEKAELYASEVELRQDITDLLSARRALRQSRRNRKTRYRAPRFDNRIRTKRKGWLAPSVENRINAHLSRIEAVLRLLPVTKITVETASFDLQLLKNPDISGKEYQEGEQLGFWNIREYVLCRDGHVCQHCYGRSKDPVLNVHHLESRRTGGDSPGNLITLCETCHKALHRGEITLKAKRGQSFRAEAFMGIMRWEVHNRLRALHPGIEVSNTYGYRTKHARIANGIAKSHCADAFCIAGNLGAERLCEFFFQKQTRRNNRQIHKLSILKGGIRKRNQAPFEVKGFRLFDKVACKGEEGFIFGRRSSGFFDVRKLDGT

SEQ ID NO: 15753 - protein, 415 aa, unidentified
MFVYVISKDGQPLMPTARFGKVRRLLRDKKAKVIRSCPFTIKLLYEPETSVVQEVVLGQDTGSKYVGTACVANDKVSYQSEVTLRDNIKKKMDSRRGSRRNRRQRKTRYRKPRFLNRANSTKEDRLSPSVKSKVQAHADEIEFCKKILPVSEMVFETGKFDTQLMEKPWIQKYKWAYQKGVNYGFANARAHALDRDNYTCQCCGKKHVRLEVHHITFRSQGGSDELDNLITLCEKCHSAIHDGKITLNAKGKRKRNLKHATQMSIIRSQLLKIYPEAIETFGFVTKTNRENLNLPKEHFIDACVIASGGEKFEQLDQLFKKRQVAKQNRQLCKGAHGEKKLPTGKIFGFKRFDKVKYLGEIYFVKGRRSSGAFVLMDIDNNSIDFRDRGGRQNPSYKLLERLNTRRSTLCISQRI

SEQ ID NO: 15754 - protein, 476 aa, unidentified; identical to SEQ ID NO: 3164

SEQ ID NO: 15755 - protein, 431 aa, unidentified
MPNKVYVINKHGRPLMPCSPAKARHLLDEGKAKVKKRTPFTIQLVYGSSGYTQEVILGVDAGSKTIGMSASTTKEELLSAEVKPRNDVVDLLSTRREFRRAQRNRKTRYRKPRFDNRVRSKHKGWLAPSVEVKIQEHITSIKRVCRILPVSKVVIETAEFDLQLLKAIADGKPVPQGEDYQQGEMYGHYNVRQYVLWRDGYTCQCCGAHATKKKEVRLHVHHLESRKVGGDAPDNQVTLCESCHEKLHKGLIAEKDFKKRKRRSTRDATFMGIMRKTLMQRLCSELPIPVVETRGYITKATREKLLVLPKSHINDALAIAQGKQGFNVGYLPGILQIDKIYTIRPVRHHNRQLYKATILKGGIRKSNQTEKYVFGYRLFDKVQFNGQDCFIWGRRTTGIFTIKTINGKMIKDGISFKKLKLVEKSTSYLIA

SEQ ID NO: 15756 - protein, 456 aa, unidentified
MSTCVCVLSNSGKRLMPTFRLGKVRHLLKDGKAKIVKHHPFTIQLLYDGKTNTQPIEICEDVGYNYIGISVKSQSHEYVSAQYDTLQDEKACHDSCRKLRRSRRNRLRYRKPRFDNRKRGEGWLAPSLKHKKELNVNVVKMYCAVMPITHATVEVGSFDTMLVKAIQEGKAIPEGADYQKGPRYNLATLREAVFYRDNYTCQVCGRKVADGAILHMHHMFYWKGRHGDSLNELLTVCEKCHTPANHQKGGKLYGFGENVKFADLSGAAFMNTVRWQIVNELYAAFGKDFVTVTYGAMTKEKRIALHLEKSHNNDAYAMGNCHPAHRCEFGHYQKRCRNNRVLEKFYDATYIDTRTGDKAKGKELFNGRISRNHKKDSEDLHKYRSKKVSKGRRSIRRQRYAIQPYDTVRLESKSYITSGCHNKGTRLLIPANGKSKSVAISKVQVVCHAGAWIQII

SEQ ID NO: 15757 - protein, 406 aa, unidentified; identical to SEQ ID NO: 2874

SEQ ID NO: 15758 - protein, 296 aa, unidentified
INAHLSRIEAVLRLLPVTKITVETASFDLQLLKNPDISGKEYQEGEQLGFWNIREYVLCRDGHVCQHCYGRSKDPVLNVHHLESRRTGGDSPGNLITLCETCHKALHRGEITLKAKRGQSFRAEAFMGIMRWEVLNRLKASHPELEVNNTYGYRTKHARIANDIAKSHCADAFCIAGNLGAERLGEFFFQKQTRRNNRQIHKLSILKGGIRKRNQAPFEVNGFRLFDKVACKGEEGFIFGRRSSGFFDVRKLDGTCISAGISYKKLHLLEKRRTYLTEIRKEKALPPLPGGSGLRA

SEQ ID NO: 15759 - protein, 457 aa, unidentified
VWLYQAVYNLGEGFLPSSEERTAFYWLLIYRKEHGIMQYVYVLNKHGEPLMPCSPGKARLLLKQQKACVVKRTPFTIKLLYGSAGYKQPITLGVDAGSKHVGLSASTEKRELYREEFTPRNDVVDLLSTRRQNRRSRRNRKTRYRAPRFDNRVHSKHKGWLAPSVEVKIQEHITVIKRICRILPITLVRVETAEFDTQRLKAMLKEKPLPVGTDYQLGEMYDEYNVRQYVLKRDNYTCQCCGAHPTEKKPVRLHVHHLESRHVGGNAPNNLITLCVACHKALHEGKITLEKGKKRGKPLRDAAFMGIMRNTLLARLKDELNIPVKQTYGYITKLLREKNKIPKSHVNDARCIAKAPNAKPCDTMLYTRALRHHNRQIHKAKILNGGIRKKNQAPYLVKGFRLWDKVRYNGEECFITGRRSSGYFALKKYDGTVISNSASYKKLMLLEAATNYITERS

SEQ ID NO: 15760 - protein, 418 aa, Anoxybacillus sp.
MVEENMTCFMQRKGENPMVFVLDTNKRPLAPCHEAVARKLLKQGKAAIYRRFPFTIILKKSVDESEIKATYRLKIDYGSRHTGLAILRGQEVVWLGQLDHRTDIKERIDKRRAFRRARRNRKTRYRKPRFLNRRRKDGWLPPSLESRVQNIQTWVNRLKKLCPIGYISYENAKFDTQLMRNPEINGVEYQQGTLQGYEVREYLLEKFGRKCCYCGKENVPLEVEHIIPKSRGGTDRVDNLCLACHDCNQRKGSKTAEEFGYPHIQKQVKESLKDTSAINSTRWKAYEVLKQTGLDVECGTGARTKMNRIRLDLPKTHYFDACCVGESTTNHLYFKTKEVLFIKAKGRGSRSRTNLDRPPCRKKFGTIGRMKTNIVEISPCSWGHEVDVSMVRKSPKDRRTPVAWCTTECRSRVGKHAG

SEQ ID NO: 15761 - protein, 369 aa, unidentified
VDTGSGTIGTAVSNDNSDIVYMSEVIVRNDITDKMTQRRKYRKNRRGRKTRYRKARWLNRANSTKTDRFSPTMQSKLHSHVKEIEYIKSILPITTMVFETGQFDTHLMKNPNLANPKVKHWGYQKGVNYGFENTKAMVLNRDNYTCQCCKGKHKDSKLEVHHIIFRSQGGSDEESNLITLCHTCHKDLHSGTINFKLKGKLKGNLKYATQMNSIRKQLFMIYPDAIETFGYVTKANRLVLGIDKEHYYDACTIATQGNAFNVKSNLYKKKCVSDGDFQKTKGIRSEQPIVTDKICGFRKFDKVRYFGNNYFIKGRMSTGYAVLMDIDGNKADFSAMPKGYKTPKMVKLKRIEARTTWMITTVEVTPNIA

SEQ ID NO: 15762 - protein, 467 aa, unidentified
VGDFGRGAAPQTTACSCLHYLLSQIKNTIERIAYQMVYVLNVNGVPLMPTDRHGKVRRLLKSKQARVVKRTPFTIQLLYDTQTCVQPLTLGVDAGSKHIGLSVSSENKEVYAGQIEPRQDVSKRLDERRQYRRSRRNRLRYRKPRFNNRTASKPKGWIAPSIACKIESHVTVIGQLHQILPITEIVVEVADFDTQKILNPDIQGKEYQTGPLFNSNLRQYTFARDGYTCQWCKGKSKNKILHVHHWNYWRGDHTNKPSSVITLCDVCNDSKNHKKDGFLYGWEPKITNNLKDAAFMNMSRWALYNRLKEIYPNVRLTYGYITKVVRSDHGLEKSHVNDALCIANHPNATRLPYCYLIKKNRIHNRQIHKANKLKGGRLKLNQAPHLVKGYCLNDIVKCNGQSYVITGRRSSGYFQLKSLKTGERLQSVSYKKIKLLEKAKYYTTERVARNGEAIPSTVKTVGFLALF

SEQ ID NO: 15763 - protein, 430 aa, unidentified
MKAVFVLSNTKKPLMPCRPARARKLLTAGKAAVYRLHPFTIILHDRADGDVQDVEVKVDPGSKTTGIALVGHFEQQGAVVLFGANLNHRGQAIKNNLESRRSLRRGRRGRKTRYRQSRFLNRTRKAGWLPPSVESRVMNTESVINKLANRCPITSATVELVKFDMQQMVNPEVSGVEYQQGELAGYEVREYLLEKWNRTCAYCGTQHVPLQVEHIQPKAQGGSNRVSNLTLACQPCNQKKGSQPIDQFLQRQPDVLRKIKAQAKAPLKDAAAVNASRWALVNRLREWLPVTTGSGGRTKCNRTRQGYPKDHWIDAACVGESGEQVTIREGMKPLTITAKGRGSHQVVRTDKYGFPRGKAGRIKRIHGFSTGDIVKLVMAKGKYVGTYIARLAGIRLTGTLDIKTAAGTVGASWKNFTLIQRNDGFDYATI

SEQ ID NO: 15764 - protein, 442 aa, unidentified; identical to SEQ ID NO: 11618

SEQ ID NO: 15765 - protein, 413 aa, unidentified; identical to SEQ ID NO: 3220

SEQ ID NO: 15766 - protein, 425 aa, unidentified
MVYALNKDGQPLMPTDRHGKVKHLLKDGKAKVVKRCPFTIKLLYESTTHTQNLTLGVDTGSGTVGAAVSKDNGDIVYMSEVVVRNDITDKMTQRSKYRRNRRNRKTRYRKARWLNRKNSIRPDRFSPTMISKFHSHIKEIEYIRSILPITTMVFETGQFDTHLMKNPSLAGPDIRHWGYQKGSNYGFENTKAMVLNRDGYTCQYCKDRHKDRKLEVHHIMFRSKGGSDEESNLITLCRTCHKDLHSGKIRPDFKGKTKGTLKYATQMNSIRKQLFRSYPEAAETFGYITKANRLAIGVAKGHYYDACTIATQGKPFIVKTSLYKKKCVSDGDFQKTKGTRSEQPIVTDKICGFRKFDKVQYFGKEYFIKGRMSTGYAILMNIDGKKADFSTMPKGCKIPKMTKLKRVEARTTWMVTAVEVTPNIA

SEQ ID NO: 15767 - protein, 441 aa, unidentified; identical to SEQ ID NO: 12415

SEQ ID NO: 15768 - protein, 374 aa, unidentified
SKRAKKIGVIKRHLPGCEKEVLCIGIKNKEAKFSNRTRPEGWLTPTANQLLQTHINLVKKIQKFLPISDVVLEINKFAFMRLDNPNVQKWQYQQGPLYQKASLEEAVSEMQEHHCLFCKNTIDHYHHVVPQHKNGSNTIGNIVGLCAKHHDLVHKDTSWQEKLAKKKTGLNKRYGALSVLNQIIPALTKELSSLFPKHFFATNGKSTYDYRAAHGVSKDHWLDAYCIAGSVLPNDACDNNINSHVPYELKQFRRHDRRALHKENMSRVYTLNGKSVATNRHKAIKQTTDSLEEFRQRQPNDVCKLKVKEHHPEYRNPKRSFPGCVFLVGKQTHVMQGTSGSHNGKADGYYDTNGNSYSSGKCKFVAKNEGIVFA

SEQ ID NO: 15769 - protein, 440 aa, Clostridium sp.; identical to SEQ ID NO: 10253

SEQ ID NO: 15770 - protein, 447 aa, Marinobacter sp.; identical to SEQ ID NO: 5861

SEQ ID NO: 15771 - protein, 442 aa, unidentified; identical to SEQ ID NO: 3218

SEQ ID NO: 15772 - protein, 442 aa, unidentified; identical to SEQ ID NO: 2903

SEQ ID NO: 15773 - protein, 406 aa, unidentified; identical to SEQ ID NO: 2752

SEQ ID NO: 15774 - protein, 453 aa, unidentified
MMTAVLSSIGVRLMPTTCFKARKLIESGKAVIHSYDPFTIRLTQRESGGTQPIEYCCDTGYQHIGISIKSAKHEYVGVQVDALKDEKKHHQDAMTYRRTRRNGKTRYRAARFDNRKATKSKGWLAPSIRHKKDIHLAQVQKYAKVFPITSIVFEMGEFDTQKLKAIEEGRHTPAGVEYQQGEQYGFDDVRNAVFTRDDYRCVCCGRGVKDGVILHVHHLKYRSLGGTNRMGNLVTVCDRCHTPANHQKGGLLWNLMDKYKVKNFKGATFMTSVRWQMYDELKVMFPDTEIHLTYGSRTKETRRLLGIRKSHINDAYSMGDFHPKHRSEHWLYTKKRRNNRVLAKFYDAKYIDSRDGKKKSGKDLFSGRTKRSRELNVENLHRYRQQKVSKGRVSVRRRHYPIQPGDTVIYEGRKYITKGVQNLGTYLKIGEKVVPVRKIRIHRYAGGYIRQMM

SEQ ID NO: 15775 - protein, 413 aa, unidentified
LKVFVLNMRGKPLMPCSPAKARHMLKAGKAVVVRRTPFTIKLTIATGETKQDVTLGVDAGARHVGISATTEKEEVFASEVALRQDITGLLADRLAFRRARRNRKTRYRAPRFNNRVRSKHKGWLASSVENRIQAHMSRIDAVCRLLPVTKIVIEAASFDVQKIKNPTIEGTDYQQGDQLGFWNVREYVLFRDSHICQHCRGRSKDPILNVHHLESRKTGGDAPNNLITLCETCHKAYHAGKIKLKVKRGQSFRAEAFMGIMRWTLLDRVRKTHPKLPVENTYGYLTKHKRIALGLPKTHCADAFCIAGNLKALRRGDFLFQQQTRKHNRQIHRCSILKGGVRKLNQAPFLVKGCRLFDKVRIGGQIGFVFGRRVRGTFNIRRLDKTVIGKDINCKKLRLLETRKTFLTELRKE

SEQ ID NO: 15776 - protein, 424 aa, unidentified
LVWNKRGKPLMPCSPAKARLLLKEKKAIVKRRTPFTIQLTIATGESKQPVTLGVDAGYKHVGLSASTEKAELYASEVELRQDVSDLLSARRALRQSRRNRKTRYRAPRFDNRIRTKRKGWLAPSVENRINAHLSRIGAILRLLPVTKITVETASFDTQLLKNPDISGKEYQEGEQLGFWNVREYVLFRDGHACQHCHGRSKDPVLNVHHLESRRTGGDSPGNLLTLCETCHKALHRREIKLKTKRGQSFRAEAFMGIMRWEVLNRLKASHPELEVHNTYGYRTKHTRIVNGIDKSHCADAFCIAGNLGAKRLGEFFFQKQTRRNNRQIHKLSILKGDIRKRNQAPFEVNGFRLFDKVACKGEEGFIFGRRSSGFFDVRKLDGTCISAGISYKKLHLLEKRRTYLTEIRKEEALPPPPEGRGLRA

SEQ ID NO: 15777 - protein, 529 aa, unidentified
VGHVAAAEPDVPERHSQFRETAVQSRSLTQGATARLRETYHLQKRCPDHRAPSTGGKKMLLFTIDRNGRPGHPTRRFDMIRKLVKQGRAKIIGGGTSGKPPVAMFLDREFDYSKTVSRKLIIVLDPGYQCIGFAICELKGRKVIVYCIGVLETRIPEIKELMAERRTHRRNRRYYSRCKKRRLSAKQGRVLTKFKVPRNVRAENRTNATLRHGIETHLNLYKKLLKFFPFPAEQVVFVMEDNVFDVRSMTWGKTYGTGYQKSPRVPAEKKCIICGAEDNLQKHHLIQRKRCGTDVQENLVYLCRDCHEDVHAGRVYIPVDGVKQWRALGTMNAIIGQLRKIRWLKFVPASDVAQMRKRLELEKSHANDALAAAAVFCNCPEIDKTHMIELTLAKFRRHNRARTHTVRDRLYKVNGEIVAKNRRKRTDQKEPSFADISPLPPEIQRKLKVYPGTKILNPLRKEMPTIAGDVWIHIPTGKRFVATGVVSQKYLYSPQLKKIVGKTYVKPEECRQVLHNEGMVVMYNSLYRN

SEQ ID NO: 15778 - protein, 458 aa, unidentified
MNTCVCVLSNNGERLMPTFRLGKVRRLLKDGKAKIVKHHPFTIQLLYDSKTNTQPIEICEDVGYNYIGISAKSKSHEYVSAQYDTLQDEKEHHDDCRKMRRTRRNRLRYRKPRFDNRKRGEGWLAPSLRHKKELNVNVVKMYCAVMPITHATVEVGSFDTMLVKAIQEGKVIPEGADYQKGPRYNLATLREAVFYRDNYVCKVCGRKATEGAILHMHHMFYWRGRHGNSLDELLTVCEKCHTPANHQKGGKLYGFGEDVKFTDLSGAAFMNTVRWQIVNELYAAFGKPFVTITYGAMTKEKRIALQLEKSHNNDAYAMGEFHPSCRCKFRHYQKRRRNNRVLEKFYDATYIDTRTGNKAKGKELFNGRISRNHKKDSENLHKYRAHKITKGRCSIRSKHYDIQSGDTVLYAGRKCITTGCFNKGKWLRIPVGSTAKSVAISKVKLINHVGAWKEGSSI

SEQ ID NO: 15779 - protein, 225 aa, unidentified
MPNKVYVINKHGRPLMPCSPAKARHLLDAGKAKVKKRTPFTIQLVYGSSGYTQEVILGVDDGSKTIGISASTKKEEVFAADVTPRNDVVNLLSARREFRRARRNRKTRYRKSRFDNRVRSKRKGWLAPSVEVKIQEHITSIKMVCRILPVSKVVIETAEFDLQLLKAIEEGKPVPQGEDYQQGEMYGHYNVRQYVLWRDNYTCQCCGAHATKKKEVRLHVHHLES

SEQ ID NO: 15780 - protein, 429 aa, unidentified
MCNYVFVLDASHKPLNPCRPVTARKLLTAGKAAVYRRYPFTIILKKQVEAEPKPMSLKIDPGSKITGLAIVYGNQVVWSAEIEHRGSKIKSALDSRRAVRRSRRNRKCRYRKPRFNNRKRPEGWLAPSLQHRVATTMTWVLKLMKLTPIGGISQELVRFDTQKLQNPEISGIEYQQGELMGYEVREYLYQKWGRQCVYCGAKSVKLEVEHIIPKSKGGTNRVNNLTLACHRCNQAKGNLDARDFLSGKPDVLKRILGRAKQPLLDAAAVNSTRWQLYQSLKETGLSVAVGTGGRTKYNRIKLGLPKGHWVDAACVGEVATLKIVTRQPLLIKAMGHGCRQVIQMDKYGFPRKGYKPKHPVKGWKTGDIVNVVAGKNAGLKGVRIKTVRAKGNFDLIGADQDSSNKVNSASRNYIQCVHRQDGYYYSFAK

SEQ ID NO: 15781 - protein, 521 aa, unidentified; identical to SEQ ID NO: 11204

SEQ ID NO: 15782 - protein, 424 aa, unidentified; identical to SEQ ID NO: 3351

SEQ ID NO: 15783 - protein, 416 aa, unidentified
MVYVLDKNGQPLMPTDRHRKVRLMLQSGQAKVIKRCPFTIQLNYDSGHQTQEISLGIDAGSKHIGVSATTKIKVLYEVDVELRNDIVDLLSSRRELRRGRRNRKTRYRQAKFNNRRRGNGWLAPSIRQKIGTHLTVVKNICKILPISRIMVETASFDIQKIKNPDIQGAEYQQGDQLEFWNVREYVLFRDGHTCQCCKGKSKDKILNVHHIESRKTGGNAPNNLITLCETCHTGYHKGTVQLPKAIKRGIRFKDAAFMGIMRWVFYEALKQQYEPVGTPVHNTYGYITKHTRIAYNLPKEHYVDARCISGNPEASSNGEYYYQKKVRCHNRQMHKLTILKGGIRKQNQATYLVKGYRLFDKVSYQGKGYFVFGRRQSGFFDIRTLSGEKVNKGSLSCKKLKFIATRTHYLTERRAV

SEQ ID NO: 15784 - protein, 411 aa, unidentified; identical to SEQ ID NO: 3917

SEQ ID NO: 15785 - protein, 442 aa, unidentified; identical to SEQ ID NO: 2903

SEQ ID NO: 15786 - protein, 453 aa, unidentified; identical to SEQ ID NO: 2687

SEQ ID NO: 15787 - protein, 420 aa, unidentified
MQYVYVLNKHGEPLMPCSPRKARLLLKQKKACVVKRTPFTIKLLYGSTGYKQPITLGVDAGSKHIGISAATEKYELYREEATPRNDVVDLLSARRAFRRSRRNRKTRYRAPRFDNRVHSKHKGWLAPSVEVKIQEHITLIKRVCRILPVTLVRVETAEFDTQRLKAMLEGKPLPVGTDYQLGEMYDEYNVRQYVLKRDNYTCQCCGAHPTKTKAVKLHVHHIETRRTGGNAPNNLITLCTACHKALHAGKVTLNGKKRGKPLKDAAFMGIMRKTLMERLLKELKIPVQETYGYITKYLREKHSIPKSHTNDARCISKNPLAIPCDTCYYTKAIRHHNRQLHKATILKGGIRKANQAPYTVKGYRLWDKVSYNGSECVITGRRTSGYFALKKLDGTVVSNSASYKKLRLLEVATNYITERR

SEQ ID NO: 15788 - protein, 419 aa, unidentified; identical to SEQ ID NO: 8591

SEQ ID NO: 15789 - protein, 431 aa, Escherichia sp.; identical to SEQ ID NO: 3801

SEQ ID NO: 15790 - protein, 443 aa, unidentified; identical to SEQ ID NO: 10351

SEQ ID NO: 15791 - protein, 460 aa, unidentified
MVAVVDLFGKPLMPTNEYRARRLLKQKKAKIFGYRPFTIQLTERKSTEIQPIELCMDTGYIHIGISAKSERHEYLGMQIDTLTDEKLKRDDKRQYRRQRRNRKRYRAPRFDNRRRKEGWIAPSLEHKKEIHIDAIQRICKVMPITDITLEMGNFDTHVLKAVEEGKPLPQGSDYQHGERYGIATLREAVFLRDGYKCQCCEKSVKDGAILHVHHIKYRSQGGTNRMSNLITVCDKCHTPKNHKPGGKLWNWKPKLAEFKGASYMTSIRWTLYNEVTALLPNSSVHITYGAKTKESRRKLDIKKSHVNDAYVMGLFCPKHRTKPVYFKKKRRNNRVLEKFYDAKYIDSRDGKKQSGQELFNGRINRNHRKDSENLHLYRKQKVTKGKRSIRNKHYPIQPHDILLYQKKKYENAGCHNNGSRVILLPEKKSVALKQLTIYQYAGGYYRVPYESNKKEERTGS

SEQ ID NO: 15792 - protein, 431 aa, unidentified; identical to SEQ ID NO: 11953

SEQ ID NO: 15793 - protein, 442 aa, unidentified; identical to SEQ ID NO: 3161

SEQ ID NO: 15794 - protein, 423 aa, unidentified; identical to SEQ ID NO: 14011

SEQ ID NO: 15795 - protein, 470 aa, unidentified
MSVFVVGLNGCRLMPVSERKARLLLKGGKASVYRKVPFTIKLNYKTGSTVQPGYLGIDTGSQHIGVSVVQKDGTVLHKEEIGLRDSMSKRKLLESRASSRRGRRYRKTRYRHPKWKPKTKRIYNEKADRKGRHWKKQKNTFTSKRQAGWLPPSLQSKTDHHIQWIRKLLDLLPEGYRLSIELGRFDPARMKDPEIHGELYQKGPQYDYENVRAYVLARDGYTCRVCKKKGGKLHVHHILYRSRGASDNPKYMAAVCSKCHTTENHLPGGILYQWMKDQKKFTRGLRDATFMNILKKRLRKAFPDAVFTYGNITKADREKLELPKSHGNDATAIALVKTEVKSVKDEEPVIHIQQVRRKKRSLHEETPRKGRKEPNRTASRSDKNTKSVTVTKGNGEKKVSMIACLFDRVELDGKKGWITGFTGTSCYVKDKEDNYICTSSKYKQVSISRLRILHHCGNWAIGAEKPLGKG

SEQ ID NO: 15796 - protein, 456 aa, unidentified
MSTCVCVLGNNGERLMPTFRLGRVRHLLKDGKAKIIKHHPFTIQLLYDSKMNTQPIEICEDVGYNYIGISVKSQSHEYVSAQYDTLQDEKACHDSCRKYRRTRRNRLRYRKPRFDNRKRGDGWLAPSLEHKKQLNIRLIERYVSVIPITRATVEVGSFDTMLLQAIQKGESKPEGVDYQKGPRYNLATLREAVFYRDNYTCQVCGRKIADGAILHMHHMFYWKGRHGYQLDELVTACEKCHTPANHQKGGKLYGFGKDKKFANLSGAAFMNAVRWQIVDALHATYGKEFVTITYGAMTKEKRIILGIEKTHNNDAYAMGDYHPAHRCVFRHYQKRRRNNRVLEKFYDATYIDARTGNKAKGKELFNGRISRNHKKDSENFHKYRSKKVSKGRRSIRRQRYAIQPYDTVRLESKTYITSGCHNKGTRLLIPANGKSKSVAISKVQVVCHAGAWIQII

SEQ ID NO: 15797 - protein, 470 aa, Anaerostipes sp.; identical to SEQ ID NO: 2825

SEQ ID NO: 15798 - protein, 427 aa, unidentified; identical to SEQ ID NO: 12009

SEQ ID NO: 15799 - protein, 415 aa, unidentified; identical to SEQ ID NO: 5374

SEQ ID NO: 15800 - protein, 453 aa, unidentified; identical to SEQ ID NO: 14710

SEQ ID NO: 15801 - protein, 431 aa, unidentified
MPNKVYVINKHGRPLMPCSPAKARHLLDAGKAKVKKRTPFTIQLVYGSSGYTQEVILGVDAGSKTIGMSASTTKEELLSAEVKPRNDVVDLLSTRREFRRARRNRKTRYRKPRFDNRVRSKHKGWLAPSVEVKIQEHITSIKMVCRILPVSKVVIETAEFDLQLLKAIEEGKPVPQGEDYQKGEMYGHYNVRQYVLWRDDYTCQCCGAHATKKKEVWLHVHHLESRKVGGDAPDNQVTLCESCHEKLHKGLITEKDFKKRKRRSTRDATFMGIMRKTLMQRLCSELPIPVVETRGYITKATREKLLVLPKSHTNDALAIAQGKQGFNVGYLPEILQIDKIYTIRPVRHHNRQLHKAAILKGGIRKSNQAGKYVFGYRLFDKVQFNGQDCFIWGRRTTGIFTIKTINGKMIKDGISFKKLKLVEKSTGYLIA

SEQ ID NO: 15802 - protein, 423 aa, unidentified; identical to SEQ ID NO: 8374

SEQ ID NO: 15803 - protein, 421 aa, unidentified; identical to SEQ ID NO: 14103

SEQ ID NO: 15804 - protein, 415 aa, unidentified
MFVYVLSKTGQLLMPTTRFGKVRRLLRDKKAKVVRSCPFTIKLLYEPETSVVQEIVLGQDTGSKHVGTACVANNKVLYQSEVTLRDDIENKMDHRKGFRRNRRQRKTRYRKPRFLNRANSTKKDRLPPSVQHKVQAHVDEIEFCKKILPVNKLVFETGKFDTQLLEKPWLQKYKWAYQKGINYGFANSRAHALDRDNYTCQCCGKKHVRLEVHHIIFRSLGGSDELENLITLCEKCHAAIHDGKITLNLKGKRKRNLRHATQMSIIRSQLLKLYPDAIETFGYVTKANSENLGLLKEHYLDACVVASGDKEFKQSNWLFKKRRVSRQNRQLCKGARGEKKIPTGKILGFRKCDKVKYLNEICFIKSRRSSGYFTLMDIDSNTLDFRDRGGKKIPFYKLLERLNLQRSTLCIGHFV

SEQ ID NO: 15805 - protein, 424 aa, unidentified; identical to SEQ ID NO: 3434

SEQ ID NO: 15806 - protein, 431 aa, Escherichia sp.; identical to SEQ ID NO: 3801

SEQ ID NO: 15807 - protein, 424 aa, unidentified
MVYVISKDGNPLMSCCNVIARLLLKQGKAQVKKREPFTIKLNYETTNYLQNLTLGVDTGSRTIGTAVSNDNGDILYMSEVVVRNDITEKMTQRAKYRRNRRNRKTRYRKARWLNRANSIKNDRFSPTMRSKLYSHVKEIECIKSILPITQMVFETGQFDTHLMKNPSLANPRIRRWGYQKGPNYGYENTKAMVLNRDNYTCQCCKGKHKDSKLEIHHIVFRSKGGSDEASNLITLCHTCHKDLHSGKINPKLKGRIKGNLKFATQMNTIRKQLFRLYPNAIETFGYITKANRLQLGVNKEHYYDACTIATQGNRFTIKSNLYKKKCISDGDFQQTKGICSKQPIVTNKIHGFRKFDKVRYLGKNYFIKGRMSTGYAVLMDINGKKADFSNMPKGFKTPKMANFKRIEARTTWMTTTVMLTSNIA

SEQ ID NO: 15808 - protein, 512 aa, unidentified
MSTVYVLNKDGKPLMPTTRGGHVRHLLKEQKARVVRAKPFTIQLLYETNDVVQPLYLGIDPGRTNIGVAVVKANGTAVFTAHLETRNKEIPKLMQGRKKARRARRTNGRRCRRQRRAKANGTISKKCVKQTTAQNGSVSKRAKDIGVIKRRLPGCEKDVLCIGIKNKETKFTNRTRPEGWLTPTANQLLQTHINLVKKIQKFLPISDVVLEVNKFAFMRLDNPNIQKWQYQQGPLYKKESLESAVSEIQEHHCLFCKKPIDHYHHVVPQHKNGSNTIGNIVGLCAKHHDLVHKDSAWEKKLAQKSTGLYKKYGALGVLNQIIPTLTNELSSLFPKHSFVTNGKSTYDYRAAHGVSKDHWLDAYCIACSVLPSNVCDSNINNHMPYELKQFRRHDRRVLNNENMNRVYTLNNKAVAINRHKAKDQKTVSLEEFRKEHPDDVCKLKVKEHHPTYRNMNRNFPGSVFLVGKQIHVMQGIASSKDGKATKYNDTSATAIAAGKCKFVAKNTGILFV

SEQ ID NO: 15809 - protein, 442 aa, unidentified; identical to SEQ ID NO: 2903

SEQ ID NO: 15810 - protein, 428 aa, Enterococcus sp.; identical to SEQ ID NO: 4335

SEQ ID NO: 15811 - protein, 434 aa, unidentified; identical to SEQ ID NO: 5659

SEQ ID NO: 15812 - protein, 396 aa, unidentified; identical to SEQ ID NO: 4508

SEQ ID NO: 15813 - protein, 452 aa, unidentified
  REGION 1..452: note = Ga0373628_0106757
MSKQTLQREFQNVPTGAPLACSSTTLPLNRDERTSVVGIVLSCNNPEVGLRKQTSGPKATVFVLSIDGSPLMPCTPTKARHLLEKEKAKVVSLNPFTIKLTFKCENKVQEVSLGIDSGYKHIGFSVITKTKEIVSGEVFLDDKTSKRLTERRVYRKRRRSRLRYRKQRSSNRNTPEGWLPPSVQRRFDTHINVIKRLKKLTPIRKITIETGAFDIQKLMDPEISGKEYQQGNLYGYNNLKAFLFSREHGKCQFCCKKINRGEKTHSHHIIPRSETGTDRPYNMALLHEYCHNKLHKDGLYKKLKAPKQYKAETFMSIVADKFKSALNCNVTYGYETAIKRDFLGVKKNHVNDAFVVTGGDSQDRCIPYKVEQKRTNNRVLQTNRKGFIPSIRRQRYEIQNRDFVWINGRKHLCGGVAGRGSEVYYFDGIEKKRVSIKKVSRFYSTGSLVWSN

SEQ ID NO: 15814 - protein, 413 aa, unidentified
MENKIEYCFVVDKDNQPLAPTKVNKGWYLVRKGRARLKSKYPMVIQLEKRVKLDENDKSYMTCGIDDGSAHVGLAIVQKCPIKNKVVFKGTIEQRQDVKHLIDVRRGYRRYHRYHKRYRPMRFNNRSSSKRIGRLAPSIKQKKDAILRILFQLNKWIDIKEYYLEDVCIDIRAMTDDYKPYKWQYQKSNRLDENLRKAAIIRDNYKCQECGKSNCKLEVHHIQARKYSGADTIGNLITLCSKCHQKTEGKEQDFEDKYFKIIGSKPKRFDYAMHVMQGKNYLRSKISELGLLHLTNGGETANKRIEWNIEKSHSNDAICITDSIPDSCNIKEWTIKPMRRKSKAKINNVLGIKHRDLVSYTYKNGETHTGYVTALYSKQLALNFQSRTKHCKKVNARKCRLLWQFNKIYWLEY

SEQ ID NO: 15815 - protein, 413 aa, unidentified; identical to SEQ ID NO: 11958

SEQ ID NO: 15816 - protein, 465 aa, unidentified
MSTCVCVLSNSGERLMPTFCLGKVRHLLKDGKAKIVKHHPFTIQLLYSSKTNIQPIEICEDVGYNYIGISVKGESHEYVSAQYDTLQDEKEHHDDCRKMRRTRRNKLRYRKPRFDNRKRNKGWLAPSLEHKKQLNISLIERYVSVIPITHATVEVGSFDTMLLQAIQKGEAKPEGADYQEGPRYNLATLREAVFYRDNYTCHVCGHKITNGAVLHMHHMFYWKGRHGYQLDELVTVCEKCHTPANHQKNGKLYGFGENVKFADLSGAAFMNTVRWQIVNELYAAFGKPFVTITYGAMTKEKRIALRLEKSHNNDAYAMGEFHPNLRCTFEHYEKVRRNNRILEKFYDSRYIDIRTGEIATGKALFNGRINRNHKKDSENLHKYRGKRTYAGHRALLRKKVNLNPGDLVSLNGETLIVHSTHTNKKGAVNVEFKTPAKNGRKSASLKKLKIVKAASFMHSAWEKVS

SEQ ID NO: 15817 - protein, 442 aa, unidentified; identical to SEQ ID NO: 2903

SEQ ID NO: 15818 - protein, 427 aa, Parasutterella sp.; identical to SEQ ID NO: 14928

SEQ ID NO: 15819 - protein, 377 aa, unidentified; identical to SEQ ID NO: 6426

SEQ ID NO: 15820 - protein, 437 aa, unidentified
MPCSEKRARLLLARGRACVHRLVPFVIRLTDRQLDTCTLQPLRIKLDPGSKTTGLALVRDTEHLNTDTGEIQRGVAVLSLIELVHRGRHISEALTARRQMRRRRRGCLRYRAPRFLNRGNKQRGWLAPSLQHRINTAMAWVARIRRWSPVTALSAELVRFDMQRLQNPEISGVEYQQGTLAGYEVREYLLAKWSRKCAYCGVENVPLQIDHVHPKAKGGTNRVSNLTLACGPCNARKSAQSVDAFLAKDPKRLTALLAQAKRPLKDAAAVNATRWALVGALKATGLPVETASGGCTKFNRSRLAIPKTHALDAVCVGAVSVVTNWQKPSLTIKCTGRGSYQRTRLDKYGFPRGYLMREKSVKGFKTGDLVRAIVPTGKKAGRHTGRVAIRKSGSFNIQTLAGVVQGIGYRHCRLLQRADGYGYFFNKAACDTAQKRE

SEQ ID NO: 15821 - protein, 367 aa, unidentified
TIGLSASAETEELLSAEVKPRNDVVDLLSTHREFRRARRNRKTRYRKPRFDNRVRSKHKGWLAPSVEVKIQEHITSIKRVCRILPVSKVVIETAEFDLQLLKAIADGKPVPQGEDYQKGEMYGHYNVRQYVLWRDDYTCQCCGAHATKKKEVRLHVHHLESRKVGGDAPDNQVTLCESCHEKLHKGLITAKDFKKRKRRSTRDATFMGIMRKTLMQMLCSELPIPVVKTRGYITKATREKLLVLPKSHTNDALAIAQGKRGFNVGYLPEIAQIDKICTIRPVRHHNRQLHKAAILTGGIRKSNQAEKYVFGYRLFDKVQFNGQDCFIWGRRTSGYFAVKTIDGKVIHNSASFKKLNLVERASNYLIA

SEQ ID NO: 15822 - protein, 465 aa, unidentified; identical to SEQ ID NO: 4641

SEQ ID NO: 15823 - protein, 416 aa, unidentified
MVYVLGQDGHPLMPTCRHGKVRRMLKSGMAKVVQRCPFTIQLQYESTTHTQKINLGIDAGSKTIGVSATTESKVLYESEVVLRNDIVELLSGRRALRNSRRSRKTRYRKPRFDNRKKPDGWLAPSIRQKIETHVTVVGNVMKILPVTKIIVETASFDIQKIKNPEIEGEGYQHGEQLDFWNVREYVLFRDGHTCQCCKGKSKDNILNVHHIESRKTGGNAPNNLITLCETCHKAYHKGIITLPNEIHRGMRFRDAAFMGIMRWAFYDRLKELYNPLGAEVINTYGYITKNTRIEHGLPKEHYVDARCISDNPAAKPLDHYYFQKKVRCHNRQIHKNTILKGGIRKRNQASYEVKGFRLYDQVLWKGQKCFIFGRRSTGRMDLRLLDGTHINASVGHKNLKLLSMRKNYLIEQRKAG

SEQ ID NO: 15824 - protein, 483 aa, unidentified
MKIYVIGLNGIGLAPTMPRKARLLLKNGRARIAFRQPFTIQLTYKTGCAHPKEMVIGIDTGSQHIGAGIISKETKQVVSKEEYELRSSMEKRSLLETRMTYRRGRRYRKVRYRHPKFKPATRRVYVEKLITQNKHQTHWKKQTNTFDSARPEGWLPPSIQSKLDHHIRIISRYQKALPKDIQLRIEVGRFDVQHMENPQIRGEMYQKGSMYEYENKKAFVFSRDGYTCKCCKCKAGSKRKDGTTVKLVVHHVDFRSQGASDNPKRLVTVCDRCHTTAAHKPGGILYDWMLKGKTFARGYRDTAIMNILRRRLWQEFPDAAFTYGNITAADRKILHIDKTHGNDAVAIAAHGMEGIKDIPNTTYYRQMRKQKRSLHEATPRKGRKEPNRTAKRNAKNTCVVKGIYLNDKVKAFGQTGWVTGFSGTSSVYIKNREGEYITVPGKNHKMVPLTELSVRTHCNNWAVSDIKTVSNRRDGNCDAEMCM

SEQ ID NO: 15825 - protein, 297 aa, unidentified
WLAPSVEVKIQEHITVIKRICRILPITLVRVETAEFDTQRLKAMLAGKPLPVGTDYQLGEMYDEYNVRQYVLKRDHYTCQCCGAHNTAEKVVKLHVHHLESRKTGGNAPSNLVTLCTTCHKNLHKGKVTLDGKERDKPLRDAAFMGIMRKTLMARLKEELPIPVQGTYGYITKMRREQNDIKKSHTNDARCISKHPLAEPCSVCYRTKAIRHHNRQTHKANFSKKCIRKRSQMPYLVEGFRLWDKVLYKGQECFVSGRRSSGSFALKKLDGTSISKGVTFKKLRLLEPATNYLIERM

SEQ ID NO: 15826 - protein, 411 aa, unidentified; identical to SEQ ID NO: 6244

SEQ ID NO: 15827 - protein, 493 aa, unidentified; identical to SEQ ID NO: 2644

SEQ ID NO: 15828 - protein, 446 aa, unidentified
VAFSLATIQKKEEGIMPNKVYVINKHGRPLMPCSPAKARHLLDAGKAKVKKRTPFTIQLVYGSSGYTQEVILGVDAGSKTIGMSASTTKEELLSAEVKPRNDVVDLLSTRREFRRARRNRKTRYRKPRFDNRVRSKHKEWLAPSVEVKIQEHITSIKRVCRILPVSKVVVETAEFDLQLLKAIADGKPVPQGEDYQQGEMYGHYNVRQYVLWRDGYTCKCCGAHTTKKKEVRLHVHHLESRKVGGDAPDNQVTLCESCHEKLHKGLIAEKDFKKRKRKSTRDATFMGIMRKTLMQRLCSELPIPVIETRGYITKATREKLLVLPKSHTNDALAIAQGKQGFNVGYLPGIEQIDKIYTIRPVRHHNRQLHKAAILKGGIRKSNQTGKYVFGYRLFDKVQFNGQDCFIWGRRTTGIFTIKTINGKMIKDGISFKKLKLVEKSTSYLIA

SEQ ID NO: 15829 - protein, 533 aa, unidentified
MSRGMTHPHFGVFPASNPADRCAKPRESNPPSGGVFIDRKEGIRVPVYVISSTGKPLMPSRRFVHVRLLLKEGKAKVVKTKPFTIQLLYESTEYTQPLYGGTDPGRTNIGEAVLDQCGTVQYAAHVESRNKDIPKLMENRAAHRSASRRGERKRRQRRAVANGTITFPLQKQWILPGCQKPITNKFIINSEAKFLNRKRPANWLTPTTNQLVQTHLNMVKKICSILPVTDWTLEINKFAFMLMEDGTIRGVDFQNGRMKGYPDVEAYIYAIQDGKCPFCGKTIEHYHHIKPRSEGGSNRPENLVGLCSDCHARIHKGDTEMAGLIDKLGEQKKYAALSVLNQAIPYIYQGLVEIFGEEHTHICYGWQTKEMYTKLKIPKTHSNDAICIAALGSGVVPPIQMTNPYEVKQCRRHNRAIVKAQRERTYKLFGETVAKNRHPRFKQEGPSLEDFVESIPAAYRQQVISVLKVTPSKRYYNTMDRDLPGTVFYYQGHRYVKSGQSSGGKDLRAYGMGSKNFPSAKVSIVPSGGLVYL

SEQ ID NO: 15830 - protein, 431 aa, unidentified
MPNKVYVINKHGRPLMPCSPAKARHLLDEGKAKVKKRTPFTIQLVYGSSGYTQEVILGVDAGSKTIGMSASTTKEELLSAEVKPRNDVVDLLSTRREFRRARRNRKTRYRKPRFDNRVRSKHKGWLAPSVEVKIQEHITSIKRVCRILPVSKVVIETAEFDLQLLKAIEEGKPVPQGEDYQQGEMYGHYNVRQYVLWRDGYTCQCCGAHATKKKEVRLHVHHLESRKVDGDAPDNQVTLCESCHEKLHKGLIAEKDFKKRKRKSTRDATFMGIMRKTLMQRLCSELPIPVIETRGYITKATREKLLVLPKSHTNDALAIAQGKQGFNVGYLPGIVQINKIYTIRPVRHHNRQLHKATILKGGIRKSNQTEKYVFGYRLFDKVQFNGQDCFIWGRRTTGIFTIKTINGKMIKDGISFKKLKPVEKSTGYLIA

SEQ ID NO: 15831 - protein, 588 aa, unidentified
VLALLQVLVIFRVQVQLIRLYSDISSEMIYNLVSIRERSFMKQKKQKVMVYILNKKGKPLMPTTRCGHVRKLLDSKKAVVVSSNPFTIRLKYDTPNGVQDVFAGIDSGRENIGSGASNEDGDCLYLGELKTSNKSIKIKMTERAGFRKERRRRDRQNKQRKARKDHTEIQNGNADICRTTISCKSVQISYPAAEKSVTHKIIRGKEGKFANRHRDEGWITPSARQLVQMHMNDLKSMCKILPISHVTLERVAFDFQKLENENIKAWEYGKGKLYGYDSPEEYIHDVQGGKCLICGKPHIDYLHHIIPRSKGGSNKVSNLAGLCYDCHYGPMGVHNCQDTQDRLPELKNEANKQYKVSLLNSVMPVLIEEMDKFCKANSIIFSICEGHDTAKVRDIYDLQKDHCVDGFAISLVGRNVKSVDVMPDRIHQKQRYKKKSKNIIKKRNCREYYDGKKLVAVNRHKGTDQKADSLEEYMNTYAETHTADECKKHFESLTVKPARRTYTFHKEGRICPFHIGDKVRYEKKNKIKGNTKVETFICEGIRFPKDENKAKVEHNKTKSKKMKFCRVLEPGCTPYICLLYTSPSPRDV

SEQ ID NO: 15832 - protein, 213 aa, unidentified
LQFYRKEHGIMQYVYVLNKHGEPLMPCSPGKARLLLKQQKACVVKRTPFTIKLLFGSAGYKQPITLGVDAGSKHVGLSASTEKRELYSEEFTPRSDVVELLSTRRQKRRSRRNRKTRYRVPRFDNRVHSKHKGWLAPSVEVKIQEHITVIKHICKILPISLVRVETAEFDTQRLKAMLAGKPLPVGTDYQLGEMYDEYNVRQYVLKRDHYTCQ

SEQ ID NO: 15833 - protein, 419 aa, unidentified; identical to SEQ ID NO: 6355

SEQ ID NO: 15834 - protein, 413 aa, unidentified
MPTTRLGKVYRLLKTQKAHIVSYEPFTIQLDYEPDTQVIQPMTLGVDSGAIHSGYSLTNEHREYYSAEVIARNDISNRLSERHMYRQNRRSRKTRYRQPRFNNRKNQKKGWLPPSLEQKVTVQVNEINHIHRYFPIDTIIVETAEFDIQKIKNPDISGIEYQQGTLQGYNIRNYLLEKHGRRCFYCGKAVSDFEVEHMFPKSKGGSNRIDNLTLSCHDCNEKKGTLTAEEFIQQTLPAKKATAKLKQLPQEKRLFKYMAYMNATRWALYDAIKERYPNVKMTYGYITKYNRIQVGLPKAHHIDAKCITGFPTVPSIDQTIVKVKMRRHNRQLHRATFSKGHVRKAACLPTTVFGFQLYDLVCFNNHRYYIKGRRSSGSFALVSVEGLKDENRSYKKLTLLAHTNTYLTNHYVH

SEQ ID NO: 15835 - protein, 398 aa, unidentified
AVIHKVYPFTIRLKDNSCVSQNRAYTVKLDPGSRHTGIAIVDDRDQVVMLAELEHRGHLIKRNMDSRRAVRRHRRNRNTRYRPARFLNRKIPKGWLAPSVKSRADNVINFIKKYKKLINIDKVMIEHVSFDTAQMSSNTKLYGVKYQQGPLYQQKLRSFIFSRSNGKCVYCGAQAEEIDHVIPRAKGGTNSVYNLVASCRACNQMKSNLSLKEFGKKINKNFSKLEPKKLPKDAAIVQAARNYMVKEVTKLVFNTTLHDAWMTKYNRDELGLPKEHYYDALSVGEVPNKFDFLTDKVFQISAKGRGSRQMCLMNKYGFPRTKSKGSKLVEGFQTGDMVKVIVPSGLKQGEYLGRVVVRSSKCFDVKTKTKTVQGIWHKYFHIVQRGDGYLYNYERRAI

SEQ ID NO: 15836 - protein, 431 aa, unidentified
MPNKVYVINKHGRPLMPCSPAKARHLLDAGKAKVKKRTPFTIQLVYGSSGYTQEVILGVDAGSKTIGVSALTKKEELFAANVIPRNDVVDLLSTRREFRRARRNRKTRYRKPRFDNRVRSKHKGWLAPSVEVKIQEHITTIRRVYGILPVSKVVVETAEFDLQLLKAIADGKPVPQGEDYQKGEMYGHYNVRQYVLWRDNYTCQCCGAHATKKKEVRLHVHHLESRKVGGDAPDNQVTLCESCHEKLHKGLIAEKDFKKRKRKSTRDATFMGIMRKTLMQRLCSELPIPVIETRGYITKATREKLLVLPKSHTNDALAIAQGKQGFNVGYLPGIVQINKIYTIRPVRHHNRQLHKATILKGGIRKSNQAGKYVFGYRLFDKVQFNGQDCFIWGRRTTGIFTIKTINGKMIKDGISFKKLKPVEKSTSYLIA

SEQ ID NO: 15837 - protein, 431 aa, unidentified
MPNKVYVINKHGRPLMPCSPAKARHLLDAGKAKVKKRTPFTIQLVYGSSGYTQEVILGVDAGSKTIGMSASTTKEELLSAEVKPRNDVVDLLSTRREFRRARRNRKTRYRKPRFDNRVRSKHKGWLAPSVEVKIQEHITSIKRVCRILPVSKVVVETAEFDLQLLKAIADGKPVPQGEDYQQGEMYGHYNVRQYVLWRDGYTCKCCGAHTTKKKEVRLHVHHLESRKVGGDAPDNQVTLCESCHEKLHKGLIAEKDFKKRKRKSTRDATFMGIMRKTLMQRLCSELPIPVVETRGYITKTTREKLLVLPKSHTNDALAIAQGKHGFNVGYLPGIEQIDKIYTIRPVRHHNRQLHKATILKGGIRKSNQAEKYVFGYRLFDKVQFNGQDCFIWGRRTSGYFVVKTIDGKVIHNSASFKKLRLVERASNYLIA

SEQ ID NO: 15838 - protein, 483 aa, Polaromonas sp.
MSGVGVAVFVLDNQGKALMPCTEKRARLLLARGRARVHRLVPLVIRLVDRQAAACDFQPLRIKLDPGSKTTGVALVRDVESVDASTGEIHSGVAVINLLDLVHRGRQISEALTARRQMRRRRRSNLRCRAPRFLNRGNKKSGWIAPSLQHRVDTAMAWVRRIQRWAPVRAISSELVRFDMQALQNPEISGVEYQQGTLFGYELREYLLEKWGRQCAYCDAKDTPLQIEHIRPKALGGSNRASNLTLACQCCNQKKAARSIEEFLAKDKKRLTGILAQAQKPLRDAAAVNVTRWALANALKATGLPVELASGGRTKFNRCTLGVPKTHALDAACVGQVRFIQDWSRPTLTLKAMGRGSYQRTRLDRFGFPRGYLMRGKRVQGFGTGDMVRADVPKGVKAGVHVGRVAVRASGSFNIQTHQGGISGVVQGISHKHCRVTQRNDGYGYFFNRADHTGREQVWPKASDAAHPALYLPAMNGRVSRAI

SEQ ID NO: 15839 - protein, 424 aa, unidentified
MVYVLSKEGTPLMPTNRRGRVRHLLDAGEAKAVKRCPFTIQLLYQSTTYTQEITLGVDAGSKTIGLSASTEKKELYASETRLRMDITDLLSVRRQFRRTRRNRKTRYRKARFNNRVHAKHKGWLAPGIEAKIGTHFRAVRDVCRILPVTEIIVETASFDIQKIKALENGEPVPEGTDYQEGDQLGFWNVREYVLWRDGYKCRCCNGKSKDQVLNVHHIESRKTGGDAPNNLATLCGYCHKQYHKGTILLPKSVRRGNSFRDAAFMGIMRRTFYNRLKEQYPRVAMTYGYITKNTRIRNSLPKTHYADARCIAGHPQAEPLEVYYFQKKVRCHNRQIHKSNILKGGKKKRNQAEYLVKGYRLYDRVRYQNREYYVFGRRASGFFDIRTLGGNKGNKGSVSCKKLRFLEPRKTMLIERRMQEREAV

SEQ ID NO: 15840 - protein, 419 aa, Geobacillus sp.; identical to SEQ ID NO: 3993

SEQ ID NO: 15841 - protein, 412 aa, unidentified; identical to SEQ ID NO: 4932

SEQ ID NO: 15842 - protein, 443 aa, Tepidimonas sp.
MAVFVLDRRKKPLMPCSEKRARLLLERGRARVHRLVPFTIRLVDRTQEESALQPLLVKLDPGSKTTGIAVVREDESADEETGEIQRQVHVLWLAQLVHRGQQISETLAVRRAFRRRRRGANLRYRAPRFLNRSRPKGWLAPSLRHRVETTLSWVRRLQRLAPISGISQELVRFDPQALENPEISGIEYQQGTLAGYEVREYLLEKWGRQCAYCGATDVPLQIEHIHPKARGGSDRVSNLTLACAPCNHAKGAQDVRVFLAKDPQRLARILEQAKRPLHDAAAVNSTRWSLFEALKATGLPVETGSGARTKFNRVRLGLPKTHALDAVCVGVTHAVFDWDRPTLQIKATGRGGYQRTRLDRFGFPRGYLTRQKRHFGFQTGDMVRAEVPKGKKTGTYVGRVAVRASGSFNIQTREEVIQGIAHRYCTLLQRADGYGYSWIKRAC

SEQ ID NO: 15843 - protein, 384 aa, Lactobacillus sp.
  VARIANT 334..337: note = X can be any naturally occurring amino acid
VINRQGEPLMPCKQQKCRKLLQAGRAKVVKKEPFTIQLLFGSTGYKQPVSIGVDSGQHHIGLAVTSQDKVLFQGEVSLRQDVKKLLDTRRAYRNGRRNRNTRYRPPRFLNRAKPVGWLPPSVASKVQHNINWIQRMQAVLPKADLHIEVGKFDMAKMKQPDITGLGYQQGDKYGYETTKQYVLARDNYTCQICQGKSKDPKLKIHHIIYRSTGGTNQVSNLLTVCANCHTLANHQPGGKLYALQAKQFQSHRSLKGATFMNILRRRLFMAFPAAKFQYGAQTTLDRAKLDLPKAHYNDAVTISGIQKITQRPTAVVMFHQFRKKKRSLHEATAXXXXVKYPILRVNVMLKTRNFQTAFILMTMCNYLTDKRGISVGSAAKRLVM

SEQ ID NO: 15844 - protein, 419 aa, unidentified; identical to SEQ ID NO: 4877

SEQ ID NO: 15845 - protein, 456 aa, unidentified; identical to SEQ ID NO: 13864

SEQ ID NO: 15846 - protein, 441 aa, unidentified; identical to SEQ ID NO: 6900

SEQ ID NO: 15847 - protein, 420 aa, unidentified
MQYVYVLSKHGEPMMPCSPGKARLLLKRQKACVVRRTPFTIKLLYGSAGYKQPITLGVDAGSKHVGLSASTEKRELYREEFTPRNDVVELLSTRRQNRRSRRNRKTRYRAPRFDNRVHSKHKGWLAPSVEVKIQEHITIIKRICKILPISLVRVETAEFDTQRLKAMLAGKPLPVGTDYQLGEMYDEYNVRQYVLKRDNYTCQCCGAHTTAKKLVKLHVHHLESRKTGGNAPSNLVTLCTTCHKNLHKGKVTLDGKERGKPLRDAAFMGIMRKTLMARLKEELPIPVQGTYGYITKMRREQNDIKKSHTNDARCISKHPLAEPCSVCYRTKANRHHNRQTHKANFSKKGIRKRSQMPYLVEGFRLWDKVLYKGQECFVSGRRSSGSFTLKKLDGTSVSKGVTFKKLRLLEPATNYLIERM

SEQ ID NO: 15848 - protein, 428 aa, unidentified; identical to SEQ ID NO: 15093

SEQ ID NO: 15849 - protein, 419 aa, Geobacillus sp.; identical to SEQ ID NO: 3993

SEQ ID NO: 15850 - protein, 442 aa, unidentified
MSTSVFVLDKKHRPLMPCRPARARRLLRAGRARVVKRFPFVIRLVDRTVEQSEVQPVLIKLDPGSRETGAAVVRDDEKKRHHALAFFVIKHRGGAIRDALKARSAFRRRRRSQNLRCRSPRFLNRVKPKGWLPPSLRHRVETTLSFVRRMCRYLPVSGIATELVKFDSQKLQNPEVSGVKYQQGTLFEYEVREYLLEKFGRKCVYCGAEGVPLNIDHVVPRAKGGSNRVSNLVLACVSCNQKKGARSLEDFLKGKPEVLARVRRELKTPLRDAAAVNATRWVLFNELKATGLPVETGSGALTKLNRHAFGVEKEHWLDALCVGRLNGVVTRKGLNVLEIRCMGRGSRQRTRLTKYGFPRGYLMRQKCVHGFATGDMVEANVPKGKKAGLWRGRVAVRVSGSFNIQTPKGVIQGVGWKHCRLISHNDGYGYAWLGHAPHSSPA

SEQ ID NO: 15851 - protein, 456 aa, Halomonas sp.; identical to SEQ ID NO: 5133

SEQ ID NO: 15852 - protein, 414 aa, unidentified
MPCSPAKARLLLKEKKAIVKRRTPFTIQLTIATGETKQPVGLGVDAGYKHVGLSASTDKAELYASQVELRQDITDLLSARRALRRARRNRKTRYRAPRFNNRIRTKRKGWLAPSVENRINAHLSRIEAVLRLLPVTKITVETASFDMLLLKNPDIAGKEYQEGEQLGFWNVREYVLFRDGHVCQHCYGRSKDPVFNVHHLESRRTGGDSPGNLITLCETCHEALHRGEIALKTKRGHSFRAEAFMGMMRWEVLNRLKASHSELEVNNTYGYRTKHARIVNGIDKSHCADAFCIAGNLGAERLCEFFFQKQTRRNNRQIHKLSILKGGIRKRNQTPFEIKGFRLFDKVACKGEESFIFGRRSSGYFDVRKLDGTRISAGISCKKLRLLEKRRTYLTEIRKEEALPPLPEGRGLRA

SEQ ID NO: 15853 - protein, 420 aa, unidentified; identical to SEQ ID NO: 12818

SEQ ID NO: 15854 - protein, 413 aa, unidentified
MTNYAFVLDTNNKQLAPTKEQKGWFLIRKKRATLVSKYPMVIQLKKKIPDKEICKDEFRCGIDDGGLHVGIALVQKCQTRNKVVFKGIIEQRNDVKHLIDVRRGYRRYHRYHKRYRQVRFNNRKSSKRKGRIAPSILQKRQATIRVINQLNKWINIMNYWLEDVAIDIQALTDGYKSYRWQYQKSNRLDENIRKAVILRDDCKCMECGKSNCRLEVHHIKPKRLKGSNTLGNLITLCTKCHQKTEGIEELYMNRYFALLNSCDNKNLNYAQHVMIGKKWLREQLSILGMLHLTSGGDTANKRTDWDIAKSHSNDAVCITDLRPDTCEIKEWVIKPMRRQSKAKTDNVLGIKHRDLVEYTFRNGETHRGYVTALYPEQNALNFQSPTKHCKKVNARKCKVLWKYSKIYWLDNVS

SEQ ID NO: 15855 - protein, 470 aa, unidentified; identical to SEQ ID NO: 2825

SEQ ID NO: 15856 - protein, 420 aa, unidentified
MQYVYVLNKHGEPLMPCSPRKTRLLLKQNKASVVKRTPFTIKLLYGSTGYKQPVTLGVDAGSKHIGISATTEKYELYREEATPRNDVVDLLSARRAFRRNRRHRKTRYRAPRFSNRVHSKHKGWLAPSVEVKIQEHITLIKRVCRILPITLVRVETAEFDTQRLKAMLEGKPMPVGTDYQIGEMYNEYNVRQYVLKRDNYTCQCCGAHSTKTKGIKLHVHHIETRRTGGNAPNNLVTLCTVCHKALHAGKVTLDGKKRGKPLKDAAFMGIMRKTLMERLHKNLKIPVQETCGYITKYLREKNSISKSHTNDARCISKNPLAIPCGTCYYTKAVRHHNRQLHKATILKGGIRKANQAPYIVKGYRLWDKVSYNGTECFITGRRISGYFALKKFDGTVVSNSASYRKLRLLEASTNYITERK

SEQ ID NO: 15857 - protein, 415 aa, unidentified; identical to SEQ ID NO: 6534

SEQ ID NO: 15858 - protein, 447 aa, unidentified; identical to SEQ ID NO: 5937

SEQ ID NO: 15859 - protein, 431 aa, unidentified
MPNKVYVINKHGRPLMPCSPAKARHLLDAGKAKVKKRTPFTIQLVYGSSGYTQEVILGVDAGSKTIGVSALTKKEELFAANVIPRNDVVDLLSTRREFRRARRNCKTRYRKPRFDNRVRSKHKGWLAPSVEVKIQEHITAIRRVCGILPVSKVVVETAEFDLQLLKAIEKGKPVPQGEDYQQGEMYGHYNVRQYVLWRDDYTCQCCGAHTTKKKEVRLHVHHLESRKTGGDAPSNLITLCDSCHEKLHKGLIAEKDFKKRKRRSTWDATFMGIMRKTLMQRLCSELPIHVVETRGYITKATREKLLVLPKSHINDALAIAQGKHGFNVGYLPGILQIDMIYTIRPVRHHNRQLHKATILKGGIRKSNQTGKYVFGYRLFDKVQFNGQDCFIWGRRTTGIFTIKTINGKMIKDGISFKKLKPVEKSTSYLIA

SEQ ID NO: 15860 - protein, 512 aa, unidentified
MSTIYVLNKDGKPLMPTTRGGHVRHLLKEQKARVVTSNPFTIQLLYETDDVVQPLYLGIDPGRTNIGVAVVKADGTAVFTAHLETRNKEIPKLMKKRKNSRRARRTNGRRCRRQRRAKANGTISKKCVKQDTAQNGSVSKRAKKIGVIKRHLPGCEKEVLCIGIKNKEAKFSNRVRPEGWLTPTANQLLQTHINLVKKIQKFLPISDVVLVVNKFAFMQLDNPNIQKWQYQQGPLYQKANLEEAVSEMQEHHCLFCKKPIAHYHHVVPQSENGSNTIGNIVGLCTKHHDLVHKDTEWQKKLAKKKTGLNKKYGALSVLNQIIPALTKELSSLFPKHFFATNGKSTYDYRAAHGVSKDHWLDAYCIACSVLADDVCDNNIHSHVPYELKQFRRHDRRALHKENMSRVYTLNGKSVATNRHKATEQTTDSLEEFRQRQPNDVCNLKVKEHHPTYRNMNRNYPGSVFLIGKQVHVMQGIAGSKDGEATTYKDTNANSIAAGKCKFVAKNSGILFV

SEQ ID NO: 15861 - protein, 483 aa, unidentified
LRDGITTKTKEASELTVLEELLSKTEYIYVLGTDGRPQMPTKRKRHVLKLLNTGKARIAEKVPFTIQLKYDNIPVLQPIILAADPGRTNIGVTALSPFGDLMFAAVIETRNKEIKKLMADRKSHRQASRRGERKARQRLAKKYGTMIKAGMVMRKLPQYAADKFVTCNVIRNTEARFCNRKRCSDWLTPTVNHLAQTHLNVIKKISRYLPVTDIAIEVNRFAFMQMENPNASGVDFQNGPLRGFDDVKAAIREQQNGKCLMCKNDIEHFHHMVPLSKGSSDTIQNQVGLCPKCHAKAHTEQTFKKKLKDKKSGLLKKYGALSALNQSIPFICKDLLAEYGKEHVHFCTGKETSLIRTSLGYEKTKDNQMHEVDAYCIGLASLELEDIKLQSFVNTYKIKQFRRQDRSIIHHQTERSYYLDEQKIVTNRKPRFEQTGNALSDWYKKQVKACDKAKADKMLNTLKVKKSARSYNSEGRLMPGAVF

SEQ ID NO: 15862 - protein, 427 aa, Parasutterella sp.; identical to SEQ ID NO: 4250

SEQ ID NO: 15863 - protein, 412 aa, unidentified; identical to SEQ ID NO: 14932

SEQ ID NO: 15864 - protein, 496 aa, Streptomyces sp.; identical to SEQ ID NO: 4777

SEQ ID NO: 15865 - protein, 406 aa, unidentified; identical to SEQ ID NO: 7944

SEQ ID NO: 15866 - protein, 447 aa, unidentified; identical to SEQ ID NO: 5309

SEQ ID NO: 15867 - protein, 515 aa, unidentified
MTHQERRHLMPEYIYVLGMDGRPQMPTTRRRHVQKLLNIGKARIAEHVPFTIQLLYKNDPVLQSVMLAEDPGRTNIGLAVLSLEGDLLLSAVTETRNKEIAKLMLDRRKNRRASRNGERKARQRLAKKFGTVIKAGMLMRKLPKYAADKFVTCNLIRNTESRFCNRKRPEGWLNPTVNHLVETHIHLIHKMQKYLPVTDIAFEVNRFAFLLLEDPSVSGVDFQNGPLKGYDNLKDAVYDLQDGKCLMCGHEIEHYHHIVPRAKDGSNTLGNIAGLCKCCHDKVHKDAEFKKKLKDCKKGLDQKYGALSALNQAIPFICKRLEEEFGKEHIFYCTGRDTARVRNSLGYQKTKESQLHEVDAWCIGLLAVGKAPESLPDFSQTHRIRQFRRRDRSLIQAQVERTYKMNGKTVAKNRKKRMDQRTDSLEEWYQKQVRSVGKKEAERKRSQLTVVKSYRRYNELGRIMAGAILIYQGKRYVLQNRITNGQYYHVFGSEKNIPAKKCMIEKHNEGLVFLS

SEQ ID NO: 15868 - protein, 416 aa, unidentified
MVYVLSQHGQPLMPTENHAKVRALLKHGKAKVIQGCPFTIQLLYESTTHTQKINLGIDAGSKTIGVSATTESKVLYESEVVLRNDIVELLSGRRALRRSRRNRKTRYRKPRLDNRRRPDGWLALSIRQKIKTHVTVVENVMKILPVTKIIVETASFDIQKIKNPEIEGAEYQYGEQLDFWNVREYVLFRDGHTCQCCKGKSKDNILNVHHIESRKTGGNAPNNLITLCETCHKAYHKGVITLPKEIHRGMRFRDAAFMGIMRWAFYDRLKELYTPFGVEVINTYGYITKNTRIEHGLPKEHYVDARCISGNPAAKPLGHYYFQKKVRCHNRQIHKNTILKGGIRKRNQASYEVKGFRLYDQVLWKGQKCFIFGRRSTGRMDLRLLDGTHINASVGHKNLKLLSMRKNYLIEQRKAG

SEQ ID NO: 15869 - protein, 427 aa, unidentified; identical to SEQ ID NO: 4447

SEQ ID NO: 15870 - protein, 424 aa, Enterococcus sp.; identical to SEQ ID NO: 4034

SEQ ID NO: 15871 - protein, 456 aa, unidentified; identical to SEQ ID NO: 11534

SEQ ID NO: 15872 - protein, 460 aa, unidentified
MVAVVDLFGKPLMPTNEYRARRLLKQKKAKIFGYRPFTIQLTERKSTEIQPIELCMDTGYIHIGISAKSERHEYLGMQIDTLTDEKLKRDDKRQYRRQRRNRKRYRAPRFDNRRRKEGWIAPSLEHKKEIHIDAIQRICKVMPITDITLEMGNFDTHVLKAVEEGKPLPQGSDYQHGERYGIATLREAVFLRDGYKCQCCEKSVKDGAILHVHHIKYRSQGGTNRMSNLITVCDKCHTPKNHKPGGKLWNWKPKLAEFKGVSYMTSIRWTLYNEVTALLPNSSVHITYGARTKESRRKLDIKKSHVNDAYVMGLFCPKHRTKSVYFKKKRRNNRVLEKFYDAKYIDSRDGKKQSGQELFNGRISRNHRKDSENLHLYRKQKVTKGKRSIRNKHYPIQPHDILLYQKKKYENAGCHNNGSRVILLPEKKSVALKQLTIYQYAGGYYRVPYESNKKEERTGS

SEQ ID NO: 15873 - protein, 515 aa, unidentified
MTALEEKLSKTEYIYVLGFDGKPQMPTRRKRHVLKLLKTGRARIAEDIPFTIRLTYRNAPVLQPVTLAEDPGRTNIGAAVLSPLGGLLFAAVIETRNKEIKKLMADRKKSRQASRRGERKARQRLAKRYGSMVKSGMVMRKLPMYAADRFVTCKFIRNTQARFCNRKRCPDWITPTVQHLVQTHLNIIRKISRYLPVTDIAFEVNRFAFMHMENPEAMGVDFQNGPLKGYGDVKEAIRTQQHGKCLMCKKPIAHFHHIVPRSRGGSDTIQNLAGLCPECHTKVHTDTAFRKDFDEKKSGQLKKYGALSALNQAVPFICKKLLEEYGEEHVHFCGGLDTSLIRTALGFEKTKKNQMHEVDAYCIGLAALEVNEVETPAFDHTFQIRQFRRQDRSIIHHQTGRSYYQGKEKVAQNRKPGFEQKTTALSQWYKEQVRIHGEKEAEKLRSQLRVEKSCRHYNDMDRFLPGAVFLYEGKRYVLSGRITNGKYLRACGQGMKNFPAAECTFIRHNAGLVFI

SEQ ID NO: 15874 - protein, 555 aa, unidentified
VIEQKRDACVPSGDGTPGFFQSRDPAEQAPSLGRPFYRHAQAYTRCRDTVYPCGTAWHIYERRHLMPYIYVLGMDGKPQMPTTRRRHVQKLLDTGRARIASHVPFTIQLLYKNNPVLQPVTLAEDPGRTNIGLAALSLKGDLLFSAKVETRNKEIAKLMEKRKQCRRASRNGERKARQRLAKKFGTMLKAGLLMRKLPQYAADKFITCHVIQNTQARFSNRRRPDGWLTPSARHLVQTHVNLVHLMQKYLPVTDIGLEVNRFAFMQLEDPSISGVGFQNGPLKGFDDLHAAVRDLQDGKCLLCKKEIEHFHHIVPRSRHGSNTIGNIAGLCTKCHEKVHKDEKAGKRLKDKKKGLDKKYGALSILNQAIPFICKELETEFGKEHVHYCTGRETSLVRRSLGYHKTKEEQYHEVDAWCIGALSLDSIPEKTPAFEEVHTIMQFRRQDRAIINAQTSRTYKLDGESVAWNRKKRTDQKNDSLEDWYLKQVQIHGQKEADRMRSHLTVKISKRRYNNPERMLPGAVFLYKGKRYVMKGQHCNGVYLQAVGMGSKDFPV

SEQ ID NO: 15875 - protein, 403 aa, unidentified
  source 1..403: note = Clostridiales bacterium UBA3578
MPTTPCKARKLLKQGKVKVVKREPFTIQLLYATGETKQDITLGVDAGSKIIGLSATTDKQELFSAEVELRNDIVDLLSTRREFRRTRRNRLRYRKPRFLNRVYSKNKGWLAPSVENKIQTHLKIISKIHEILPISKIIIEVASFDIQKIKNPDIEGKQYQQGEQLGFWNVREYVLWRDGYKCQGKKGCKNKILNVHHIESRKTGGNSPSNLITLCESCHKDYHAGKLKLNLKRGQSFKDAAFMGIMRWTFYNKLKEIYSNVKITYGYITKNTRIQNNLPKEHRIDALCISGNPNVKRLDYWYYIKQVRRHNRQIHKANILKGGKKKLNQAPYLVKGFRLFDKVKYKGEECFIFGRRSSGYFDLRKLDGTVIHRSANCKDLKLISKSKTLLWERRIDVAVSSHD

SEQ ID NO: 15876 - protein, 451 aa, unidentified; identical to SEQ ID NO: 2390

SEQ ID NO: 15877 - protein, 469 aa, unidentified; identical to SEQ ID NO: 3785

SEQ ID NO: 15878 - protein, 323 aa, unidentified
TRYRAPRFDNRIRTKRKGWLAPSVENRINAHLSRIEAVLRLLPVTKITVETASFDLQLLKNPDISGKEYQEGEQLGFWNIREYVLCRDGHVCQHCYGRSKDPVLNVHHLESRRTGGDSPDNLLTLCETCHKALHRGEITLKTKRGQSFRAETFMGIMRWEVLNRLKASHSELKVHNTYGYLTKHARIENGIAKSHGADAFCIAGNLGAERLGEFFFQKQTRRNNRQIHKLSILKGALRKRNQAPFEVKGFRLFDKVSCKGEEGFIFGRRSSGYFDVRKLDGTRISAGISYKKLHLLEKRQTYLIEIRKEEAFPPLPEGRGLRA

SEQ ID NO: 15879 - protein, 440 aa, unidentified; identical to SEQ ID NO: 6580

SEQ ID NO: 15880 - protein, 515 aa, unidentified; identical to SEQ ID NO: 4456

SEQ ID NO: 15881 - protein, 311 aa, Microcoleus sp.; identical to SEQ ID NO: 8988

SEQ ID NO: 15882 - protein, 406 aa, Desulfosporosinus sp.
MAYVVNKDGSPLMPCTSVIARLLLKQGKAKCIRKVPFTIKLSYQTTNYAQDITLGVDTGSGTIGSSVIKDNGDVIYMSQIEIRNDISDKLKQRSKYRRNRRNRKTRYRKVRGLNRKKSIKKDRFSPTMTSKIKSHVKEIKFVKTILPISKVILETATFDPHALKNPAVLNNKWLYQKGINYGFANTKAYVLDRDNHTCQHCKGKSKDSKLEVHHIVFRRNGGSDESSNLITLCKTHHDHLHSGNITLKGGKTKGHLKHATQMNSIRVQLLSLLPSAEETFGFVTKEHRQLLNLPKEHHMDAVVIASQGNAVNFKTNVILFKRCICDGDYQQSKGVRSEQRIPTGKIQGFRKFDKVKYLGSEYFIKGRMSTGYAILMDSKGIKVTLKPIPKFSKMERIQARKSWIIS

SEQ ID NO: 15883 - protein, 465 aa, unidentified
MSTCVCVLSNNGERLMPTFRLGKVRHLLKDGKAKIVKHHPFTIQLLYDSKTNTQPIEICEDVGYNYIGISVKSQSHEYVSAQYDTLQDEKACHDSCRKLRRTRRNRLRYRKPRFDNRKRSEGWLAPSLKHKKELNVNVVKMYCAVMPITHATVEVGSFDTMLVKAIEEGKATPESADYQKGPRYKLATLREAVFYRDNYTCQVCGRKANEGAILHVHHMFYWKGRHGNSLSELITVCEKCHTPANHQKGGKLFGFGEDIKFANLSGAAFMNTVRWQIVNVLYAAFGKPFVTFTYGAMTKEKRIALHLEKSHNNDAYAMGSFHPVNRCAFEHYEKVKRNNRILEKFYDSQYIDTRTGELTNGKSLFNGRISRSHKKDSENLHKYRGKRICKGHRALRRKKLALNPGDLVSLNGEILVVHGTHTKKNGSVNVEFKTPSRGGKKSASLKKLKIVKTSNLMHSAWTKVS

SEQ ID NO: 15884 - protein, 418 aa, unidentified
MVYVLSKPGQPLMPTENHAKVRVLLKQQKAKVIANCPFTIQMLYNSTDYAQPISLGIDAGSKHIGVSATTENKVLYESDVTLRNDIVDLLSARRTLRRARRNRKTRYREPRFMNRTHSKKQGWLVPSIRQKIDSHMTVVDKTCKLLPITNIVVETASFDIQKIKNPDISSIDYQQCEQLGFWNVREYVLFRDGHKCQCCHGKSKDPILNVHHIESRRTGGNAPNNLITLCETCHKGYHKGTVILPKTIHRGMRFKDAAFMGIMRWAFYNRLKELYASKHISVSMTYGYITKNTRIEHHLPKEHFVDARCISGHPDAIPPKEVFYQKKVRCHNRQIHKLTINKGGIRKRNQAVYEVKGFRLYDTVLWKGKKCFIFGRRSTGYMDLRLIDGIHINASAGYKNLKLLRKQSNYLIEQRKVS

SEQ ID NO: 15885 - protein, 406 aa, unidentified; identical to SEQ ID NO: 3498

SEQ ID NO: 15886 - protein, 413 aa, unidentified; identical to SEQ ID NO: 2636

SEQ ID NO: 15887 - protein, 477 aa, Lactobacillus sp.
MASMDNIVEGQQRNSALGLPMRIAAGSMIAGKGGKMEYENANRVFLLNKDGKPLMPCRPRKARLLLKSGKAFVVKKYPFTIQLKYGSYGYKQKVSLGVDTGQRHIGFAVTSQDKVLHQSEVELRQDVHKNLYTRRVYRRGRRNRKTRYRQARFLNRVHGKRDGSWLPPSVKGKASHNIAWIKRYLAVLPNPDLHIEVGKFDMAKMVNPAISGKQYQEGSLHGWKNYEYYVLARDEYTCQLCHKHGEGVKLVVHHIVYRSQGGTDRVDNLITLCTNCHTTKNHQPGGKLYKWMKAKKKVTKQLKGATFMNILRKRLMTAFPEASCQYGYQTFFDRKKFNLPKGHFTDAIAISGIKSVGQMPETVAMISQFRKKKRSLHEATARKGRKEPNRTSKRNAKNTKYARGLWLNDYVHVIGTNLRGYVQSYLSKGAYVRLSDGLDNYVIKDGKNYISTKLCKLITHNGNWQKAEQKLLLYEFK

SEQ ID NO: 15888 - protein, 420 aa, unidentified; identical to SEQ ID NO: 11268

SEQ ID NO: 15889 - protein, 431 aa, unidentified
MPNKVYVINKHGRPLMPCSPAKARHLLDAGKAKVKKRTPFTIQLVYGSSGYTQEVILGVDAGSKTIGMSASTTKEELLSAEVKPRNDVVDLLSTRREFRRARRNRKTRYRKPRFDNRVRSKHKGWLAPSVEVKIQEHITSIKRVCRILPVSKVVIETAEFDLQLLKAIEEGKPVPQGEDYQQGEMYGHYNVRQYVLWRDGYTCQCCGAHATKKKEVRLHVHHLESRKVDGDAPDNQVTLCESCHEKLHKGLIAEKDFKKRKRKSTRDATFMGIMRKTLMQRLCSELPIPVIETRGYITKATREKLLVLPKSHTNDALAIAQGKQGFNVGYLPGIVQINKIYTIRPVRHHNRQLHKATILKGGIRKSNQTEKYVFGYCLFDKVQFNGQDCFIWGRRTTGIFTIKTINGKMIKDGISFKKLKPVEKSTGYLIA

SEQ ID NO: 15890 - protein, 428 aa, unidentified; identical to SEQ ID NO: 3484

SEQ ID NO: 15891 - protein, 417 aa, unidentified
MPCSPAKARLLLKERKAIVKRRTPFTIQLTIATGEAKQPVTLGVDSGYKHIGLSATTEQAELYASEVELRQDITDLLSARLALRRSRRSRKTRYRAPRFDNRVASKRKGWLAPSVENRITAHMSRVEAVMRVLPVTAITVETAAFDTQLLKDPDITGEAYQQGEQLGFWNVREYVLFRDGHVCQHCRGKSKDPILNVHHIESRRTGGDAPNNLITLCETCHKAFHRGEIELKVKRGKSFKAETFMGIMRWPLFERLKKSHPELSVRNTYGYLTKHKRISYGIAKSHCADAYCIADNLGAKRLEGFFFQKQTRKHSRQIHKLSILKGGLRKKNQAPYEVKGLRLFDKVICKGEEAFIFGRRTSGSFDVRRLDGTRISAGINYKKLRLLEPRTTYLTEFRKEAALPPLHECRGFRAEFL

SEQ ID NO: 15892 - protein, 442 aa, unidentified; identical to SEQ ID NO: 4522

SEQ ID NO: 15893 - protein, 443 aa, Anoxybacillus sp.; identical to SEQ ID NO: 2702

SEQ ID NO: 15894 - protein, 428 aa, unidentified
MNLFMVYVISQDGKPLMPCSNPIARLLLKQGKAKVKKREPFTIKLTYETTNYVQDLTLGVDTGSGTIGTAVGKDNGDIVYMSEVTVRNDITGKMTQRAKYRRNRRNRKTRYRKSRWLNRANSIKKDRFSPTMQSKFHSHVKEIEYIKSILPITEMVFETGQFDTHLMKNPSLSNPKVKHWGYQKGTNYGFENTKVFVLNRDNYTCQCCKGKHKDSKLEVHHIVFRSQGGSDEESNLITLCHTCHKDLHSGKINPKLSGKVKGNLKYATQMNSIRKQLFRLYPNAIETFGYVTKANRLHLGVDKEHYYDACTIATQGNAFNVKSNLYKKKCVSDGDFQKTKGIRSEQPVVTDKICGFRKFDKVRYFGNDYFIKGRMSTGYAILMDIDGNKIDFSAMPKGYKTPKMVNLKRLEARSTWMITTVEVTPNIA

SEQ ID NO: 15895 - protein, 411 aa, Vibrio crassostreae
MFVFVLNKNGEPLMPCKPQKARVLLKRGDAKVIKRTPFTIKLIGGSSGYKQPLVAGMDTGSKTVGCAVVGLGKVIYQSQVALRQDVSKKMKLRAMYRRSRRGRKCRYRPARWLNRSSMRATGRLAPSLKSKLDSHLRERDFVESILPISEWRVETASFDIHRICNPEVTGAGYQNGQQKDFYNVKAYVLHRDGYQCQSGRKGKHSNKLHVHHIIFRSKGGTDTPSNLLTLCEMCHNDLHSGQFELKAKKSRTKYATEVGIIKSRLKSKWSFIETFGYETKFKREQILGLPKEHYLDAVAICLEDGEYVEQNPTVYFKRHVAKGDYQLTKGARSEKRIPVGKLFGLKKHDLISTPQGTGFVKGKRSSGYFALETITGGKVHASVNVKKNTVRLSARTTTLIQVYGGGNSPHS

SEQ ID NO: 15896 - protein, 442 aa, unidentified
MGEGLQPDASPSRQNLRVFVLNKRGQPLMPCSPAKARLLLKEKKAVVMRRTPFTIQLTQATGETVQPVKLGVDAGSKFIGLSASTDKAELYASEVELRTDVVDLLSSRRELRRARRNRKTRYRAPRFNNRVHSKNKGWLAPSVENKINAHLSRVDAVRQLLPVTKIVVETASFDIQKIKNPDIEGADYQWGEQLGFWNVREYVLFRDGHRCCHCHGKSKAPILNVHHLESRKTGGDAPNNLITLCETCHKAYHAGKIVLKAKRGQAFRDAAFMGIMRWTFFNRLKAQCPELDVRNTYGYLTKNTRIRHGLDKSHHTDAFCIAGNLGAKRLGEYFFQKQTRKHNRQIHKMSILKGGVRKRQQAPYEVKGFRLFDKVRYGSREAFIFGRRNSGYFDIRLLKGEKVSPAISYKYLQLLESRKTFLTQLIKEDAIPPATEVAGFLA

SEQ ID NO: 15897 - protein, 418 aa, unidentified; identical to SEQ ID NO: 12237

SEQ ID NO: 15898 - protein, 416 aa, unidentified
MLVYVLNKHGKPLMPCKPSKARKLLKQGKAKITQREPFTIQLIYGSSGYKQPITLGIDAGSKFIGVSATTEKQELFSAEVELRNDIVQLLSERRQYRRSRRYRKTRYRKPRFSNRVRSKNKCWLAPSIENKIQTHLKIVEKVHKILPITKIITEVASFDIQKIKNPNIEGVEYQQGEQLGFWNVREYVLWRDNHTCQICKGKSKDNRLNVHHIESRQTGGNAPNNLITLCETCHNKYHKGELNVKLKRGQSFRDTAFMGIMRWTFYNRLKNIYPNVELTYGYITKNTRITHKLPKSHRIDALCISGNPKAKQLDYWYYIKQVRKHNRQIHKAKILRGGIRKLNQAPYLVKGFRLFDKVKYKGQECFIFGRRSSGYFDLRKLDGTVIHRSASYKDLKLLSKRKTLLWERREGVSSPT

SEQ ID NO: 15899 - protein, 475 aa, unidentified
MVAVVTSTGKPLMPTSAYRARKLLKKGRAVIFKYRPYFTIQLVDRADGEVQEVEYKSDTGSVHVGISVCTEKKELLSEQRDLLENEPEHHNDRKKNRRTRRNRKRYRKPRFDNRKKKPQEGHEKWLPPTLLHKMEVQVRLFREFCRVVPVTSACFEMGKFDTQALKAVSKGEPVPEGEGYQKGERYGTDTLRAAVFLRDGHTCRFCGRSVKDGAILHVHHVGYWKGDRTDRLANLASACEQCHTPANHGKNGILYGKEPEFKTLKDASYMTSVRWIMLDEIKKAAPGVRVSVTYGVTTKRKRQELHLPKSHVNDAFSMASFHPQKRSDTEYWKKIPRHDRVLQRFYDAVYLDTRDGSEKKGSELSNGRISRNHKKDSENLHRYRGYKVSKGHNSIRRGASSLKPGSIVMYKGEKMTVHGTHTRYVTDKDGKTVKKVNVQFTRPASDGKKSASLKKCTPVSRVYNTGWKRYWPDKK

SEQ ID NO: 15900 - protein, 451 aa, unidentified
MVYVINFEGKPLMPTTNAKARKLLNQKKATVKKVNPFIIQLLYKTDTEYIQTITLGIDSGYLNIGFSAITDSKELIVGEVKLLQGMKDRLLEKSQYRRIRRQRLRYRKPRWNNRKIRQGWLAPSLQHKLNTHLKFIDYLNSILPIRNIVLEVANFDIQKIKNPDISGVEYQQGEQMGFWNVREYVLHRDGHKCQNPNCKNKSKEQILEIHHIKYKSEGGSDAPSNLITLCNKCHTSPNHKKGKFLYDWCENGKKVRGFRDATFMSMIRWYLLEQLKEKYTNIKATYGYLTKNHRIEHGIEKSHFNDAFAIAKGVNQVRNLEIFKVEQSRLNNRSLEKFYDAKYIDNRTGEKVSASELNCGRRTRNKNLNSENLRMFRGQKISKGQRRIRKQKSLYQPNDLIKYNGNVYTVKGSQNEGKYIALKEIKKVPNVELIKPYIFKKGLNWSHGLSW

SEQ ID NO: 15901 - protein, 399 aa, unidentified
ARLLLKQQKACVVRRTPFTIKLLYGSAGYKQPITLGVDAGSKHVGLSASTEKRELYREEFAPRNDVVELLSTRRQNRRSRRNRKTRYRAPRFDNRVHSKHKGWLAPSVEVKIQEHITIIKRICKILPISLVRVETAEFDTQRLKAMLAGKPLPVGTDYQLGEMYDEYNVRQYVLKRDNYTCQCCGAHTTAKKLVKLHVHHLESHKTGGNAPSNLITLCTTCHKNLHKGKVTLDGKERGKPLRDAAFMGIMRKTLMARLKKELPIPVQGTYGYITKMRREQNDIKKSHTNDARCISKHPLAEPCSVCYRTKAIRHHNRQTHKANFSKKGIRKRSQMPYLVEGYRLWDKVLYKEQECFVSGRRSSGSFTLKKLDGTSVSKGVTFKKLRLLEPATNYLIERM

SEQ ID NO: 15902 - protein, 499 aa, unidentified
MRYVYVLDVDGKPLMPTCRFGKVRRMLKSGQAKAVDTLPFTIQLTYKPRTRILQPVTLGQDPGRTNIGMAAVRFDGKELGRFHCLTRNKEIPKLMADRMATRRASRRGERLARKRLARKLHTTAKHLEGRMLPGCSEPIAVKDIINTESRFNNRLRPEGWLTPTATQLLRTHINLFVRLAKILPVTDVAIELNKFAFMQLDNPEMKKREIDFCHGPLCGTGGLEAAVKEQQDGKCLLCGKESIGHYHHIVPRSRRGSNTIANIAGLCPKCHELVHKDADTAERLTEMKTGLTKKYGGTSVLNQIIPKLVETLADLFPGHFHVTNGWNTKEFREKHHLEKDHDVDAYCIACSHLKPEETLVETEPFEILQFRKHNRAIIHHQTERTYKLDGVTVAKNRKKRMEQKTDSLEDWYVDMAKEHGKTQADAMRSRLTVIKSTRYYNTPGRMMPGTVFLYEGKRYVMTGQITNGKYYRAYDQEKRNFPAVKVRILTKNTGLVFVA

SEQ ID NO: 15903 - protein, 419 aa, Anoxybacillus sp.; identical to SEQ ID NO: 5328

SEQ ID NO: 15904 - protein, 512 aa, unidentified; identical to SEQ ID NO: 7636

SEQ ID NO: 15905 - protein, 424 aa, unidentified
MRVFVLNMRGEPLMPCSQRKARLLLKSNKAVIYKYNPFTIQLAYATGEAKQGCRIGVDTGSKHIGLAVTSEDKVMWKAEVELRQDVKSKIDKRRMYRGNRRYRKTRYRKPRFLNRKREPKWLPPSLQNRVNHTFHWIDVLSSLVPNPNLHIEVGKFDTAKMINPEINGVDYQHGQTYGFYNERYFVFARDNYTCQCCGKSKDKILNTHHIIYRSNGGTNRVDNLITICTDCHTSQNHKKGGILYEWQEQHKKVTQYKEPPFMNTLRRRIFTAYPDAKITYGSETTPKRKDMGLNKTHYNDAIIISGINDINENDEEWLLIKQFRKKKRSLHEATARKGRKKPNSSQVRNSKNTPYYKGLYLNDKVVVFGKSGYITGFTSDGAYIKDGDDNYITLPNKNYKQVGISKMKFECHNNNWQYIVKNAV

SEQ ID NO: 15906 - protein, 427 aa, unidentified
MAVFVLDRRGRPLMPCSEKRARLLLARGRARVHRVVPFVIRLTDRLAEDSAYQSLRVKLDPGSKVTGVALVRMFDEGVAVLNLFDLVHRGRQISEALTARRAFRRRRRSANLRYRAPRFNNRTRREGWLAPSLQHRVDTTMSWVRRLMRWAPVSALSMELVRFDMQAMQKPEISGVEYQQGELLGYEVREYLLEKWGRQCAYCDDEGVPLQIEHIVARARGGSNRVSNLTLACEPCNCRKGSLDVREFVKDEQRLKRILARAKAPLRDAAAVNSTRWALASALKETELAVELASGGRTKWNRTRFHIPKAHALDAVCVGEVETVQGWKRPTLEVKCAGRGSYQRTRLTAQGFPRGYLMRTKRVHGFQTGDRVKAVVPSGKKVGTYVGRVAVRATGSFNIQTSQGVVQGISHRHCKVIQRADGYGYSH

SEQ ID NO: 15907 - protein, 515 aa, unidentified; identical to SEQ ID NO: 13314

SEQ ID NO: 15908 - protein, 406 aa, unidentified; identical to SEQ ID NO: 3157

SEQ ID NO: 15909 - protein, 423 aa, unidentified; identical to SEQ ID NO: 3951

SEQ ID NO: 15910 - protein, 456 aa, Halomonas sp.; identical to SEQ ID NO: 2773

SEQ ID NO: 15911 - protein, 431 aa, unidentified; identical to SEQ ID NO: 2952

SEQ ID NO: 15912 - protein, 424 aa, unidentified; identical to SEQ ID NO: 8578

SEQ ID NO: 15913 - protein, 412 aa, unidentified
MVYVISSNGQPLMPTENHAKVRILLKTQKAKVIKKCPFTIQLTYNSTNYTQPVSLGVDAGSKHIGLSATTKDKVLFESDVELRNDIVDLLSARRQNRRARRNRKTRYRKPRFSNRRRKDGWLSPSVQSKVDTHLTAVRKVHEILPVSKIIVEVASFDIQKIKNPAISGADYQKGEQMGFWNVREYVLFRDGHECQCCHGRSKDMILNVHHIESRKTGGDAPNNLITLCESCHTGYHKDTVKLPKTIHRGMSFRDACFMGIMRWAFYNKLKEIYSNVSLTYGYITKTIRIENDLPKNHCIDARCISGNPLASSDGTVYYQKKVRDHNRQIHKNTILKGGIRKRNQAPYEVMGFRLYDKVRWKGKNCFIFGRRSTGRMDLRLLNGTKVNSSVGYKNLRLLEMRKNMLIELRKVV

SEQ ID NO: 15914 - protein, 462 aa, unidentified; identical to SEQ ID NO: 9356

SEQ ID NO: 15915 - protein, 408 aa, Sulfobacillus sp.
MFVYVLNKHGNPLIPCSPRKARILLKAGKAIVVNRTPFTVQLLYGSSGYKQEVSLGVDAGTKPVGLSATTEKQVLYEAEGELCTDIPAWLAMRREFRRNRRPRKTRYRPARFPHRRRKAGGLPPAIQHQVATHVKVIKQVTKILPIMGITVEVAQFDTPLLKNPEVSGAAYQHGEQMGFWNVREYVFYRDHHTCQGCQGKSGDKILHGHHRESRKTGGDAPNNLVTWGETCHHKIHQEGLEDQIQRKTASLRDATQMTILRWFIYHGITAEYPQAKLTDGYITKNTRMTHGLAKSHIVDARCISGNPDAIPIAQTFLIKQVRGQNRQLHKVTILKGGVRKANKAPRHVLGFPLFDKVCVTTVGNVSSLEGVPAVTLICDYSMGQKCLPGSVTRNSRGLRQPRHFEQNH

SEQ ID NO: 15916 - protein, 430 aa, unidentified; identical to SEQ ID NO: 3328

SEQ ID NO: 15917 - protein, 431 aa, unidentified
MPNKVYVINKHGRPLMPCSPAKARHLLDAGKAKVKKRTPFTIQLVYGSSGYTQEVILGVDAGSKTIGMSASTTKEELLSAEVKPRNDVVDLLSTRREFRRARRNRKTRYRKPRFDNRVRSKHKGWLAPSVEVKIQEHITAIRRVCGILPVSKVVVETAEFDLQLLKAIEEGKPVPQGEDYQQGEMYGHYNVRQYVLWRDGYTCQCCGAHATKKKEVRLHVHHLESRKVGGDAPDNQVTLCESCHEKLHKGLITAKDFKKRKRRSTRDATFMGIMRKTLMQRLCSELPIPVIETRGYITKATREKLLVLPKSHTNDALAIAQGKQGFNVGYLPEIAQIDKICTIRPVRHHNRQLHKATILKGGIRKSNQAEKYVFGYRLFDKVQFNGQDCFIWGRRTSGYFVVKTIDGKVIHNSASFKKLRLVERASNYLIA

SEQ ID NO: 15918 - protein, 430 aa, unidentified
MPKVYVLNRHGRPLMPCTPAKARHLLDAGKAKVRHRTPFTIQLLYGSTGYTQEVILGVDAGSKTIGLSAATETEELFSAEVKPRNDVVELMSARRQFRRARRNRTTRYRKPRFDNRVRSKHKGWLAPSVEVKIQEHMTAIRRACAILPVSKVVVETAEFDLQLLKAVAEGKPVPQGEDYQKGEMYGHYNVRQYVLWRDSYTCRICGMHGSVRKGVPLHVHHLESRRVGGDAPDNLVTLCTACHDKLHKGIIMAADIKKRKRRSTRDATFMGIMRMTLLRRLREQLPVPVVETRGYITKATRENLLVLPKSHTNDALAIAHGPQGFRAEYLPNIRQADRLYTIRPVRHHNRQLHKATILKGGVRKANQAEKYICGFRLYDKVLYNGIECFVWGRRTSGSFLLRQLSGEKVKDGVSYKHLKLLERSQSYLVA

SEQ ID NO: 15919 - protein, 456 aa, unidentified
MSTCACVLSKNGERLMPTIRLGKVRRLLKDGKAKIVKHHPFTIQLLYDSKTNTQPIEICEDVGYNYIGISVKSKSHEYVSAQYDTLQDEKEHHDDCRKYRRTRRNRLRYRKPRFDNRKRSEGWLAPSLEHKKQLNIRLIERYVSVIPITRATVEVGSFDTMLLQAIQKGESKPEGVDYQKGPRYNLATLREAVFYRDNYTCQVCGRKIADGAILHMHHMFYWKGRHGYQLDELVTACEKCHTPANHQKGGKLFGFGEDKEFANLSGAAFMNAVRWQIVNALYATYGKEFVTITYGAMTKEKRIALQLEKTHSNDAYAMGDYYLAHRCVFRHYQKRRRNNRVLEKFYDATYIDARTGNKAKGKELFNGRINRNHKKDSENFHKYRSKKVSKGRRSIRRQRYAIQPYDTVRLEGKTYITSGCHNKGTRLLIPANGKSKSVAISKVQVVCHAGAWIQII

SEQ ID NO: 15920 - protein, 408 aa, unidentified; identical to SEQ ID NO: 6548

SEQ ID NO: 15921 - protein, 417 aa, unidentified
MIYVRSKEGSVLMPTERCGKIGYLLRHGKAHVVSRVPFVVQLDYDSTTYTQDVSLGIDAGSKHIGVSASSEKKEMLAAQVELRSDIVNLLSTRRELRQTRRNRKTRYRKARFDNRKKKDGWLAPSVEQKIESHLKVIRLVHKILPITKATIEVAQFDAQKIKNPYIKGDEYQQGEQMGFWNVREYVLARDGHKCVHCKGKSKDPILNVHHLESRKTGGNSPSNLVTLCETCHKAYHRGEFDLKIKRGSSLRDAAVMNIMRWAVYERAKAEFGNVHLTYGYITKHTRIENGIAKTHAADAFCIAKNVHAMRLSSFFMCRCVPRHTRALHVANPKKCGIRRNTIASHKIGKSNFQRFDMVRWMGKECFIFGSTHGRPVLRDIDGLQVANQPSVNIKTIKFLKRLKNNILMEEKNFRRLN

SEQ ID NO: 15922 - protein, 423 aa, unidentified; identical to SEQ ID NO: 2845

SEQ ID NO: 15923 - protein, 430 aa, unidentified; identical to SEQ ID NO: 3328

SEQ ID NO: 15924 - protein, 413 aa, unidentified; identical to SEQ ID NO: 12223

SEQ ID NO: 15925 - protein, 426 aa, unidentified; identical to SEQ ID NO: 5945

SEQ ID NO: 15926 - protein, 515 aa, unidentified
MTTLEERLSKTEYIYVLGFDGKPQMPTRRKRHVLKLLKTGRARIAEDIPFTIRLTYRNAPVLQPVTLAEDPGRTNIGAAVLSPLGDLLFAAVIETRNKEIKKLMADRKKSRQASRRGERKARQRLAKRYGSMLKSGMIMRKLPMYAADKFVACKFIRNTQARFCNRKRCTDWITPTVQHLVQTHLNIIRKISRYLPVTDIAIEVNRFAFMHMENPKAVGVDFQNGPLKGYDDVKEAIRTQQHGKCLMCKKPIAHFHHIVPRSRGGSDTIQNLAGLCTEFHTKVHTDTAFRKDFDEKKSGQLKKYGALSALNQAVPFICKKLLEEYGEEHVHFCRGLDTSLIRTALGFEKTKKNQMHEVDAYCIGLAALEVNEVAAPAFDHTFQIRQFRRQDRSIIHHQTGRSYYQGKEKVAQNRKPGFEQKTTALSQWYKEQVRIHGEKEAEKLRSQLRVEKSCRHYNDMDRFLPGAVFLYEGKRYVLSGRITNGKYLRACGQGMKNFPAAECTFIRHNAGLVFI

SEQ ID NO: 15927 - protein, 420 aa, unidentified
MQYVYVLNKHGEPLMPCSPRKARLLLKQKKAYVIKRTPFTVKLLYGSAGYKQPVTLGVDAGSKHIGISATTEKHELYREEATPRNDVVDLLSARRAFRRSRRNRKTRYRAPRFNNRVHSKHKGWLAPSVEVKIQEHITLIKHACRILPVTLVRVETAEFDTQRLKAMLEGKPLPVGTDYQLGEMYDEYNVRQYVLKHDNYTCQCCGAHSTKTKGVKLHVHHIETRRTGGNAPNNLITLCKACHKALHAKKVTLDGKKRGKPLKDAAFMGIMRKTLMERLRKELKIPVQGTYGYITKYLREKNGIPKSHTNDARCISKNPLAIPCDTCYYTKAVRHHNRQLHKATILKGGIRKANQAPYIVKGYRLWDKVAYNGTECFITGRRTSGYFALKELDGTVVSNSISYKKLRLLEAATNYIIERK

SEQ ID NO: 15928 - protein, 453 aa, Nostoc sp.; identical to SEQ ID NO: 3348

SEQ ID NO: 15929 - protein, 375 aa, unidentified
MQYVYVLNKHGEPLMPCSPGKARLLLKQQKAHVVKRTPFTIKLLYGSTGYKQPITLGVDAGNKHVGLSASTEKREFYCEEFTPRNDVVDLLSTRKQSRRSRRNRKTRYRAPRFDNRVHSKHKGWLAPSVEVKIQEHITVIKRICRILPVALVRVETAEFDTQRLKAMLEGKPLPVGTDYQLGEMYDEYNVRQYVLKRDHYTCQCCGAHTTTKKTVKLHVHHLESRKVGGNAPSNLITLCTTCHDALHKGKVSLDGKERGKPLRDAAFMGIMRKALMARLREELPIPVQGTYGYITKMRREQNDIKSHVNDARCISKHPLAEPCSVCYRTKAIRHHNRQTHKANFSKGGIRKRSQMPYVVEGYRLWDKVLYKGQEC

SEQ ID NO: 15930 - protein, 421 aa, unidentified
MFVYVLDENGQPLMPTSRFGKVRRLLRDKKAKVVKRCPFTIKLLYEPETKIVQDIVLGVDTGSKYVGVACVGNDKVLYQSQVELRDDIKRKMDSRRMYRKSRRYRKTRYRKPRFLNRGNSTKKDRYCPTIISKFHGHEREIEFCKKILPIKDTILETGKFDTQLMEKPWLREHKWAYQKGVNYGYANAREHALVRDNYTCQCCGKKNCRVEAHHIVFRSKNGSNDLENYITLCEDCHKAVHLGEIELKLNGKRKSDLRHATQMSIIRSMLLKKYPDAIETHGFVTKANRENLNIDKEHYLDACVIASGGLAFEPSDILYRKRCVPTQNRCLSQGIRAEKKIPTGKVHGFKRYDKVKYFGVICFVSARRTRGDFVLMGIDTNTIDFRDIGGVQNPSYKFIKRLNARRSVLCMLQRIEKGGGN

SEQ ID NO: 15931 - protein, 338 aa, unidentified; identical to SEQ ID NO: 4723

SEQ ID NO: 15932 - protein, 419 aa, unidentified; identical to SEQ ID NO: 6355

SEQ ID NO: 15933 - protein, 421 aa, unidentified
MDGDPLDPTHPAKARILLKQKKAKVIRRLPFTIKLTYEIKNPKTQKYTLGVDTGFSKLGTAVINEKDEVVYLSEVTLRNNIKNIMQNRSQNRRARRNRNTRYRKPRWLNRKNSIKEDRYSPTMISKFNSHMKEIKFIKSILPISTINLELAKFDNHALNNPLVKYNKWMYQKGLKFGFANTKAFILNRDKYTCQYCKTKQGTLEVHHIIFRSNGGSDEPDNLITLCRNCHKELHLGKFSLKNTKGLKRKNKQAAATQMNILRSMIIKKFNLSFTETYGFITKEVRQYLNLPKEHYFDGVAICYCDKVNKSKVFFKTNLVNLKRCISKGSYKRQKFTRGKMINLPKGKMQGFKRYDTVEYFGKRYFIMSRMSSGFAKLADINLNIIDFSFLGKGRKTPKLKNLKRISSRKSWITDQKIIQNI

SEQ ID NO: 15934 - protein, 415 aa, Bacillus sp.; identical to SEQ ID NO: 2431

SEQ ID NO: 15935 - protein, 428 aa, Enterococcus sp.; identical to SEQ ID NO: 4335

SEQ ID NO: 15936 - protein, 431 aa, Escherichia coli; identical to SEQ ID NO: 4170

SEQ ID NO: 15937 - protein, 524 aa, unidentified
MEILRIDWKDICPTGQSGLPQKELFMRPVYVLDMNGKPLMPTCRFGKVRRMLKSGEAKVVDTLPFTIQLDRPTKTHVVQSVTLGCDPGRTNIGLAAVRSDGTDLYRSHCETRNKEIVDLMDTRRAARRASRRGERLTRKRLAAKHETATTFPDGRKLPGYEKPIMLKDIINTEARFNNRVRPAGWLTPTATQLLRTHLNLIKRISRILPVSDIALEINKFAFMQLDEPDKNKWNIDFQHGPLYGTGGLKATVRQLQDDTCLLCQENVIEHFHHLIPRSKRGDNTINNIAGLCQRCHEAVHKSADTAEKLSTLKKGQTKRYGGTSVLNQIIPKLVEELGKTYHEHLHLTYGWQTKEFRTKHKLEKTHDTDAYCIAAGTMQTVKPNIRTDVYEIKQFRRHNRANIHHQTERTYKLNGQTVARNRRKRTDQKTDSLAEWFENTVKQYGQQKAEHLRAGLKVRKSTRYYNSKDRVMPGAVFQYEGNRYVVTGQLSGGQYYRAYGKGNQNFPAKKIRIISLNRGLVYVA

SEQ ID NO: 15938 - protein, 470 aa, Thermoanaerobacterium sp.; identical to SEQ ID NO: 15617

SEQ ID NO: 15939 - protein, 417 aa, unidentified
MPCSPAKARLLLKEKKAIVKRRTPFTIQLTIATGEAKQPVTLGVDSGYKHIGLSATTEKVELYASEVELRQDITDLLSARLALRRSRRSRKTRYRAPRFDNRVANKREGRLAPSVENRIAAHMSRVEAVMRVLPVTAITVETAAFDTQLLKNPDIAGAAYQQGEQLGFWNVREYVLFRDGHVCQHCRGKSKDPILNVHHIESRRTGGDAPNNLITLCETCHKAFHRGEIKLKVRRGKSFKAETFMGIMRWTLLERLKKAHPELRVRNTYGYLTKHKRISHGIAKSHCADAYCIADNLGAKRLEGFFFQKQTRKHNRQIHKLLILKGGLKKKNQAPYEVKGFRLFDKVICKGEEAFIFGRRTSGSFDVRRLDGTRISAGINYKKLRLLEPRTTYLTEFRKEAALPPLHKCRGVCAEFL

SEQ ID NO: 15940 - protein, 415 aa, unidentified
MENEMAYCFVVDKNNRPLAPTKVNKGWYLVRKGRAKIKSRYPMVIQLEKEVEPDKYDESRMVVGIDDGSAHVGLAIVQKCPTKNKVVFKGTIEQRQNVKHLMDVRRGYRRYHRHHKRYRQARFNNRHSSKRSGRLAPSIKQKKDAILRVLYQLNRWIDIQEYCLEDVCIDIRAMTDGHNPYKWKYQKSNRLDENLRKAAIIRDGCKCQECGKSNCVLEVHHIRARKYGGADTIGNLITLCSGCHQKTEGREREFEDRYFKIIGSKPKRFDYAMHVMQGKNYLREKISELGPLHLTNGGETANKRIDWNIEKSHSNDAICITNCNPDTCDVKEWIIKPMRRKSKAKTDNVLGIRHRDLVSYTYKNGEIHTGYVTALYPELLALNFQSKTKHCKKVNARKCRLLWKFDKIYWLEQRV

SEQ ID NO: 15941 - protein, 466 aa, unidentified; identical to SEQ ID NO: 3943

SEQ ID NO: 15942 - protein, 418 aa, unidentified
MQNYVFVIDTNKQPLNPISPKKARRLLDKGKAAVFRMYPFTIILKTAINNPTISPCQIKIDPGSKVTGFALVQNNQILWGMELEHRGGLIKKKLESRKAVRRGRRNRNTRYRKPRFLNRRRPPGWLTPSLDHRILTIGTWVKRLIKFCPVNEIWVEKVKFDTQKMQNPEINDVEYQQGELAGYEVREYLLEKWGRECTYCGQQNVPLQIEHISPKSFGGSNRVSNLCLACEKCNQRKGNKPIEEFLKKKPSLLQKIKSKAKQPLKDAAAVNTTRNKLVKVLQKIKPVVTGTGAQTKYNRTKLGFPKEHWIDAACVGDIEALQLRTNQPLLVTCKGQGGRQKAALNKYGYPIRHNPLRPIKGWTTGDIAKHQKLGIGKVTPRSKGSFGFTPLGIKGYKSCKPQDLSAVHRKDGYTYSFC

SEQ ID NO: 15943 - protein, 571 aa, unidentified
VIEQKQDACVPSGDGTPGFFQSRDTAEQAPSLGRPFYRHAQAYTRCGDTVYPCGTAWHIYERRHLMPYIYVLGMDGKPQMPTTRRRHVQRLLDTGRARIVSPVPFTIQLLYKNDPVLQPVTLAEDPGRTNIGLAALSLKGDLLFSAKVETRNKEIAKLMDKRRQSRRVSRNGERKARQRLARKFGTMLKAGMLMRKLPQYAADKFITCHVIRNTQARFSNRKRPDGWLTPSARHLVQTHINLVRKMGRYLPVTDVALEVNRFAFMQMEDPSISGVDFQNGPLKGFDDLHAAVRELQDGKCLLCKKEIEHFHHIVPRSRHGSNTIGNIAGLCTKCHEKVHKDEKAGKRLKDKKKGLDKKYGALSILNQAIPFICKELETEFGKEHVHYCTGRETSQVRRSLGYHKTKEEQYHEVDAWCIGALSLDSIPEKAPAFEEVHTIMQFRRQDRALIKAQTSRSYKLDGETVAWNRKKRTDQKNDSLEDWYQKQVQLHGQKEAGRMRSRLTVKISQRRYNNPERMLPGAVFLYKGKRYVMKGQHCNGVYLQAVGMGSRDFPVKECTIIKRNQGLVFLS

SEQ ID NO: 15944 - protein, 419 aa, unidentified
LGQPLMPTKDHRKVRLLLDSGAAVVVKRTPFTIRLTTKAKSYVQPIILGVDAGSKTIGLSASTETEELFAAEVTPRNDVVDNLSTRREFRRSRRNRKTRYREPRFNNRVRSKHKGWLAPSVEVKIQEHITAVKRVCALLPVGKIVVETAEFDLQLLKAVEAGLPVPQGEDYQKGEMLGHYNIRQYVLWRDGYTCRCCGTHGKGVKFHVHHLESRKTGGNAPDNLVTLCDGCHKKFHKGIITPDILKKRKRRSTRDAAFMGIMRKTLMERLRAELAIQVVETKGYITKYTRVELLKLEKTHTNDALAIAQGRRGFGVEELTTIPQSDYIYRIRPVRHHNRQLHKATILPGGIRKSNQAPRYVRGFRLFDKVSYLGEDCFIWGRRSSGSFLLKLLDGTKVKDGVGYKRISLLERSASYLIS

SEQ ID NO: 15945 - protein, 490 aa, unidentified; identical to SEQ ID NO: 3566

SEQ ID NO: 15946 - protein, 447 aa, unidentified; identical to SEQ ID NO: 5309

SEQ ID NO: 15947 - protein, 416 aa, unidentified
MPCSPAKARHLLDEGKAKIKKRTPFTIQLVYGSSGYTQEVILGVDAGSKTIGMSTSTKKEEVFAADVTPRNDVVDLLSTRREFRRARRNRKTRYRKPRFNNRVRSKHKGWLAPSVEVKIQEHITSIKMVCRILPVSKVVVETAEFDLQLLKAIEEGKPVPQGEDYQQGEMYGHYNVRQYVLWRDNYTCQCCGAHLTKKKEVRLHVHHLESRKVGGNAPGNLVTLCDRCHEKLHKGLITEKDLKKRKHRSTRDATFMGIMRKTLMQRLCSELPIPVAETRGYITKATREKLLVLPKSHTNDALAIAQGKQGFNVGYLPGIEQIDKIYTIRPVRHHNRQLHKAAILKGGIRKSNQAEKYVFGYRLFDKAQFNGQDCFIWGRRTSGYFVVKTIDGKVIHNSASFKKLRLVERASNYLIA

SEQ ID NO: 15948 - protein, 452 aa, unidentified; identical to SEQ ID NO: 3042
  source 1..452: note = uncultured beta proteobacterium

SEQ ID NO: 15949 - protein, 442 aa, Anaerostipes sp.; identical to SEQ ID NO: 2903

SEQ ID NO: 15950 - protein, 451 aa, unidentified; identical to SEQ ID NO: 2910

SEQ ID NO: 15951 - protein, 442 aa, unidentified; identical to SEQ ID NO: 6360

SEQ ID NO: 15952 - protein, 227 aa, Eubacterium sp.; identical to SEQ ID NO: 14371

SEQ ID NO: 15953 - protein, 426 aa, unidentified
MQVYVLNKHGQPLMPCSPAKARRLLEAGKAKVIKRTPFTIQLLYGSTGYKQTIIHGVDAGSKTIGMSASTKSVELFAEEVTPRNDVVKNLSTRREFRRARRNRKTRYRKPRFSNRVHSKHKGWLAPSVEVKIQEHITAIQKVCAILPISKVVVETAEFDLQLLKAVADGKPVPEGEDYQKGEMLGQYNVRQYVLWRDGYTCQCCGAHGDGVKLHVHHKESRKVGGNAPDNLVTLCDKCHKGFHEGTISLTKLVKRGRKSTRDAAFMGIMRKTLMERLSAALPISVVETKGYITKGTRTELLKLPKSHINDALAIAQGKHGFGITEPTAIARADRQYTVKPIRHHNRQLHKATVLKGGIRKSNQAAKYVNGFRLFDKVTYQGQECFIWGRRTSGSFLLRTLDGAKVKDGVGAKYLKLLERSSNYLIA

SEQ ID NO: 15954 - protein, 493 aa, unidentified; identical to SEQ ID NO: 3781

SEQ ID NO: 15955 - protein, 396 aa, unidentified; identical to SEQ ID NO: 5072

SEQ ID NO: 15956 - protein, 393 aa, unidentified; identical to SEQ ID NO: 6115

SEQ ID NO: 15957 - protein, 325 aa, unidentified
MYCAVMPITHATIEVGSFDTMLVKAIQEGKAIPEGADYQKGPRYNLATLREAVFYRDNYVCKVCGRKATEGAILHMHHMFYWKGRHGNSLDELLTVCEKCHTPANHQKSGKLYGFGENVKFADLSGAAFMNTVRWQIVNELYAAFGKDFVTVTYGAMTKEKRIALHLEKSHNNDAYAMGEFHPNCRCTFEHYEKVRRNNRILEKFYDSRYIDIRTGEIATGKELFNGRINRNHKKDSENLHKYRGKRLYKGHRALVRKKVNFNPGDLVSLNGEVLVVHGTHTNKKGAVNVEFKTPAKNGRKSANLKKLKIVKAAGSIHPAWEKVS

SEQ ID NO: 15958 - protein, 331 aa, unidentified
LSTRRQNRRSRRNRKTRYRAPRFDNRVHSKHKGWLAPSVEVKIQEHITVIKRICRILPITLVRVETAEFDTQRLKAMLKGKPLPVGTDYQLGEMYDEYNVRQYVLKRDNYTCQCCGAHPTEKKPIRLHVHHIESRHVGGNAPNNLITLCVACHKALHEGKITLDKGKKRGKPLRDAAFMGIMRNTLLARLKDELNIPVKQTYGYITKLLREKNKIPKSHVNDARCIAKAPNAKPCDTMLYTRALRHHNRQIHKAKILKGGIRKKNQAPYLVKGFRLWDKVRYNGEECFITGRRSSGYFALKKYDGTVISNSASYKKLMLLEAATNYITERS

SEQ ID NO: 15959 - protein, 514 aa, unidentified
MSVLVIGRNGRALMPTNPRKARLLLKKKTASVVCRHPFTIQLLYKTGCATQEGCIGIDTGSQHIGVGITCGDRVILKDEHALRSSMEKRSLLATRTVMRRGRRYRKVRYRKPKWRHHTKRMYFEKANRRGQHWRKVKTTTQSPRLKGWLPPSLQSKCDHHFRIIDRYLKYLPDPITRNLVIEAGRFDMARMNDPTIHGEMYQRGPMYDAENLRAYIFARDNYQCACCKAKAGTTRKADGTTVKLVAHHILFRSRGATDNPKYIISVCDHCHTTKAHQPGGILYSWMENNKKVARGLRDATFMNILRKRLFARYPQAAFTYGNITAADRKQLRLPKNHANDAVAISLFGKEASTVKNICQTMHYKQIRKSKRSLHEAIPRKGRKNPNTKAVRNKKNTTQVNGFKLWDSVLADGKKLFICSFTGTSAYLIDKNGCYISQPGKTYKQCPLSKLKRLHPNVDILPRINPWDSLDYNNITTPYRSGYSMIFQDLATIGVPHLGWYFLAAGQMPVPISLS

SEQ ID NO: 15960 - protein, 416 aa, unidentified; identical to SEQ ID NO: 7050

SEQ ID NO: 15961 - protein, 512 aa, unidentified; identical to SEQ ID NO: 3057

SEQ ID NO: 15962 - protein, 407 aa, unidentified
MVYVQDINGNPLMPTTRHGKVRRLLKNNKAVVVNLCPFTIRLTYETTNYKQEIVLGVDAGTKHVGLSATTKSKELYSSEVILRNDIVDLLSTRRELRRTRRNRLRYRKPRFDNRIKSKRPGWVAPSVKYKIDAHIRVIDNVCSILPISSIVIEVAQFDTQKIKNPNISGKEYQEGDQLGFWNVREYVLARDGHKCQYCKGKSKSKILNVHHIESRKTGGDSPSNLITLCETCHKEYHKGNIDLKIKRGKSLRDAAVMGIMKWRLYEELKYKYDRVSMTFGYVTKYNRINHGIEKSHVSDAFVISKNFNAKRLNFSYKIKLVRRHNRQIHKMKIQKGGTKRPNQSPFEIFGFRLFDRVRFDSKFYFIYGRRKTGSFNIRDINGENKKDVIYKKLKLSRCKRFMIQIEM

SEQ ID NO: 15963 - protein, 447 aa, unidentified; identical to SEQ ID NO: 5316

SEQ ID NO: 15964 - protein, 427 aa, unidentified
MQNYVFVIDTNKQPLNPIPPKKARRLLDKGKAAVFRMYPFTIILKTAIKNATISPCQIKIDPGSKITGFALVQNNQVIWGMELEHRGGLIKKKLESRRAVRRGKRNRHTRYRKPRFLNRKHSESWLPPSLEHRILTIETWVKRLIKFCPINEIWIERVKFDTQKMQNPEISGVEYQQGELAGYEVREYLLEKWGRECTYCGKQSVPLQIEHIHPKCKGGSARVSNLCLACEKCNQRKGNKPIEEFLKKKPSLLQKIKTKAKQPLRDAAAVNATRNKLVKVLKNIKPIITGTGAQTKYNRTKLGFSKEHWIDAACVGDIETLVLRVYQPLLVTCKGQGGRQKAALNKYGYPIRHNPLKPIKGWVTGDIAKHQKLGIGKVTPRTKGSFGFTPLGMKGYKSCKPQDLSAIHRKDGYTYSFCKHLPESTGQ

SEQ ID NO: 15965 - protein, 442 aa, unidentified
MSTSVFVLDKKHRPLMPCRPARARRLLRAGRARVVKRFPFVIRLVDRTVEQSEVQPVLIKLDPGSRETGAAVVRDDGKKRHHALAFFVIEHRGGAIRDALKARSAFRRRRRSQNFRCRSPRFLNRVKPKGWLPPSLRHRVETTLSFVRRMCRYLPVSGIATELVKFDSQKLQNPEVSGVKYQQGTLFEYEVREYLLEKFGRKCVYCGAEGVPLNIDHVVPRAKGGSNRVSNLVLACVSCNQKKGARSLEDFLKGKPEVLARVRRELKTPLRDAAAVNATRWVLFNELKATGLPVETGSGALTKLNRHAFGVEKEHWLDALCVGRLNGVVTRKGLNALEIRCMGRGSRQRTRLTKYGFPRGYLMRQKCVHGFATGDMVEANVPKGKKAGLWRGRVAVRVSGSFNIQTPKGVIQGVGWKHCRLISHNDGYGYAWLGHAPHSSPA

SEQ ID NO: 15966 - protein, 465 aa, unidentified; identical to SEQ ID NO: 6728

SEQ ID NO: 15967 - protein, 589 aa, Streptomyces sp.; identical to SEQ ID NO: 8594

SEQ ID NO: 15968 - protein, 414 aa, unidentified; identical to SEQ ID NO: 4015

SEQ ID NO: 15969 - protein, 431 aa, unidentified
MPNKVYVINKHGRPLMPCSPAKARHLLDEGKAKIKKRTPFTIQLVYGSSGYTQEVILGVDAGSKTIGMSASTTKEELLSAEVKPRNDVVDLQSTRREFRRARRNRKTRYRKPRFDNRVRSKHKGWLAPSVEVKIQEHITSIKMVCRILPVSKVVIETAEFDLQLLKAIADGKPVPQGEDYQQGEMYGHYNVRQYVLWRDDYTCQCCGTHATKKKEVRLHVHHLESRKVGGDAPDNQVTLCESCHEKLHKGLITEKDFKKRKRRSTRDATFMGIMRKTLMQMLCSELPIPVVETRGYITKATREKLLVLPKSHTNDALAIAQGKRGFNVGYLPGIIQTDKIYTIRPVRHHNRQLHKAAILKGGIRKSNQVGKYVFGYRLFDKVQFNEQDCFIWGRRTTGIFTIKTINGKMIKDGISFKKLKLVEKSTGYLIA

SEQ ID NO: 15970 - protein, 425 aa, unidentified; identical to SEQ ID NO: 13021

SEQ ID NO: 15971 - protein, 449 aa, Syntrophothermus sp.
MWTYSVKLTYPQGGLLMVYVLSKDREPLMPTKRYGKVRRLLKNNKAKVIRRKPFTIQLLYETTTYTQPITLGIDSGYNYIGFSAVTEKEELISGEVTLLQDISERLKERAMYRRQRRNRLRYRKPRFDNRRKPEGWLPPSIQHKYDSHVRFTNLISSILPITKVVIEVASFDIQKTKNPDIEGVGYQNGEQKGFYNLREYILYRDNYACQLCGKGNLPLEVHHIGYWKQDRTDRPSNLITLCINCHTPENHLRSGKLWGWQPKLQPFKEATFMSIVRWKLVNTLGCKYTYGYVTKAKRKALMLEKTHYNDAFIIAGGSNQKRVEPIYFEQVRRNNRSLEKFYDAKYIDTRTGKPATGQELFNGRRVRNKNYNTENLRKYRGQKLFKGRRSIRKQRYFYQPKDVVIYEGQKYIVKGVQNRGAYIKLEGLPKPVRIELVKPYLFRKGFCAV

SEQ ID NO: 15972 - protein, 388 aa, Ammonifex sp.; identical to SEQ ID NO: 12259

SEQ ID NO: 15973 - protein, 451 aa, unidentified; identical to SEQ ID NO: 12558

SEQ ID NO: 15974 - protein, 464 aa, unidentified
MAGKVLLLKTYCNIGEVNLPPLWGEFIRKDLIFMVYVISIEGKPLMPTNNAKARLLLKQKKAKVKTVRPFIIQLLYKTKNYTQPVILGIDSGYLNIGFSAVTDKKELISGEVELLKGQTERLKERTMYRRQRRNRKRYRKPRFDNRKIDKGWLAPSIKHKLESHIRFIGYLKTILPVTNTIVEIANFDIQKIKNPSISGEEYQEGKQKGFYNLREYIFHRDNHTCQICKAKDKPLEIHHIGYYKKDRSDRPDNLITLCINCHTSANHKEGGILYGLKPKLGPFKEETFMTTIRRRLIKELNCKYTYGYITKGKRIEQELEKTYFNNAFIIAGGKKQIRTEPIKFRQIRRNNRSLEKFYDAKYIDIRTGEKVSGQELYNGRTVRNKNYNTENLHKYREEKISKGRRSIRKQRYFYQPNDLVKYEGKIYTVKGTQNSGKYAALKGIKKVPKVELLQPYRFRKGFAC

SEQ ID NO: 15975 - protein, 431 aa, unidentified
MVYVLSIEGKPLMPTNRRGKIRRLLKEGKAKVVKVKPFTIQLLYQTKEYTQPITLGIDSGYTYIGFSAITEKRELISGEVNLRNDVSELIKEKHMYRRIRRNRLRYRKPRFNNRKRKEGWLAPSIQHKLDSHVRFIQKLKTILPITNIIVEVANFDTQKIKNPNIGGIEYQQGEQKGFWNIREYVLYRDNYICQLCGKQGIPLEVHHIGYWIPDRTDRPDNLITLCIKCHTPKNHQEGGKLWGMKPKSKPLKEATFMSTVRWKLVNTLSCKHTYGYITKSKRIILGLEKTHYNDAFCIAGGTNQERITPIMFEQIKRNNRSLEKFYDAKYVDIRTGKILSGQELFSGRRCRNKNLNSENLHKYRGHKQSKGRRSIRTQRYFYQPKDIVTYDRKQYIVKGIQSKGSYIKLEGLSKPVKVELVKPYIFRKGIC

SEQ ID NO: 15976 - protein, 454 aa, unidentified
LDVPECNIGQVAITLAIGDFSMSKNSVFVLDTNRKPCNPVHPAVARKLLTQRKAAVFRRYPLTIILKEESKNQPKELRIKIDPGAKITGLALVSDTNIVWCAELEHRGFQIKDNLSDRRARRRSRRNRKTRYRQPRFLNRKRRDGWLPPSLMSRVFNIESWVKKLCRLAPISTISMELVRFDTQKMVNPEINGIEYQKGELFGYEIREYLLEKFNRTCVYCNTKEGPFNLDHFYPKSKGGSDRVSNLVLSCVKCNQKKDNQLPVDFLRDQPKLLALIEKQRKQPLADTAAVNATRWKLKETLEAMGLPVEVGSGGLTKFNRKRLGISKSHWTDAACVGTSTPDSLNIKGYQPLLIKAMGRGSRQMVNSDKYGFPIVAPKLRQKSFFGFQTGDIVKAVVKKGKKIGTYVGRVAVRKTGSFNIKTKTELIQGISHKYCQHTHKSDGFSYGFGEVVQ

SEQ ID NO: 15977 - protein, 413 aa, unidentified
MDSSGESRDTCFFVNYKRGLTLPKTELDSMSKRKLMESRSSLRRGRRHRKTRYRHPKWRLKAKRVYYETPDRKGRHWKKQKITFASKRPQGWLPPSLQSKTDHHIQWIKKLQDLLPDGYRLSIELGRFDPARMKDTEIHGDLYQKGPQYDYENVRAYVLDRDRYTCQVCGKKGGKLHIHHILYRSHGATDNPQYMATICSDCHSTENHQPGGILYQWMQEQKKFTRGLRDATFMNILRKRLMKAFPKATFTYGNITKADREKLKIPKSHGNDATAIAIVKTGIMTVKDNEPVIYIQQVRRKKRSLHEETPRKGRKEPNRKASRYNKNTKAVTVTKRKNKKRISITGCLFDRVELNGKKGWISGFTDKSCYIKDENDQYIRISPKYKQVSLSKLKILHHCGNWVIGARRSLGKG

SEQ ID NO: 15978 - protein, 428 aa, Sutterella sp.
LKVFVLNMRGRPLMPCSPAKARHLLKAGKAVVRRRTPFTIQLRIATGETKQSVTLGVDAGAKHVGLSAATEKEEVFAPEVELRQDITGLLAARLSLRRERRQRKTRYRAPRFLNRVRSKHKGWLAPSVENRIQAHLSRIDAICGLLPVTKIVIETASFDIQKIKHPDVEGTDYQQGDQLGFWNVREYVLFRDGHVCQHCHGHAKDKILNVHHLESRQTGGDAPNNLITLCERCHKACHAGKIKLKVKRGQSFREEAFIGIMRWTLLDRVRKAHPGLPVENTYGYLTKNTRITLGPPKAHCVDAYCIAGNLKAVRRGVHLYQRQVRKHNRQIHKCTVLSKTLKDGTKIGYRKLNQTPHLVKNFRLFDKVRCLGQTGFIFGRRSSGYFDVRRLDGVKISSCINYRKLTLLEKRGTCLTELRKEDGASSPV

SEQ ID NO: 15979 - protein, 451 aa, unidentified
MSVAVISKTGIVLMPTSEYRARKLLDSGKAIIYGYRPFTIQLTERETGDVQPVELCVDTGYIHIGVSVKSEKHEYLGLQVDTLTDEKAKHDDRRMYRRQRRNRKRYRKSRFDNRKRKSGWLAPSLEHKKEINLQIITAICGVYPIADITLEMGNFDTQVLKAKEEGKQIPQGTDYQHGERYGIATLREAVFTRDGYKCQCCGRGIKDGAILHAHHIQYRSQGGTNRMSNLITVCEKCHTPANHKPGGKLYGWKPKIASFKDATYMTAVRWQLYRKVKEMFPGIHVKITYGAETKERRRILDIKKSHVNDAFVMGQFHPKHRSLPVLYKKKRRNNRCLEKFYDAKYIDSRNGKTRSGQELFNGRISRNHKKDSENLHRYRKKKVSRGKRNIRVQRYKIQPHDIVLFDGKKYETTGCHNKGTRAILLPEKKSKSVEKLTIYKYAGGYYPSKFA

SEQ ID NO: 15980 - protein, 286 aa, unidentified
KWQYQQGPLYQKASLEEAVSEMQEHHCLFCKNTIDHYHHVVPQSENGSNTIGNIVGLCTKHHDLVHKDTSWQEKLAKKKTGLNKRYGALSVLNQIIPALTKELSSLFPKHFFATNGKSTYDYRAAHGVSKDNWLDAYCIAGSVLPNDACDNNINNHVPYELKQFRRHDRRALHKENMGRVYTLNGKSVATNRHKAIKQTTDSLEEFRQRQPNDVCKLKVKEHHPEYRNPKRNFPGCVFLVGKHTHVMQGTSGSHNGKADGYYDTNGNSYSSGKCKFVVKNEGIVFT

SEQ ID NO: 15981 - protein, 518 aa, unidentified
LANLKLIDELLEKTEYIYVLGTDGKPQMPTNRKVRVRSLFKSGLAKIVDTVPFTIRLLYENDAVLQPITIAEDPGRTNIGAAVLTQLGDLVFSAVVETRNKSIKKLMSDRKAYRQASRRGERKARQRLAKRHGSMIKAGMIMRKLPQYAADKFVTCKIIKNTEARFCNRKRMPDWLTPTVNHLVQTHINLIKKVEKYLPITDVAIEVNRFAFMQMENPDASGVDFQNGPLKGFDDVKAAICEQQHGKCLMCKNDIEHFHHIVPRSKGGSDTIQNQAGLCKKCHAKVHTDAEFQAKFKDKKEGLIKKYGALSALNQAIPFICKELLEIYSVEHVHFCTGKDTSLIRSSLGYEKTKDNQMHEVDAYCIGLAAIGADKAKRPDFNNVFKIKQFRRQDRQLVHYQKERTYYLDGKKIATNRNPRFEQKGDALSDWYKEQIKIYGQYEAEKMRSRLTVKKSKRSYNTTKRLMPGCVFYYDGQRHVMAGQSSYGRYLRAYNCGTKDFPASKCQVIQFNTGLVFV

SEQ ID NO: 15982 - protein, 408 aa, unidentified; identical to SEQ ID NO: 4614

SEQ ID NO: 15983 - protein, 423 aa, Arthrospira sp.; identical to SEQ ID NO: 3091

SEQ ID NO: 15984 - protein, 432 aa, unidentified
MSSVFVLAPDRQPLDPCHPARARQLLDAGRAAVFRRFPFTIILHDRTRAASVVHEHRLKIDPGSKTTGLALLAGTRVLWAAAVTHRGRRITAALRSRHAIRRGRRQRQTRYRPPRFLNRTRPVGWLAPALHSRVANVMTWVERLRRLCPLTALSQELVRFDMQQMQHAEMRGVEYQHGELAGYEVREYLLEKWHRTCAYCDAKDVPLEVEHIIPKARGGSNRVSNLTLACVPCNRKKGARSAAECGLPQVQAQARRPLHDAAAVNATRWRLSQALHATGLPVETGTGGRTQYNRSRLGIAKSHWGDAACVGASTPDTLRVRGIQPVGIRAMGHGSRQRCRVDAHGFPQGHRARQKHYGGMQTGDIVQAVVPTGKYAGTWTNRVVVKASGWFDLVIDGKKASVNQRHCTRLWAADGYTYTLPAGAGTAVSSPR

SEQ ID NO: 15985 - protein, 515 aa, unidentified; identical to SEQ ID NO: 5111

SEQ ID NO: 15986 - protein, 415 aa, unidentified
MVNRIEYCFVVDKNNKPLAPTKINKGWYLIRKGRAKLKSKYPMVIQLEKEVESDEGDKSHIVCGIDDGSSCVGLAIVQKCLTKNKVVFKGTIEQRQDVKHLMDVRRGYRKYRRYHKRYRQARFNNRSSSKSTCRSAPSIKQKKDAVLRVLYQLNKWVNIQEYYLEDVCIDIRAMVDGYKPYRWQYQKSNRLDENIRKATILRDGCRCQECGKSNCRLEVHHIRARRYGGADTIGNLITLCEKCHDKTKGKEKCFEEKYFNMIKSKPKRFDYAMHVMQGKTYLREKISELGILHLTNGGDTANKRIEWNIVKTHSNDAICIADGIPDTCDIKEWIIKPMRRKSKAKADNVLGIKHRDLVTYTYKNGETHTGYVTALYPEQLALNFQSKTKHCKKVNARKCRLLWKFNKIYWLEQCV

SEQ ID NO: 15987 - protein, 545 aa, unidentified
VQFAWWLCHPKPSDNIEDVNHETALMLLQIKAGTETFGTAPCGSGPKAEGVSPERKAMNTVAVVTNTNKPLMPTSPYRARKLLSSGKAKIVKHRPFTILLVNRSDGNVQEIEYKSDTGYLHVGISVCSEKREFVREQRDLLPDEKEKHNDRRKYRRTRRNRKRYRKARFDNRIGKIRKAEKNKHVWLPPSLEHKVDAQVQLFLRLYQVMPVKRAVFEMGQFDPALMKALEKGEAAPQGIDYQMGERYQIATRRAAVFTRDRYACVFCGRSIKDHAILHVHHIGFWKQDRSNRLDNLATCCEQCHTSENHRPGGILYGVEPKLESLASATYMNVVRFELLRRLKEAAPDVEFHISYGAKTSVIRKQRSISKSHTNDAYCLGQYFPKLRAEEIGFQKIRRNDRILQKFYDAEYLDSRDGTTKKGKELTNGRISRNHMKDHKNLHQYRGKKLSKGRITIRRGRSSLKPGGLVRFDGEVLTVHGTHRSRKKNKAGHIKVSVNVEFERPSKTGRKSAALSKCQIISQSYNTGWKQIQLRKEEQGRIAAVV

SEQ ID NO: 15988 - protein, 458 aa, unidentified
MSNVFMLDTYEKPLDPVHPGHARLLLKQGKASVWRRFPFTLILKDEVKEPVVQPLRLKLDPGSRTTGIAIVNDASGEVVFAAELTHRGHKVKERLDSRRAVRRNRRARKTRYRKARWQNRRRRQGWLAPSFESRLANVLTWVHRLSRYCPISAISMELVRFDMQMMDNAEISGVKYQQGTLQGYEVREYLLEKWNRQCAYCGKKEVPLEVEHIVPRAKGGTDRVSNLTLACEPCNKAKGTQDITMFLKKKPDVLRHIQALQKGTLKDATAVNSTRWALFERVKATGLPIECGSGGLTKYNRTMRGLEKTHWLDAANVGKSTPDILNGRGIVPLFISATGHGSRQMCRMNKYGFPRTKPKHAKKVQGFQTGDMIKAVVPDGAKKGSYVGKVAIRATGSFNVTTATQTIEGINARHCRIIHRGDGYSYGFGEGASHPSPKKGGPLSSLASRHRVSRGRVL

SEQ ID NO: 15989 - protein, 415 aa, unidentified
MVYVLANDGQPLMPTERHGKVCRMLKSGIAKVVKKCPFTIQLQYESERNVQPVALGIDAGSKHVGVSATTKAKVLYESDVELRDDIVKLLATRRQLRRRRRSRKTRYRPARFDNRRRKEGWLAPSIRQKIGSHLTVVANVCKILPVSQIIVETASFDIQKIKNPDIQGIEYQQGEQMDFWNIREYVLFRDGHTCQCCKGKSKDKVLNVHHIESRKTGGNAPNNLITLCETCHKGYHNGTVTLPKNIKRGMKFKDAAFMGIMRWTFYNTLKEQYEPDIPVHYTYGYITKNTRINHNLPKGHCIDARCISGNPDAVSDGTYYYQKKVRCHNRQIHKQTILKGGIRKSNQAEYLVRGFRLFDKVRYQGREYFIFGRRKSGFFDIRTLSGEKVNKGSISVKKLTFVDTRKNYFIERRTV

SEQ ID NO: 15990 - protein, 451 aa, unidentified; identical to SEQ ID NO: 6577

SEQ ID NO: 15991 - protein, 418 aa, unidentified; identical to SEQ ID NO: 5724

SEQ ID NO: 15992 - protein, 431 aa, Escherichia sp.; identical to SEQ ID NO: 10059

SEQ ID NO: 15993 - protein, 447 aa, unidentified; identical to SEQ ID NO: 5316

SEQ ID NO: 15994 - protein, 276 aa, unidentified
VVGNNLLSIKPLINIGKGVIYSSICTGLSLQTYQKRKEVPYMVYVLDIDGQPLMPTTRHGKVRRLLNSHLAKVVKRCPFTIQLLYQSTKETQPVSLGVDAGSKHIGMAATTEKKVVYQEELFPRNDVVKLLSARRTLRRTRRNRKTRYRKPRFNNRVHSKHKGWLAPSVEVKIQEHITTIKRICQILPISEIQVETAEFDLQRLKAMKEGKTLPVGTDYQLGEQYDFYNTRQYVLHRDGYTCQCCGTHDNNIKLHMHHIESRQTGGDAPNNLITLC

SEQ ID NO: 15995 - protein, 414 aa, unidentified
MPCSPAKARLLLKEKKAIVKRRTPFTIQLTIATGESKQPVTLGVDAGYKHVGLSASTEKAELYASEVELRQDVSDLLSARRALRQSRRNRKTRYRAPRFNNRLRTKRKGWLAPSVENRINAHLSRIEAVLRLLPVTKITVETASFDLQLLKNPDISGKEYQEGEQLGFWNVREYVLFRDGHVCQHCHGRSKDPVLNVHHLESRRTGGDSPGNLITLCETCHKALHRSEITLKTKRGQSFRAEAYMGLMRWEVLNRLKTSHPGLEVHNTYGYRTKYTRIVNGIDKSHCADAFCIAGNLGAERLGEFFFQKQTRRNNRQIHKLSILKGGIRKRNQAPFEVNGFRLFDKVACKGEEGFIFGRRSSGYFDVRKLDGTCISAGISYKKLHLLEKRRTYLTEIRKEEALPPLPEGSGLRA

SEQ ID NO: 15996 - protein, 493 aa, unidentified; identical to SEQ ID NO: 2644

SEQ ID NO: 15997 - protein, 512 aa, unidentified; identical to SEQ ID NO: 3769

SEQ ID NO: 15998 - protein, 512 aa, unidentified
MSTIYVLNKDGKPLMPTTRGGHVRHLLKEQKARVVRAKPFTIQLLYETNDAVQPLYLGIDPGRTNIGVAVVKANGTAVFTAHLESRNKEILKLMQDRKKARRARRTNGRRHRRQRRAKANGTISKKCVKQDTAQSKNPSKRAKEIGVIKRRLPGHKKDLLCIGIKNKEAKYTNRARPEGWLTPTAIQLLQTHINLVKKIQKFLPISDVVLEVNKFAFMRLDNPDIQKWQYQQGPLYQKGSLENAVSEMQEHHCLFCDKPIDHYHHVVPQSENGSNTIANIVGLCSEHHNLVHKDAAWQKKLAEEKVGLNKKYGALSVLNQIIPALTNKLSVLFPKHFFVTTGKSTHDYRESHSVSKDHWLDAYCIACSVLPSNVCDSNINNHVPYELKQFRRHDRRTLHKENMSRVYTLNGKAVATNRHKAIKQTTDSLEEFRQSHPGDICKLKVKEHHPAYRNLNRNHPGSVFFVGEQAHVMQSIVASKDGKATRYKDTNVNKIAAGQCRFVAKNEGIVFT

SEQ ID NO: 15999 - protein, 428 aa, unidentified; identical to SEQ ID NO: 15007

SEQ ID NO: 16000 - protein, 447 aa, Marinobacter sp.; identical to SEQ ID NO: 6487

SEQ ID NO: 16001 - protein, 515 aa, unidentified; identical to SEQ ID NO: 5111

SEQ ID NO: 16002 - protein, 405 aa, Pseudomonas sp.; identical to SEQ ID NO: 7991

SEQ ID NO: 16003 - protein, 256 aa, unidentified
LLFYRKEHGIMQYVYVLNKHGEPLMPCSPGKARLLLKQQKACVVRRTPFTIKLLYGSAGYKQPITLGVDAGSKHVGLSASTEKRELYSEEFTPRSDVVKLLSTRKQNRRSRRYRKTRYRAPRFDNRVHSKHKGWLAPSVEVKIQEHITVIKRICKILPISLVRVETAEFDTQRLKAMLAGKPLPVGTDYQLGEMYDEYNVRQYVLKRDHYTCQCCGAHNTAEKVVKLHVHHLESRKTGGNAPSNLVTLCTTCHKNL

SEQ ID NO: 16004 - protein, 437 aa, unidentified
VFVLDKRKKPLMPCSEKRARRMLERGRARVHRLVPFTIRLVDRTQAESVVQPVVVKLDPGATTTGMALARVEEGNAEPTHHVLHLAELPHRGRAIRAAMRQRAAFRRRRRGKNLRYRPARFDNRRKPKGWLAPSLRHRVETVVSWVARYRRFVPVSQVAMERVRFDTHALAAPEVAAKGGIAYQQGTLAGFEIREYLLEKWERSCAYCDARDVPLQIEHIIARSRGGSDRVSNLTLACEPCNRRKDAQAVETFLAHDPKRLARIQANLQKPLDGAAAMNATRWALWRMLCATGLPVECATGGRTKWNRSRLDIPKTHALDAACVGVVGRVANWQRPTLAIRCTGRGAYSRTRLTAHGFPRGHLTRQKRHYGFQTGDLVRAVVAEGVHAGTWIGRVAVRATGSFNIRIGTQTRQGICWRNCIVLQHGDGYAYETSSQR

SEQ ID NO: 16005 - protein, 414 aa, unidentified; identical to SEQ ID NO: 11301

SEQ ID NO: 16006 - protein, 460 aa, unidentified; identical to SEQ ID NO: 3778

SEQ ID NO: 16007 - protein, 431 aa, unidentified
MPNKVYVINKHGRPLMPCSPAKARHLLDAGKAKVKKRTPFTIQLVYGSSGYTQEVILGVDAGSKTIGMSASTTKEELLSAEVKPRNDVVDLLSTRREFRRARRNRKTRYRKPRFDNRVRSKHKGWLAPSVEVKIQEHITAIKMVCRILPVSKVVIETAEFDLQLLKAIADGKPVPQGEDYQKGEMYGHYNVRQYVLWRDDYTCQCCGAHATKKKEVRLHVHHLESRKVGGDAPDNQVTLCESCHEKLHKGLITEKDFKKRKRRSTRDATFMGIMRKTLMQRLCSELPIPVIETRGYITKATREKLLVLPKSHTNDALAIAQGKQGFNVGYLPEIAQIDKIYTIRPVRHHNRQLYKATILKGGIRKSNQTKKYVFGYRLFDKVQFNGQDCFIWGRRTTGIFTIKTINGKMIKDGISFKKLKLAEKSTSYLIA

SEQ ID NO: 16008 - protein, 427 aa, unidentified; identical to SEQ ID NO: 12009

SEQ ID NO: 16009 - protein, 470 aa, unidentified; identical to SEQ ID NO: 2825

SEQ ID NO: 16010 - protein, 408 aa, unidentified
MLVYVINKNGNPLMPCKPAKARKLLRAGKAKIVNRCPFTIQLQWDCEENVQPVTLGIDKGSHYTGLCSVGFGQILLSGIINHRTDIKDKMTARRGNRCQRRYRKWYRPKRFLNRATSKHSGRLQPSIKANAEEVIRVVRQIPLPLSQIVIEDVQVDIARLNNPDLLGIEYQRSNRLDENLRIATLMRDKYQCISCGKKKVQLQAHHIVPQNQGGKDTIKNLITLCQSCHNKVHQGQITLHADGISGFKDQIAQRTMQGKSFIYQILENFAPVFKVFGYQTASFRKYLSLPKEHDVDALCVATLDKGTKVPYHRDNFYTIKFRPRQTRRCYYDLPQKGKGRVPYQVNAELDGFRKGDVVRVKGKWIKQINSIYSNGRLAFARIKGEPNSAKPLDCQLLRRGLTIIWTHS

SEQ ID NO: 16011 - protein, 415 aa, unidentified; identical to SEQ ID NO: 3582

SEQ ID NO: 16012 - protein, 428 aa, unidentified
MYVYVLNQHGEPLMPCSPRKARIMLRDHKATVVRRTPFTIRLLHRSSEYRQDITLGVDAGSKFIGLSACTESKELFAAEVKPRNDVVDLLSTRRELRCSRRSRKTRYRAARFNNRVHSKHKGWLAPSVEVKIQEHITAIKRTCAILPISMVIVETAEFDTQRLKAMLEGKPLPVGTDYQLGEMYDEYNVRQYVLKRDNYTCQCCGIQSTDKAPVKFAVHHKESRHVGGNAPNNLITLCEKCHRLLHAGVITLEEGKRKRGKSFRDAAFMGIMRKTLMQRLRSELSIPVKETYGYITKLLRETHAIQKSHVNDAQCIARVPDARPSDTLYRIRAVRHHNRQLHKVNPIKGGIRKRNQAPYKVFGFRLWDKVLFNGQECFITGRRVSGYFALKNFDGKKVHTGASYMALTIVESSTSYLIERRTAVSSRG

SEQ ID NO: 16013 - protein, 419 aa, Anaerostipes sp.; identical to SEQ ID NO: 6355

SEQ ID NO: 16014 - protein, 515 aa, unidentified
MTALEERLSKTEYIYVLGFDGKPQMPTRRKRHVLKLLKTGRARIAEDIPFTIRLTYRNAPVLQPVTLAEDPGRTNIGAAVLSPLGDLLFAAVIETRNKEIKKLMTDRQKSRQASRRGERKARQRLAKRYGSMVKSGMVMRKLPMYAADRFVTCKFIRNTQARFCNRKRCPDWITPTVQHLVQTHLNIIRKISRYLPVTDIAFEVNRFAFMHMENPEAIGVDFQNGPLKGYGDVKEAIRTQQHGKCLMCKKPIAHFHHIVPRSRGGSDTIQNLAGLCPECHTKVHKDTAFRKDFDEKKSGQLKKYGALSALNQAVPFICKKLLEEYGEEHVHFCRGLDTSLIRTALGFEKTKKDQMHEVDAYCVGLAALEVNEVETPAFDHTFQIRQFRRQDRSIIHHQTGRSYYQGKEKVAQNRKPGFEQKTTALSQWYEEQVRIHGEKEAEKIRSQLRVEKSCRHYNDMDRFLPGAVFLYEGKRYVLSGRITNGKYLRACGQGMKNFPAAECTFIRHNAGLVFI

SEQ ID NO: 16015 - protein, 279 aa, unidentified
TKITVETASFDLQLLKNPNISGKEYQEGEQLGFWNIREYVLFRDGHVCQHCHGRSKDPVLNVHHLESRRTGGDSPGNLITLCETCHRALHRGEMKLRAKRGQSLRAEAFMGIMRWEVLGRLKTSHPELEVNNTYGYRTKHVRIRNGIAKSHCADAFCIAGNLGAERLGEFFFQKQTRRNNRQIHKLSILKGGIRKRNQAPFEVKGFRLFDKVACKGEEGFIFGRRSSGFFDVRKLDGTRISAGLSCKKLHLLEKRQTYIKEIRKEEALPPLPDGRDLRA

SEQ ID NO: 16016 - protein, 570 aa, unidentified
LRSARMALRDFSSPEHCRADTKSWKTVLPLCTGLPPTQGYRLSLRNCMTHQERRHLMPEFIYILGMDGKPQMPTTRRRHVQKLLNTGRARIAEHVPFTIQLLYKNDPILQPVMLAEDPGRTNIGLTVLSLKGDLLLSAVTETRNKEITKLIDKRRACRRTSRNGERKARQRRAKRFGTTLKAGMLMRKLPKYDTDKFVTCKLIRNTESKFCNRKRPDGWLTPSARQLADTHINLIHKMQKYLPITDVAFEVNRFAFMLLKDPSVSGVDFQNGPLKGFDDLHDAVCELQDGTCLLCNRKIEHYHHIIPKSKNGSDTIDNIAGLCMCCHDKVHKNEKEAQRLQKKKKGLNKKYGALSVLNQAIPFICKRLEEEFGAEHVFYCTGRETAAVRNSFGYQKTKDNQLHEVDAWCIGILALGKIPKTLPDFSYTCRIRQFRRQDRSRIKAQTERTYKLEGKIVAKNRKKRTEQKTDSLEDWYQKQTALYGQKEADRMRSRLTAAKSQRRYNAPSRILPGTVFLYDGKRHVLSGQLTGGKYFRAVGDAKTNYPASKCRIVRKNEGLVFISQVITERV

SEQ ID NO: 16017 - protein, 493 aa, unidentified; identical to SEQ ID NO: 3154

SEQ ID NO: 16018 - protein, 512 aa, unidentified
MSTVYVLNKDGKPLMPTTRGGHVRHLLKEQKARVVRAKPFTIQLLYETNDVVQPLYLGIDPGRTNIGVAVVKANGTAVFTAHLETRNKEIPKLMQDRKKARRARRTNGRRCRRQRRAKANGTISKKCVKQTTAQNGSVSKRAKDIGVIKRRLPGCEKDVLCIGIKNKETKFTNRTRPEGWLTPTANQLLQTHINLVKKIQKFLPISDVVLEVNKFAFMRLDNPNIQKWQYQQGPLYKKESLESAVSEIQEHHCLFCKKPIDHYHHVVPQHKNGSNTIGNIVGLCAKHHDLVHKDSAWEKKLAQKSTGLNKKYGALGVLNQIIPTLTNELSSLFPKHSFVTNGKSTYDYRAAHGVSKDHWLDAYCIACSVLPSNVCDSNINNHMPYELKQFRRHDRRVLNNENMNRVYTLNNKAVAINRHKAKDQKTVSLEEFRKEHPDDVCKLKVKEHHPTYRNMNRNFPGSVFLVGKQIHVMQGIASSKDGKATTYKDSNANSITVSKCKFVAKNSGILFV

SEQ ID NO: 16019 - protein, 431 aa, unidentified; identical to SEQ ID NO: 11677

SEQ ID NO: 16020 - protein, 426 aa, unidentified
MVYVQNHLGQPLMPTQDHRKVRLLLKAGAAVVVRRTPFTIRLTTRTKTYVQPVILGVDAGSKTVGMSAATHEEEVFAAELTPRNDVVKNLADRRKFRSSRRGRTTRYRQPRFNNRVHSKHKGWLAPSVEVKIQEHITSIKRACELLPIGKVVVETAEFDLQLLKSIADGMPVPQGEDYQKGEMYGFYNVRQYVFFRDGYTCQCCGAHGKGIKFHTHHLESRKTGGNAPDDLVTVCDKCHKAFHAGLITDAKLKKRRRKSTRDAAFMGIMRKTLLQRLRAELPIPVVETRGYITKATRERLLKLPKSHTNDALAIAMGRHGFGIEEVTYMPQSDRIYQIKPVRHHNRQLHKALPKKGGRRQRSQGPKYVQGFRRFDKVLYRGQECFIWGLRTRGYFQLKLLNGTKVHESAKASELILLEHSSGYLIA

SEQ ID NO: 16021 - protein, 408 aa, unidentified
MVYVQDIDGKPMMPTTRHGKVRRLLKANKATVVNLCPFTIRLTYATSGYKQEIVLGVDAGTKHVGLSATTKSKELYSSEVILRNDIVELLSTRRELRRTRRNRLRYRKPRFNNRIKSKRTGWVAPSVRHRIDAHIRVIDNICSTLPISRIIVEIAQFDTQKIKNPDISGNEYQEGDQLGFWNVREYVLARDGHKCQHCKGKSKDPILNVHHIESRKTGGDSPSNLITLCETCHKEYHKGKIDLRVKRGKSLRDAAVMGIMKWKLYEELKSRYDNVSMTFGYITKYNRIKYGIEKYHISDAFVISKNFNALRLEYHYKVRLVRRHNRQIHKQKVLKGGAKKPNQSPFEVFGFRLFDRVMFEGNYYFIFGRRKSGSFNIRDINGGNQRNVTYKKLKLSIGKRFMIQKEMN

SEQ ID NO: 16022 - protein, 430 aa, unidentified
MPNKVYVINKHGRPLMPCSPAKARHLLDAGKAKVKKRTPFTIQLVYGSSGYTQEVILGVDAGSKTIGMSASTTKEELLSAEVKPRNDVVDLLSTRREFRRARRNRKTRYRKPRFDNRVRSKHKGWLAPSVEVKIQEYITSIKRVCRILPVSKVVIETAEFDLQLLKAIADGKPVPQGEDYQKGEMYGHYNVRQYVLWRDGYTCQCCGAHTTKKKEVRLHVHHLESRKVGGDAPDNQVTLCESCHEKLHKGLIAEKDFKKRKRKSTRDATFMGIMRKTLMQMLCSELPIPVVKTRGYITKATREKLLVLPKSHTNDALAIAQGKQGFNVGYLPEILQIDKIYTIRPVRHHNRQLHKAAILTGGIRKSNQTEKYVFGYRLFDKVQFNGQDCFIWGRTTGIFTIKTINGKMIKDGISFKKLKLVEKSTGYLIA

SEQ ID NO: 16023 - protein, 451 aa, unidentified; identical to SEQ ID NO: 2436

SEQ ID NO: 16024 - protein, 512 aa, unidentified; identical to SEQ ID NO: 5549

SEQ ID NO: 16025 - protein, 420 aa, unidentified; identical to SEQ ID NO: 3288

SEQ ID NO: 16026 - protein, 418 aa, unidentified; identical to SEQ ID NO: 4327

SEQ ID NO: 16027 - protein, 546 aa, unidentified; identical to SEQ ID NO: 12293

SEQ ID NO: 16028 - protein, 445 aa, unidentified
LYRYFPTIVILKDVDARKLSGLSSYRIKIDPGAKYTGIAIVRDDTNEFMYAMQIEHRGEQIKKNLDTRRNARGDRRSRETGYRRPKWGNQCTAKEQRQSYDSRRDENWLPPSVKSTADNIISWVRRLSRWINITNCSFESVRFDTQLMENPEIEGVEYQQGTLYGYEVKEYLLEKYGHTCQYCGGKSSDPILEWEHMIPRSRGGSDRLKNATLACHNCNQDKGNHTLEEWQTILQDRLPKERGKQKELDQMRQKYVQQVMEGKAPLKGLRYAAWVNSSRRYSQRHLYLRFPELECSSGGRTKYNRNALGYPKEHHYDALCVGKIPEDGFVDWTHGYYLYAKATGRGTRLRGQLNGCGVIISKWKNRSKTAFGFQTGDLVVANVPKDTKYKYKGRFVGRVMIRKSGSFDIRTLSGELVTVNAKFCRLLQNNSGYQMMIKRAIPLGD

SEQ ID NO: 16029 - protein, 470 aa, unidentified
MSVFVVGLNGCRLMPVSERKARLLLKGGKASVYRKVPFTIKLNYKTGSTVQPGYLGIDTGSQHIGVSVVQKDGTVLHKEEIGLRDSMSKRKLLESRASSRRGRRYRKTRYRHPKWKPKTKRIYNEKADRKGRHWKKQKNTFTSKRQAGWLPPSLQSKTDHHIQWIRKLLDLLPEGYRLSIELGRFDPARMKDPGIHGELYQKGPQYDYENVRAYVLARDGYTCRVCKKNGGKLHVHHILYRSRGASDDPKYMAAVCSNCHTTENHLPGGILYQWMQDQKKFTRGLRDATFMNILKKRLRKAFPDAVFTYGNITKADREKLELPKSHGNDATAIALVKTEVPSVKDEEPVIHIQQVRRKKRSLHEETPRKGRKEPNRTASRIDKNTKSVTVTKGSGEKKASMTACLFDRVELDGKKGWITGFTGTSCYVKDKEDSYICTSPKYKQVSISRLRILHHCGNWAIGAEKPLGKG

SEQ ID NO: 16030 - protein, 461 aa, Parasutterella sp.; identical to SEQ ID NO: 3646

SEQ ID NO: 16031 - protein, 522 aa, unidentified
MGAVFVVDKNGKPLMPTYSKPKVRRMLKDGRAEIFRHEPFTIQLTQRAGGYTQPVHYDTDSGYQYAGVSVKSEKHEFLHMQADMLEDEKGRYDDRRKYRCTRRNRLRHRPPRFDNRRKGEGWIAPSLAHRLENQVRLFQTMCGVCPITEAHIEVGRFDAQALDAVEKGLPLPEGIDYQHGPRYAFDTIREAVFARDQHTCQCCGASPSKKPGTILVVHHALYWKGDHTDRLPGLLTLCTNCHTSANHQKGGKLRGLAPNAATANKAPAAFMNVVRWMMRDRFQADGVPTTITYGAATKRERLSRNVAKTHANDAYCIGEFRPKHRSLEIHIAKRRRNDRRLEKFRDATYIDARDGSIKSGKELSSGRTKRKEPRHGAKDLRRFRLKQLTKGCNAVRRKRYEIRPDDLVRTTDGRVYTVNGTQNRGATLQLRTTKTVLLTALVPKTGKEKELLPVETGQKLALKGRKEKHEVLSVDLASGKAVMRWYMGVKPENVTLLTGTYGGWTVVPAQAVNTCKKGETEK

SEQ ID NO: 16032 - protein, 431 aa, unidentified
MPNKVYVINKHGRPLMPCSPAKARHLLDAGKAKVKKRTPFTIQLVYGSSGYTQEVILGVDAGSKTIGMSASTTKEELLSAEVKPRNDVVDLLSARREFRRARRNRKTRYRKPRFDNRVRSKHKGWLAPSVEVKIQEHITSIKRVCRILPVSKVVIETAEFDLQLLKAIADGKPVPQGEDYQKGEMYGHYNVRQYVLWRDDYTCQCCGAHATKKKEVRLHVHHLESRKVGGDAPDNQVTLCESCHEKLHKGLIAEKDFKKRKRRSTRDATFMGIMRKTLMQRLCSELPIPVVKTRGYITKATREKLLVLPKSHTNDALAIAQGLQGFRVGYLPGIVQIDKIYTIRPVRHHNRQLHKAAILKGGIRKSNQAEKYVFGYRLFDKVQFNGQDCFIWGRRTSGYFVVKTIDGKVIHNSASFKKLNLVERASNYLIA

SEQ ID NO: 16033 - protein, 424 aa, unidentified; identical to SEQ ID NO: 8578

SEQ ID NO: 16034 - protein, 512 aa, unidentified
MSTVYVLNKDGKPLMPTTRGGHVRHLLKEQKARVVRAKPFTIQLLYETNDVVQPLYLGIDPGRTNIGVAVVKANGTAVFTAHLETRNKEVPKLMQDRKKARRARRTNGRRCRRQRRAKANGTISKKCVKQDTAQSKNPSKRAKEIGIIKRRLPGYKKDVLCIGIKNKEAKYTNRTRPEGWLTPTANQLLQTHINLVRKMQKFLPISDVVLEVNKFAFMRLDNPDIQKWQYQQGPLYQKGSLENAVSEMQEHHCLFCDKPIDHYHHVVPQSENGSNTIANIVGLCAEHHNLVHKDAAWQKKLAEEKVGLNKKYGALSVLNQIIPALTNKLSVLFPKHFFVTAGKSTHDYRAAHGVSKDHWLDAYCIACSVLPSNVCDSNINNHMPYELKQFRRHDRRVLNNENMNRVYTLDNKAVAINRHKATEQEAASLEEFRKEHPNDVCKLKVKEHHPTYRNMNRNFPGSVFLVGKQIHVMQGIASSKDGKATTYKDSNANSITASKCKFVAKNSGILFV

SEQ ID NO: 16035 - protein, 279 aa, unidentified
PLYQKGSLENAVSEMQEHHCLFCDKPIDHYHHVVPQSENGSNTIANIVGLCAEHHNLVHKDAAWQKKLAEEKVGLNKKYGALSVLNQIIPTLTNKLSVLFPKHFFVTTGKSTHDYRESHSVSKDHWLDAYCIACSVLPSNVCDSNINNHVPYELKQFRRHDRRALHKENMSRVYTLNGKAVATNRHKAIKQTTDSLEEFRQSHPGDVCKLKVKEHHPAYRNLNRNHPGSVFFVGEQAHVMQSIVASKDGKATRYKDTNVNKIAAGQCRFVAKNEGIVFT

SEQ ID NO: 16036 - protein, 421 aa, unidentified
MRGQPLMPCSPAKARHLLKAGNAVVKRRTPFTIQLRIATGETKQNVTLGVDAGAKHVGLSATTEKEEVFASEVELRQDITGLLAARLSLRRDRRHRKTRYRAPRFLNRVRSKHKGWLAPSVENRIQAHMSRIDAVCRLLPVTKIVIETASFDIQKIKDPSVEGTDYQQGDQLGFWNVREYVLFRDGHVCQHCHGRSKDKILNVHHLESRQTGGDAPNNLITLCETCHKAYHAGKIKLKVKRGQSFRAEAFMGIMRWTLLDRVRKAHPGLPVENTYGYLTKHTRITHGLPKTHCVDAYCIAGNLKAVRRGVHLYQRQVRKHNRQIHKCTVLSKTLKDGTKIGYRKLNQTPHLVKSFRLFDKVRCLGQTGFIFGRRSSGYFDVRRLDGVKISSCISYRKLTLLEKRSTCLTELRKEDGASSPV

SEQ ID NO: 16037 - protein, 410 aa, Geobacillus sp.; identical to SEQ ID NO: 4122

SEQ ID NO: 16038 - protein, 413 aa, unidentified
LKVFVLNMRGKPLMPCSPAKARHMLKAGKAFVVRRTPFTIKLTIATGETKQDVTLGVDAGARHVGISATTEKEEVFASEVKFRQDITGLLADRLAFRRARRNRKTRYRAPRFNNRVRSKHKGWLAPSVENRIQAHMSRIEAVCRLLPVTKIVIETASFDIQKIRNPEVEGTGYQQGDQLGFWNVREYVLFRDGHICQHCRGRSKDPILNVHHLESRKTGGDAPNNLITLCETCHKAYHAGKIKLKVKRGHSFRAEAFMGIMRWTLLNRMRKAHPSLPVENTYGYLTKHKRIALGLPKTHCADAFCIAGNLKALRRGDFLFQQQTRKHNRQIHKCSILKGGVRKLNQAPFLVKGFRLFDKVRIGGQIGFVFGRRVRGTFNIRRLDKTVIGTDINCKKLSLLETRKTFLTELRKE

SEQ ID NO: 16039 - protein, 412 aa, unidentified; identical to SEQ ID NO: 3155

SEQ ID NO: 16040 - protein, 437 aa, Sulfobacillus sp.
MVFVLDKQKKPLMPCSEKRARLLLERRRARVVNIVPFTIRLVDRLRENSVLQDMRLKLDPGSKTTGMAITLDGIHGTHVVFLGEIVHKSGIQARLEARRAVRRGRRFRHTRYRAARFQNRTRKDGWLPPSLAARVNQTLRTVDKIRAHAPITAMSVEHVRFDTQKLENPEIVGVEYQQGTLLGYEVREYLLEKWGRTCVYCGATDVPLQVEHIIPKRRGGSNRMSNLTLACKPCNLQKGKQTAAEFGHPDVQVHARQPLKDAALMNATRWRLYHQLQATSLPVEGGSGGRTKKQRIAHDLPKEHYYDALCVGKSTPAQFLTLPAFVQIWSAKGRGNRQRCRTDKHGFPIRHLSRQKHHFGFQTGDLVQAVIPHGKYAGTWTGRATVKASGSIRIVTSIGVHPTTSYRYGHVLQRGNGWVYTQKPSNQERGKAASSPA

SEQ ID NO: 16041 - protein, 442 aa, unidentified; identical to SEQ ID NO: 2903

SEQ ID NO: 16042 - protein, 460 aa, unidentified; identical to SEQ ID NO: 5845

SEQ ID NO: 16043 - protein, 496 aa, unidentified; identical to SEQ ID NO: 2063

SEQ ID NO: 16044 - protein, 451 aa, unidentified; identical to SEQ ID NO: 7526

SEQ ID NO: 16045 - protein, 515 aa, Actinoplanes sp.; identical to SEQ ID NO: 9031

SEQ ID NO: 16046 - protein, 425 aa, Nodularia sp.; identical to SEQ ID NO: 3113

SEQ ID NO: 16047 - protein, 406 aa, unidentified
MRVFVLNKNRQPLDPCKPARARIILSTGKAKVYRRYPFTIILTEEIEEPITHTHQLKIDPGAKTSGLAIVQNSRVVWGGELTHRGFQIRDALTSRRQLRRARRNRKTRYRKPRFLNRPWSEGWLAPSLMSRVYNILTWVKKLTRLCPITGFSQELVRFDTQKLQNPEISGIEYQQGTLYGYELREYLLEKWNRKCAYCGTTDTQLEIEHIKPLSKGGSDRVYNLAIACHSCNQAKSNQEVEHFLSGKPDVLRRVKAQAKRPLADAASVNATRWKLYHELKSIGLPVEVGSGGLTKFNRCRQNLPKTHWLDAANVGKIETLVIEVTHPLIITAKGHGTRQLCRTNKYGFPIRYCSRTKVHKGFQTGDIVRAVVTKGKKIGTYVGRVATRKSGSFNISTKSGCAACSK

SEQ ID NO: 16048 - protein, 381 aa, unidentified
LRVFVLNKRGKPLMPCSPAKARHLLKEKKAIVVRRTPFTIQLTIATGESKQPVSLGVDAGYKYVGLSASTEKAELYASEVELRQGITDLLSARRALRRARRNRKTRYRAPRFDNRIRTKRKGWLAPSVENRINAHLSRIEAVLRLLPVTKITVETASFDMQRLKNPDISGKEYQEGEQLGFWNVREYVLFRDGHVCRHCHGRSKDPVLNVHHLESRRTGSDSPDNLITLCETCHKALHRGEITLKAKRGQSFRAETFMGIMRREVLDRLKASHPKLEVQNTYGYRTKHARISNGIAKSHCADAFCIAGNLGAKRLGEFLFQKQTRRNNRQIHKLSILKGGIRKRNQAPFEAKGFRLFDKVACQGEEGFIFGRRSSGSFDVR

SEQ ID NO: 16049 - protein, 477 aa, Acidithiobacillus sp.; identical to SEQ ID NO: 3862

SEQ ID NO: 16050 - protein, 483 aa, unidentified
MKKVKASGRSGSDTPRDAPQVPCNCGRKDEREEQQGTKREPKRLNDAVRSLDVAHPGAEGHRPIHKNNKPKAYACVLHRDGTPLTPTKIGKAKALVRGGRARVVRHNPFTVRLTNETTKHAPEMTLGIDAGYSHVGYSIVSEEARREYFRGTLEQETGKTGNPTSERLTERAMYRRQRRNRLWHRGKRFDNRRNMVGKYPPSIERKYLTHVNLWRMWAKLVPIIGTVVEVGKFDIQAAMNPDVQGVGYQQGPIFGYVNVKAYVMAREKGVCQLCGDLVLGQKVNLHHVRPRSRGGSDRADNLALLHEECHKRLHREGLEKQLKKPKKFVAETFMSSVWRRFPKDIPHCRLTFGCLTAYFRQENGIAKSHADDAFIIAGGDRAFARCGEAWVVVQHRRNDRQLQWNQIRRMGSGGRRIRRGRKPYHSGDLVWVDGEMKVCKGMTGDRVALGFKKSPAGNNSPVTVSAKKIAKHYRNNYEWRLQA

SEQ ID NO: 16051 - protein, 419 aa, unidentified; identical to SEQ ID NO: 4131

SEQ ID NO: 16052 - protein, 446 aa, unidentified; identical to SEQ ID NO: 2419

SEQ ID NO: 16053 - protein, 375 aa, unidentified; identical to SEQ ID NO: 5583

SEQ ID NO: 16054 - protein, 428 aa, unidentified
LKVFVLNMRGRPLMPCSPAKARHLLKAGKAVVRRRTPFTIQLRIATGETKQNVTLGVDAGAKHVGLSAATEKEEVFASEVELRQDITGLLAARLSLRRERRQRKTRYRAPRFLNRVRSKHKGWLAPSVENRIQAHMSRIDAVCRLLPVTKIVIETASFDIQKIKDPSVEGTDYQQGDQLGFWNVREYVLFRDGHVCQHCHGHAKDKILNVHHLESRQTGGDAPNNLITLCERCHKACHAGKIKLKVKRGQSFREEAFMGIMRWTLLDRVRKAHPGLPVENTYGYLTKNTRITQGLPKAHCVDAYCIAGNLKAVRRGVHLYQRQVRKHNRQIHKCTVLSKTLKDGTKIGYRKLNQTPHLVKNFRLFDKVRCLGQIGFIFGRRSSGYFDVRRLDGVKLSPSISWRKLTLLEKRSTYLTELRKEDGASSPV

SEQ ID NO: 16055 - protein, 443 aa, unidentified
LTKDENRPSGRTTGLRAEQAEPAGIRKGDTLKVFVLNMRSKPLMPCSPAKARHMLKAGKAFVVRRTPFTIKLTIATGETKQDVTLGVDAGARHVGISATTEKEEVFASEVALRQDITGLLADRLAFRRARRNRKTRYRAPRFNNRVRSKNKGWLAPSVENRIQAHISRIDAVCRLLPVTKIVIETASFDVQKIKNPTIEGTDYQQGDQLGFWNVREYVLFRDGHVCQHCHGRSRDKILNVHHLESRKTGGDAPNNLITLCETCHKAYHAGKIKLKVKRGQSFRAEAFMGIMRWTLLDRVRKTYPKLPVENTYGYLTKHKRIALGLPKTHCADAFCIAGNLKALRRGDFLFQQQTRKHNRQIHRCSILKGGVRKLNQAPFLVKGFRLFDKVRIGGQIGFVFGRRVRGIFNIRRLDKTVIGTDINCKKLSLLETRKTFLTELRKE

SEQ ID NO: 16056 - protein, 401 aa, unidentified
MVYVQGIDGSPLMPTTRHGKVRRLLKSKKAAVVNLCPFTIRLLYDTTSYNQEIVLGVDAGTKHVGLSATTKSKELYASEVILRSDVVDLLSTRRELRRIRRNRLRYRKPRFMNRIKSKKRGWVAPSVRQKIDSHIRIIGFVYSILPVSKLIIEVAQFDTQKIKNPEISGKEYQKGEQLGFWNVREYVLARDNHKCQHCKGKSKDPILNVHHIESRKTGGNSPSNLITLCETCHKEFHKGNIKLKVKRSDSLRDAAVMGIMKWKLYDKLKSLYPNVKMTFGYITKYNRINHGIEKSHVSDAFVISRNFDSERLGYYYKRKLVRRHNRQIHKMKIMKGGIRKMNQAPFKVFGFRLFDKVIFQNKVYFIYARRVRGVFNKENKKDIYYKKLRYISHGLISVEID

SEQ ID NO: 16057 - protein, 415 aa, Bacillus sp.; identical to SEQ ID NO: 2671

SEQ ID NO: 16058 - protein, 426 aa, unidentified
MSNSTNYVFVLDAKKKPLAPCKPAMARSLLKSRKAKVFKHYPFTIILNKLVAVDFQGLQLKIDPGSKQTGFAIVTQSEEVIFAMVLIHRGQQIKNALERRLTLRRGRRHRKTRYRKCRFFNRQRKKGWLPPSLRHRVLTVETWVNRLCKLSPVSSLAMELVKFDTQKIQNPEISGVEYQKGELFGYDVREYLLEKWGRSCAYCGATDTPLEVEHIVPRSKGGSNRVSNLAIACHQCNQNKGAMDIREFLENKPSILARVLKVAKTPLKDAAAVNSTRTQIFETLTATGLPMITGSGAGTKYNRRRLNLAKEHWIDAACIGEVEKLTMLTSQPLVVTAMGHGCRQMVQMDKYGFPRIGYKAKKPVPGWKTGDIINVIKGQNAGLKGVRIKTVRSKGNFDIRQGDKILSVSRNHIQPVHRRDGYNYSF

SEQ ID NO: 16059 - protein, 415 aa, unidentified
MLVYVLDKNGQPLMPTQRFSKVRRLLKEKKAKVVRSCPFTIKLLYEPKTKIVQDIVLGVDTGSKYVGVACVGNDKVLYQSQIELRDDIKKKMDSRRMYRRGRRQRKTRYRKPRFLNRGNSIRKDRYCPTIISKFHGHEREIEFCKKLLPVKYTILETAKFDTQLMEKPWLQAHKWAYQKGVNYGYANAREHALVRDNYTCQCCGKKNCRVEAHHIVFRSKNGSNALENYITLCEDCHKAVHLGKIELKLKGKHRSTLRYATQMSVIRSMLLKKYPDAVETFGYVTKANRENLGIGKDHYLDACVIASGGLEFEPLDTLYRKKCIPSQSRQLCKGVRGERKLPKGKVHGFKRYDKVKYLGIICFIKARRVSGQFTLMDIDSNNLDFRDMGGVQNPSYKALERLNVRKSSLCIRQKI

SEQ ID NO: 16060 - protein, 404 aa, Salipiger sp.; identical to SEQ ID NO: 12547

SEQ ID NO: 16061 - protein, 447 aa, unidentified; identical to SEQ ID NO: 8397

SEQ ID NO: 16062 - protein, 406 aa, unidentified
MVYINDIDGRPLMPTKRHGKVRWLLKENKAVVINLCPFTIQLTYKSTDHKQPVTLGIDAGAKHIGFSATAEKEELFACETTLRTDIVDLLSTRLQNRRTRRSRLRYRKPRFNNRGSSKKKGWVAPSVKQRIDSHLNEVNEIHKILPITKIVIEVAQFDTQKMKNHDISGSDYQNGEQLGFWNVREYVLFRDGHKCSHCKGKSKDPVLNVHHLESRKTGGDSPSNLVTLCESCHKAFHKGEIELKKKRGKSLRDAAVMGIMKWKLYEELKSRYDNVSMTFGYITKYNRIKYGIEKSHTSDAFVISRNFNAKRIERQYLKRLVRRHNRQIHKMKILKGGKKKNNQAPFEVFRFRLFDKVLYNNEICFIYGRRKSGNFNIRDFNGENPKDVSYKKLKLIRGKMHPIILK

SEQ ID NO: 16063 - protein, 439 aa, Aeromonas sp.; identical to SEQ ID NO: 5240

SEQ ID NO: 16064 - protein, 429 aa, unidentified; identical to SEQ ID NO: 9624

SEQ ID NO: 16065 - protein, 471 aa, unidentified
MSVFVVGLNGCRLMPTSERKARLLLKQGKAFVEQKVPFTIRLNYKTGSTTQLGYLGIDTGSQHIGVSVVREDGTVLHKEEIGLRDSMSKRKLLEAKASLRRGRRYRKTRYRHPKWRPKTKRVYCEVPDRKGRHWQKKKITFTSKRPKGWLPPSLQSKTDHHIRWIKKLQDLLPEGYRLSIELGRFDPARMKNPEIHGDLYQKGPQYDYENVRAYVLDRDRYTCQICKKKGGKLHVHHILYRSHGATDDPQYMVTVCSDCHSAQNHLPGGILYQWMQEQKRFSRGLRDATFMNILRKRLIRAFPEAVFTYGNVTKVDREKLKLPKSHGNDATAIALVKTGITAVKDKESVICIQQVRRKKRSLHEETPRKGRKEPNRTAARNNKNTKAVTVTKRQNKKKVSMTGCLFDRVELNGKKGWISGFTGKSCYVKDADDQYLSTSPKYKQVSLSKLRILHHCGNWIIIGAKKTLGKG

SEQ ID NO: 16066 - protein, 521 aa, unidentified
MWLRPGYGNTTGTCSLAYSKGDIMNYGYVLDQQGNPLMPTRRYGWVRRALKSGKAKAVCTLPFTMQLMYDPDTTKIQNLTLGIDPGRINIGMATADETGRCLYSSQCETRNREIPKLMEKRRQHRQASRRGERLSRKRLARRLGTTMGNILERMLPGYEKPVMVKDIINTESRFNNRRRKEGWLTPTAAQLLRTHLNLVEKVCRILPVSGIALEANRFAFMELEAGGHLESGVDYQRGPLYGYRSIREALEELQDGRCLLCGERAIKHDHYLIPRSKGGSNTMANMTGLCEKCHTSVHTDQTAAEKLKTIKAGQNKKYGALSVLNQIIPYLVEILSNRFNGNIRLVSGWETKQFRDEHQINKDHDIDAYCIAVVGQEPKMIDVPETHFEIRQFRRHDRARIKSQTERVYRLDGTKVATNRRKRMEQRTDSLEDWYQKMAEQHGHQQADRMRSRLQVQKSTRRYNNPDRLMPGTVFLYQGKTYIMTGQLTGGQYFRAAGCDKKNFPARSVQIVRHNQGLVYV

SEQ ID NO: 16067 - protein, 512 aa, unidentified; identical to SEQ ID NO: 3741

SEQ ID NO: 16068 - protein, 395 aa, unidentified
MDTGYIHIGISVKSEKHEYLAEQIDTLTNERSRHDACRMYRRQRRNRKRYRQLRFSNRKKDKGWITPSLKHKKDVHVQAISRIIKVMPVTNITMEMGNFDTQVLKAKEEGKPLPQGADYQHGERYGIATLREAVFARDDYKCQCCGRTIKDGAILHVHHIKYRSQGGTNSMPNLATVCDKCHTPKNHKPGGKLYNWKPKLPSFKGATFMTTIRWQLYNEVKSLFPDINVHITYGAATKEQRRELNIDKSHVNDAFAMGKFHPKHRANAVLYKKKRRNNRCLEKFYDAKYIDSRDGSKKTGQELFNGRINRNHKKDSENLHQYRLQKIKAGKRTIRKQHYNIQPHDIIMYKNRKRETSGCHCNGTRVVLLPDKKTAAIKKVKIYKYAGGYFKSAFN

SEQ ID NO: 16069 - protein, 432 aa, unidentified
MQPTKQQNWVFQINGDKQPLDMINPGRCRELQNRGKLASFRRFPYVVIQQQTIENPQTKEYILKIDPGSQWTGFAIQCGNDILFRAELNHRGEAIKFDLVKRAWFRRGRRSRNLRYRKKRLNRAKPEGWLAPSIRHRVLTVETWIKRFMRYCPIAWIEIEQIRFDTQKLANPEIDGVEYQQGELQGYEVREYLLQKWGRKCAYCGTENVPLEVEHIQSKSKGGSSRIGNLTLACHVCNVKKGNLDVRDFLAKSPDILNQVLENSTKPLKDAAAVNSTRYAIVKMAKSICENVKCSSGARTKMNRVRQGLEKTHSLDAACVGESGASIRVLTDRPLLITCKGHGSRQSIRVNASGFPAVKNAKTVFTHIAAGDVVRFTIGKDRKKAQAGTYTARVKTPTPKGFEVLIDGARISLSTMSNVVFVHRSDGYGYEL

SEQ ID NO: 16070 - protein, 331 aa, unidentified
MVYVISKQGTPLMPTERFGKVRRILKNSLAHVVRRIPFTIQLDYDTTEFAQPITLGIDAGSKHIGVSATTTEKELYAADVELRNDIVDKLSTRRKQRRTRRNRLRHRKPRFDNRVSSKNKGWLAPSIENKIHTHMSVVKNVCKILPVSNIVVETASFDMQKIKHLDIQGEEYQQGEQFGFWNVREYVLWRDGHVCQHCHGKSKDPILNVHHLESRKTGGDAPSNLITLCETCHKAYHRGKFELKIKRGKPLRDAAFMGIMRWAFYKRLKKEHPNVSMTFGYITKNTRITNNLPKEHYVDARCISGHPKAKPMGYYFYQKKVRCHNRQIQRQ

SEQ ID NO: 16071 - protein, 423 aa, unidentified; identical to SEQ ID NO: 2998

SEQ ID NO: 16072 - protein, 413 aa, unidentified
  source 1..413: note = Campylobacterales bacterium
KNKTPLAPTSKAKARILLKKGKATVDKIFPFTIRLKENKECQKSFEIKFDVGSSVTGVAIVDAIKCFFFAQIVHRGKTVKKAMDSRRATRRSRRNSKTRYREPRFDNRTRPKGWLPPSIKSRVDNVINFAKKYSKLISINSIVVERVSFDISSMTQDRKLYGVEYQNGELKDRKLREYIFAKNNNKCVYCGKKGQEIEHIVPKSKGGTNLIYNLTLSCRNCNIKKGKLTLKEFGKKIGKDLSPLEPKKTPKNASIIQSAREYTIKELKKDFEVKIGEGWETYANREEIDLPKEHYFDAMCIGDTYKYKIFTNSVLEVKAQGRGKRQVCLMDRFGFPRTKAKGEKIIKGFQTGDIVKAVVTKGKKLGTYLGKVAVRSSGYFNITTKLGTIQGINHKYCKTIQKGDGYSYATIKI

SEQ ID NO: 16073 - protein, 458 aa, unidentified; identical to SEQ ID NO: 4474

SEQ ID NO: 16074 - protein, 428 aa, unidentified
KVYVINKHGRPLMPCSPAKARHLLDEGKAKVKKRTPFTIQLVYGSSGYTQEVILGVDAGSKSIEISASTKKEEVFAADVTPRNDVVDLLSTRREFRRARRNRKTRYRKPRFNNRVRSKHKGWLAPSVEVKIQEHITSIKMVCRILPVSKVVVETAEFDLQLLKAIEEGKPVPQGEDYQQGEMYGHYNVRQYVLWRDNYTCQCCGAHPTKKKEVRLHVHHLESRKTGGDAPGNLVTLCDSCHEKLHKGLITEDDFKKRKRRSTRDATFMGIMRKTLMQRLCSELPIPVIETRGYITKATREKLLVLPKSHTNDALAIAQGKQGFNVGYLPGIVQINKIYTIRPVRHHNRQLHKATILKGGIRKSNQTEKYVFGYCLFDKVQFNGQDCFIWGRRTTGIFTIKTINGKMIKDGISFKKLKPVEKSTGYLIA

SEQ ID NO: 16075 - protein, 470 aa, unidentified; identical to SEQ ID NO: 2949

SEQ ID NO: 16076 - protein, 451 aa, unidentified
VTTILKTCFAAFNLAKVVVLMDAWDIIVVLNKRGKPLMPCSPAKARLLLKEKKAIVKRRTPFTIQLTIATGESKQPVTLGVDAGYKHVGLSASTEKAELYASEIELRQDITDLLSARRALRQSRRNRKTRYRAPRFDNRIRTKRKGWLAPSVENRINAHLSRIEAVLRLLPVTKITVETASFDLQLLKNPDISGKEYQEGEQLGFWNIREYVLCRDGHVCQHCYGRSKDPVLNVHHLESRRTGGDSPGNLITLCETCHKALHRGEITLKAKRGQSFRAEAFMGIMRWEVHSRLRALHPGIEVSNTYGYRTKHARIANGIAKSHCADAFCIAGNLGAERLGEFFFQKQTRRNHRQIHKLSILKGGIRKRNQAPFEVKGFRLFDKVACQGEEGFIFGRRSSGFFDVRKLDGTRISAGISCKKLHLLEKRRTYLTEIRKEEALPPLPEGRGLRA

SEQ ID NO: 16077 - protein, 413 aa, unidentified
MTSYAFVLDANGKQLAPAKEQKAWFLIRKKRAALVSKYPMVIQLKKKIQENEICKDEIRCGIDDGGLHVGIALVQKCKTKNKVVFKGTIEQRNDVKHLMEVRRNYRRYHRYHKRYRQARFDNRKSSKRKGRIAPSILQKRQATIRVINRLNKWINITNYWLEDVSIDIRALTDGYKPYRWQYQKSNRLDENIRKAAILRDGGKCMECGKSNCRLEVHHIKPRRRNGSNTLDNLITLCESCHQKTEGQEELYMDRYFSLLKSSDNKNLNYAQHVMIGKMWLRKQLSGLGVLYLTSGGDTANKRIDWNIEKSHTNDAVCITDLQPDTCDIKEWAIKPMRRQSKAKTDHVLGIHHRDLVEYTFKNGETHRGYVTALYPDQKAINFQSQTKHCKKVNARKCKLLWNYSKIYWFENAS

SEQ ID NO: 16078 - protein, 470 aa, unidentified; identical to SEQ ID NO: 2825

SEQ ID NO: 16079 - protein, 453 aa, Erysipelotrichaceae sp.
MSVAVLSSTGRKLMPTSNYRARKLLKGGRATIECYRPIFTIRLTDRKEGETQPIEYACDTGYQHVGVSIKSKKHEFVHAQYDMLSDETERHNNRRKYRRTRRNRLRYRKPRFDKRSKKNKDMASSLRHRKENQIRLFESFCKVLPITSATFEMGKFDTQLLQAIADGKPLPEGKDYQQGSKYLFQTEREAVFARDNYTCQVCGKSIKDGAILHTHHIGFWKNYRSNRISNLLTVCGHCHTAKNHKPGGKLWGLEPKSTDLQDATYMSTVRWSMYRDLMLSHPEVDIHIQYGAKTAVIRKTLHLSKTHANDAYCIGSLHPKHRTTEAVYQKKRRNNRILAKFYDAKYVDVRDGKKKTGATLSCGRTNRRESRRSDKNLRIFRGKKVSKGRTSVRKRRYFYQPGDTVLHRSQRFAVNGTHCNGTRVILSTGKSVKKTDLVCIKKEGGWRFLPTPD

SEQ ID NO: 16080 - protein, 423 aa, Arthrospira sp.
MSNHVFVLDTNRKPLRPCKPGVARSLLKAGKASVFRRYPFTIILNKEVDANPEPLELKLDPGSKVTGIALKQGNHIIFAAELQHRGQQIKEALLSRRQLRRSRRNRKTRYRPARFLNRTRSKGWLAPSLQHRVDTLMTWVHRFRRLAPVGRIAQELVRFDLQLMENPEISGVEYQQGELQGYEVREYLLFKWDRTCAYCGAQNVPLEVEQIQPRSKGGSDRVSNLTMACHSCNQAKGNGDIRDFLSGQPDVLSRLLRQAKSPLKDAAAVNSTRWALFKALKATGLPVTTGTGGQTKFNRLRLNLPKAHWLDAACVGPVESLEVLTSKPLLILAKGHGTRQMCGTNKYGFPNRHRSRRQIHKGFQTGDMVTALVTAGKKIGSYLGRVLCRASGSFDITTASVRVAGISHKYCQPIHRKDGYAYA

SEQ ID NO: 16081 - protein, 411 aa, unidentified
MEYSFVVDKNNRPLAPTKATRAWYLIRKGRARLKSKYPMIIQLNREVDVDKEEDETHVLCGIDDGSVYVGIAIVQKCPTRNKVIFKGIIEQRQDVKHLLDVRREYRRYHRQHKRYRKPRFNNRSVSKRKGRIAPSIKQKKDAIIRTLLWLNRWINIQEYYLEDVAIDIRAITDGYKPYRWQYQKSNRLDENLRKAAILRDDCKCQECGRSNCLLEVHHIRARKFNGADTIGNLITLCSGCHQKTEGKEQSFEDKYFKKVNSKPSRVDYAMHVMQGKTYLREQISQLGLLHLTTGGDTANKRIEWNIEKSHINDAICITNCYPDTVGIKEWTIKPMRRKSKAKTDNVLGIKHRDLVSYTYRNGETHTGYVTALYPELKALNFQSKTKHCKKVNARKCKLLWKYNKIYWLECA

SEQ ID NO: 16082 - protein, 413 aa, unidentified; identical to SEQ ID NO: 8326

SEQ ID NO: 16083 - protein, 374 aa, unidentified; identical to SEQ ID NO: 12633

SEQ ID NO: 16084 - protein, 430 aa, Mitsuokella sp.; identical to SEQ ID NO: 8353

SEQ ID NO: 16085 - protein, 417 aa, unidentified; identical to SEQ ID NO: 13222

SEQ ID NO: 16086 - protein, 470 aa, unidentified; identical to SEQ ID NO: 7284

SEQ ID NO: 16087 - protein, 462 aa, unidentified
MSVLVIGRNGRALMPTTSRKARILLKKETASVVCRHPFTIQLLYKTGCATQEGCIGIDTGSQHIGVGITCGNRVILKEEHELRSSMEKRSLLVTRAAMRRGRRYRKVRYRKPKWGQHTKRMYFEKPNRRGQHWRKVKTTTQSPRSKGWLPPSLQSKCDHHFRIIDRYLKYLPDSITRNLVIEAGRFDMARMNDPMIHGEMYQRGPMYDAENLRAYIFARDNYQCACCKAKAGTTRKADGTTVKLVAHHILFRSRGATDNPKYMVSVCDHCHTTKAHQPGGVLYFWMENNKKVTRGLRDATFMNILRQRLFARYPQAAFTYGNITAADRKQLRLPKSHANDAVAISLFGKEVSAVRDTCQTVHYKQVRKSKRSLHEAIPRKGRKNPNTKAVRNKKNTTQVNGFKLWDSVLADGKKLFICSFTGTSAYLVDKNGCYVSQPGKTYKQWPLSKLKRLHHNGNWLMT

SEQ ID NO: 16088 - protein, 470 aa, Blautia sp.; identical to SEQ ID NO: 2925

SEQ ID NO: 16089 - protein, 477 aa, Blautia sp.; identical to SEQ ID NO: 2707

SEQ ID NO: 16090 - protein, 430 aa, unidentified
MPKVYVLNRHGRPLMPCTPAKARHLLDAGKAKVRHRTPFTIQLLYGSTGYTQEVILGVDAGSKTIGLSASTETEELFSAEVKPRNDVVELMSARRQFRRARRNRTTRYRKPRFDNRVRSKHKGWLAPSVEVKIQEHMTAIRRACAILPVSKVVVETAEFDLQLLKAVAEGKPVPQGEDYQKGEMYGHYNVRQYVLWRDGYTCRVCGAHGSVRKGVPLHVHHLESRRVGGDAPDNLVTLCTACHDKLHKGIIMAADIKKRKRRSTRDATFMGIMRMTLLRRLREQLPVPVVETRGYITKATRENLLVLPKSHANDALAIAHGPQGFRAEHLPNIRQADRLYTIRPVRHHNRQLHKATILKGGVRKTNQAEKYICGFRLYDKVLYNGIECFVWGRRTSGSFLLRQLNGEKVKDGVSYKHLKLLERSQSYLVA

SEQ ID NO: 16091 - protein, 425 aa, unidentified
MENTLKVFVLNMRGQPLMPCSPPKARKLLRAGKAVPVRRTPFVIQLTVPTGETKQPITLGVDAGYKHVGLSATTAKEELLASEVELRQDVTGLLSDRLALRRARRNRKTRYRAPRFDNRVRSKHKGWLAPSVENRIQAHISRIEAVCRVLPITKIVIETASFDIQKIKNPEVEGTDYQQGEQLGFWNVREYVLFRDGHVCQACKGRSKDLILNVHHIESRKTGGDAPGNLITLCEACHKAYHAGKLKQFSPRRGASFRAETFMGIMRWTVLNRLRERHPELPVTNTYGYLTKHKRIVAGLPKTHCADAFCIAGVLDAKRRGEYLFQKQTRRHNRQIHKLTILKGGVRKRHQAPYLVHGFRLFDKVLCKGEVGFIFGRRSSGAFDVRRLDGTKISAGISYKKLSLLEKRKMFLTELRKEGRDSSRV

SEQ ID NO: 16092 - protein, 421 aa, unidentified
MQYVYVLNKHGEPLMPCSPGKARLLLKQQKACVVKRTPFTIKLLYGSTGYKQPITLGVDAGSKHVGLSASTEKRELYREEFTPRNDVVDLLSTRRQNRRSRRNRKTRYRAPRFDNRVHSKHKGWLAPSVEVKIQEHITVIKRICRILPITLVRVETAEFDTQRLKAMLKGKPLPVGTDYQLGEMYDEYNVRQYVLKRDNYTCQCCGAHPTEKKPVRLHVHHLESRHVGGNAPNNLITLCVACHKALHEGKITLDKGKKRGKPLRDAAFMGIMRNTLLARLKDELNIPVKQTYGYITKLLREKNKIPKSHVNDARCIAKAPNAKPCDTMLYTRALRHHIRQIHKAKILNGGIRKKNQAPYLVKGFRLWDKVRYNGEECFITGRRSSGYFALKKYDGTVISNSASYKKLMLLEAATNYITERS

SEQ ID NO: 16093 - protein, 424 aa, unidentified; identical to SEQ ID NO: 8578

SEQ ID NO: 16094 - protein, 518 aa, unidentified
LSNLKLIDALLEKTEYIYVLGIDGKPQMPTNRKVRIRSLFKSGRAKIVDTVPFTIRLLYENDAVLQSITIAEDPGRTNIGTAVLTQLGDLVFSTVVETRNKSIKKLMTDRKAHRQASRRGERKARQRLAKKHGSMIKAGMMMRKLPQYAADKFVTCKIIKNTEARFCNRKRMPDWLTPTVNHLVQTHINLIKKIEKYLPITDVAIEVNRFAFMQMENPNINGLDFQNGPLKGFDDVKAAIREQQHGKCLMCKNDIEHFHHIVPRSKGGSDTIQNQAGLCKKCHAKVHTDSEFLAKFKDKKEGLIKKYGALSALNQAVPFICKELIKIYGVEHVHFCTGKDTSLIRSSLGYEKTKENQMHEVDAYCIGLAAIGADKVKRPSFNNVFKIKQFRRQDRQRVHYQKERTYYLDGKKIATNRKPRFEQKGNALSDWYKEQIEAYGQHEAGKMRSRLTVKKSKRSYNTAKRLMPGCIFYYDGQRHVMTGQSSYGRYLRAYNCGTKDFHASKCQIIRFDTGLVFV

SEQ ID NO: 16095 - protein, 417 aa, unidentified
MPCSPAKARLLLKEKKAIVKRRTPFTIQLTIATGEAKQPVALGVDSGYKHIGLSATTEKAELYASEVELRQDITDLLSARLALRCSRRSRKTRYRAPRFDNRVASKRKGWLAPSVENRIAAHMSRVEAVMRVLPVTAITVETAAFDTQLLKNPDIAGEAYQQGEQLGFWNVREYVLFRDGHVCQHCRGKYKDPILNVHHIESRRTGGDAPNNLITLCETCHKAFHRGEIKLKVKRGKSFKAATFMGIMRWTLFERLKKAHPELSVRNTYGYLTKHKRISHGIAKSHCADAYCIADNLGAKRLEGFFFQKQTRKHNRQIHKLSILKGGLRKKNQAPYEVKGFRLFDKVICKGEEAFIFGRRTSGSFDVRRLDGTRISAGINYKKLRLLEPRTTYLTEFRKEAALPHLHECRGFRAEFL

SEQ ID NO: 16096 - protein, 450 aa, unidentified; identical to SEQ ID NO: 4205

SEQ ID NO: 16097 - protein, 456 aa, Halomonas sp.
MAVFVLGKNKQPLMPCSEKRARLLLERGRAVVVNLTPFVIRLRDRCLSDCALQLTLLGIDPGSKETGLALMRLEENATDEQAPAIRHVLCLFQLVHRGFQIRQALEQRAGFRRRRRSKNLRYRQPRFDNRTRKKGWLPPSLQHRVDTTMAWVGKLCRWAPVTHLSMELVRFDLQKMEHPEISGIEYQQDTLLGYEVREYLLEKWGRECAYCGTGDTPLEIEHVVAKSRNGSSRVANLTIACHDCNQAKDSQWLADFFATNKGLKKRLKANGLSADVRLERVQRQLKLPLRDATAVNATRWALYGSLKTTGLPVVVGSGGRTQYNRQRLGIPKTHALDAACVGKFDTLKGWRVPTQVIKAMGRGSYQRTRLDKFGFPRGYLMRQKQVKGFQTGDRVRAIVPAGKKTGSHTGRVAIRKTGSFNIQTEQGAVQGISWRHCTLLQRGDGYGYHPLPTIQH

SEQ ID NO: 16098 - protein, 441 aa, Sulfobacillus sp.; identical to SEQ ID NO: 4231

SEQ ID NO: 16099 - protein, 405 aa, unidentified; identical to SEQ ID NO: 13871

SEQ ID NO: 16100 - protein, 425 aa, Nodularia sp.; identical to SEQ ID NO: 3165

SEQ ID NO: 16101 - protein, 570 aa, Streptomyces sp.; identical to SEQ ID NO: 5250

SEQ ID NO: 16102 - protein, 423 aa, unidentified
MRVFVLNKNRQPLDPCKPARARILLSTGKAKVYRRYPFTIILTEEIKDPVTHEHQLKIDPGAKTSGLAIVQGTRLIWGAELSHRGFQIRVALSSRRQLRRSRRNRKTRYRKPRFLNRTRPKGWLAPSLTSRVQNILTWVKKLIRFCPITGISQELVRFDTQKLQNPEISGIEYQQGTLYGYELREYLLEKWNRKCAYCGATGTQLEIEHIKPLSKGGSNRVSNLTIACHPCNQAKSNQDIELFLSKKPSILKRILSQSLRPLADAASVNSTRWKLYYELKSIGLPVEVGSGGLTKFNRCRQNLPKTHWLDAANVGKVETLIIEVTLPLVITAKGHGTRQLCRTNKYGFPIRHCSRIKFHKGFQTGDIVRAVVTKGKNIGTYVGRVATRKSGSFNISTLGGLVQGISHKYCRFIHRKDGYAYTN

SEQ ID NO: 16103 - protein, 465 aa, unidentified
MSTCACVLSKNGERLMPTIRLGKVRHLLKDGKAKIIKHHPFTIQLLYDSETNIQPIEICEDVGYNYIGISVKSQSHEYVSAQYDTLQDEKSCHDACRRMRRTRRNRLRYRQKRFDNRKRDKGWLAPSLKHKKELNVNVIKMYCEVVPITHATVEVGSSDTMLVKAIEEGKATPEGADYQKGPRYNLATLREAVFYRDNYTCQVCGRKIADGAILHMHHMFYWKGRHDNSLSELITVCEKCHTPANHQKGGKLYGFGEDIKFANLSGAAFMNTVRWQIVNELYAAFGKPFVTFTYGAMTKEKRIALHLEKSHNNDAYAMGEFHPNCRCTFEHYEKVRRNNRILEKFYDSRYIDIRTGEIATGKELFNGRINRSHKKDSENLHKYRGKRIRKGYRALRRKKVALNPGDLVSLNGEILTVHGTHTKKNGSVNVEFKTPSKSGKKSTSLKKLKIIKTISPMRSAWDKVS

SEQ ID NO: 16104 - protein, 442 aa, unidentified; identical to SEQ ID NO: 3234

SEQ ID NO: 16105 - protein, 375 aa, unidentified; identical to SEQ ID NO: 5779

SEQ ID NO: 16106 - protein, 435 aa, unidentified; identical to SEQ ID NO: 4695

SEQ ID NO: 16107 - protein, 400 aa, unidentified
MCIRDSRQRLAKRYGSMVKSGMVMRKLPMYAADRFVTCKFIRNTQARFCIRKRCPDWITPTVQHLVQTHLNIIRKISRYLPVTDIAFEVNRFAFMHMENPKAMGVDFQNGPLKGYDDVKEAICTQQHGKCLMCKKPIAHFHHIVPRSRGGSDTIQNLAGLCPECHTKVHTDTTFRKDFDRKKSGQLKKYGALSALNQAVPFICKKLLEEYGEEHVHFCGGLDTSLIRTALGFEKTKKNQMHEVDAYCIGLAALEINEVETPAFDHTFQIRQFRRQDRSIIHHQTGRSYYQGKEKVAQNRKPGFEQKTTALSQWYEEQVRIHGEKEAEKLRSQLRVEKSCRHYNDMDRFLPGAVFLYEGKRYVLSGRITNGKYLRACGQGMKNFPAAECTFIRHNAGLVFI

SEQ ID NO: 16108 - protein, 254 aa, unidentified
LKVFVLNMRGQPLMPCSPAKARHLLMDKKAVVKRRTPFTLQLTIATGETKQDVTLGVDAGAKHIGLSASTEKEEVFASEVELRQDITGLLAARLAFRRARRHRKTRYRAPRFLNRVHSKHRGWLAPSVENRIQAHMSRIDAICGLLPVTKIVIETASFDIQKIKNPDVEGTDYQQGDQLGFWNVREYVLFRDGHVCQHCRGRSKDKVLNVHHLESRQTGGDAPNNLITLCETCHKAYHAGKIKLKVKRGQSFRA

SEQ ID NO: 16109 - protein, 441 aa, unidentified; identical to SEQ ID NO: 4242

SEQ ID NO: 16110 - protein, 458 aa, unidentified; identical to SEQ ID NO: 9884
  REGION 1..458: note = IscB polypeptide

SEQ ID NO: 16111 - protein, 431 aa, Escherichia sp.; identical to SEQ ID NO: 3801

SEQ ID NO: 16112 - protein, 512 aa, unidentified
MSTVYVLNKDGKPLMPTTRCGHVRHLLKEQKARVVASKPFTIQLLYKTNDVVQPLYLGIDPGRTNIGVAVVKADGTAVFTAHLETRNKEIPKLMKKRKDSRRARRTNGRRCRRQRRAKANGTISKKCVKHDTAQNGSVSKRAKEIGVIKRHLPGCEKDVLCIGIKNKEAKFSNRTRPEGWLTPTANQLLQTHINLVKKIRKFLPISDAVLEINKFAFMQLDNPNIQKWQYQQGPLYQKANLEEAVSEMQEHHCLFCKKPIAHYHHVVPQSENGSDTIGNIVGLCTKHHDLVHKDTAWQKKLAKKKTGLNKKYGALSVLNQIIPALTKELSSLFPKHFFATNGKSTYDYRSAHGVSKDHWLDAYCIACSVLPNDVCDSGINNRVPYELKQFRRHDRRALNNENMSRVYTLNDNVVATNRHKATKQITDSLEEFRQNHPDDVCKLKVKEHHPTYRNMNRNYPGSVFLIGKQVHVMQGIAGSKDGEATTYKDTNANSIAAGKCKFVAKNSGILFV

SEQ ID NO: 16113 - protein, 442 aa, Ktedonobacter sp.
MNDASLGGPCIGENRKETMSRVLIVDQQRRPLMPCTPARARLLLKQKKAAVLRRCPFTLILHESRPEAVVQPLRLKIDPGSKVSGLALVNDTSGEVVWAAEVTHRGGQVHKDLQKRAGVRRGRRQRHTWYRPARYLNRRRPKGWLPPSLESRVQNVETWTRRLIFWAPVGSLSYEAVRFDTQALQNPEIEGTQYQHGTLAGLEVKEYLLLKWGQRCAYCEKMGLPLQLEHIIPKIRGGSNRVTNLTLACEQCNGKKGNQTAEEFGFPHLQAQAKAPLKDAAAVNSTRRVLHQRLMRTGLPIEASSGGHTKWNRGERDIAKTHWLDAANVGPSTPARLLFQHVRPWLIEANRRQDRQLCLVNALGFPRSKPKKKSPKHDFRTGDIVRAVVPAHLENPGIYVGRMAAKASGAFTITTKQRKVSDIGYRYCTRLQHTDGYSYLIK

SEQ ID NO: 16114 - protein, 422 aa, Petrotoga sp.; identical to SEQ ID NO: 5403

SEQ ID NO: 16115 - protein, 430 aa, unidentified
MPNKVYVINKHGRPLMPCSPAKARHLLDEGKAKVKKRTPFTIQLVYGSSGYTQEVILGVDAGSKTIGMSASTTKEELLSAEVKPRNDVVDLLSTRREFRRARRNRKTRYRKPRFDNRVRSKHRGWLAPSVEVKIQEHITSIKRVCRILPVSKVVIETAEFDLQLLKAIADGKPVPQGEDYQQGEMYGHYNVRQYVLWRDNYTCQCCGAHATKKKEVRLHVHHLESRKTGGDAPGNLVTLCDSCHEKLHKGLIAEKDFKKRKRRSTRDATFMGIMRKTLMQRLCSELPIPVIETRGYITKATREKLLVLLKSHTNDALAIAQGKQGFNVGYLPGIVQIDKICTIRPVRHHNRQLHKATILKGGIRKSNQAEKYVFGYRLFDKVQFNGQDCFIWGRTTGIFTIKTINGKMIKDGISFKKLKLVEKSTSYLIA

SEQ ID NO: 16116 - protein, 461 aa, Desulfotignum sp.
MGAFAESGVSRVFVIDKRGEPLMPCHPARARKFLAQGRARVHQMFPFTIRLVDRIREDSDVHPVNVKIDPGAKTTGMAVVRQDGGHAWILHLSELTHRGAAIRKKLDQRSNYRRRRRTANLWYRKKRFNNRTRPKGWLPPSLKSRVDNTLSWVKKYQRFCPITGIFLERVRFDTQKLQNPDISGIAYQQGTLFGYEVKEYLLERFKRTCAYCNGLSKDPVLEIEHFVPRNPSKGDKGSNRINNLAIACKTCNQDSKKNLQPADWISLLSRSRKNIDQVRLQNATRFLEGKRPSLASTAAVNATRNAIFFELRGLGLPVECATGGRTKYNRSRLDIPKTHCLDAACTGQVDSVSGWKQNVFLIKAMGRGSYQRTRVDKYGFPRGTLMAQKTVKGFATGDMVKVIVPTGKKKGTYIGRVAVRKSGSFNIQTNTETVQGISWKHCTIISRQNGYNCAIQVSSPT

SEQ ID NO: 16117 - protein, 423 aa, unidentified
MKQDQKYAFVQDNRGVVLSPTKVEKAWYLIRHNKATLVKTEPIVIRLNRKQNNTDMSFMKVGLDPGDTTGVAIVQESHLNMSKNKAVFKANIQHRNDIKSLIESRREYRRLHRYNKRYRQARFNNRASSRRKDKVAPSIKNKKDEILRVLRYLSKYICIDGIYIEDVSFDIRALTDEYKPYRWQYQRSNRLDENIRKAVIQRDKCKCKMCGAKDTQLEVHHITPKREGGNNTLKNLITLCSECHKSITGVEDDYKSYLYSLIDGKQIPLAPAMHVMIGKNYLYQQLRQFIGGDSYVYLTTGGDTANSRLDWNIEKSHSNDAACITDVRCLPENLKTYVYTIKPQRKKKKTKQNTSNLAIKHRDLVWYTPRGRAPIKCCVTAIMQTGCCAGKYKLKSVDGERFGPIAESSLKKIQQGTSSLMFV

SEQ ID NO: 16118 - protein, 418 aa, unidentified
MQNYAFVIDTNKQPLNPISPKKARRLLDKGKAAVFRMYPFTIILKTAVENSTISPCKIKIDPGSKFTGFALVQNHQVIWAMELEHRGGLIKKKLEARSAVRRGRRNRHTRYRKPRFLNRRRSEGWLGPSLEHRVLTIETWVKRLIKFCPIHEIWVERVKFDTQKMQNPEITGAEYQQGELAGYEVREYLLEKWGRECAYCGKKSVPLHIEHIHPKSFGGSDRVSNLCLACEKCNQRKGNKPIEEFLKKKPSLLQKIKNKALSPLRDATAVNMTRNKVVKVLKKILPVVTGTGAMTKYNRIRLGFSKEHWIDAACVGDIETLVLRTSQPLLVTCKGQGGRQKAALNKYGYPIRHNPLKPIKGWATGDIAKHQKLGIGKVTPRSKGSFGFTPLGTKGYKSCKPQDISVIHRKDGYTYSFC

SEQ ID NO: 16119 - protein, 452 aa, unidentified; identical to SEQ ID NO: 13261
  REGION 1..452: note = IscB polypeptide

SEQ ID NO: 16120 - protein, 406 aa, unidentified
MVYVQDINGKPMMPTTRHGKVRRLLKDNKAVVVNLCPFTIKLTYVTSDYKQQIVLGVDAGTKHVGLSATTKSKELYSSEVILRNDIVDLLSTRRELRRTRRNRLRHRKHRFNNRIKSRRPGWVAPSVKYKIDAHIRVIDNVCSILPIFRIVIEVAQFDIQKINNPNISGKEYQEGDQLRFWNVREYVLARDGHKCQYCKGKSKDNILNVHHIESRKTGGDSPSNLITLCETCHKEYHKGNIDLKIRRGKSLRDAAVMGIMKWRLYEELRSRYDRVSMTFGYITKHNRIKYGIEKSHVSDAFVISMNINAKRIERQYLKRLIRRHNRQMHKMKILKGGKKKNNQASFEVFGFRLFDKVLYNNKIFFVYGRRKSGSFNIRDFNGENSKDVSRKKFKLIRGKRHPIILK

SEQ ID NO: 16121 - protein, 518 aa, Collinsella sp.
MANYERRYLMPDTDYIYVLGADGKPQMPTKRKRHVKRLLDTGKARIACHVPYTIQLLYKNTPVLQPVMLAEDPGRTNIGMAVLSVKGELLMSAVVETRNREIVRLMNHRRGYRRASRIGERKARQRLAKRFGTMLKAGLIMRKLPKFAADKFITCHCIKNTESRFCNRKRPDGWLTPTSRQLVETHINLIHKIQKYLPVTDIAMEVNRFAFLSLENPSVLGMDFQNGPLKGFDNLHDAVNELQHGKCLLCDKKIEHYHHIVPRSMNGSNTIGNIAGLCMECHDKVHKHASYQKKLNDVKKGLDKKYGALSALNQAVPFICKRLEAEFGKEHVSYCTGRDTAKMRNSFGFQKTKDNQMHETDAWCIGIIALNRVPDVVPDFGQTYCIKQFRRQDRSFVYAQTERVYKLDGVTVAKNRKKRTEQKTDSLEDWYNRQMALYGKQKADFMRSRLTVIKSKRRYNDSIRVMPGAVFMYNGECHVLSGHLTEGKYFRAVGNAKTNYPASKCKITRHNEGLVFVC

SEQ ID NO: 16122 - protein, 466 aa, Cupriavidus sp.; identical to SEQ ID NO: 6544

SEQ ID NO: 16123 - protein, 471 aa, Streptomyces sp.; identical to SEQ ID NO: 14708

SEQ ID NO: 16124 - protein, 424 aa, unidentified; identical to SEQ ID NO: 3351

SEQ ID NO: 16125 - protein, 418 aa, unidentified; identical to SEQ ID NO: 13636

SEQ ID NO: 16126 - protein, 431 aa, Escherichia sp.; identical to SEQ ID NO: 3801

SEQ ID NO: 16127 - protein, 418 aa, unidentified; identical to SEQ ID NO: 6784

SEQ ID NO: 16128 - protein, 429 aa, unidentified
MCNEVFVLDANHKPLNPCRPVTARKLLTAGKAAVYRRYPFTIILKKQVEAEPKPMSLKIDPGSKMTGLAIVYGNQVVWSAEIEHRGSKIKSALDSRRAVRRSRRNRKCRYRKPRFNNRKRPEGWLAPSLQHRVATTMTWVLRLIKLTPIGSISQELVRFDTQKLQNPEISGIEYQQGELMGYEVREYLYQKWDRQCVYCGAHSVKLEIEHIVPKSKGGTNRVSNLTLACHRCNQAKGNLNAQDFLLGKPDVLKRILARAKQPLLDAAAVNSTRWKLYQSLKKTGLSVEVGTGGRTKYNRIKLGLPKSHWIDAACVGEVATLEIVTRQPLLIKAMGHGCRQVIQMDGIGFPRKGYKPKHPVKGWKTGDIVNVVAGKNAGLKGVRIKTVRAKGNFDLIGADQDSSNKVLSASRNYIQCVHRQDGYYYSFAK

SEQ ID NO: 16129 - protein, 420 aa, unidentified
MQYVYVLNKHGEPLMPCSPRKARLLLKQKKACVVKRTPFTIKLLYGSTGYKQPITLGVDAGSKHIGISAATEKYELYCEEATPRNEVVDLLSARRAFRRSRRNRKTRYRAPRFNNRVHSKHKGWLAPSVEVKIQEHITLIKRVCRILPVTFVRVETAEFDTQRLKAMLEGKPLPVGTDYQLGEMYDEYNVRQYVLKRDNYTCQCCGAHPTKTKAVKLHVHHIETRRTGGNAPNNLITLCTACHKALHAGKVTLDGKKRGRSLKDAAFMGVMRKTLMERLLKELKIPVQGTYGYITKYLREKHSIPKSHTNDARCISKNPLAIPCDTCYYTKAIRHHNRQLHKATILKGGIRKANQAPYTVKGYRLWDKVSYNDSECFITGRRTSGYFALKKLDGTVVSNSASYKKMRLLEVATNYITERR

SEQ ID NO: 16130 - protein, 462 aa, Ruminococcus sp.
MVIALDKHKKPIGFVTEKRARQLMESHRACIYRTYPTVIIIMDRDVREFTNVPTYRIKIDPGSKYTGIAIVCNETNEVVMMLQLEHRGENIVELLQTRSAARKNRRNRETPYRRSKWANGSNGSRPSKERKMPPSIKSIGDNVIRIVEKLKRFIRITECSFESTRFDTQLMDNPDISGEEYQHGTLFGYELREYLMEYYRHTCQYCGGKSEDSVLEWEHIIPKSRGGSDSVRNATLSCCSCNRDKGALTPNEWLKQLKEKTPGCKKDGELTQTRITHLESILSNGKVYGSNRYAAWSNILRKYEEKALFEIFGNVECSTGGRTKYNREMILHTSKDHHYDALAIGSISESGFTDRTKGYVLYIKAMGRGNRMRGHINQCGIITDKWTDRRKRFNGLQTGDIVHVTIPSGKYEGTYTGRLMIRKSGSHDIRTLDGKLVTGTKKSIYKIMQHADGYNYKYEKAE

SEQ ID NO: 16131 - protein, 417 aa, unidentified
MFVYVISKDGQPLMPTSRFGKVRRLLKNKKAKVIRSCPFTIKLLYEPETLIVQEVVLGQDTGSKHIGTACIANDKVLYQSEVTLRDDIKKKMDGRRATRKRRRDRKTRYRKSRFLNRANSTKKDRLPPSVRSKVQSHIDEIEFCKKILPISKIVLEVSQFDTALMKNPALINEKVKRWGYQKGFNYEYSSRREAVLHRDNYTCQCCGKKHVKLEVHHIIFRSMGGTDDEKNLITLCEKCHKAVHDGILILTKKPKKLNLKYATQMSIIRSQLLKIYPDAIETFGFVTKENRNNLNLSKEHFTDACVIASGGKEFKQSNWLFKKRRVAKQNRQLCKGVRGEKKIPTGKILGFRKFDKVEYLKEIYFIKARRSRGDFVLMDIDNNAIDFRNKGGRKEPSYKILKRLNTRKSILCISQRI

SEQ ID NO: 16132 - protein, 418 aa, unidentified
MVYVLSQNGQPLMPTENHAKVRVFLKQGKAKVVQRCPFTIQLLYESTTHTQKINLGIDAGSKTIGISATTDSKVLYEAEVVLRNDIVELLSGRRALRRSRRNRKTRYRKPRLDNRRRPDGWLAPSIRQKIKTHVTVVENVMKILPVTKIIVETASFDIQKIKNPEIEGAEYQYGEQLDFWNVREYVLFRDGHTCQCCKGKSKDNILNVHHIESRKTGGNAPNNLITLCETCHQAYHKGIITLPKEIHRGMRFRDASFMGIMRWAFYDRLKELYTPLDVEVVNTYGYITKNTRIEHGLPKEHYVDARCISGNPAAKPLGHYYFQKKVRCHNRQIHKNTILKGGIKKRNQAAYLVKGYRLFDKVKYQNQEYFIFGRRSSGFFDIRTLDGTKVNKGSISCKKLQLVEKSKHYLTEQRKVAA

SEQ ID NO: 16133 - protein, 425 aa, Nodularia sp.; identical to SEQ ID NO: 3165

SEQ ID NO: 16134 - protein, 460 aa, unidentified
  REGION 1..460: note = IscB polypeptide
MVEVTSRVKEHTVECSTSFTLCTPVFKQSCDGRGSDADKVLAGNNSDVDRSQHRESSDLRVQNIVYVLNMRGQPLMPTRQQKANKLLKQGKAKVVKRKPFTIQLNYPTGEAKQPIKLGIDSGYENVGFSATTSKRELLSGELKLRTNISKLLEQRRNYRRARRNKLWHREPRFNNRGRSDGWFAPSIQHKLDSHIRLIEAIKKILPITDINVEVASFDIQKIKNPDIQGTEYQNGVLKNFWNVREYVLHRDNHTCQHCKGKSRDKILQVHHVHGKKAGATDRPEELLTVCKTCHDNHHKGINVIPDKEIHRFKPETFMTMVRWKLVNQLKDTYGSAHHTYGYITKSNRISMNISKSHVNDAFAIAGGTSDIQRCISYNFKHVRRNNRSIQFNRKGFKPSIRRQRYKLQPNDLVQYRKKFFRVKGIFNYGKWVRLVDSIGNIINSNVKNVELICYGKGIFG

SEQ ID NO: 16135 - protein, 267 aa, unidentified; identical to SEQ ID NO: 6860

SEQ ID NO: 16136 - protein, 512 aa, unidentified
MSTIYVLNKDGKPLMPTTRGGHVRHLLKEQKARVVRTKPFTIQLLYETDDVVQHLYLGIDPGRTNIGVAVVKTDGTAVFTAHLETRNKEIPKPMKKRKDSRRARRTNGRRCRRQRRAKANGTISKKCVKQTTAQNGSVSKRAKEIGVIKRHLPGCEKEVLCIGIKNKEAKFSNRVKPKGWLTPTANQLLQTHINLVKKIQKFLPISDVVLEVNKFAFMQLDNPNIQKWQYQQGPLYQKASLEEAVSEMQEHHCLFCKKPIDHYHHVVPQHKNGSNTIGNIVGLCAKHHDLVHKDTTWQKKLAKKKTGLNKKYGALSVLNQIIPTLTKELSSLFLKHFFVTNGKSTYDYRAAHGVSKDHWLDAYCIACSVLPNDTCDKTINSRVPYEFKQFRRHDRRALNNENMSRVYTFNGKMVATNRHKATEQTTDSLEEFRQRQPNDVCNLKVKEHHPTYRNMNRNYPGSVFLIGKQVHVMQGIAGSKDGEATTYKDTNANSIAAGKCKFVAKNSGILFV

SEQ ID NO: 16137 - protein, 458 aa, unidentified; identical to SEQ ID NO: 15778

SEQ ID NO: 16138 - protein, 380 aa, unidentified
TTGETKQDCHIGIDTGSKYIGAAVRSEDKVFWKGEIELRQDIRSNLDTKRIYRRSRRNRKTRYRKPRFLNRKRRDEWLPPSLQSRINHTFHWIDTLSSLVPNPILHIEVGKFDVAKMINPEIHGVDYQHGQTYGFFDERYFVFARDNYTCQCCGKSKNKILNTHHIIYRSNGGTNRVDNLITVCTDCHTSQNHRKGGIFYQWQEQHKKVKQYKEPPFMNTLRKRIFVAYPDAEITYGSETTPKRKAMKLDKTHYNDAIVISGINEIKENPEEWLLIKQFRKKKRSLHEATARKGRKKPNRNQTRNSKNTPYYKGFYLNDKVSVFGKSGYITGFTSNAAYIKDENNDYITLPNKTYKQVSINKMKLECHNNNWQYIIKNAV

SEQ ID NO: 16139 - protein, 452 aa, Defluviitoga tunisiensis
MWVLSVEGNPLMPTKRHGKVRCLLKQQLAKVVKVKPFTIQLLYETTSYTQNITLGIDSGYNYIGFSAVTEKEELICGEVKLRNDISELLKERRMYRRIRRNRLRYRKPRFDNRISSKKEGWLAPSIKHKLDSHVRFINYLKKILPIANIVVEVANFDTHKLKNPNVVGKGYQQGEQQDFWNVREYVLYRDNYTCQLCGKKNTILEVHHIGYWKQDRTDRPGNLITLCAKCHNSNNHKDGGKLYGMKPVQKPLKDATFMSTIRWKLVNALMCDYTYGYITKSKRVSLGLEKTHYNDAFCIAGGINQQRIEPIYFEQIRRNNRSVEKFYDAKYVDIRDKSIKTGQELFCGRRTRNKNLNEENLHKYRGAKKSKGRRNIRKQRYAYQPKDIVTFESKKYSVQGVQNKGEYIKLMEMSKPVKTDLVKPYMFRKGFSVFYNCNSSPTYRSGSLLAGK

SEQ ID NO: 16140 - protein, 451 aa, unidentified; identical to SEQ ID NO: 3199

SEQ ID NO: 16141 - protein, 420 aa, unidentified
MQYAYVLNKRGDPLMPCSPGKARILLKQQKACVVKRTPFTIKLLHGSAGYKQPITLGVDAGSKHVGLSASTEKRELYSEEFTPRNDVVELLSTRRQNRRSRRNRKTRYRAPRFNNRVHSKHKGWLAPSVEVKIQEHITVIKRICRILPVTLVRVETAEFDTQRLKAMLAGKPLPVGTDYQLGEMYDEYNVRQYVLKRDNYTCQCCGAHTTAKKTVKLHVHHLESRKVGGNAPSNLITLCTTCHNNLHKGKITLDGKKRGKTLRDAAFMGIMRNTLLTRLRNELNIPVQNTYGYITKLLREQNDIKKSHVNDARCISKHPLAKPCSVCYRTKAIRHHNRQIHKAKILKGGIRKANQAPYIVKGFRLWDKVLYNEQECFISGRRSSGYFALRKFDGTTITNSISFKKLRLLEPATNYLIERK

SEQ ID NO: 16142 - protein, 420 aa, unidentified; identical to SEQ ID NO: 8162

SEQ ID NO: 16143 - protein, 515 aa, unidentified; identical to SEQ ID NO: 3339

SEQ ID NO: 16144 - protein, 480 aa, unidentified
LYTKPLDNIGEGSLPPSGEINLKGMTFMVYVKSIDGKALMPTSNAKARKLLKQKKAKVVSLRPFVVKLTYKTKTEYTQKLNLGVDSGYSNIGFSVIDAKQEYIAGEVKLLEGMKKRLLEKASYRRIRRSRLRYRKARWNNRVKSKKKGWLAPSLKHKLDTHIKFIDYLKNILPIEKITIEVANFDIQKMKDDLISGVDYQNGDMFSFWNVREFVLHRDGHKCQNPNCKHKDKKEQILKVHHIRYRSEGGSDRPENLITLCSKCHTPANHKKGKFLYDWCVNGKKVRGFKDATFMSMIRWYLVNELKSKHNNVSITYGYITKNHRIQNGIEKSHLNDAFAIAKGTNQARTKDRFLVIQDRLKNRSLEKFYDSKIIDIRTEKKVSGGDLNCGRSTRNKNLNTENLRKYRGVKISEGQRRIRKQKYFYQPNDLVKYDGKVYTVKGTQNEGKYIALKEIKKVPKVELLIPYVFKKGLNWSYGLC

SEQ ID NO: 16145 - protein, 431 aa, unidentified
MPNKVYVINKHGRPLMPCSPAKARHLLDAGKAKVKKRTPFTIQLVYGSSGYTQEVILGVDAGSKTIGLSASAETEELLSAEVKPRNDVVDLLSTHREFRRARRNRKTRYRKPRFDNRVRSKHKGWLAPSVEVKIQEHITSIKRVCRILPVSKVVVETAEFDLQLLKAIADGKPVPQGEDYQQGEMYGHYNVRQYVLWRDNYTCQCCGAHATKKKEVRLHVHHLESRKVGGDAPDNQVTLCESCHEKLRKGLIAEKDFKKRKRRSTRDATFMGIMRKTLMQRLCSELPIPVVKTRGYITKATREKLLVLPKSHTNDALAIAQGKRGFNVGYLPKIAQIDKIYTIRPVRHHNRQLHKATILKGGIRKSNQTEKYVFGYCLFDKVQFNGQDCFIFGRRTSGYFVVKTIDGKVIHNSASFKKLNLVERASNYLIA

SEQ ID NO: 16146 - protein, 443 aa, Anoxybacillus sp.; identical to SEQ ID NO: 4041

SEQ ID NO: 16147 - protein, 465 aa, unidentified; identical to SEQ ID NO: 5709

SEQ ID NO: 16148 - protein, 466 aa, unidentified; identical to SEQ ID NO: 4972

SEQ ID NO: 16149 - protein, 415 aa, unidentified
LMPCSPAKARLLLKEKKAIVVRRTPFTIQLTIATGETKQPVSLGVDAGYKHVGLSASTEKAELYASEVELRQDITDLLSARRALRQSRRNRKTRYRAPRFDNRIRTKRKGWLAPSVENRIDAHLSRIEAVLRLLPVTKITVETASFDLQLLKNPDISGKEYQEGEQLGFWNIREYVLCRDGHVCQHCYGRSKDPVLNVHHLESRRTGGDSPGNLITLCETCHKALHRGEITLKAKRGQSFRAEAFMGIMRSEVLNRLKASHPELEVNNTYGYRTKHARIANDIAKSHCADAFCIAGNLGAERLGEFFFQKQTRRNNRQIHKLSILKGGIRKRNQAPFEVNGFRLFDKVACKGEEGFIFGRRSSGFFDVRKLDGTRISAGISCKKLHLLEKRRTYLTEIRKEEALPALPEGRGLRA

SEQ ID NO: 16150 - protein, 443 aa, Anoxybacillus sp.; identical to SEQ ID NO: 4343

SEQ ID NO: 16151 - protein, 420 aa, unidentified; identical to SEQ ID NO: 14214

SEQ ID NO: 16152 - protein, 515 aa, unidentified
MTALEERLSKTEYIYVLGFDGKPQMPTRRKRHVLKLLKTGRARIAEDIPFTIRLTYRNAPVLQPVTLAEDPGRTNIGAAVLSPLGDLLFAAVIETRNKEIKKLMADRQKSRQASRRGERKARQRLAKRYGSIVKSGMVMRKLPMYAADRFVICKFIRNTQARFCNRKRCPDWITPTVQHLVQTHLNIIRKISRYLPVTDIAFEVNRFAFMHMENPKAMGVDFQNGPLKGYGDVKEAIRTQQHGKCLMCKKPIAHFHHIVPRSRGGSDTIQNLAGLCTECHTKVHTDTAFRKDFDEKKSGQLKKYGALSALNQAVPFICKKLLEEYGEEHVHFCGGLDTSLIRTALGFEKTKKNQMHEVDAYCIGLAALEINEVETPAFDHTFQIRQFRRQDRSIIHHQTGRSYYQGKEKVAQNRKPGFEQKTTALSQWYKEQIRIHGEKEAEKLRSQLMVEKSCRHYNDMDRFLPGAVFLYEGKRYVLSGRITNGKYLRACGQGMKNFPAAECTFIRHNAGLVFI

SEQ ID NO: 16153 - protein, 413 aa, unidentified
MPCSPAKARLLLKEKKAIVKRRTPFTIQLTIATGETKQPGSLGVDAGYEHVGLSASTEKAELYASEVELRQDITDLLSARRALRQSRRNRKTRYRAPRFDNRIRTKRKGWLAPSVENRINAHLSRIETVIRLLPVTKISVETTSFDMQLLKNSDIAGKEYQESEQLGFWNVREYVLFRDGHVCQHCHGRSKDPVLNVHHLESRRTGGDSPGNLITLCETCHKELHRGEITLKAKRGQSFRAETFMGIMRWDVLDRLKASHPKLEVQNTYGYRTKHARIVNGIAKSHCADAFCIAGNLGAERLGEFFFQKQTRRNNRQIHKLSILKGGRRKRNQASFEVKGFRLFDKVACKGEEIFIFSRRSSGYFDVRKLDGTRISAGISYKKLRLLEKRRTYLTEIRKEAFSPLPEGRSLRA

SEQ ID NO: 16154 - protein, 512 aa, unidentified; identical to SEQ ID NO: 3720

SEQ ID NO: 16155 - protein, 428 aa, unidentified
MQRVFVLDHNKQPLMPCHPARARKLLKKGKAAVYRRYPFTIIMTHRLCGDLQPIEIKFDLGSRTTGIALVGHFDRGSEVIWAGNLNHRGYQIKKDLNSRRAIRRTRRNRKTRYRPARFLNRRRPTGWLPPSLRSRVLNVNNWMLKLSQLAPLTQIAVETVRFDTQKIQKPEISGVEYQQGELAGYELREYLLEKWGRECVYCGAKNVPLEIEHIQARSKGGSDRVSNLTLACTPCNIDKGNKDIKEFLKRKPKRLKKIQTIATASLKDAAAINATRYATGNALKGFGLPIAFSSGGRTKFNRTSCGYPKDHWIDAACVGESGSDVFIPKMITPLIITAKGRGSRQKCRMNQYGFPRTRPKKHKRVKGFQTGDIVKAVVTKGKKIGTYVGRVVVRASGSFDIGIGKKKVSGISYKYCQLIQRVDGYEYT

SEQ ID NO: 16156 - protein, 451 aa, unidentified; identical to SEQ ID NO: 3581

SEQ ID NO: 16157 - protein, 451 aa, unidentified; identical to SEQ ID NO: 3061

SEQ ID NO: 16158 - protein, 431 aa, unidentified
MPNKVYVINKHGRPLMPCSPAKARHLLDAGKAKVKKRTPFTIQLVYGSSGYTQEVILGVDAGSKTIGMSASTTKEELLSAEVKPRNDVVDLLSTRREFRRARRNRKTRYRKPRFDNRVRSKHKGWLAPSVEVKIQEHITSIKRVCRILPVSKVVIETAEFDLQLLKAIADGKPVPQGEDYQQGEMYGHYNVRQYVLWRDGYTCQCCGAHATKKKEVRLHVHHLESRKVDGDAPDNQVTLCESCHEKLHKGLIAEKDFKKRKRKSTRDATFMGIMRKTLMQRLCSELPIPVIETRGYITKATREKLLVLPKSHTNDALAIAQGKQGFNVGYLPGILQIDKIYTIRPVRHHNRQLHKATILKGGIRKSNQTEKYVFGYCLFDKVQFNGQDCFIWGRRTTGIFTIKTINGKMIKDGISFKKLKPVEKSTGYLIA

SEQ ID NO: 16159 - protein, 418 aa, unidentified; identical to SEQ ID NO: 4327

SEQ ID NO: 16160 - protein, 435 aa, unidentified; identical to SEQ ID NO: 4695

SEQ ID NO: 16161 - protein, 414 aa, unidentified
MPCSPAKARLLLKEKKAIVKRRTPFTIQLTIATGETKQPVGLGVDAGYKHVGLSASTDKAELYASQVELRQDITDLLSARRALRRARRNRKTRYRAPRFNNRIRTKRKGWLAPSVENRINAHLSRIEAVLRLLPVTKITVETASFDMLLLKNPDIAGKEYQEGEQLGFWNVREYVLFRDGHVCQHCYGRSKDPVLNVHHLESRRTGGDSPGNLITLCETCHEALHRGEIALKTKRGHSFRAEAFMGMMRWEVLNRLKASHSELEVNNTYGYRTKHARIVNGIDKSHCADAFCIAGNLGAERLCEFFFQKQTRRNNRQIHKLSILKGGIRKRNQAPFEIKGFCLFDKVACKGEESFIFGRRSSGYFDVRKLDGTRISAGISYKKLRLLEKRRTYLTEIRKEEALPPLPEGRGLRA

SEQ ID NO: 16162 - protein, 424 aa, unidentified
LVWNKRGKPLMPCSPAKARLLLKEKKAIVVRRTPFTIQLTIATGETKQPVSLGVDAGYKHVGLSASTEKAELYASEIELRQDITDLLSARRELRRARRNRKTRYRAPRFDNRIRTKRKGWLAPSVENRINAHLSRIETVLRLLPVTKITVETASFDMQLLKNPDIAEKEYQEGEQLGFWNVREYVLFRDGHVCQYCHGRSKDPVLNVHHLESRRTGGDSPGNLITLCETCHKALHRGEIKLRAKRGQSFRAETFMGIMRWEVLNRLKASHSKLEVNNTYGYLTKHARIKSGITKSHCSDAFCIAGNLGAKRLGEFLFQKQTRRNNRQIHKLSILKGGIRKRNQAPFEVKGFRLFDKVACQGEEGFIFGRRSSGFFDVRKLDGTRISAGISCKKLHLLEKRRTYLTEIRKEEALPALPEGRGLRA

SEQ ID NO: 16163 - protein, 431 aa, unidentified
MPNKVYIINKHGRPLMPCSPAKARHLLDAGKAKVKKRTPFTIQLVYGSSGYTQEVILGVDAGSKTIGMSASTTKEELLSAEVKPRNDVVDLLSTRREFRRARRNRKTRYRKPRFDNRVRSKHRGWLAPSVEVKIQEHITSIKRVCRILPVSKVVVETAEFDLQLLKAIADGKPVPQGEDYQKGEMYGHYNVRQYVLWRDNYTCQCCGTHPSKKKEVRLHVHHLESRKVGGDAPDNQVTLCESCHEKLHKGLIAEKDFKKRKRRSTRDATFMGIMRKTLMQRLCSELPIPVVKTRGYITKATREKLLVLPKSHTNDALAIAQGKRGFNVGYLPEIAQIDKIYTIRPVRHHNRQLHKATILKGGIRKSNQTEKYVFGYRLFDKVQFNGQDCFIWGRRTTGIFTIKTINGKMIKDGISFKKLKLVEKSTSYLIA

SEQ ID NO: 16164 - protein, 425 aa, unidentified; identical to SEQ ID NO: 7055

SEQ ID NO: 16165 - protein, 409 aa, unidentified
MVYVLNIQGKPLMPCKKAKARKLLKQGKAKVIKREPFTIQLIFECENQVQEVTLGVDAGSQAIGLSVTTDKDELFSAEVELRNDIVDLLSTRRQNRRTRRNRLRYRKPRFLNRVGSKNKGWLAPSIENKINTHLKVISKIYEILPISKTIVEVASFDIQKIKNPDIQGKEYQQGEQLDFWNVREYVLFRDGHKCQGKKNCKNKILNVHHIESRKIGGDSPNNLITLCENCHEDYHDGRLKLNLKRGQSFRDATFMGIMRWSFYNRLKEIYPNVQMTYGYITKNTRIVNGLPKEHRIDALCISGNLSVKQSEYWYYIKQIRKHNRQIHKANILKGGKKKLNQAPYEVKGFKLFDKVKYKGQECFIFGRRSSGYFDLRKLDKVVVHRSASYKDLELIQKSNSLLIERRSAG

SEQ ID NO: 16166 - protein, 431 aa, unidentified
MVYVLDQEGRPLMPTNRHGKVKHLLREGKAKVVKRTPFTIQLLYESTHYTQDIILGVDAGSKTIGMSATTEKQEVFAAEVTPRNDIVKLMSERRSLRRARRNRKTRYRPARFNNRVRSKHKGWLAPSVEVKIQEHITSIKRVLHLLPITKVIVETAEFDLQLLKAIENGDPLPEGTDYQKGEQLGHYNLRQYILHRDAYTCQACGEHKEGTKLHVHHLESRRVGGNAPANLVTLCEACHKALHQGLITEDDLKKRKRRSTRDATFMGIMRKTLMTRLRNELTIPVAETRGYFTKYTRVEVLQLPKSHINDAFSICQGSIGFKASKETQANRIEEHYLIKPVRHHNRKLHKLTILKDGIRKSNQSDRYTKGYRLYDKVLFNGQECFIFGRRTSGYFDLRKLDGTKVHASASWKKLALLERQSNYLIEGKVAG

SEQ ID NO: 16167 - protein, 334 aa, unidentified
MVYVLANDGQPLMPTERHGKVCRMLKSGIAKVVKKCPFTIQLQYESERNVQPVALGIDAGSKHVGVSATTKAKVLYESDVELRDDIVKLLATRRQLRRRRRSRKTRYRPARFDNRRRKEGWLTPSIRQKIESHLTVVANVCKILPVSQIIVETASFDIQKIKNPDIQGIEYQQGEQMDFWNIREYVLFRDGHTCQCCKGKSKDKVLNVHHIESRKTGGNAPNNLITLCETCHKGYHNGTVTLPKNIKRGMKFKDAAFMGIMRWTFYNTLKEQYEPDIPVHYTYGYITKNTRINHNLPKGHCIDARCISGNPDAVSDGTYYYQKKVRCHNRQIHK

SEQ ID NO: 16168 - protein, 436 aa, unidentified; identical to SEQ ID NO: 15633

SEQ ID NO: 16169 - protein, 304 aa, unidentified
LAPSVENRINAHLSRIEAVLRLLPVTKITVETASFDMQLLKNPDISGKEYQEGEQLGFWNIREYVLCRDGHVCQHCYGRSKDPVLNVHHLESRRTGGDSPGNLVTLCETCHKALHRGEITLKAKRGQSFRAEAFMGIMRWEVQNRLKASHPELEVNNTYGYRTKHARIANDIAKSHCADAFCIAGNLGAERLGEFFFQKQTRRNNRQIHKLSILKGGIRKRNQAPFEVNGFRLFDKVACKGEEGFIFGRRSSGFFDVRKLDGTCISAGISYKKLHLLEKRRTYLTEIRKEEALPPLPEGRGLRA

SEQ ID NO: 16170 - protein, 553 aa, unidentified; identical to SEQ ID NO: 8282

SEQ ID NO: 16171 - protein, 515 aa, unidentified
MATVHVLNKDGKPLMPTTRCGHIRHLLKEKKARVVRTNPFTIKLVYETDDVVQPLYLGIDPGRTNIGVAVVKVDGTAVFTAHLETRNKEIPKLMAKRKEHRQGRRHYRRCKRQRRAAAHGTLSKKCKKQDTAQGGNISKRAQTIGVFERNLPGCEKSVLCIGIKNKEARFNNRVRPARWLTPTANQLLLTHVNFVKKICKFLPISDVVLEINKFAFMALDNPNIQKWQYQQGPLYQKGSLENAVSEQQDHHCLFCEKTIEHYHHVILRSENGSDTIANIVGLCAEHHDLIHKDDKLKEELAKKKQGLNKKYGALSVLNQIIPALTYELGSRFQGHFYVTTGKSTYDYRAAHSVSKDHWLDAYCIACSVLPDGCFDNTINSRVPYELKQFRRHDRQVCQQQNVKRKYYLDKKLVATNRHKAIKQETDSLEEYRNNGGTTDKLVVKEHKPTNKRLNRILPGALMAANGKLNVMVASRGLHNGIPDNYVFDNNSKAKPSKCTLINKNKGIVFVSNSVS

SEQ ID NO: 16172 - protein, 413 aa, unidentified; identical to SEQ ID NO: 3290

SEQ ID NO: 16173 - protein, 420 aa, unidentified; identical to SEQ ID NO: 5866

SEQ ID NO: 16174 - protein, 419 aa, unidentified; identical to SEQ ID NO: 4877

SEQ ID NO: 16175 - protein, 414 aa, unidentified
MPCSPAKARLLLKEKKAIVVRRTPFTIQLTIATGEAKQPVSLGVDAGYKHVGLSASTEKAELYASEVELRQDITDLLSARRALRQSRRNRKTRYRAPRFDNRIRTKRKGWLAPSVENRINAHLSRIEAVLRLLPVTKITVETASFDTQLLKNPDIAGKEYQEGEQLGFWNIREYVLCRDGHVCQHCYGRSKDPVLNVHHLESRRTGGDSPGNLITLCETCHKALHRGEIKLRAKRGQSFRAETFMGIMRWGVLNRLKASHPKLEVHNTYGYRTKHARIANGIAKSHCADAFCIAGNLGAERLCEFFFQKQTRRNNRQIHKLSILKGGIRKRNQAPFEVKGFRLFDKVACQGEEGFIFGRRSSGFFDVRKLDGTRISAGISYKKLHLLEKRRTYLTEIRKEEALPPPPEAAQRPR

SEQ ID NO: 16176 - protein, 415 aa, Bacillus sp.
MRVFVKNVRGEPLMPCSHRKARILLKQGKVKIIGYTPFTIQLQYATGEAVQPVTIGVDSGAKHIGIAITTEDKVLAKGTIELRQDFKENLTLRAILRRGRRQRKTRYRKARFLNRKKKEGWLPPSIQSRVDNQIHWIEIFRSLLPSPKVIVEVGKFDAQKLKNPDIQGTEYQQGDTFGFWNTRYYIFARDNYTCQICKKKGGILHTHHIIERCSGGSDMADNLVTVHDECHQKFHQGKLKHSFKKPKQYKETAFMNILRLQIMNRLDCDITYGSYTTPKRKELGLSKTHVNDAIAITHPTQLQEYDQSGEFRIKQFRKKKRSLHEATARKGRKTKNTSAKRNKKNTPHIDGIYLGDKVKVFGQVGFVTGFTGKMVYVQDIHGQYIQNPSKSYKQVKMSDMERIHHTNNWQFLQIS

SEQ ID NO: 16177 - protein, 477 aa, unidentified
MIIALDKYKRPLGFLTERRCRILMERKRAVLYRVFPTVVILMDVDARTIPDLPSFRIKIDPGSKYTGIAIIRNDTDEFVYAMQIEHRGDAVRAALNKRKNARRNRRSRETGYRRAKWGNRCLSEKDKRSYDSSREDDWLPPSIRSAADNVISWVRRLGRWINLTECSFEAVRFDTQLMEDPDIEGEEYQHGTLFGLEIKEYLMEKFGHTCQYCGGKSGDPVLEWEHMRPKSRGGSDRVKNALLSCSSCNKDKGNRTPEEWLELIKARLPREKGKRKELDEERVELIQKVIDGKPQGGALRYAAWVSSSRRYLEKALFGIFGNVECSSGGRTKYNRTELGYPKEHHYDALCVGTVPEKGYHDRTNGYYLYAKAAGRGTRLRGHLNKCGVIVAKWTDRKKGFFGFQTGDIVVAEVPHKTPKPYKYEGRFVGRVMVRATGSFDIKTTDGKLVTVKEQYCRLLQANSGYQYTMKRAIPLGH

SEQ ID NO: 16178 - protein, 459 aa, unidentified
MLYALILNSFKRKDFVKRMTKTATQKVIQVCVLDQNGQPLMPTQRLGKVYRLLKSKKAHIVAYEPFTVQLDYEPKTHIIQPLTLGVDSGAIHSGYSLANEHREYYNAEVIARDDISKNISDKRMYRRNRRARKTRYRKPRFNNRKNKGEGWIPPSLEQKVEVQVKEIKHLHKYFPIKDIIIEVAEFDIQKIVNSDISGKEYQQGTLQGYNIRNYLIEKYNHKCFYCDKEVSAFEVEHMIPKARNGSNRIDNLTLSCPDCNQKKGTLTAEEFIRQTLSPQKAAQKLRQLPKTKKLLKYMAHMNATRWVLYNTIKEIYNSVSLTYGYITKHNRINAGLPKAHHIDAKCITGFSTVPSFEVTVVKTKMRRHNRQLHRATFSKGHVRRAATLPRIVHDFQLYDIVLFNNHRYYIKSRRSSGYFTIVSLEGLNNSKRSYKKLTFLAHTNAYLINHYVNDKIKKC

SEQ ID NO: 16179 - protein, 420 aa, unidentified
MSVFVINQRNQPLMPCSPRKARLLLKQGEAKIVKRTPFTIQLLQATGETKQDITLGVDAGSKHIGLSATTQKKEMFSAEVELRNDIVDLLSTRRQNRRTRRNRLRYRKPRFLNRVGSKNKGWLAPSIENKIQTHISIVEKLYKLLPITKIIVEVASFDIQKIKNPDIQGTEYQQGNKLNFWNTREYVLFRDGHKCHGKKGCKNKILNVHHIESRKTGGDSQDNLITLCEECHNHYHSGKLKLNLKRGKSFRDAAFMGIMRLAFYNKLKVLYPNVSLTYGYMTKNTRIINNLPKEHRIDALCITGNPIVKRLKNYYYVKQVRKHNRQIHKANILKGGKKKLNQAPYLVKGFRLFDKVKFEDRECFIFGRRSTGYFDLRTLDGTKIHASASVKKLKLLEVRKSLLWERREQGIGVHGIPPLP

SEQ ID NO: 16180 - protein, 456 aa, Halomonas sp.
MAVFVLDKHKRPLMPCSEKRARLLLARGRAVVHKRYPFTIRLKDRVSGETQPLRLGIDPGSKTTGLALMREPDSQQRHVLCLFELIHRGFQIKKALQQRAAFRRRRCSANLRYRAPRFNNRIKPKGWLAPSLQHRVDTVMAWVNRLSRLAPVTAISQELVRFDTQKLDNPEISGVEYQQGTLLGYEVREYLLEKWGRECAYCGTGDTPLEIEHVVPRSRGGSNRVSNLTLSCHPCNAEKDSQTLTDFFATNKGLKKRLKANGLSADAQLERVQRQLKQPMRDASAVNATRWALFSALKTTDLPVAVSSGGRTKYNRQRLNIPKTHALDAACVGAFGKLHDWTVPTLTIKAMGRGSYQRTRLTKHGFPRGYLMRQKQVHGFQTGDMVRAIVPTGKKAGTHTGRVAIRKTGSFNIQTEQGAVQGISHKYCTVIQRGDGYGYYITPFTNLTGGAGQAVA

SEQ ID NO: 16181 - protein, 443 aa, Actinomadura sp.
MGREVRIRQPAVFVLDKNGRPLQPTTPPRARKLLSSGRAVVARHTPFVIRLRDRTVRESRVDGVEIGIDPGSRHTGMAVFTSRREERRARFGVRLDHRGSAIGKKLRQRAAYRRRRRTANLRHRAPRFDNRVRTDGWIAPSVRHRLETTVSWVDRLSRWAPVTAAHLERTAFDTHAMAAGRPLEGAEYQHGTLHGYEVREYLLAKFGRTCVYCDATGVPLNIDHVVPRSRAGSDRVSNLVPACIPCNRAKGDLPVEHFAPAKAASIKVRALAPLRDAAALNTARRALWKALDARMPVRASSGGRTKWNRTRHHLPKSHTLDALAVGELDSITEILTVFLAVGCTGRGTYARTRPDRHGFPRLRLPRRKDVFGFRTGDLARAVVPSGKNAGTHTGRIAVRSSGTFTVRSRGGLFTARHIRFRLLQRADGYAYTTGKEAGTAARP

SEQ ID NO: 16182 - protein, 211 aa, Clostridium sp.
LTHQFKKGVPVMVYVLDKNGQPLMPTDRHRKVRLMLQSGQAKVIKRCPFTIQLTYNTGHQAQEISLGIDAGSKHIGVSATTKTRVLYEADVELRNDIVDLLSSRRELRRGRRNRKTRYRPARFDNRRREDGWLAPSIRQKIGTHLTVVENICKILPISRITVETASFDIQKIKNPDIQGAEYQQGDQLGFWNNREYVLFRDNHTCQCCKGK

SEQ ID NO: 16183 - protein, 422 aa, unidentified; identical to SEQ ID NO: 5333

SEQ ID NO: 16184 - protein, 419 aa, unidentified; identical to SEQ ID NO: 6987

SEQ ID NO: 16185 - protein, 432 aa, unidentified; identical to SEQ ID NO: 4738

SEQ ID NO: 16186 - protein, 557 aa, unidentified; identical to SEQ ID NO: 3108

SEQ ID NO: 16187 - protein, 465 aa, unidentified
MSTCVCVLSNNGERLMPTIRLGKVRHLLKDGKAKIIKHHPFTIQLLYDSKTNTQPIEICEDVGYNYIGISVKSQSHEYVSAQYDTLPDEKACHDSCRKLRRTRRNRLRYRKPRFDNRKRGEGWLAPSLEHKKELNVNIIKMYCEVMPITHAIVEVGSFDTMLVKAIEEGKATPESADYQKGPRYKLATLREAVFYRDNYTCQVCGRKANEGAILHVHHMFYWKGRHGNSLSELITVCEKCHTPASHQKGGKLYGFGEDIKFANLSGAAFMNTVRWQIVNVLYAAFGKPFVTFTYGAMTKEKRIALHLEKSHNNDAYAMGSFHPVNRCAFEHYEKVKRNNRILEKFYDSQYIDTRTGELTNGKNLFNGRISRSHKKDSENLHKYRGKRICKEHRALRRKKLALNPGDLVSLNGEILVVHGTHTKKNGSVNVEFKVPSKSGKKSASLKKLEIIKTSNSMRSAWKKVS

SEQ ID NO: 16188 - protein, 416 aa, unidentified; identical to SEQ ID NO: 14170

SEQ ID NO: 16189 - protein, 417 aa, unidentified; identical to SEQ ID NO: 2758

SEQ ID NO: 16190 - protein, 440 aa, unidentified
MTKTFTQKTSQVCVLDQNGIPLMPTKRLGKVYRLLKNQKAHIVNYEPFTIQLDYEPKTHIIQPMTLGVDSGAIHSGYSLANEHREYYSAEVIARDNISKNLSDRRMYRQTRRSRKTRYRKPRFNNRKNKGKGWIPPSLEQKVTVQVNEIKHLHKYFPIENIIIEVAEFDIQKIKNPDISGKEYQQGTLYGYNIRNYLLEKYHHKCFYCDKEVSVFEVEHMIPRSRNGSNRIDNLTLSCHDCNQKKGTLTAEEFIRQTLSPQKAAQKLRQLPKTKQLLKYMAHMNATRWALYNTIKEMYESVSQTYGYITKYNRIDAGLPKAHHIDAKCITGFSTVPSFDVIVVKTKMRRHNRQLHRATFSKGHIRKAATLPRFVHGFQLYDIVMFNNHRYYIQSRRSTGSFTLVSLEGLKDENRMYSKLTQLAHTNAYMMNHMLMINKIN

SEQ ID NO: 16191 - protein, 535 aa, unidentified
VLRPRYQYPTRWYPSREQGSGNGCLSGEENTDLEQEVSGTLSKGDHSHPGEQDFCVPAITIQGGPAMSVFVVGLNGCRLMPTSERKARLLLKHGKASVYRKVPFTIKLNYKTGSTTQSGYLGIDTGSQHIGVSVVREDGTVLHKEEIGLRDSMSKRKLMQSRASSRRGRRHRKTRYRHPKWRPKAKRVYCEIPDRKGRHWKKKEITFASKRPKGWLPPSLQSKTDHHIWWIKKLQDLLPEGYRLSIELGRFDPARLKDPEIHGELYQKGPQYDYENVRAYVLNRDRYTCQVCGKKGGKLHVHHILYRSHGATDDPQYMATVCSDCHNTENHQQGGILYQWMQKQKKFTRGLRDATFMNILRKRLIEAFPGATFTYGNITKADRERLRLPKSHGNDATAIAIVKTGIMTVKDKEPVIYIQQVRRKKRSLHEETPRKGRKEPNRTASRYDKNTKAVTVTKRKNKKISITGCLFDRVELNGKKGWISGFTDKSCYVKDENDQYIRTSPKYKQVSLSKLKILHHCGNWAIGARQSLGKG

SEQ ID NO: 16192 - protein, 279 aa, unidentified
VVVETAEFDLQLLKAIEEGKPVPQGEDYQQGEMYGHYNVRQYVLWRDDYTCQCCGAHATKKKEVRLHVHHLESRKVGGDAPDNQVTLCESCHEKLHKGLIAEKDFKKRKRRSTRDATFMGIMRKTLMQRLCSELPIPVIETRGYITKATREKLLVLPKSHTNDALAIAQGKRGFNVGYLPEIAQIDKIYTIRPVRHHNRQLHKATILKGGIRKSNQTEKYVFGYRLFDKVQFNGQDCFIWGRRTTGIFTIKTINGKMIKDGISFKKLKLVEKSTSYLIA

SEQ ID NO: 16193 - protein, 512 aa, unidentified
MSTVYVLNKDGKPLMPTTRCGHVRRLLKEQKARVVTSKPFTIQLLYETDDVVQSLYLGIDPGRTNIGVAVVKTDGTAVFTAHLETRNKEIPKLMKKRKDSRRARRTNGRRCRRQRRAKANGTISKKCVKQTTAQNGSVSKRAKEIGVIKRHLPGCEKEVLCIGIKNKEAKFSNRTRPEGWLTPTANQLLQTHINLVKKIRKFLPISDVVLEINKFAFMRLDNPNIQKWQYQQGPLYQKASLEEAVSEMQEHHCLFCKKPIDHYHHVVPQHKNGSNTIGNIVGLCAKHHDLVHKDTTWQKKLAKKKTGLNKKYGALSVLNQIIPTLTKELSSLFLKHFFVTNGKSTYDYRAAHGVSKDHWLDAYCIACSVLPNDTCDKTINSRVPYEFKQFRRHDRRALNNENMSRVYTFNGKMVATNRHKATEQTTDSLEEFRQRQPNDVCNLKVKEHHPTYRNMNRNYPGSVFLVGKQVHVIQGIAGSKDGKATTYNDTNTNSIAAGKCKFVAKNSGILFV

SEQ ID NO: 16194 - protein, 471 aa, Acidithiobacillus sp.; identical to SEQ ID NO: 13024

SEQ ID NO: 16195 - protein, 416 aa, unidentified
MVYVLDKNGQPLMPTDRHRKVRLMLQSGQAKVIKRCPFTIQLNYDSGHQTQEISLGIDAGSKHIGVSTTTKIKVLYEVDVELRNDIVDLLSSRRELRRGRRNRKTRYRQAKFNNRRRGNGWLAPSIRQKIGTHLTVVENICKILPISRIMVETASFDIQKIKNPDIQGAEYQQGDQLGFWNNREYVLFRDNHTCQCCKGKSKDKILNVHHIESRKTGGNAPNNLITLCETCHTGYHKGTVQLPKAIKRGMRFKDAAFMGIMRWAFYEALKQQYEPVGTPVHNTYGYITKHTRIEHNLPKEHYVDARCISGNPDAFPNGEYYYQKKVRCHNRQMHKLTILKGGIRKQNQATYLVKGYRLFDKVSYQGKGYFVFGRRQSGFFDIRTLSGEKVNKGSLSCKKLKFIATRTYYLTERRAV

SEQ ID NO: 16196 - protein, 423 aa, Arthrospira sp.; identical to SEQ ID NO: 3735

SEQ ID NO: 16197 - protein, 456 aa, unidentified
MSTCVCVLSNNGERLMPTIRLGKVRHLLKDGKAKIIKHHPFTIQLLYDSKTNTQPIEICEDVGYNYIGISVKSQSHEYVSAQYDTLQDEKACHDSCRKLRRTRRNRLRYRKPRFDNRKRSEGWLAPSLEHKKQLNIRLIERYVSVIPITRATVEVGSFDTMLLQAIQKGESKPEGVDYQKGPRYNLATLREAVFYRDNYTCQVCGRKIADGAILHMHHMFYWKGRHGYQLDELVTACEKCHTPANHQKGGKLFGFGENKEFANLSGAAFMNAVRWQIVNALYATYGKEFVTITYGAMTKEKRIILGIEKTHNNDAYAMGDYHPVHRCVFRHYQKRRRNNRVLEKFYDATYIDARTGNKAKGKELFNGRISRNHKKDSEDLHKYRSKKVSKGRRSIRRQRYAIQPYDTVRLENKTYITSGCHNKGTRLLIPANGKSKSVAISKVQVVCHAGAWIQII

SEQ ID NO: 16198 - protein, 442 aa, unidentified
MSTSVFVLDKRHRPLMPCRPARARRLLRAGRARVVKRFPFVIRLVDRTVEQSEVQPVLIKLDPGSRETGAAVVRDDEKKRHHALAFFVIKHRGGAIRDALKARSAFRRRRRSQNFRCRSPRFLNRVKPKGWLPPSLRHRVETTLSFVRRMCRYLPVSGIATELVKFDSQKLQNPEVSGVKYQQGTLFEYEVREYLLEKFGRKCVYCGAEGVPLNIDHVVPRAKGGSNRVSNLVLACVSCNQKKGARSLEDFLKGKPAVLARVRRELKTPLRDAAAVNATRWVLFNELKATGLPVETGSGALTKLNRHAFGVEKEHWLDALCVGRLNGVVTRKGLNVLEIRCMGRGSRQRTRLTKYGFPRGYLMRQKCVHGFATGDMVEANVPKGKKAGLWRGRVAVRVSGSFNIQTPKGVIQGVGWKHCRLISHNDGYGYAWLGHAPHSSPA

SEQ ID NO: 16199 - protein, 456 aa, unidentified
MSTCVCVLSNSGERLMPTFRLGKVRRLLKDGKAKIVKHHPFTIQLLYDSKTNTQPIEICEDVGYNYIGISVKSKSHEYVSAQYDTLQDEKEHHDDCRKYRRTRRNRLRYRKPRFDNRKRSEGWLAPSLEHKKQLNIRLVERYVSVIPITHATVEVGSFDTMLLQAIQKGESKPEGADYQKGPRYNLATLREAVFYRDNYTCQVCGRKIADGAILHMHHMFYWKGRHGYQLDELVTACEKCHTPANHQKGGKLFGFGEDKEFANLSGAAFMNAVRWQIVNALYATYGKEFVTITYGAMTKEKRIALQLEKTHSNDAYAMGDYYLAHRCVFRHYQKRRRNNRVLEKFYDATYIDARTGNKAKGKELFNGRINRNHKKDSENFHKYRSKKVSKGRRSIRRQRYAIQPYDTVRLESKTYITSGCHNKGTRLLIPANGKSKSVAISKVQVVCHAGAWIQII

SEQ ID NO: 16200 - protein, 427 aa, Enterococcus sp.; identical to SEQ ID NO: 5630

SEQ ID NO: 16201 - protein, 376 aa, unidentified
LKLDPGRKTTGLALAGENETVNTTTDKLMRALPMIMLLELKHPVQAIRDALTSCHAFRRRQRGKLRYRLARFDNLARPDGWLAPSLRHRVDTTMSWVWRLLRWVPATAVSQELVRFETQALENPEISGTEYQQGTLFWLRGAGVSAREVGRKCAYSDGQNVPLEIEHIQPKSFGGSDRVSNLMLACRPCNQRKGNQQLKQFLAKPPERTRRILAQAKAPLRDAAVNSSGWALFQRLKARGLEVEVASGGRTKWNRRRFSIPKTHCLEAVCGGQGDAIWNWQQQVLQVQGRGCGSYQRTRLRRQGFLRGYLTRSKSAFGFQTGDLVWAVGTTGKKVDAYLGRVAIGASGNFNIQTGNRLVQGQASTDSAPCLAGRWV

SEQ ID NO: 16202 - protein, 414 aa, unidentified
MPCSPAKARLLLKEKKAIVVRRTPFTIQLTIATGESKQPVSLGVDAGYKHVGLSASTEKAELYASEVELRQDITDLLSARRALRQSRRNRKMRYRAPRFDNRIRTKRKGWLAPSVENRINAHLSRIETVIRLLPVTKISVETTSFDMQLLKNSDIAGKECQESEQLGFWNVREYVLFRDGHVCQHCHGRSKDPVLNVHHLESRRTGGDSPGNLITLCETCHKELHRGEITLKAKRGQSFRAETFMGIMRWEVLDRLKASHPKLEVQNTYGYRTKHARIVNGIAKSHCADAFCIAGNLGAERLGEFLFQKQTRRNNRQIHKLSILKGGIRKRNQVPFEVKGFRLFDKVACKGEEGFIFGRRSSGFFDVRKLDGTHVSAGISYKKLRLLEKRQTYLTEIRKEEALPPLPEGRGLRA

SEQ ID NO: 16203 - protein, 426 aa, Ferroplasma sp.
VDLLSPVGGHKADMPVFILNDDGKPLIPCKPAKARHLLSDKKAKVISSNPFTIQLLWHCEENVETITLGIDSGYKHIGFSAVTDNKELISGEVVIRTDIPKLNEEKAMYRRKKRNKLWYRKPRFMNRGNNKEGWFAPSIEHKLETHIRLIEKLKRILPVSNTVIEVASFDTQKMKNPEISGIEYQQGELQGYEIREYLLEKFHHICVYCSKTGVPLEIEHLTPRSRDGPDTVNNLAISCHECNQKKNNLTAEEFGYPEVRKRALITMRDAAFMNTVRWKLTQLTGSEHTLGFITKKNRISLSLDKTHVNDAFVIAGGTVQIRTSPFTITQRRRNNRSIQTNRKGFRPSIRRKRYAFQPGDIVVYDHERFSVVGMHNYGKSIVIKGGGKKMDINTKKVKLVKYGKGLQFAPQFLPTLSDGVSLGGVR

SEQ ID NO: 16204 - protein, 442 aa, unidentified
MSTSVFVLDKKHRPLMPCRPARARRLLRAGRARVVKRFPFVIRLVDRTVEQSEVQPVLIKLDPGSRETGAAVVRDDEKKRHHALAFFVIEHRGGAIRDALKARSAFRRRRRSQNFRCRSPRFLNRVKPKGWLPPSLRHRVETTLSFVRRMCRYLPVSGIAAELVKFDSQKLQTPEVSGIEYQQGTLFEYEVREYLLEKFGRKCVYCGAEGVPLNIDHVVPRAKGGSNRVSNLVLACVSCNQKKGARSLEDFLKGKPEVLARVRRELKTPLRDAAAVNATRWVLFNELKATGLPVETGSGALTKFNRHAFGVEKEHWLDALCVGRLNGAVTRKGLNVLEIRCMGRGSRQRTRLTKYGFPRGYLMRQKCVHGFATGDMVEANVPKGKKAGLWRGRVAVRVSGSFNIQTPKGVIQGVGWKHCRLISHNDGYGYAWLGHAPHSSPA

SEQ ID NO: 16205 - protein, 477 aa, Blautia sp.; identical to SEQ ID NO: 2707

SEQ ID NO: 16206 - protein, 433 aa, unidentified
MSVFVLDRSGTPLMPCSEKRARLLLARRRARVHRVIPFVIRLVDRKAEACSLQPLRVKLDPGSKVTGVALVSDAEHAVIVLNLFELVHRGRQISEALTARRAFRRRRRGANLRYRTPRFLNRRRPEGWLPPSLCHRVDTTIAWVNRICCWAPITALSSELVRFDMQALENPGISGIEYQQGRLAGYELREYLLEKWDRMCIYCDARGRPLQIEHLTARARNGSNSIANLGLACSDCNQHKGSLGVREYVGDPKRLARILATASRPLRDAAAVNATRWALANALHATGLPLEIASGGRTKFNRIAHGIPKTHALDAACVGHVRGVLNWQRPSLKIQATGRGRYQRTRLSRDGFPRGYMMRQKQVHGFQTGDHVRADVPGGKKAGVHFGRVAVRATGSFNIQMASGVVQGISHRYCELVQRGDGYAYHLQATDGF

SEQ ID NO: 16207 - protein, 431 aa, unidentified
MPNKVYVINKHGRPLMPCSPAKARHLLDAGKAKVKKRTPFTIQLVYGSSGYTQEVILGVDAGSKTIGVSASTKKEELFAANVIPRNDVVDLLSTRRESRRARRNRKTRYRKPRFDNRVRSKHKGWLAPSVEVKIQEHITSIKRVCRILPVSKVVIETAEFDLQLLKAIADGKPVPQGEDYQQGEMYGHYNVRQYVLWRDNYTCQCCGAHATKKKEVRLHVHHLESRKVGGDAPDNQVTLCESCHEKLHKGLIAEKDFKKRKRRSTRDATFMGIMRKTLMQRLCSELPIPVVKTRGYITKATREKLLVLPKSHTNDALAIAQGKQGFNVGYLPGIVQINKIYTIRPVRHHNRQLHKATILKGGIRKSNQTEKYVFGYRLFDKVQFNGQDCFIWGRRTTGIFTIKTINGKMIKDGISFKKLKLVEKSTGYLIA

SEQ ID NO: 16208 - protein, 377 aa, Anoxybacillus sp.
IKATYRLKIDYGSRHTGLAILRGQEVVWLGQLDHRTDIKERMDKRRAFRRARRNRKTRYRKPRFLNRRRKDGWLPPSLESRVQNIQTWVNRLKKLCPIGYISYENAKFDTQLMRNPEINGVEYQQGTLQGYEVREYLLEKFGRKCCYCGKEGVPLEIEHIIPKSRGGTDRVDNLCLACHDCNQRKGSKTAEEFGYPHIQEMVKKTLKDASVVNATRWKVYEVLKQSGCEVECGTGARTKMNRIRLGLPKIHYFDACCVGESTTNHLYFKTKEVLFIKAKGRGSRSRTNLDRYGFPRGYLARQKFFFGFQTGDMVKAVVPRGKYQGVWFGEVACRKTGSFDIKGKDGKRIAQGINYRYVQVIQRFDGYAYGKGVAELA

SEQ ID NO: 16209 - protein, 427 aa, unidentified
LRVFVLNKRGKPLMPCSPAKARLLLKEKKAIVKRRTPFTIQLTIATGEAKQPVSLGIDAGYKHVGLSASTEKAELYASEVELRQDITDLLSARRALRQSRRNRKTRYRAPRFDNRIRTKRKGWLAPSVENRINAHLSRIEAVLRLLPITKITVETASFDMQRLKNPDISGKEYQEGEQLGFWNVREYVLFRDGHVCRHCHGRSKDPVLNVHHLESRRTGSDSPDNLITLCETCHKALHRGEITLKAKRGQSFRAQAFMGIMRREVLNRLKASYPELKVHETYGYLTKHARIANGIVKSHGADAFCIAGNLGAERLGEFFFQKQTRRNNRQIHKLSILKGGIRKRNQAPFEAKGFRLFDKVACQGEEGFIFGRRSSGYFDVRKLDGTRISAGISYKKLRLLEKRRTYLTEIRKEETLPPLPEGRGLRA

SEQ ID NO: 16210 - protein, 408 aa, unidentified; identical to SEQ ID NO: 4826

SEQ ID NO: 16211 - protein, 408 aa, unidentified; identical to SEQ ID NO: 4810

SEQ ID NO: 16212 - protein, 421 aa, unidentified
MLIYVLSKNGQPLMPTHRCGFVRRLLNSQKAKVVRRCPFTIQLQYDTDCKTQPVTLGIDAGSKHIGVSATTESKVLYEADIELRNDIVDLLATRRQMRRARRSRKTRYRKARFDNRKRNDKWLAPSIQHKVNCHLEAVRFVHKLLPISKIIVEVASFDIQKIKNPLITSTDYQNGELLDWKNVREYVLFRDSHICQCCKGKSKDPVLQVHHIESRKTGGNAPNNLITLCKTCHNGYHHGTVKLPAKIKRGMKFNDATFMGIMRWGFYNQLKSLYPDVSLTYGYITKDIRISNGLAKTHFIDARCISGNPLATSDNTVYFLKKRRRHNRQIHKFNILKGGRKKRNQAAYLVKGYRLFDKVNYNRKEYFIFGRRASGFFDIRTLSGEKVNKGSISCKKLKLLEASKGYLTERRNAFLSPLNSV

SEQ ID NO: 16213 - protein, 442 aa, unidentified; identical to SEQ ID NO: 4522

SEQ ID NO: 16214 - protein, 421 aa, unidentified
MRGQPLMPCSPAKARHLLKAGKAVVKRRTPFTIQLRIATGETKQNVTLGVDAGAKHVGLSATTEKEEVFASEVELRQDITGLLAARLSLRRDRRHRKTRYRAPRFLNRVRSKHKGWLAPSVENRIQAHMSRIDAVCRLLPVTKIVIETASFDIQKIKDPSVEGTDYQQGDQLGFWNVREYVLFRDGHVCQHCHGRSKDKILNVHHLESRQTGGDAPNNLITLCETCHKAYHAGKIKLKVKRGQSFRAEAFMGIMRWTLLDRMRKAHSGLPVENTYGYLTKNTRITLGLPKTHCVDAYCIAGNLKAVRRGVCLHQRQVRKHNRQIHKCTVLSKTLKDGTKIGYRKFNQTPHLVKNFRLFDKVRCLGQTGFIFGRRSSGYFDVRRLDGVKISSCINYRKLTLLEKRGTCLTELRKEDGASSPV

SEQ ID NO: 16215 - protein, 426 aa, unidentified
MLVYILKQNGQPFMPTERFGKVRRLLKEKKAKVVRREPFTIKLLYEPDTDVVQACYCGVDTGSKYIGVAVVGNDRVLYQSQIELRTDIKKKMDRRRGFRRLRRSRKTRYRKARFLNRRNSIKKDRFPPSVKHKVQAHIDEIEFCKKILPVSDENLILEVSQFDIALMKNPSLTSEEVKKWGYQQGFDYGYSSRREAIRHRDNYTCQCCGKKNCRLEVHHIKFRRDGGTDDEDNLITLCKECHDGVHAGTIELNKKPKKSKNLKYATHMSIIRSQLLKKYPDAIETFGFVTAENRNHLKLKKDHYIDACVIASGGLEFEHSNIILYKRRVSKGDYQLCKGIRGEQIIPTGKICGFRKFDKVVYLRKEYFIKGRMSSGFAVLMGIDGNKVGFSYMSKGLKTPKLLNCKRVLSRSSCLCITQKIVLNIV

SEQ ID NO: 16216 - protein, 429 aa, unidentified
MCNYVFVLDVNHKPLNPCRPVTARKLLTAGKAAVYRRYPFTIILKKQVEAEPKPMSLKIDPGSKFTGLAIVYSNQVVWSAEIEHRGAQIKSALDSRRAVRRSRRNRKCRYRKPRFKNRKRPEGWLAPSLQHRVATTMTWVLKLMKLTAIGSIFQELVRFDTQKLQNPEISGIEYQQGELMGYEVREYLYQKWGRQCVYCGAKSVKLEVEHIIPKSKGGTNRVNNLTLACHGCNQAKGNLDARDFLSGKPDVLKRILGRAKQPLLDAAAVNSTRWQLYQSLKETGLSVAVGTGGRTKYNRIKLGLPKSHWIDAACVGEVATLEIVTRQPLLIKAMGHGCRQVIQMDKYGFPRKGYKPKHPVKGWKTGDIVNVVAGKNAGLKGVRIKTVRAKGNFDLIGADQDTSNKVLSASRNYIQCVHRQDGYYYSFAE

SEQ ID NO: 16217 - protein, 452 aa, unidentified
MVYVISMDEKPLMPTTNAKARILLKEKKATVKRLRPFTIQLTYETKTTYVQKTTLGIDSGYLNIGFSVVDDKKELISGEVKLLQGMKERLIEKSSYRRNRRQRLRYRKARFDNRKKSKPKGWLAPSLQHKLNTHVKFINFLHSLIPVEKTIVEVANFDIQKMKDDLISGKGYQEGDMLGFWNVREYVLHRDGHKCQNPNCKNKSKNPVLMVHHLVYRSEGGTDRPENLATLCDKCHTPANHKKGKFLYDWMVQGKQMKGFKDATFMSMIRWMLINGLKETYPNINFTYGYLTKNKRIEQGIEKSHRNDAFVIANGTTQKRDENPFLVTQSRLKDRSLEKFYDAKYIDTRTGEKVSASDLPCGRSTRNKKLNTENLKIYRGQKLSKGQRRIRKQKYSYQANDLVKYEGKVYTVKGTQNGGKYVALKEMKKVPKVELLTPYVFKKGLNWSYNSI

SEQ ID NO: 16218 - protein, 487 aa, unidentified
  source 1..487: note = uncultured beta proteobacterium
GPRSSDSRQAIGDVRNGSDSNAGLQHGRGEMFSKHVTAARRVERSNPMSRVFVIAKHGDPLMPCEPARARQLLRKGMAVVHRTFPFVIRLKQRETGDVQPIKLKLDPGSKTTGIALTREAPGKSVALKLIELEHRGRQISDALTSRSSLRRRRRGQLRYRAPRFLNRGNKKNGWLAPSLMHRVHSTMSWVERLRRWVPVSDIASELVRFDMQALENPEVTGVEYQQGTLAGYEVREYLLEKWARKCAYCDATGVPLQIEHIVARARGGTDRISNLTLACGCCNQRKGASSIQEYLAKDQSRLKKILASAKAPLKDAAAVNATRWRLANELKTTGLRIELASGGRTKFNRTQFGVPKSHALDAMCVGNVVGVERWNQPTLLARSTGRGGYQRAITDAYGFPKAHKTRTKMQFGFQTGDMVRALIPRGKYTGVHTGRVSVRATGKFDLKSDSRPRFGVGHKHCTIVQRADGYSYSWKPTPTADQKGTTA

SEQ ID NO: 16219 - protein, 431 aa, Ktedonobacter sp.
MSKVFVLDMYEKPLEPVHPGRARILLSQRKAAVFRTFPFTIILKIKGEPLQIEPLRIKLDPGSRTTGIAIVNDRSGEVVFAAELSHRGHKIKESLDSRRAVRRSRRRRKTRYRKARFLNRRHHASWLPPSLESRVANVQTWVNRLARYAPISAMSMELVRFDMQLMENAEISGVEYQQGALAGYEVREYLLEKWNRKCAYCLKQGISLQIEHIVPRAKGGTNRVSNLTLSCEKCNTAKGTLDSAVFLKKKPAVLQRILAQVKKPLKDASAVNTTRWALYERLKATGLPIECGSSGLTKFNRTRKELPKAHWLDAANVGKSTPDVLFVKNIVPLLITATGHGRRQMCVTDSHAIGFPKQHKERHKTFLGYRTGDIVKAVTPKGTIRGRIAIRHRPSFRIGKVDIHPKYMRRLHRADGYEYQVKGVVALPPHS

SEQ ID NO: 16220 - protein, 292 aa, unidentified
MKDDLISGIDYQNGDMFGFWNVREFVLHRDGHKCQNPNCKHKDKKEQILKVHHIRYRSEGGSDRPENLITLCSKCHIPANHKKGKFLYDWCVNGKKVRGFKDATFMSMIRWYLVNELKSKHNNVSITYGYITKNHRIQNGIEKSHLNDAFAIAKGTNQARTKDRFLVIQDRLKNRSLEKFYDSKIIDIRTEKKVSGGDLNCGRSTRNKNLNTENLRKYRGAKISKGQRRIRKQKYFYQSNDLVKYDGKVYTVKGTQNEGKYIALKEIKKVPKVELLIPYVFKKGLNWSYGLC

SEQ ID NO: 16221 - protein, 420 aa, unidentified
MQYVYVLNKHGEPLMPCSPGKARLLLKQQKACVVKRTPFTIKLLYGSAGYKQPITLGVDAGSKHVGLSASTEKRELYCEEFTPRNDVVDLLSTRKQNRRSRRNRKTRYRAPRFDNRVHSMRKGWLAPSVEVKIQEHITVIKRICRILPITLVRVETAEFDTQRLKAMLEGKPLPVGTDYQLGEMYDEYNVRQYVLKRDHYTCQCCGAHTTTKKTVKLHVHHLESRKVGGNAPSNLITLCTTCHDALHKGKVSLDGKERGKPLRDAAFMGIMRKTLMARLRDELSIPVQGTYGYITKMRREQNDIKKSHVNDARCISKHPLAEPCSVCYRTKAIRHHNRQTHKANFSKGGIRKRSQMPYVVEGYRLWDKVLYKGQECFVSGRRASGSFTLKKLDGTRISKGVTFKKLRLLEPATNYLIERM

SEQ ID NO: 16222 - protein, 512 aa, unidentified
MSTVYVLNKDGKPLMPTTRGGHVRYLLKEKKARVVTSKPFTIQLLYETDDVVQPLYLGIDPGRTNIGVAVVKTDGTAVFTAHLETRNKEIPKLMQGRKKARRARRTNGRRCRRQRRAKANGTISKKCVKQTTAQNGSVSKRAKKIGVIKRHLPGCEKKVLCIGIKNKEAKFSNRTRPEGWLTPTANQLLQTHINLIKKIRKFLPVNDVVLEINKFAFMQLDNPNIQKWQYQQGPLYQKASLEEAVSEMQEHHCLFCKQSIVHYHHVVPQSENGSDTIGNIVGLCTKHHDLVHKDTAWQKKLAKKKTGLNKKYGALSILNQIIPALTKELSFLFPKHFFATNGKSTYDYRAAHGVSKDHWLDAYCIACSVLADDVCDNNISSHVPYELKQFRRHDRRALHKENMSRVHTLNGKSVATNRHKATEQTTDSLEEFRQRKPNDVCKLKVKEHHPEYRNPERNFPGCVFLVGKHTHVMQGTSGSHNGKADGYYDTNGNSYPSGKCKFVAKNKGIVFA

SEQ ID NO: 16223 - protein, 436 aa, unidentified
MTKTLTTQTTQACVLDQQGKPLMPTTRLGKVYRLLKTQKAHIVSYEPFTIQLDYEPDTRVIQPITLGVDSGAIHSGYSVANEHREYYSAEVIARNDISNRLSDRHMYRQNRRYRKTRYRKPRFNNRKNKKKGWLPPSLEQKVAVQVNEIDHLHRYFPIETIIVETAEFDIQKIKNPDISGIEYQQGTLQGYNIRNYLLEKHGRKCFYCGKAVSDFEVEHMFPKSKGGSNRIDNLTLSCHDCNEKKGTLTAEEFIQQTLPAKKATAKLKQLPQEKRLFKYMAYMNATRWALYDAIKERYPNVKMTYGYITKYNRIQAGLPKAHHIDAKCITGFSTVPSMSQTVVKVKMRRHNRQLHRATFSKGHVRKAASLPTKVFGFQLYDLVLYNNHRYYIKGRRSSGSFALVSVEGLKDEKRSYKKLTLLAHTNAYLTNHYVNA

SEQ ID NO: 16224 - protein, 424 aa, unidentified; identical to SEQ ID NO: 8578

SEQ ID NO: 16225 - protein, 512 aa, unidentified
MSTVYVLNKDGKPLMPTTRGGHVRHLLKEQKARVVRTKPFTIQLLYETDDVVQPLYLGIDPGRTNIGVAVVKADSTAVFTAHLETRNEEIPKLMQGRKKARRARRTNGRRCRRQRRAKANGTISKKCVKQTTAQNGSASKRAKEIGVIKRHLPGCEKDVLCIGIKNKEAKFSNRTRPEGWLTPTANQLLKTHINLVKKIRKFLPISDVVLEINKFAFMRLDNPNIQKWQYQQGPLYQKASLEEAVSEMQEHHCLFCKKSIAHYHHVVPQSENGSNTIGNIVGLCTKHHDFVHKDTAGQKKLAKKKTGLNKKYGALSVLNQIIPALTKELSSLFPKHFFATNGKSTHDYRIAHDVSKDHWLDAYCIACSVLPNDTCDRTINSRVPYELKQFRRHDRRALHKENMSRVYTLNGKSVATNRHKATEQTTDSLKEFRQRQPNDVCKLKVKEHHPTYRNMNRNYPGSVFLIGKQVHVMQGIAGSKDGEATTYKDTNANSIAAGKCKFVAKNSGILFV

SEQ ID NO: 16226 - protein, 544 aa, Actinomadura sp.
MATLDTRQQTHRRVLPQPAALESASVDTPGVGTKRGVDAAEAASGVHHGRGETTAAPPGGGGVTPGPSGAGEQGREARTRPPAVFVLDKHGTPLQPTTPARARKLLNAGRAVVARHTPFVIRLKDRTAERSQIDGVEVGVDPGSRHTGIAVFTARGGERRGRYAIRLDHRGAAITKKLRQRAAYRRGRRTRNLRHRPPRFSDRARPSGWLPPSLRHRVETTVSWIDRLTRWAPVRAVHVERVAFDTHALTAGRPLEGVEYQHGTLHGFEVREYLLAKFGRACVYCDAAGVPVNIDHVHPRSQGGSDRVSNLVLACIPCNRAKSDRPVQEFAPGRAAAIKARAKAPLRDAAAVQSTRWVLWRALDERLPTSVGSGGRTKWNRTRSRLPKSHTLDALAVGTLDSITGTVDTVLVAGCAGRGSYARTRTDRHGFPRLRLPRVKGFFGFQTGDLVRAVVPTGKKAGTHTGRVAVRATGRFNITTGTETVQGIGHRHVRLLQRADGYAYTTRPETRPEQPASRAGRLVSAQGGHTAPALLRRRSKSSSA

SEQ ID NO: 16227 - protein, 425 aa, Nodularia sp.; identical to SEQ ID NO: 3165

SEQ ID NO: 16228 - protein, 420 aa, unidentified; identical to SEQ ID NO: 3685

SEQ ID NO: 16229 - protein, 331 aa, unidentified
MVYVLDKYGHPLMPTERHGKVRRLLNSSKAKVIKRCPFTIQLMYESMTNTQDISLGVDAGSKHIGISATTTDKELYAADIELRNDIVELLSTRREARRARRNRNTRYRAPRFNNRKREDNWLAPSVRAKVVTHLKVVNGVQKILPVSKIIVEVASFDIQKFKNPNIFGAEYQQGKQLNFWNVREYVLFRDGHTCQCCKGKSKDKILNVHHIESRKTGGDSPDNLITLCETCHKGYHNGTLKLPKTIRRGMSFRDATFMGVMRWAFYNKLKELYPNVKMTYGYITKNTRIENDLPKEHYIDARCISGNPLARPLGYVYYQKKVRCHNRQIHK

SEQ ID NO: 16230 - protein, 474 aa, Lactobacillus sp.
MDNIVEGQQRNSALGLPMRIAAGNMIAGKGGKMEYENANRVFLLNKDGKPLMPCRPRKARLLLKSGKAFVVKKYPFTIQLKYGSYGYKQKVSLGVDTGQRHIGFAVTSQDKVLHQSEVELRQDVHTNLYTRKIYRRGRRNRKTRYRQARFLNRVHGKRDGLWLPPSVKGKASHNIAWIKRYLAVLPNPDLHIEVGKFDMAKMVNPAISGKQYQEGSLKDWKNYEYYVLARDKYTCQLCHKHGEGVKLVVHHIVYRSQGGTDRVDNLITLCTNCHTTKNHQPGGKLYKWMKAKKKVTKQLKGATFMNILRKRIMIAFPEASYQYGYQTFFERKKFNLPKGHFTDAIAISGIKSVGQMPETVAMISQFRKKKRSLHEATARKGRKEPNRTSKRNAKNTKHARGLWLNDYVHVIGTNLRGYVQSYTSKGAYVRLSDGLGNYVIKDGKNYISTKLCKLITHNGNWQKAEQKLLLYEFK

SEQ ID NO: 16231 - protein, 443 aa, unidentified
LTKDENRPSSRTTGLRAEQAEPAGIRKGDTLKVFVLNMRGKPLMPCSPAKARHMLKAGKAFVVRRTPFTIKLTIATGETKQDVTLGVDAGARHVGISATTEKEEVFASEVALRQDITGLLADRLAFRRARRNRKTRYRAPRFNNRVRSKHKGWLAPSVENRIQAHISRIEAVCRLLPVTKIVIETASFDIQKIRNPEVEGTGYQQGDQLGFWNVREYVLFRDGHICQHCRGRSKDPILNVHHLESRKTGGDAPNNLITLCETCHKAYHAGKIKLKVKRGQSFRAEAFMGIMRWTLLDRVRKTHPKLPVENTYGYLTKHKRIVLGLPKTHCADAFCITGNLNALRRGDFLFQRQTRKHNRQIHKCSILKGGVRKLNQAPFLVKGFRLFDKVRIGGQIGFVFGRRVRGTFNIRRLDKTVIGTDINCKKLSLLETRKTFLTELRKE

SEQ ID NO: 16232 - protein, 448 aa, Thiorhodococcus sp.; identical to SEQ ID NO: 9652

SEQ ID NO: 16233 - protein, 477 aa, unidentified; identical to SEQ ID NO: 8085

SEQ ID NO: 16234 - protein, 461 aa, unidentified
VQPLYLGIDPGRTNIGVAVVKTDGTAVFTAHLETRNKEIPKLMQGRKKARRARRTNGRRCRRQRRAKANDTISKKCVKQATAQNGSVSKRAKEIGVIKRHLPGCEKEILCIGIKNKEAKFNNRTRPEGWLTPTANQLLQTHINLVKKIRKFLPISDVVLEINKFAFMQLDNPNIQKWQYQQGPLYQKASLEEAVSEMQEHHCLFCKKPIAHYHHVVPQSENGSDTIGNIVGLCTKHHDLVHKDTVWQKKLAKKKTGLNKKYGALSVLNQIIPALTKELSSLFPKHFFATNGKSTYDYRSAHGVSKDHWLDAYCIACSVLPNDVCDSGINNRVPYELKQFRRHDRRALNNENMSRVYTLNDNVVATNRHKATKQTTDSLEEFRQNHPDDVCKLKVKEHHPTYRNMNRNYPGSVFLIGKQVHVMQGIAGSKDWEATTYKDTNANSIAAGKCKFVAKNSGILFV

SEQ ID NO: 16235 - protein, 499 aa, unidentified; identical to SEQ ID NO: 6993

SEQ ID NO: 16236 - protein, 582 aa, unidentified; identical to SEQ ID NO: 8788

SEQ ID NO: 16237 - protein, 451 aa, Ruminococcus sp.; identical to SEQ ID NO: 2424

SEQ ID NO: 16238 - protein, 404 aa, unidentified
LLKEKKAIVVRRTPFTIQLTIATGESKQPVSLGVDAGYKHVGLSASTEKAELYASEVELRQDITDLLSARRALRQSRRNRKTRYRAPRFDNRIRTKRKGWLAPSVENRINAHLSRIETVIRLLPVTKISVETTSFDMQLLKNSDIAGKEYQESEQLGFWNVREYVLFRDGHVCQHCHGRSKDPVLNVHHLESRRTGGDSPGNLITLCETCHKELHRGEITLKAKRGQSFRAETFMGIMRWEVLDRLKASHPKLEVQNTYGYRTKHARIVNGIAKSHCADAFCIAGNLGAERLGEFLFQKQTRRNNRQIHKLSILKGGIRKRNQVPFEVKGFRLFDKVACKGEEGFVFGRRSSGYFDVRKLDGTRISAGISYKKLRLLEKRQTYLTEIRKEEALPPLPEGRGLRA

SEQ ID NO: 16239 - protein, 408 aa, unidentified; identical to SEQ ID NO: 6729

SEQ ID NO: 16240 - protein, 514 aa, unidentified; identical to SEQ ID NO: 6277

SEQ ID NO: 16241 - protein, 415 aa, Bacillus sp.; identical to SEQ ID NO: 10988

SEQ ID NO: 16242 - protein, 454 aa, unidentified
LDTVAVISASGKKLMPTNSYRARRLLKSKRAVIYRYRPVFTIKLAGRTDGYTQPIEYKCDTGYQNIGISICSDTKEFVNEQRDLLKDEVKRHSDSRKYRRTRRNRLRYRKKRFDNRRSMISKDGFAPSIRNKRDVHVRLYEEYYKVFPITKAVFEMGQFDTQVLKAVEAGLPIPDGTDYQRGEQYGYATLREAVFARDDYKCICCGKSAIKDGVKLRIHHIGYLSGDRSNRMANLGSVCENCHTSKNHKPGGKLYNLKPELKTFKGATFMTTVRYSMVKKLKVMTPTVDIKVTYGAATKLARKDLNVRKTHSNDAYCMGEFHPKHRSDFKHYKKCRRNNRVLSRFYDAKYRDLRDGSVKTGSQLSCGRTNRRIPRHTELNERIYRGHKISKGKLVVRRQHYQYRPGDTVWAEGKRCTVKGIISNGTRIALNERNPVSVNKIDKTVHTGGWAKAS

SEQ ID NO: 16243 - protein, 434 aa, unidentified
MSIVYVLGMNGQPLMPTRRSGWVYRALRDGRAKVVSKCPFTIKLLYESTNFIQPLTLGVDTGSKYVGSAVVNDETSKVLYESQTELRDDIKSKMDRRRQFRRTRRNRLRYRPARFNNRRASKHKERYNPTLIAKFQGHKREIEFIKSILPISSLVLEVGEFDTQLLQDTSLAYRKWGYQKGELYQQENFKQAARARDNYRCQCCGKKDCRLEVHHLLPRSKGGSDKLANLITLCTDCHHLAHSSEEQLLAFQKRFGKKAKGTLRYATQMNVLRHMLQREYPNAEITYGFITKEVRRIFSIEKTHATDACCIASRGILFKNKNSNKYKKKCVANGDYARTDVCRGKFVILPKGKIAGFRRYDKVLHDNKEYFVVGRESVGYVYLIDIDNNRLQVERTRRNTGEKYISKAKIKASLVKKITGVKSCICVENYLNRL

SEQ ID NO: 16244 - protein, 414 aa, unidentified
MPCSPAKARLLLKEKKAIVKRRTPFTIQLTIATGESKQPVSLGVDAGYKHVGLSASTEKAELYASEVELRQDITDLLSARRALRQSRRNRKTRYRAPRFDNRIRTKRKGWLAPSVENRINAHLSRIEAVLRLLPVTKITVETASFDLQLLKNPDISGKEYQEGEQLGFWNIREYVLCRDGHVCQHCYGRSKDPVLNVHHLESRRTGGDSPGNLITLCETCHKALHRGEITLKAKRGQSFRAEAFMGIMRWEVLNRLKASHPELEVNNTYGYRTKHARIANDIAKSHCADAFCIAGNLGAERLGEFFFQKQTRRNNRQIHKLSILKGGIRKRNQAPFEVNGFRLFDKVACKGEEGFIFGRRSSGFFDVRKLDGTRISAGISYKKLHLLEKRRTYLTEIRKEEVLPPLPEGRGLRA

SEQ ID NO: 16245 - protein, 442 aa, Sutterella sp.
MSTSVFVLDKKHRPLMPCRPARARRLLRAGRARVVKRFPFVIRLVDRTLEKSEVQPVLIKLDPGSRETGAAVVREDEKKRHHALAFFVIKHRGGVIRDALKARSAFRRRRRSQNLRYRTPRFLNRVRPKGWLPPSLRHRVDTTLSVVRKLCRYLPVSGLAMELVKFDSQKLQNPEVAGVEYQQGTLFEYEVREYLLEKFDRKCGYCGAEGVPLNIDHVVPRAKGGSNRVSNLVLACVDCNQKKGARSLEDFLKGKPEVLARVRQALKTPLRDAAAVNATRWVLFNELKATGLPVETGSGAQTKLNRHAFGVGKEHWLDALCVGRINGVVIPKGLNVLEIKCAGRGSYQRTRLTKYGFPRGYLMRQKRIHGFATGDMVEANVPKGKKAGLWRGRVAVRASGSFNIQTPKGVIQGVGWKYCRLISHNDGYGYAWLGHAPHSSPA

SEQ ID NO: 16246 - protein, 465 aa, unidentified
MSTCVCVLSNSGERLMPTIRLGKVRRLLKDGKAKIIKHHPFTIQLLYDSKANTQPIEICEDVGYNYIGISVKSQSHEYVSAQYDTLQDEKACHDSCRKLRRTRRNRLRYRKPRFDNRKRGEGWLAPSLEHKKQLNIRLIERYVSVIPITHATVEVGSFDTMLVKAIEEGKATPESADYQKGPRYNLATLREAVFYRDNYICKVCGRKATEGAILHMHHMFYWKGRHGDSLSELITVCEKCHTPANHQKSGKLYGFGENVKFADLSGAAFMNTVRWQIVNELYAAFGKDFVTVTYGAMTKEKRIALHLEKSHNNDAYAMGSFHPVNRCAFEHYEKVKRNNRILEKFYDSQYIDTRTGELTNGKSLFNGRISRSHKKDSENLHKYRGKRICKGHRALRRKKLALNPGDLVSLNGEILVVHGTHTKKNGSVNVEFKTPSRGGKKSASLKKLKIVKTSNLMHSAWTKVS

SEQ ID NO: 16247 - protein, 408 aa, unidentified; identical to SEQ ID NO: 5302

SEQ ID NO: 16248 - protein, 462 aa, unidentified
MSVLVIGRNGRALMPTNPRKARLLLKKKTASVVCRHPFTIQLLYKTGCATQKGSIGIDTGSQHIGVGITCGDKVILKDEHALRSSMEKRSLLATRAVMRRGRRYRKVRYRKPKWRHHTKRMYFEKANRRGQHWRKVKTTTQSPRPKGWLPPSLQSKCDHHFCIIDRYLKYLPDPITRNLVIETGRFDMARMNDPTIHGEMYQRGPMYDAENLRAYIFARDNYQCACCKAKAGTTRKADGTTVKLVAHHILFRSRGATDNPKYMVSVCDHCHTTKAHQPGGILYSWMENNKKVARGLRDATFMNILRKRLFARYPQAAFTYGNITATDRKQLRLPKSHANDAVAISLFGKEASTVKNICQTMHYKQIRKSKRSLHEAIPRKGRKNPNTKAVRNKKNTTQVNGFKLWDSVLANGKKLFICSFTGTSAYLIDKNGCYISQPGKTYKQWPLSKLKRLHPNGNWLMA

SEQ ID NO: 16249 - protein, 433 aa, Lactobacillus sp.
MQNRVFVINKHGKALMPCKPRKARILLRDGKAKVLKKEPFTIQLLYGSAGYKQDISIGIDSGQRHIGLAVTSQDKVLFQGEVELRQDVKKLIDTRRIYRRSRRNRKTRYRKARFLNRIASKKDNWLPPSVASKVNHNINWIKRLLSVLPKADLHIEVGKFDMQKMKNPAINGEGYQQGDLYGYQTVKQFVLARDNYTCQVCKKKGGRLKIHHIIYRSLGGTNTVDNLITVCSNCHTTKNHQTGILAKWCKDKKKVNKSYKGATFMNILRRSLYTAFPQAKFQYGAWTTLQRADLELTKSHYNDAVAISGIRKIQAKPTSIMMFKQFRKKKRSLHEATARKGRKTPNITSKRNAKNTKYAKGFWLNDYVKIKDSNKKGYISGFSKTTCYIKDIFGNYLTTSNKYKQVALSKLDRLSHHNNWSKQEINENVYQMN

SEQ ID NO: 16250 - protein, 512 aa, unidentified; identical to SEQ ID NO: 12631

SEQ ID NO: 16251 - protein, 413 aa, unidentified; identical to SEQ ID NO: 5705

SEQ ID NO: 16252 - protein, 413 aa, unidentified; identical to SEQ ID NO: 3476

SEQ ID NO: 16253 - protein, 424 aa, unidentified
MVVMNVVYVLSPDRVPLMPCSCAIARLLLKQGKAKVVRRTPFTIKMYTQPVDTHTQPLTLGIDTGSAVIGSAVSDECGNILYVSEVEVRNDIAQTMKKRATSLRNRRYRKTRYRPARWLNRRNSLKTGRFSPTMTSKTEAHLREIRFVQSLLPIQSIVLETGTFNPHALKHPAVLQNKWMYQKGINYGLANTKAYVLTRDGYVCQRCKGQSKDRRLEVHHIVFRSQQGSDEEANLLTLCKTCHDGLHAGTVTLKQKGKRKGNLLHATQMNSIRIQLLSRVEAIETWGFVTKEHRLLAGLPKEHIFDAAMIATRGNIPVFQTTEVLLKKCISDGDYQQTKGKHSQQRIPTGKIAGFRKFDKVRYLGVEYFIKGRMSTGYAILMDLSGNKLALKPTPKFDNMKRVSARSSWIINQKAMPSFSSSPT

SEQ ID NO: 16254 - protein, 424 aa, Symploca sp.
MFVLTVDKNRNSLNPTHAARARRFLKEGRAVVLRRYPFTIMLKEVEGSNALEYRLKLDPGSKTTGIAVVTDDRVIWGAELHHRGYSIKQSLESRRALRRGRRNRHTRYRQPRFDNRARADGWLAPSLQHRVLTIKTWVERLRRFCPISAISMELVRFDIQLMQNPEVSGVLYQQGELVGYEVREYLLEKWGRKCAYCHKEGVPLEVEHIQPRSKGGPNRVSNLTLACTKCNQRKGNKPVEQFLSRKPELLKGILAAAKRPLKDAAAVNSTRWALYRALKQTGLAVETGTGGRTKFNRTSQELPKTHWLDAACVGSSISERLKVLVAKPLAITATGHGTRQMCRTDKFGFPSRYVPRYKFVKSFQTGDIVKAIVTVGKKIGTYVGRVAVRSTGSFNISTVNGLIQGISHKYCKHIQKKDGYSYAH

SEQ ID NO: 16255 - protein, 420 aa, unidentified
MQYVYVLNKHGEPLMPCSPRKARLLLKQKKACVIKRTPFTVKLLYGSTGYKQPVTLGVDAGSKHIGISATTEKHELYREEATPRNDVVDLLSARRAFRRSRRNRKTRYRAPRFDNRVHSKHKGWLAPSVEVKIQEHITLVEHVCRILPVTLVRVETAEFDTQRLKAMLEGKPLPVGTDYQLGEMYDEYNVRQYVLKRDNYTCQCCGAHSTKTKGVKLHAHHIETRRTGGNAPNNLITLCTACHKALHAGKVTLDGKKRGKPLKDAAFMGIMRKTLMERLRKELKIPVQGTYGYITKCLREKNGIPKSHTNDARCISKNPLAIPCDTCYYTKAVRHHNRQLHKATILKGGIRKANQAPYIVKGYRLWDKVAYNGTECFITGRRTSGYFALKELDGTVVSNSISYKKLRLLEAATNYITERK

SEQ ID NO: 16256 - protein, 423 aa, unidentified; identical to SEQ ID NO: 4024
  source 1..423: note = Lachnospiraceae bacterium UBA2727

SEQ ID NO: 16257 - protein, 414 aa, unidentified
MVYVINKQGQALMPTERFGKVRRLLKNSLAHVVCRIPFAIQLDYDTTDYTQPVSLGVDAGSKHIGISATTSEKELYAADVELRNDIVDKLSTRREQRRTRRGRLRYRKARFNNRVSSKRKGWIAPSIENKIQTHLTIVEKIHKFLPITNIVVETASFDIQKINNPSIYGSEYQQGEQLDFFNVREYVLFRDNHICQHCKGKSKDKVLNVHHIESRKTGGDSPKNLITLCETCHKAYHRGEFELNVKRGKSFRDAAFMGIMRWSFYDRLKNIYPNVSMTFGYITKNTRITNNLPKDHYVDARCISGNPVAKPLGYYFYQKKVRCQNRQIHKANFLKGGRKKLNQAPFLVKGFRLFDLVEYQKDLYYIFGRRDRGFFDIRKLDGIKVNKGSINYKHLRLIDKRKSILTEKRTQVNL

SEQ ID NO: 16258 - protein, 450 aa, unidentified; identical to SEQ ID NO: 2935

SEQ ID NO: 16259 - protein, 512 aa, unidentified; identical to SEQ ID NO: 13894

SEQ ID NO: 16260 - protein, 418 aa, unidentified; identical to SEQ ID NO: 8891

SEQ ID NO: 16261 - protein, 408 aa, unidentified; identical to SEQ ID NO: 6232

SEQ ID NO: 16262 - protein, 415 aa, Ruminococcus sp.; identical to SEQ ID NO: 4916

SEQ ID NO: 16263 - protein, 442 aa, unidentified; identical to SEQ ID NO: 7529

SEQ ID NO: 16264 - protein, 456 aa, unidentified; identical to SEQ ID NO: 3676

SEQ ID NO: 16265 - protein, 427 aa, unidentified; identical to SEQ ID NO: 10893
  source 1..427: note = Cyanobacteria bacterium UBA8543

SEQ ID NO: 16266 - protein, 470 aa, unidentified
MSVFVVGLNGCRLMPTSERKARLLLKQGKAFVEQKVPFRIRLNYKTGSTTQLGYLGIDTGSQHIGVSVVREDGTVLHKEEIGLRDSMSKRKLLEAKASLRRGRRYRKTRYRHPKWRPKTKRVYCEVPDRKGRHWQKKKITFTSKRPKGWLPPSLQSKTDHHIRWIKKLQDLLPEGYRLSIELGRFDPARMKNPEIHGDLYQKGPQYDYENVRAYVLDRDRYTCQICKKKGGKLHVHHILYRSHGATDDPQYMVTVCSDCHSAQNHLPGGILYQWMQEQKRFSRGLRDATFMNILRKRLIRAFPEAVFTYGNVTKVDREKLKLPKSHGNDATAIALVKTGITAVKDKESVICIQQVRRKKRSLHEETPRKGRKEPNRTAARNNKNTKAVTVTKRQNKKKVSMTGCLFDRVELNGKKGWISGFTGKSCYVKDADDQYLSTSPKYKQVSLSKLRILHHCGNWIIGAKKTLGKG

SEQ ID NO: 16267 - protein, 406 aa, unidentified
MVYIQDIDGKPMMPTTRHGKVRRLLKDSKAVVVNTCPFTIKLMYKTSGYKQEIVLGVDAGTKHVGLSATTKSKELYSSEVILRSDIVELLSTRRESRRTRRNRLRYRKPRFNNRIKSKRTGWVAPSVRHRIDAHIRVIDNICSILPVSRVIVEVAQFDTQKIKNPDISGDEYQEGDQLGFWNVREYILARDGHKCQHCKGKSKDPILNVHHIESRKTGGDSPSNLITLCETCHKEYHKGNIDLKVKRGKSLRDAAVMGIMKWKLYDELKSRCDNVSMTFGYITKYNRIKYGIEKSHTSDAFVISRNFNAKRIERQYLKRLIRRHNRQIHKMKISKGGKKKNNQAPFEIFRFRLFDKVLYNNEILFVYGRRKSGNFNIRDFNGENPKDVSHKKLKLIRGKRHLIILK

SEQ ID NO: 16268 - protein, 450 aa, unidentified; identical to SEQ ID NO: 2935

SEQ ID NO: 16269 - protein, 326 aa, unidentified; identical to SEQ ID NO: 7203

SEQ ID NO: 16270 - protein, 350 aa, Aphanizomenon sp.; identical to SEQ ID NO: 7152

SEQ ID NO: 16271 - protein, 454 aa, Streptomyces sp.; identical to SEQ ID NO: 9429

SEQ ID NO: 16272 - protein, 431 aa, unidentified; identical to SEQ ID NO: 4463

SEQ ID NO: 16273 - protein, 389 aa, unidentified; identical to SEQ ID NO: 11598

SEQ ID NO: 16274 - protein, 437 aa, unidentified; identical to SEQ ID NO: 6287

SEQ ID NO: 16275 - protein, 426 aa, unidentified
LAKDHYRSIDREETNLRVYVLNKRGEPLMPCSAAKARILLKEKKAKVKRRTPFTIQLTIATGETKQPVTLGVDSGYRHVGLSASTEKAELYASEIELRQDIPELLAARRALRGARRSRKTRYRAPRFDNRKRDKGWLAPSVENRIGAHVSRVEAVLRILPVTKIIVETASFDVQRIKNPDVQGVEYQEGEQLGFWNVREYVLFRDGHECQHCHGKSKDRVLNVHHIESRRTGGDAPNNLITLCETCHKAFHRGEFELKVKRGRSFQAEAFMGVMRWTFFERLRARHPEIEVRNTYGYLTKDTRIANKIEKSHCADAFCIAGNLKAKRLGYYFFQKQTRRHNRQIHKLTILKGGVRKRHQTPYEIKEFRLYDKVLYRGKTAFIFGRRSSGYFDIRTLDGERISAAVNSKKLRLLEKRRTFLIELRRN

SEQ ID NO: 16276 - protein, 466 aa, unidentified
MSTCACVLSKNGERLMPTIRLGKVRHLLKDGKAKIIKYHPFTIQLLYDSKTDTQPIEICEDVGYNYIGISVKSESHEYVSAQYDTLQDEKDCHDDCRKMRRSRRNRLRYRQTRFDNRKRGEGWLAPSLEHKKELNVNVIKMYCEVAPITHATVEVGSFDTMLVKAIEEGKAAPEGVDYQKGPRYNLATLREAVFYRDNYTCQVCGREAQKDSAILHVHHMFYWKGRHGNSLSELLTVCEKCHTPANHQKGGKLYGFGENIKFSNLSGAAFMNTVRWQIVNELYTAFGKPFVTFTYGVMTKEKRIALNLEKSHNNDAYAMGSFHPADRCAFEHYEKVKRNNRILERFHDSQYIDIRTGKVTNGKSLFNGRINRSHKKDSENLHKYRGKRIRKGYRALRRKKVALNPGDSVSFNGEILIIQSTHTKKNGSVNVEFKTPSKSGKKSASLKKLKIVKMSNSMHSAWTKVS

SEQ ID NO: 16277 - protein, 442 aa, unidentified; identical to SEQ ID NO: 3234

SEQ ID NO: 16278 - protein, 456 aa, unidentified; identical to SEQ ID NO: 13627

SEQ ID NO: 16279 - protein, 442 aa, unidentified; identical to SEQ ID NO: 8963

SEQ ID NO: 16280 - protein, 413 aa, Clostridium sp.; identical to SEQ ID NO: 4134

SEQ ID NO: 16281 - protein, 460 aa, unidentified
VAVFVLDRNGKPVMPCTEKRARLLLERGRARVQRVLPLVIRLVDRTVDSCTFQPLRLKLDPGSKVTGLALVREFSVGIAVLNLFDLMHRGRQISEALTARASMRRGRRGRNTRYRAPRFLNRRKPKGWLAPSLQHRVDTTMAWVNRICRWAPVTALSTELVRFDMQAMENPEVSGIEYQQGTLAGYELREYLLEKWGRQCMYCDKEGVPLQVEHIHARASGGSNRPSNLGISCQPCNQKKAARDVRELLKKDPARLARILAQAKRPLKDAAAVNSTRWALLNSLKTTELAVEASSGGRTKYNRCRLDVPKTHALDAVCVGEVEAVTDWRRPTLAIKATGRGSYQRTRMDKYGFPRGYLMREKSVEGFQTGDMVRATVTKGGKVGKYVGRVAVRASGNFNIQMSKEVVQGINHRYCTMVQRADGYGYSFNMDSNISAGAGHASRAALSLPGINAGISRAKA

SEQ ID NO: 16282 - protein, 277 aa, unidentified
MPNKVYVINKHGRPLMPCSPAKARHLLDEGKAKVKKRTPFTIQLVYGSSGYTQEVILGVDAGSKTIGMSASTTKEELLSAEVKPRNDVVDLLSARREFRRARRNRKTRYRKPRFDNRVRSKHKGWLAPSVEVKIQEHITSIKRVCRILPVSKVVIETAEFDLQMLKTIADGKPVPQGEDYQKGEMYGHYNVRQYVLWRDNYTCQCCGAHATKKKEVRLHVHHLESRKTGGDAPDNLITLCESCHEKLHKGVIAEGDCKSVSVVPHGMPHSWASCGRL

SEQ ID NO: 16283 - protein, 512 aa, unidentified
MSTVYVLNKDGKPLMPTTRCGHVRYLLKEKKARVVASKPFTIQLLYETDDVVQPLYLGIDPGRSNIGVAVVKTDGMAVFTAHLETRNKEIPKLMKKRKDSRRARRTNGRRCRRQRRAKANGTISKKCVKQTTAQNGSVSKRAKEIGVIKRHLPGCEKDVLCIGIKNKEAKFNNRTRPTGWLTPTTNQLLQTHINLVKKIQKFLPISDVVLEVNKFTFMQLDNPNIQKWQYQKGPLYQKESLKSAVSEMQEHHCLFCKKKIDHYHHVVPQHKNGSNTIDNIVGLCTQHHDLVHKDATWQKRLAKKKTGLNKKYGALSVLNQIIPALTKELSSLFPKHFFVTNGKSTYDYRAAHGVSKDHWLDAYCIACSVLPNDTCDKTINSCVPYELKQFRRHDRRALNNENMSRVYTFNGKMVATNRHKATEQTTDSLEEFRQRQPNDVCNLKVKEHHPTYRNMSRNYPGSIFLVEKQVHIMQGIAGSKDGKATTYKDTNANSIAAGKCKFVAKNSGILFV

SEQ ID NO: 16284 - protein, 465 aa, unidentified
MSTCVCVLSNSGERLMPTIRLGKVRRLLKDGKAKIVKHHPFTIQLLYDSKTNTQPIEICEDVGYNYIGISVKSESHEYVSAQYDTLQDEKKHHDDCRKYRRTRRNRLRYRKPRFDNRKRSEGWLAPPLEHKKQLNIRLIERYVSVIPITHATVEVGSFDTMLLQAIQKGKSKPEGVDYQKGPRYNLATLREAVFYRDNYTCQVCGRKIADGVILHMHHMFYWKGRHGYQLDELVTACEKCHTPANHQKGGKLYGFGEDIKFANLSGAAFMNTVRWQIVNVLYAAFGKPFVTFTYGAMTKEKRIALHLEKSHNNDAYAMGSFHPVNRCAFEHYEKVKRNNHILEKFYDSQYIDTRTGELTNGKSLFNGRISRSHKKDSENLHKYRGKRICKGHRALRRKTLALNPGDLVSLNGEILVVHGTHTKKNGSVNVEFKTPSRGGKKSASLKKLKIVKTSNSMHSAWKKVS

SEQ ID NO: 16285 - protein, 415 aa, unidentified; identical to SEQ ID NO: 2674

SEQ ID NO: 16286 - protein, 418 aa, unidentified; identical to SEQ ID NO: 13450

SEQ ID NO: 16287 - protein, 506 aa, unidentified
MVAVLSNVGKPMMPTTEYKARKLIEKGRAIPYQYKPMFTIMILDRSGGYTQPIELKEDTGYEHIGISVCSQKHEYERKEIITLLDEPEKHHDARMHRRTRRNRLGYRPPRFDNRKRENGWIPPSLQHKIDIHLYWFNQYAEVLPITDAVFEIGTFDTKRLNAIEKGEKLPYGEDYQKGEQADFYTLRDAVFARDDYTCVVCGKGIQDGAVLRTHHVGYRHGDRSNRMSNLVTVCDHCHTTKNHQEGGALYDLKAPTKKKANAAFMNVARQRIIDCAKKSHPEINISCAFGSETKMSRKNLQIEKSHTNDAYAMGEFHPKHRCRETIYQKVRRNNRILSRFYDAKYIDRRDGLTKTGKQLSSGRTNRNHKLDSENFRVYRGKKIQKGRTATRQQVYEFKTKDIVLYQGKRYVVKGTNNKGQNVQLYLNMTADLKDLTIKTKNKRKTADPNRIEVGDKVFTEFNGKKKVFTVKNIDPTTNQVSLQADLSTKPSELKLVKYSNGYKQIK

SEQ ID NO: 16288 - protein, 456 aa, Halomonas sp.; identical to SEQ ID NO: 10060

SEQ ID NO: 16289 - protein, 489 aa, unidentified
MAMVYVQNKDGKPLMPTTRYCYVRLLLKEKKARVVCTTPFTIQLNYDTPDITQDLILGIDPGRTNIGVAVVKEDGQCVFSAHLETRNKDIPLLMKKRAGFRRQHRTLDRRRKRQRRARAAGTTIAEGSVERLLPGYEKPVVCHYIRNKAARFNNRSRPAGWLTPTANHLLQTHINLIAKVAKFLPITKVVVELNRFAFMAMDNPNIHRWEYQQGPLYGLGSVEDAVYAQQDGHCLFCKKPIDHYHHVIPRHKGGSETLANRCGLCAKHHDLVHKDKAWADKLVTRKEGMNKKYHALSVLNQIIPFLMEYLGSETLYDVYAIDGRSIKGFRIAKNVPKEHYTDAYCIACSILDTDNKVSAPVEPFELKQFRRHDRQACIRQMVDRKYLLHGKVVAANRHKAFEQKSDSLQEFREAYSDVAVSQLTVKPHPPQYKDMSRIMPGAVMDFDGIVGVMQSSIVGQFYKSTKGHKATPKRCVLLSQNAGMVFIPT

SEQ ID NO: 16290 - protein, 421 aa, unidentified; identical to SEQ ID NO: 4235

SEQ ID NO: 16291 - protein, 337 aa, unidentified
MPKVYVLNRHGRPLMPCTPAKARHLLDAGKAKVRHRTPFTIQLLYGSTGYTQEVILGVDAGSKTIGLSAATETEELFSAEVKPRNDVVELMSARRQFRRARRNRTTRYRKPRFDNRVRSKHKGWLAPSVEVKIQEHMTAIRRACAILPVSKVVVETAEFDLQLLKAVAEGKPVPQGEDYQKGEMYGHYNVRQYVLWRDSYTCCICGAHGSVRKGVPLHVHHLESRRVGGDAPDNLVTLCTACHDKLHKGIIMVADIKKRKRRSTRDTTFMGIMRMTLLRRLWEQLPVPVVETRGYITKATREKLLVLPKSHTNDALAIAQNICQISVRRTDFTPSAL

SEQ ID NO: 16292 - protein, 406 aa, unidentified; identical to SEQ ID NO: 2973

SEQ ID NO: 16293 - protein, 470 aa, unidentified; identical to SEQ ID NO: 2825

SEQ ID NO: 16294 - protein, 451 aa, unidentified
MSVAVMSKTGMQLMPTSEYRARKLLKSKKATVYGHNPFTIQLTERETGDVQPVELCMDTGYLHIGTSVKSEKHEYLGVQIDTLTDEKQKHDACRMYRRQRRGRKRYRQSRFNNRKRSDGWIAPSLEHKKDIHIQTISRICNAMPITNITLEMGNFDTQVLKALEKNRPLPQGTDYQHGERYGIATLREAVFARDKYTCQCCRRTIADSAILHVHHIIYRSRGGTNRMSNLATVCDGCHTPANHKPGGRLYNWKPKIASFKGATFMTAVRWKMYNEVKSKFSNIKIHITYGAKTKEQRRAFDITKSHVNDAFVMGQFHPKHRSRPICYKKKRRNNRCLEKFYDAKYIDSRDGKKRSGQELFNGRIDRNHKKDSENLHQYRQQKVSAGRRTIRKQHHSIQPHDIVVFNRQQFETSGCHCNGARAILLPQKKSVAIKKLSIHKYAGGYFKSDFT

SEQ ID NO: 16295 - protein, 466 aa, unidentified
MKVLVIGRNGLGLAPTTPRKARILLKEKRAEVAYRQPFTIRLKYKTGCAHPKMCLGEDTGSQHIGFAILTEKGQVLDKTEYELRSTMEKRSLLETRKEYRRGRRYRKVRYRHSKFHPTTKRLYVEKPIKYNKHTTHWKKQTNSFDSSRPEGWLPPSIQSKLDHHIRLTSRYKEALPPDTMIRIEVGRFDVAHMKDPTINGKMYQQGPMYESENVKAYVFARDSYTCKCCKAKAGSIRKDGTQVKLKAHHIDFRSKGATDNPERMVSVCDRCHTTAAHQLGGILYQWMIEGKKFSRGYRDPAFMNILRRRMWKAFPEAAFTYGNITAADRKGLLIEKSHANDAVAIAAHGMELIRNSTETTFYKQLRKQKRSLHEATPRKGRREPNRTAKRNRKNTCVVKGWYLNDKVTVFGKTGWISGFSGKSSVYIRDCENEYITVPGKNYKLVPISQIKMITHCNNWAVYTKIA

SEQ ID NO: 16296 - protein, 426 aa, unidentified
MVYVQDIDGKPLMPTTRHGKVRRLLKSNKAVVVNLCPFTIRLTYISDSYKQEIVLGVDAGTRHVGLSATTKSKELYSSEVILRNDIVDLLSTRRESRRTRRNRLRYRKPRFDNRVKNKRQGWVAPSVRHRIDAHIRVIDNVCSILPISRIVIEVAQFDTQKINNPEISGKEYQEGNKLGFWNVREYVLCRDGHKCQYCKGKSKDSILNVHHIESRKTGGNSPSNLITLCETCHKEYHKGNIDLKIKRGKSLRDAAVMGIMKWRLYEELKSKYDRVSMTFGYVTKYNRINHDIEKSHVSDAFVISKNFNAIRLGYYYKVKLVRRHNRQIHKQKIQKGGIKRLNQSPFEVFGFRLFDRVMFENSYYFIFGRRKTGSFDIRDIDGKRQKNITYKKLKLSRCKRFMIQMELNKKTRTCFENERNSDRDAA

SEQ ID NO: 16297 - protein, 408 aa, unidentified; identical to SEQ ID NO: 11651

SEQ ID NO: 16298 - protein, 459 aa, unidentified
LRQAIKSSEGKERCRLHQTPSNIDEGCLLPERAWRQNLRVFVINQRGKPLMPCSPAKARVLLREKKARVKRRTPFTIQLTTATGEARQDVSLGVDAGYRHVGLSASTEKAELYASEAVLRDDITDLLSARLALRRARRSRKTRYRAPRFLNRVHSKNKGWLAPSVEQRIASHLKLVENVCRLLPVTKITVETASFDMQAIKNPDIKGAEYQQGEQLGFWNVREYVLWRDGHQCQHCRGKSGDPILNVHHLESRRTGGDAPNNLVTLCETCHKAYHAGRIDLKLKRGRSMRAEAFMGIMRWTFFNRLKEIHSGKTVENTYGYLTKHTRITHGIEKSHCADAYCIAGNLRAERLPDYLWQKQVRKHNRQIHKLTIGKGGIRKRQQTPFEVKGFRLFDKVRLGDEEGFIFGRRSSGYFDVRRLDGQKLSAGVSFRKLHLLEKLTTYLTVLLPRLKTRVSAPE

SEQ ID NO: 16299 - protein, 369 aa, unidentified
KIGVIKRHLPGCEKEVLCIGIKNKEAKFNNRTRPAGWLTPTANQLLQTHINLIKKIQKLLPISDVVLEINKFAFMQLDNPNIQKWQYQQGPLYQKANLEEAVSEMQEHHCLFCKKKIDHYHHVVPQHKNGSNTIDNIVGLCTKHHDLVHKDTAWHEKLTKKKTGLNKKYGALSVLNQIIPALTKELSSIFPKHFFVTTGKSTYDYRAAHGVSKDHWLDAYCIACSVLPSNVCDSNINNHMPYVLKQFRRHDRRVLNNENMNRVYTLNNKAVAINRHKAKDQKTVSLEEFRKEHPDDVCKLKVKEHHPTYRNMNRNFPGSVFLVGKQIHVMQGIASSKDGKATKYNDTSATAIAAGKCKFVAKNTGILFV

SEQ ID NO: 16300 - protein, 431 aa, Ktedonobacter sp.; identical to SEQ ID NO: 3598

SEQ ID NO: 16301 - protein, 476 aa, unidentified; identical to SEQ ID NO: 11165

SEQ ID NO: 16302 - protein, 453 aa, unidentified; identical to SEQ ID NO: 11894

SEQ ID NO: 16303 - protein, 420 aa, unidentified; identical to SEQ ID NO: 6836

SEQ ID NO: 16304 - protein, 431 aa, unidentified; identical to SEQ ID NO: 2831

SEQ ID NO: 16305 - protein, 512 aa, unidentified; identical to SEQ ID NO: 10560

SEQ ID NO: 16306 - protein, 442 aa, unidentified
MSTSVFVLDKKHRPLMPCRPARARRLLRAGRARVVKRFPFVIRLVDRTVEQSEVQPVLIKLDPGSRETGAAVVRDDEKKRHHALAFFVIEHRGGAIRDALKARSAFRRRRRSQNLRCRSPRFLNRVKPKGWLPPSLRHRVETTLSFVRRMCRYLPVSGIATELVKFDSQKLQNPEVSGVKYQQGTLFEYEVREYLLEKFGRKCVYCGAEGVPLNIDHVVPRAKGGSNRVSNLVLACVSCNQKKGARSLEDFLKGKPEVLARVRRELKTPLRDAAAVNATRWVLFNELKATGLPVETGSGALTKLNRHAFGVEKEHWLDALCVGRLNGVVTRKGLNVLEIRCMGRGSRQRTRLTKYGFPRGYLMRQKCVHGFATGDMVEANVPKGKKAGLWRGRVAVRVSGSFNIQTPKGVIQGVGWKHCRLISHNDGYGYAWLGHAPHSSPA

SEQ ID NO: 16307 - protein, 414 aa, unidentified; identical to SEQ ID NO: 2588

SEQ ID NO: 16308 - protein, 537 aa, Planomonospora sp.; identical to SEQ ID NO: 3554

SEQ ID NO: 16309 - protein, 418 aa, unidentified
MLNNQKEYAFVLDAEGKKLDPTIIQNAWRLVRQKKATLIAKRPMTIQLKKVIDNPNDDEIRMGIDDGAKHIGLALVQKCKTKNKVIFIATMEQRNDVHKLMEQRKNYRRYRRYWKRYRKARFSNRVSVRRKGRIAPTILQKRQAVVRIFDRLNKYIRIDSIYLEDVAIDVRVLTDEKRLYSWQYQQSNRLDENLRKATILRDNCKCQLCGKRNCRLEVHHITPRRMSGANTIGNLITLCSECHSNVTGREMEFAEQLYSKIGKKKNNVSLQYASHVMVGKTWLREELSKRVPVFLTTGGDTANKRIDWNLEKSHEIDAVCITNLEPESVGVKSWNIKPLRHQRKTMKVKEILGFRHRDIVYYTFKNGEYHEGYVTALYPSEGKQKEGLNFLSPTKHCKRVNPKKCQRLDRPDKFLWLV

SEQ ID NO: 16310 - protein, 493 aa, unidentified; identical to SEQ ID NO: 2644

SEQ ID NO: 16311 - protein, 415 aa, Bacillus sp.
MRVFVKNLREKPLMPCSPRKARLLLKQRKAKIVKYTPFTIQLLYATGETVQPVTIGIDSGAKQIGIAITTEEKVLVKGIVELRQDIKENLTLRATLRRSRRQRKTRYRKARFLNRKKKEGWLPPSIQSRVDNQIHWIETFRSLLPSPKVIVEVGKFDAQKLKNLDIQGIEYQQGDAFGFWNIRYYVFARDQYTCQICKKKGGILHTHHIIERCNGGSDMADNLVTVHEECHQKFHQGIIKHVFKKPKQYKETAFMNILRLQIMKRLDCEITYGSYTTPRRKELGLAKTHANDALAITNPTKLQEYDQSGEFRIKQFRKKKRSLHEATARKGRKTKNASAKRNNKNTPHVDGIYLGDKVKVFGQVGFVTGFTGKMVYVQDINGQYIQNPSKSYKQVKISDMECIHHTNNWQFLQIS

SEQ ID NO: 16312 - protein, 455 aa, unidentified; identical to SEQ ID NO: 11536

SEQ ID NO: 16313 - protein, 406 aa, unidentified
MVYIKDIDGRPLMPTKRHGKVRWLLKENKAVVINLCPFTIQLTYKSTDHKQPVTLGIDAGAKHIGFSATAEKEELFACETTLRTDIVDLLSTRLQNRRTRRSRLRYRKPRFNNRGSSKKKGWVALSVKQRIDSHLNEVNEIHKILPITKIVIEVAQFDTQKMKNHDISGSDYQNGEQLGFWNVREYVLFRDGHKCSHCKGKSKDPVLNVHHLESRKTGGDSPSNLVTLCESCHKAFHKGEIELKKKRGKSLRDAAVMGIMKWKLYEELKSRYDNVSMTFGYITKYNRIKYGIEKSHTSDAFVISRNFNAKRIERQYLKRLVRRHKRQIHKMKILKGGKKKNNQAPFGVFRFRLFDKVLYNNEICFIYGRRKSGNFNIRDFNGENPKDVSYKKLKLIRGKMHPIILK

SEQ ID NO: 16314 - protein, 431 aa, unidentified; identical to SEQ ID NO: 4535

SEQ ID NO: 16315 - protein, 413 aa, unidentified
MTSYAFVLDANGKQLAPTKEQKAWFFIRKKRASLVSKYPIVIQLMKEIPEKEICQDEIRCGIDDGGLHVGIALVQKCKTKNKVVFKGTIEQRNDVKHLMEVRRNYRRYHRYHKRYRQARFDNRKSSKRKGRIAPSILQKRQATIRVINRLNKWINITNYWLEDVSIDIRVLTDGYKSYSWQYQKSNRLDENIRKATILRDGGKCMECGKSNCRLEVHHIKPKRRNGSNTLDNLITLCESCHQKTEGQEELYMDRYFSLLKSSDNKNLNYAQHVMIGKMWLRKQLSGLGVLYLTSGGDTANKRIDWNIEKSHANDAVCITDLRPDTCDVKEWTMKPMRRQSKAKTDHVLGIHHRDLVEYTFKNGETHRGYVTALYPDQKAINFQSQTKHCKKVNARKCKLLWNYSKIYWFENAS

SEQ ID NO: 16316 - protein, 431 aa, unidentified
MPNKVYVINKHGRPLMPCSPAKARHLLDEGKAKVKKRTPFTIQLVYGSSGYTQEVILGVDAGSKTIGMSASTTKEELLSAEVKPRNDVVDLLSTRREFRRARRNRKTRYRKPRFDNRVRSKHKGWLAPSVEVKIQEHITSIKRVCRILPVSKVVIETAEFDLQLLKAIADGKPVPQGEDYQKGEMYGHYNVRQYVLWRDDYTCQCCGAHATKKKEVRLHVHHLESRKVGGDAPDNQVTLCESCHEKLHKGLIAEKDFKKRKRRSTRDATFMGIMRKTLMQRLCSELPIPVVKTRGYITKATREKLLVLPKSHTNDALAIAQGKRGFNVGYLPEIAQIDKIYTIRPVRHHNRQLHKAAILTGGIRKSNQAEKYVFGYRLFDKVQFNGQDCFIWGRRTTGIFTIKTINGKMIKDGISFKKLKPVEKSTSYLIA

SEQ ID NO: 16317 - protein, 470 aa, unidentified; identical to SEQ ID NO: 2825

SEQ ID NO: 16318 - protein, 411 aa, unidentified; identical to SEQ ID NO: 3762

SEQ ID NO: 16319 - protein, 406 aa, unidentified
MVYVQDIDGKPLMPTTRHGKVRRLLKSNKAVVVNLCPFTIRLTYISDSYKQEIVLGVDAGTKHVGLSATTKSKELYSSEVILRNDIVDLLSTRRELRRTRRNRLRYRKPRFNNRVKNKRPGWIAPSVRYKVDAHIRVIDNVCSILPISRIVVEVAQFDTQKIKNPDISGKEYQEGDQLGFWNVREYVLARDGHKCQYCKGKSKDSILNVHHIESRKTGGNSPFNLITLCETCHKEYHKGNIKLKVKRGTSLRDAAAMGIMKWKLFDKLKSLYPNVSMTFGYITKHNRIKHEIKKSHISDAFVISKNFEAKRPGYYFKEKLVRRHNRQIHKMKILKGGKKKMNQAPFKVFGFRLFDKVEFQGNEYFIYARRLSGYFNIRDINSENKKDVTYKKLTHIGHGLISVETG

SEQ ID NO: 16320 - protein, 536 aa, Nocardiopsis sp.
MAEGRLYQHQPSPSKEVTLMATFRVGPKTHPGVLPQRQALESESADTPRIGHESGLRHRRQAVPGADHVRGETRPASPSGSGVTPNPVGKQGREAHTRQTDPYVFVLDKNHIPLQPCPPARARKLLTKKRAVVARHTPFTIRLTDRTAAESEIDGVEIGIDPGSKHTGIALFTHRAGERRGRYALQLDHRGAQIKKKLGQRAGYRRRRRSANLRHRSPRFSNRARPRGWLAPSLRHRVETTLGWVERLCRWVPVRAVHVERLAFDTHALSAGKPLEGAQYQQGTLAGYEVREYLLAKFNRACVYCGITNVPLNLDHVYPRSRTGSDRVSNLVLACVPCNQTKADRSVEEFAPKAAARILAQAKAPLRDAAAAQSTRWALWQALDQRLPTRVGSGGRTKFNRDRNQLPKTHTLDALAVGKVEAITQTVARVLVAGCAGRGRYARTTPDRYGFPRLRAARRKQYFSFATGDLVRAVVPSGKRAGTHTGRVLVRARGSFDITTGHGRQAGINHKHIRLLQRADGYAYTFRKEEGVSSRP

SEQ ID NO: 16321 - protein, 485 aa, unidentified
VRLRYGKFNREPFFGSLAYSKKEKIMRYVYVLDVDGNPLMPTRRYGWVRRMLKSGKADAVDSLPFTIRLKEKTGTRILQPVIVGQDPGRSSIGMAAVRNDGTVLYRVHCETRNKEIVGLMDNRRAFRRASRRGERLARKRLAKKLGTTAKNLNGRLLPGYEKPLAVKDIINTEARFNNRIRPEGWLTPTAVQLLRTHLNLFKKVSGILPATEAVIEINQFAFMQLDDPDAKKREIDFCHGPLYGTGGVKAAVQIQQKDVCLLCGKHGIEHYHHIVPRSKRGSNTVNNIAGLCMECHKKVHMSQEAAEKLEKRKAGLVKRYGGASVLNQIIPSLVEGLTGRYPGHTHVTNGWNTKEFREKYGLEKEHDIDAYCIAASILGNIQPKLETETYEIKQFRKHNRALIHHQTERTYKYEGKTVAKNRKKRMEQKTDSLEDWFISMTEKYGKEEAERMRSRLTVQKSKRYYNTPGRMMPGTVFEYAGKRYV

SEQ ID NO: 16322 - protein, 406 aa, unidentified; identical to SEQ ID NO: 6072

SEQ ID NO: 16323 - protein, 442 aa, unidentified
MSTSVFVLDKKHRPLMPCRPARARRLLRAGRARVVKRFPFVIRLVDRTVEQSEVQPVLIKLDPGSRETGAAVVRDDEKKRHHALAFFVIKHRGGAIRDALKARSAFRRRRRSQNLRCRSPRFLNRVKPKGWLPPSLRHRVETTLSFVRRMCRYLPVSGIAAELVKFDSQKLQTPEVSGIEYQQGTLFEYEVREYLLEKFGRKCVYCGAEGVPLNIDHVVPRAKGGSNRVSNLVLACVSCNQKKGARSLEDFLKGKPEVLARVRRELKTPLRDAAAVNATRWVLFNELKATGLPVETGSGALTKLNRHAFGVEKEHWLDALCVGRLNGVVTRKGLNVLEIRCMGRGSRQRTRLTKYGFPRGYLMRQKCVHGFATGDMVEANVPKGKKAGLWRGRVAVRVSGSFNIQTPKGVIQGVGWKHCRLISHNDGYGYAWLGHAPHSSPA

SEQ ID NO: 16324 - protein, 413 aa, unidentified
MTNYVFVLDANGKHLSPTKEQKAWFFIRKKRATLVSKYPMVIQLNKEIPDDKICKDEIRCGIDDGGLHTGIALVQKCQTKNKVLFKGVIEQRNDVKHLMDVRRGYRRYHRYHKRYRPARFNNRSSSKKEGKIAPSILQKRQATIRAVAQLNKWINITDYWLEDVAIDIRALTDGFKPYKWQYQKSNRLDENIRKAVILRDGCQCVECGRTNCKLEVHHIKPRRLNGSNALSNLITLCERCHQNTEGREELFMDKYFALLNSSDNKYLNYAQHVMIGKKWLREQFSSLGILHLTNGGDTANKRIDWNIEKFHSNDAICITNLQPDTCDVKEWTIKPMRRQSKAKADNVLGIKHRDLVEYTFKSGETHRGYVTALYPKQNAINFQSPTKHCKKVSAKKCRLLWKFNKIYWLDDVS

SEQ ID NO: 16325 - protein, 613 aa, Parasutterella sp.; identical to SEQ ID NO: 4681
  VARIANT 124: note = X can be any naturally occurring amino acid
  VARIANT 398..449: note = X can be any naturally occurring amino acid
  VARIANT 590: note = X can be any naturally occurring amino acid

SEQ ID NO: 16326 - protein, 427 aa, Parasutterella sp.; identical to SEQ ID NO: 6030

SEQ ID NO: 16327 - protein, 540 aa, Streptomyces sp.; identical to SEQ ID NO: 3207

SEQ ID NO: 16328 - protein, 431 aa, unidentified
MPDKVYVISRLGHPLMPCSPAKARHLLDDKKAKVVKRMPFTIRLLYGSTKYIQPIILGVDAGSKTIGLSASTAKEEVFAAEVMPRNDVVENLSTRREFRRARRNRTTRYRKPRSDNRVRSNHERWLAPSVKVKIQEHITSIKRVRTILPISKVVIETAEFDLQLLKAIQEGKPIPEGEDYQKGEMYGSYNVCQYVLWRDNYTCICCGVRGTPKNPVRLHVHHFESRKYGGNAPDNHGTLCDDCHKKFHLGIITDVKLKTRRRQSTRDAAFMGIMRKTLMWRLRTELFIPVAETKGYITKATREKLLVLPNSHTRDALAIAQGRHGFGIKEYAYVEPANHIYTVRPVRHHNRQLHKASILKGGIRKRNQASKYIFGFRLYDKVLYQGKACFVWGRRTSGTFLLRTIDGIKVKDGVSYRNLTLLERSSNYLIA

SEQ ID NO: 16329 - protein, 431 aa, unidentified; identical to SEQ ID NO: 12300

SEQ ID NO: 16330 - protein, 442 aa, unidentified; identical to SEQ ID NO: 2903

SEQ ID NO: 16331 - protein, 458 aa, Rheinheimera sp.
VRVLVLDNQKQPLMPCRSARARQLLRDGKAAVFRRYPFTIILKDRAGGDTQPVSLNVDPGSKTTGVALAADYPRGRCAVWALHIGHRGPHIKSALDSRRAIRRSRRNRKTRYRAPRFLNRTRPKGWLAPSIMSRVHNVDTWTKRLTQFAPITSANVETVRFDMQLMVNPNIAGTDYQQGSLFGWELREYLLYRHGHTCAYCDGLAGDAVLEKEHIVPRALGGSNRLANHVISCRTCNEDKGSLHPNAWAQLCSQRGGKLNATRAKNMQRILAGYRPSLKDAAAVNATRYAVGGVIKRLIPDTQFWSGGRTKKNRSDQSYAKNHWIDAACVGEKGGAVSLLCDAVLVANAKGHGSRQMCRVDKYGFPRTSAKTGSVVHGFKTGDMVTASVPTGKKQGVHVGRVAVRSSGFFNIQTKTGVVQGVSHKHCRILQRNDGYNFNYGAAIPLCAKAQSLLAEKR

SEQ ID NO: 16332 - protein, 494 aa, unidentified; identical to SEQ ID NO: 8423

SEQ ID NO: 16333 - protein, 431 aa, unidentified; identical to SEQ ID NO: 5232

SEQ ID NO: 16334 - protein, 431 aa, Aphanizomenon sp.; identical to SEQ ID NO: 8468

SEQ ID NO: 16335 - protein, 451 aa, unidentified
MSVAVISKTGERLMPTSEYRTRKLLKSGKAIKYSYHPFTIQLTERKTGNIQPIELCMDTGYIHIGISVKSEKHEYLTEQIDTLTDERSRHNARRMYRSQRRNRKRYRQPRFNNRKKDKGWIAPSLEHKKNIHVQAISRINNVMPLTDITMEMGNFDTQVLKAKEEGRPLPQGVDYQHGERYSIATLREAVFARDGYKCQCCGRTIKDGAILHVHHIKYRSQGGTNSISNLATVCDKCHTPKNHKPGGKLYGWKPKLPSFKGATFMTTIRWQLYNEAKALFPDIDIHITYGAATKERRRELNIDKSHINDAFVMGQFHPRHRIKAVLYKKKRRNNRCLEKFYDAKYIDSRDGKKRSGQELFNGRINRNHKKDSENLHQYRLQKVTAGKRTVRKQHYSIQPHDIIVYESRKRETTGCHCSGTRVMLLPDKKSVSIKKIKIYRYAGGYFKSTFN

SEQ ID NO: 16336 - protein, 435 aa, unidentified
MPKVYVLNKHGHPLMPCTPAKARHLLDSGKAKVRKRTPFTIQLLYGSSGYKQPVTLGVDAGSKTIGLSASTEKQELFAAEVKPRNDVVKLLSTRREFRQARRNRKTRYRTPRFDNRVKSKHKGWLAPSVEVKIQEHITAIARVCALLPIANVIVETAEFDTHRLKAMLEGHPLPVGTDYQLGEMYDEYNVRQYVLKRDNYTCQCCGAHPSAKKGVKLHVHHLESRKTGGNSPNNLITLCEHCHKLLHKGKITLDKKKRGHSMRDAAFMGIMRETLILRLRSELTIPVVETYGYITKLVRETHHMDKSHTVDALCIAGHPLADASDVSYLIKPVRRHNRQLHKATILKGGVRKANQAPRSVFGFRLFDRVRYQGQECFIWGRRSSGSFLLKKLDGTKVKDGISYKKLTLLERETNYLIEERRRCSSPCLKVGVSAA

SEQ ID NO: 16337 - protein, 415 aa, Bacillus sp.; identical to SEQ ID NO: 2671

SEQ ID NO: 16338 - protein, 414 aa, unidentified
MPCSPAKARLLLKEKKAIVVRRTPFTIQLTIATGESKQPVSLGVDAGYKHVGLSASTEKAELYASEVELRKDITDLLSARRALRQSRRNRKTRYRAPRFNNRIRTKRKGWLAPSVENRINAHLSRIEAVLRLLPVTKITVETASFDMQRLKNPDISGKEYQEGEQLGFWNVREYVLFRDGHVCRHCHGRSKDPVLNVHHLESRRTGGDSPGNLITLCETCHEALHRGEIALKTKRGHSFRAEAFMGMMRWEVLNRLKASYPELKVHETYGYLTKHARIANGIVKSHGADAFCIAGNLGAERLGEFFFQKQTRRNNRQIHKLSILKGGIRKRNQAPFEAKGFRLFDKVACQGEEGFIFGRRSSGSFDVRKLDGTRISAGISCKKLRLLEKRRTYLTEIRKEEALPPLPEGRGLRA

SEQ ID NO: 16339 - protein, 465 aa, unidentified
MSTCVCVLSNSGERLMPTFCLGKVRHLLKDGKAKIVKHHPFTIQLLYSSKTNIQPIEICEDVGYNYIGISVKGESHEYVSAQYDTLQDEKEHHDDCRKMRRTRRNKLRYRKPRFDNRKRNKGWLAPSLEHKKQLNISLIERYVSVIPITHATVEVGSFDTMLLQAIQKGEAKPEGADYQEGPRYNLATLREAVFYRDNYTCHVCGHKITNGAVLHMHHMFYWKGRHGYQLDELVTVCEKCHTPANHQKNGKLYGFGENVKFADLSGAAFMNTVRWQIVNELYAAFGKPFVTITYGAMTKEKRIALRLEKSHNNDAYAMGEFHPNLRCTFEHYEKVRRNNRILEKFYDSRYIDIRTGEIATGKALFNGRINRNHKKDSENLHKYRGKRTYAGHRALLRKKVNLNPGDLVSLNGETLIVHSTHTNKKGAVNVEFKTPAKNGRKSASLKKLKIVKATSSMHSAWEKVS

SEQ ID NO: 16340 - protein, 443 aa, Anoxybacillus sp.; identical to SEQ ID NO: 12144

SEQ ID NO: 16341 - protein, 403 aa, unidentified
RCRRQRRAKANGTISKKCVKQDTAQSKNPSKRAKEIGVIKRHLPGCKKDVLCVGIKNKEAKYTNRARLEGWLTPTANQLLQTHINLVKKIQKFLPISDAVLEVNKFAFMRLDNPNIQKWQYQQGPLYQKGSLENAVSEMQEHHCLFCEKPIEHYHHVVPKSENGSNTIANIVGLCAEHHNLVHKDVAWQEKLVEEKTGLNKKYGALSVLNQIIPALTKELSFLFPKHSFMTNGKSTHDYRAAHGISKDHWLDAYCIACSVLPIDVCDSTINNCVPYELKQFRRHDRRALNNENMNRVYTLNDKVVATNRHKATEQEAASLEEFRKEHPNDVCKLKVKEHHPTYRNMNRNYPGSIFLVGKHVHIMQGIAGSKDGKATKYNDTRATTIAAGKCKFVAKNSGILFV

SEQ ID NO: 16342 - protein, 413 aa, unidentified; identical to SEQ ID NO: 3587

SEQ ID NO: 16343 - protein, 512 aa, unidentified
MSTVYVLNKDGKPLMPTTRGGHVRHLLKEQKARVVRAKPFTIQLLYETNDVVQPLYLGIDPGRTNIGVAVVKANGTAVFTAHLETRNKEVPKLMQDRKKARRARRTNGRRCRRQRRAKANGTISKKCVKQDTAQSKNPSKRAKEIGIIKRRLPGYKKDVLCIGIKNKEAKYTNRTRPEGWLTPTANQLLQTHINLVRKIQKFLPISDVVLEVNKFAFMRLDNPDIQKWQYQQGPLYQKGSLENAVSEMQEHHCLFCDKPIDHYHHVVPQSENGSNTIANIVGLCAEHHNLVHKDAAWQKKLAEEKVGLNKKYGALSVLNQIIPALTNKLSVLFPKHFFVTAGKSTHDYRATHGVSKDHWLDAYCIACSVLPSDVCDSNINNHMPYELKQFRRHARRALNNENMNRVYTLNDKAVAINRHKATEQEAASLEEFCKEHPNDVCKLKVKEHHPTYRNMNRNYPGSIFLVGKHVHIMQGIAGSKDGKATTYKDSNANSITASKCKFVAKNSGILFV

SEQ ID NO: 16344 - protein, 431 aa, unidentified
MPNKVYVINKHGRPLMPCSPAKARHLLDAGKAKVKKRTPFTIQLVYGSSGYTQEVILGVDAGSKTIGMSASTTKEELLSAEVKPRNDVVDLQSTRREFRRARRNRKTRYRKPRFDNRVRSKHKGWLAPSVEVKIQEHITSIKRVCRILPVSKVVIETAEFDLQLLKAIEEGKPVPQGEDYQQGEMYGHYNVRQYVLWRDGYTCQCCGAHATKKKEVRLHVHHLESRKVGGDAPDNQVTLCESCHEKLHKGLIAEKDFKKRKRRSTRDATFMGIMRKTLMQRLCSELPIPVIETRGYITKATREKLLVLPKSHTNDALAIAQGKQGFNVGYLPGIVQINKIYTIRPVRHHNRQLHKATILKGGIRKSNQTEKYVFGYCLFDKVQFNGQDCFIWGRRTTGIFTIKTINGKMIKDGISFKKLKPVEKSTGYLIA

SEQ ID NO: 16345 - protein, 453 aa, unidentified
MSVAVVSKTGMLLMPTSEYRARKLLKSKKAIIHGYHPFTIQLTERETGYIQPVELCMDTGYIHIGTSVKSEKHEYLGEQIDTLTDERRKHDACRMYRRQRRNRKRYRQPRFNNRERDDGWIAPSLEHKKTIHIQAISRICKVMPVTDITLEMGNFDTQVLKAREEGKPLPQGLDYQHGERYSVTTLREAVFLRDGYTCQCCGRTIKDGAILHAHHVVYRSQGGTNRISNLITVCDKCHTPANHKPGGKLYGWKPKVASFKGATYMTTIRWKLYNEIKALFPDIDIHITYGAETKERRRAFDITKSHVNDAFVMGQFHPKHRSKPVCYKKKRRNNRCLEKFYDAKYIDSRDGKKRTGQELFNGRISRNHKKDSENLHQYRQQKISTGKRTIRKQHYAIQPHDIVIFNGGKFETSGCHNNGTRAILLPQKKSVAIKKLNIYRYAGGYFKSAFNQK

SEQ ID NO: 16346 - protein, 476 aa, unidentified; identical to SEQ ID NO: 3164

SEQ ID NO: 16347 - protein, 442 aa, unidentified; identical to SEQ ID NO: 3234

SEQ ID NO: 16348 - protein, 427 aa, unidentified; identical to SEQ ID NO: 5575

SEQ ID NO: 16349 - protein, 436 aa, unidentified
MLVYVLKQNGQPFMPTERFGKVRRLLKEGKAKVVRREPFTIKLLYEPETDVVQECYCGVDTGSKHIGVAVVGNDRVLYQSQTELRNDIKRKMNARRASRRSRRNRKTRYRKKRFLNRKNSIKKDRLPPSVKHKVQAHIDEIEFCKKILPVSDLILEVSQFDTALMKNPSLIDERVKHWGYQQGFNYGYSSRRSAILHRDNYTCQCCGKKNCRLEVHHIKFRRNGGTDDEENLVTLCENCHKGVHAGTVVLNKKHKKSKNLKYATHMSIIRSRLLREYPDAIETFGFVTAENRNHLKLEKDHYIDACIIASGGLDFEELDVIYKKRRVSIQDRILTKGICGEQKLPTGKLFGFKKFDKVKYLGEVCFIKGRRSSGGFVLMDINNNSIDFRDSGGKQNPSYKHLKRLSARRSVLCIEREVSSFLRKGKNTSAFLSKNL

SEQ ID NO: 16350 - protein, 512 aa, unidentified; identical to SEQ ID NO: 9400

SEQ ID NO: 16351 - protein, 431 aa, unidentified; identical to SEQ ID NO: 3235

SEQ ID NO: 16352 - protein, 413 aa, unidentified
MRGQPLMPCSPAKARHLLKANKAIVKRRTPFTIQLSIATGETKQNVTLGVDAGAKHVGLSAITDKAEVFASEVELRQDISGLLADRLAFRRGRLRRKTRYRASRFLNRVHSKRKGWLAPSVENRIQAHISRIDVVCKLLPVNKIVIETASFDIQKIKNPDVEGKGYQQGDQLGFWNVREYVLFRDGHVCQYCRGRSKDKVLNVHHLESRKTGGDAPNNLITLCETCHKAYHAGKIKLKVKRGQSFKAETFMGIMRWTLLEIVRQTHPHLLVENTFGYLTKHKRIALGLPKTHCTDAFCIAGNLKAQRSGVYLYQKQTRKHNRQIHKCSILKGGVRKLNQSPYLVKGFRLFDKVKCLEQVGFIFGRRALGYFDVRTLRGKKLSPAIHVKKLMLLEKRKTFLTELRMENCASSPV

SEQ ID NO: 16353 - protein, 420 aa, unidentified
MQYVYVLNKHGEPLMPCSPGKARILLKQQKACVVKRTPFTIKLLYGSAGYKQPITLGVDAGSKHVGLSASTEKRELYSEEFTPRNDVVELLSTRRQNRRSRRNRKTRYRAPRFNNRIHSKHKGWLAPSVEVKIQEHITVIKRICRILPITLVRVETAEFDTQRLKAMLAGKPLPVGTDYQLGEMYDEYNARQYVLKRDHYTCQCCGAHTTTMKSVKLHVHHLESRKVGGNAPSNLITLCTTCHDNLHKRKVTLDGKKRGKTLRDAAFMGIMRKALMARLKEELSIPVQETYGYITKMRREQNDIKKSHVNDARCISKHPLAEPCSVCYRTKAIRHHNRQIHKANFSKGGYRKRSQMSYIVEGYRLWDKVLYKGQACFISGRRASGRFALKKLDGTSISKSVTFKKLRLLEPATNYLIERM

SEQ ID NO: 16354 - protein, 544 aa, unidentified
MKQKKQKVMVYILNKKGKPLMPTTRCGHVRKLLDSKKAVVVNSNPFTIRLKYDTPNGIQDVFAGIDSGRENIGSGASNEDGDCLYLGELKTSNKSIKIKMTERTGFRRERRRHDRQSKQRKAKKDHTEIQNGNDDICRTTISCKSVQISYPAAEESVTHKIIRGKEGKFANRHRDEGWITPSARQLVQMHMNDLKSMCKILPISHVTLERVAFDFQKLENENIKTWEYGKGKLYGYDSPEEYIHDVQDGKCLVCGKPHIDYLHHIIPRSKGGSDKVSNIAGLCYDCHYGPMGVHNCRETQDRLPELKNEANKQYKVSLLNSVMPVLIEEMDKFCKANSIMFSICEGHDTAKVRDMYDLQKDHCLDGFAISLVGRNVKSVDVMPDRIYQKQRYKKKSKNIIQKRNCREYYDGKKLVAVNRHKGTDQKADSLEEYMNTYAETHTADECKKHFDSLTVKPARRTYTFHKEWRICPFHIGDKVRYEKKNKIKGNTKVDTFICEGIRFVKDENKAEVKHNKTKSKKMKFCRVLESGCTPYVDYRKLALM

SEQ ID NO: 16355 - protein, 432 aa, unidentified
MISVCVLDPDRQPLDPCHPARARQLLDAGRAAVFRRFPFTIILHDRTRAASMVHAHRLKIDPGSKTSGLAIVQGPRVIWAAELTHRGQRIKAALETRRAIRRGRRQRQMRYRQPRFLNRTRPVGWLPPSLQSRVCNLMTWVERLARLCPITALSQELVRFDMQLMQHAEISGVQYQQGELAGYEVREYLLEKWHRTCAYCGATEVPLEVEHIVPKVRGGSNRVSNLALACVPCNQKKGARSAAEFGFPQVQAQARRPLHDAAAVNATRWGLSQALHATGLPVETGTGGRTKYNRTRLGIEKSHWADAACVGASTPDPLRVAGIRPLGIRAMGHGTRQMCRVDAHGFPKTHRARQKHYGGMQTGDIVQAVVPTGKYAGTWISRVVVKARGWFDLVIHGKKASVHQRHCTRLWAADGYTYALPAVAGTAVSSPR

SEQ ID NO: 16356 - protein, 447 aa, Sutterella sp.
LKGLSRTCGSLRFKEKTLKVFVINKRGKPLMPCKPAKARHLLRDGKARVVRRTPFTIQLTIATGENVQPIHLGVDAGSKHIGLSATTEKEELFSSEVELRKDITDLLSSRREMRRARRNRKTRYRAPRFDNRVHAKNKGWLAPTLENEISAHLSRIKAIRAILPVSRITIEVASFDIQKIKNPEIEGEQYQQGEQLGFWNVREYVLFRDGHKCCHCHGKSKDPILNVHHIESRKTGGDAPNNLITLCETCHKAYHAGKIQLTSKRGKKFTDATHMGIMRWELLKRAKEANLGIPVKATFGYITKARRIQFGIAKTHCADAFCIAGNLNAKRLGEYLYQKQTRKHNRQIHKMAILKGGYRKRNQAPFEVFNFRLFDKVRFGGNVGFVFGRRTSGSFAVRTLFGEKLSEGVSYKKLSLLERRTTFLTQLVKEGAIPPVSKDTGFLARFL

SEQ ID NO: 16357 - protein, 557 aa, unidentified; identical to SEQ ID NO: 3108

SEQ ID NO: 16358 - protein, 415 aa, Bacillus sp.; identical to SEQ ID NO: 2431

SEQ ID NO: 16359 - protein, 457 aa, unidentified
VWLYQAVYNLGEGFLPSSEERTAFYWLLIYRKEHGIMQYVYVLNKHGEPLMPCSPGKARLLLKQQKACVVKRTPFTIKLLYGSAGYKQPITLGVDAGSKHVGLSASTEKRELYREEFTPRNDVVDLLSTRRQNRRSRRNRKTRYRAPRFDNRVHSKHKGWLAPSVEVKIQEHITVIKRICRILPITLVRVETAEFDTQRLKAMLKGKPLPVGTDYQLGEMYDEYNVRQYVLKRDNYTCQCCGAHPTEKKPIRLHVHHIESRHVGGNAPNNLITLCVACHKALHEGKITLDKGKKRGKPLRDAAFMGIMRNTLLARLKDELNIPVKQTYGYITKLLREKNKIPKSHVNDARCIAKAPNAKPCDTMLYTRALRHHNRQIHKAKILKGGIRKKNQAPYLVKGFRLWDKVRYNGEECFITGRRSSGYFALKKYDGTVISNSASYKKLMLLEAATNYITERS

SEQ ID NO: 16360 - protein, 393 aa, unidentified
NGTISKKCVKQATAQNGSASKRAKEIGVIKRHLPGCEKEVLCIGIKNKEAKFNNRTRPAGWLTPTANQLLQTHINLIKKIQKLLPISDVVLEINKFAFMQLDNPNIQKWQYQQGPLYQKANLEEAVSEMQEHHCLFCKKKIDHYHHVVPQHKNGSNTIDNIVGLCTKHHDLVHKDTAWHEKLTKKKTGLNKKYGALSVLNQIIPALTKELSSIFPKHFFVTTGKSTYDYRAAHGVSKDHWLDAYCIACSVLPNDVCDSSINNRVPYELKQFRRHDRRALHKENMSRVYTLNGKKVATNRHKATEQTADSLEEFRQNHPDDVCKLKVKENHSEYRNPKRNFPGCVFLVGKRTHVMQGTSGSHNGKADGYYDTNGNSYSSGKCKFVAKNEGIIFA

SEQ ID NO: 16361 - protein, 427 aa, Calothrix sp.; identical to SEQ ID NO: 10384

SEQ ID NO: 16362 - protein, 408 aa, unidentified; identical to SEQ ID NO: 3192

SEQ ID NO: 16363 - protein, 456 aa, unidentified
MSTCVCVLSNSGERLMPTFRLGKVRRLLKDGKAKIVKHHPFTIQLLYDSKTNTQPIEICEDVGYNYIGISVKSQSHEYVSAQYNTLQDEKACHDSCRKLRRTRRNRLRYRKPRFDNRKCDKGWLAPSLEHKKQLNISLIERYVSVIPITHATVEVGSFDTMLLQAIQKGKAKPESADYQKGPHYNLATLREAVFYRDNYTCQVCKRKIADGAILHMHHMFYWKGRHGYQLDELATVCEKCHTPANHQKGGKLFGYGEGKEFADLSGAAFMNAVRWQIVDALYTTYDKEFVTITYGAMTKEKRIALQLEKTHNNDAYAMGDYHPACRCKFRHYQKRRRNNRVLEKFYDATYIDARTGNKAKGKELFNGRINRNHKKDSENLHKYRSKKVSKGRRSIRRRRYAIQSYDTVRLEGKTYITSGCHNKGTRLLIPVNGKSKSVAISKVQVVCHAGAWIQIS

SEQ ID NO: 16364 - protein, 428 aa, Enterococcus sp.; identical to SEQ ID NO: 4335

SEQ ID NO: 16365 - protein, 482 aa, unidentified
  source 1..482: note = Firmicutes bacterium UBA5766
MVYVLDKHKKPLMTCTEKRARLLLERGRAMVHKKAPFTIRLKDRLVEDSVLQPLGLKIDPGSKTTGGAVIREKETIGYYECQHRTDIKDKMDTRRSQRKSRRNHKTRYRKPRFNNRNPGKCTACGKNAKHGSRYCRPCAEAKNLTDNGHREVRLPVSLQSRVDQTMSWVNKLRALLPITSVSMELVRFDTQLMQNPNISGVEYQQGTLAGYEVREYLLQKFNHQCAYCKGESSDPVLNVEHVVPKNPECGPRGAGRISNLVIACKTCNDTKGNLQPDEWLNKLKTSKKKLNQDRAKNLPEALKQLKAPLKDAAMMNATRWALYRRLKATGLPLETGSGGLTKYNRTQILKLPKTHYYDAVCVCESLPDMVSVPFVENYTATGRGNRQMAGVDKYGFPYRWRERKKIRFGFQTGDIVTADIFKGKYKGRWQGRVAVRKTGFFDIKDSAGKRICQGIPAKHCRLLQRANGWQYERRCAALPPHA

SEQ ID NO: 16366 - protein, 417 aa, unidentified
LLIYRKEHDIMQYVYVLNRHGEPMMPCSPGKARLLLKQQKACVVKRTPFTIKLLYGSAGYKQPITLGVDAGSKHVGLSASTEKRELYREEFSPRNDVVKLLSTRKQNRRSRRYRKTRYRPPRFDNRVHSKHKGRLAPSVEVKIQEHITVIKHICKNLPITLVRVETAEFDTQRLKAMLAGKPLPVGTDYQLGEMYDEYNVRQYVLKRDHYTCQCCGAQNTAEKVVKLHVHHLESRKTGGNTPGNLITLCTTCHENLHKGKVTLDGKERGKPLRDAAFMGVMRKTLMARLKEELPIPVQGTYGYITKMRREKNDIKKSHTNDARCISKHPLAEPCSVCYRTKAIRHHNRQTHKANFSKKGIRKRSQMPYLVEGFRLWDKVLYKGQECFVSGRRSSGSFALKKLDGTSISKGVTFKKLR

SEQ ID NO: 16367 - protein, 465 aa, unidentified
MVTVQQSTHHLPFGRVFIRRNLFMVYVISQDGKPLMPCSDPIARLLLKQGKAKVKKREPFTIKLTYETTNYTQGLTLGVDTGSGTIGTAVSKDNGDIVYMSEVVVRNDITDKMTQRAKYRRNRRNRKTRYRKARWLNRASSIKKDRFSPTMQSKLHSHVREIEYIQSILPVTEMVFETGQFDMHLMKNPSLANPKVRPWGYQKGANYGFENTKAMVLNRDNYTCQCCKGKHKDSKLEVHHIVFRSQGGSDEESNLLTLCHTCHKDLHSGKINPKLSGKVKGNLKYATQMNSIRKQLFRCYPNAIETFGYVTKVNRLHLGVAKEHYYDACTIATQGNAFNVKSNLYKKKCVSDGDFQKTKGIHSEQPIVTDKICGFRKFDKVRYFGNDYFIKGRMSTGYAILMDIDGNQIDFSTMPRGYKTPKKSNCKRITARKMVLFSILTVAAGMQAGLISVLPIRLVLIMLKP

SEQ ID NO: 16368 - protein, 415 aa, unidentified; identical to SEQ ID NO: 3582

SEQ ID NO: 16369 - protein, 453 aa, unidentified
MSVAVVSKTGMLLMPTSEYRARKLLKSKKAIILGYHPFTIQLTEREAGYIQPVELCMDTGYIHIGTSVKSEKHEYLGEQIDTLTDERQKHDACRMYRRQRRNRKRYRQPRFNNRERDDGWIAPSLEHKKTIHIQAISRICKVMPVTDITLEMGNFDTQVLKAREEGRSLPQGLDYQHGERYGIATLREAVFTRDGYTCQCCGRAIKDGAILHVHHIVYRSQGGTNRMSNLITVCDKCHTPANHKPGGKLYGWKPKVASFKGATYMTTIQWKLYNEVKVLFPDIDIHITYGAETKERRRAFDITKSHVNDAFVMGQFHPKHRSKPVCYKKKRRNNRCLEKFYDAKYIDSRNGKTRTGQELFNGRISHNHKKDSENLHQYRRQKISTGKRAIRKQHYAIQPHDIVIFNGEKFETSGCHNNGTRVILLPQKKSVAIKKLNIYRYAGGYFKSAFNQK

SEQ ID NO: 16370 - protein, 415 aa, unidentified
MVYVLDKNGQPLMPTDRHRKVRLMLQSGQAKVIKRCPFTIQLNYDSGHQTQEISLGIDAGSKHIGVSTTTKIKVLYEVDVELRNDIVDLLSSRRELRRGRRNRKTRYRQAKFNNRRRGNGWLAPSIRQKIGTHLTVVENICKILPISRIMVETASFDIQKIKNPDIQGAEYQQGDQLEFWNVREYVLFHDNNTCQCCKGKSKDKILNVHHIESRKTGGNAPNNLITLCEICHTGYHKGAVQLPKTVKRGMRFKDAAFMGIMRWAFYEALKQQYEPVALVHNTYGYITKHTRIEHNLPKEHYVDARCISGNPDAFPSGEYYYQKKVRCHNRQIHKLTILKGGIRKQNQATYLVKGYRLFDKVSYQGKGYFVFGRRQSGFFDIRTLSGEKVNKGSLSCKKLKFIATRTYYLTERRAV

SEQ ID NO: 16371 - protein, 443 aa, Anoxybacillus sp.; identical to SEQ ID NO: 2702

SEQ ID NO: 16372 - protein, 427 aa, unidentified; identical to SEQ ID NO: 4946

SEQ ID NO: 16373 - protein, 447 aa, Halolactibacillus sp.
LRVFVKSMRGSNLDPCKNQKARKLLKEKKAKIISYKPFTIQMLVPTGETTHESHVGIDLGAKYTGVAITQEDRVLAKGNIECRQDVKGLLETKKIYRRSRRSRKTRYRKCKFKHKTTRVYSNKKGKWVKKKTSFTSPRPKSWLPPSLESRTQNLFFWIDTFTSLLPKVKLHIEVGKFDVQKMKNPDIQGKGYQEGDTFGYHDVRYFVLARDSYTCQVCKKKGKILNTHHIIYRSHGGSDAPSNLISVCTDCHTSDNHKRGRILWHWMEKRKKVPTYKEPPFMNALRIRTFRRYPDASIIYGSETTPRRKALHLEKTHYNDAIAISGIQHIKENPHRIFYIKQFRKKKRSLHEATARKGRKNKNLTQKRNKKNTKEMKGIHLNDTVRIFGKIGFVSGFTTTGLYIKDIHNAYITKPGKTYKQVGFKDVTVKNHNNNWQFISHLAPDGA

SEQ ID NO: 16374 - protein, 460 aa, unidentified; identical to SEQ ID NO: 8636

SEQ ID NO: 16375 - protein, 423 aa, Arthrospira sp.; identical to SEQ ID NO: 3469

SEQ ID NO: 16376 - protein, 442 aa, Sutterella sp.; identical to SEQ ID NO: 4522

SEQ ID NO: 16377 - protein, 412 aa, unidentified; identical to SEQ ID NO: 3155

SEQ ID NO: 16378 - protein, 413 aa, unidentified; identical to SEQ ID NO: 8063

SEQ ID NO: 16379 - protein, 420 aa, unidentified
MQYVYVLNRHGEPLMPCSPGKARLLLKQQKACVVKRTPFTIKLLYGSAGYKQPITLGVDAGSKHVGLSASTEKRELYREEFTPRNDVAELLSTRKQNRRSRRCRKTRYRAPRFDNRVHSKHKGWLAPSVEVKIQEHITIIKRICKILPISLVRVETAEFDTQRLKAMLAGKPLPVGTDYQLGEMYDEYNVRQYVLKRDHYTCQCCGAQNTAEKVVKLHVHHLESRKTGGNTPSNLVTLCTTCHKNLHKGKVTLDGKERGKPLRDAAFMGVMRKTLMARLKEELPIPVQGTYGYITKMRREKNDIKKSHTNDARCISKHPLAEPCSVCYRTKAIRHHNRQTHKANFSKKGIRKRSQMPYLVEGFRLWDKVLYKGQECFVSGRRSSGSFALKKLDGTSISKGVTFKKLRLLEPATNYLIERM

SEQ ID NO: 16380 - protein, 442 aa, unidentified; identical to SEQ ID NO: 3161

SEQ ID NO: 16381 - protein, 426 aa, unidentified
MPKVYVLNRHGRPLMPCTPAKARHLLDAGKAKVRHRTPFTIQLLYGSTGYTQEVILGVDAGSKTIGLSAATETEELFSAEVKPRNDVVELMSARRQFRRARRNRTTRYRKPRFDNRVRSKHKGWLAPSVEVKIQEHMTAIRRACAILPVSKVVVETAEFDLQLLKAVAEGKPVPQGEDYQKGEMYGHYNVRQYVLWRDSYTCCICGVRGSVRKGVPLHVHHLESRRVGGDAPDNLVTLCTACHDKLHKGIIMAADIKKRKRRSTRDATFMGIMRMTLLRRLREQLPVPVVETRGYITKATRENLLVLPKSHTNDALAIAHGPQGFRAEYLPNIRQADRLYTICPVRHHNRQLHKATILKGGVRKANQAEKYICGFRLYDKVLYNGIECFVWGRRTSGSFLLRQLNGEKVKDGVSYKHLKLLERSQS

SEQ ID NO: 16382 - protein, 424 aa, unidentified; identical to SEQ ID NO: 3351

SEQ ID NO: 16383 - protein, 552 aa, Streptomyces sp.
MTTFPVGEQTHQAVLPQQPALESAGADTPGSRDETAHGHPATVRGTGREYGRGETDGHSTTARRRHAKGAAPAAKAAENGSGDAPPNDLPYDGGVGVSRVFVLSKDGQPLMPCHPARARELLTKGRAVVARQVPFAIRLKDRTRAESAVDGVQLRIDPGSKGTGLALTDEKKETDGQGATVTVRRGLVSIELQHRGDQIHSCMQQRAGYRHRRRSANCRYRKPRSRNRARSAGWLSPSLRHRVDTSFSMANRLCRYAPVTEIHVEQVSFDTHSMSAGRALRGSEYMHGPLAGTTTRDYLRDRWDNACAYCGATGVPLNIEHLRPRSRGGSNRTANLVLACIPCNTAKGSESVEVFLADRPDRLAHILRQITSSLRDAAAMNSTRRLLMAALGDLGLPVHAWTGQTTMENRNIMGLAKTHTLDALSVGQLDHEAGDVIVRYPEQVLVAKATGRGSYARTTPDRFGFPRLRRTRAKQHFGYITGDLVRATIPTGKWAGTWTGHISVRARGQHSLRIHTGRLNVSHWNLELLQRGDGYGYSVRPELPPSTSRKIG

SEQ ID NO: 16384 - protein, 414 aa, unidentified; identical to SEQ ID NO: 3441

SEQ ID NO: 16385 - protein, 395 aa, unidentified; identical to SEQ ID NO: 14042

SEQ ID NO: 16386 - protein, 509 aa, unidentified; identical to SEQ ID NO: 7892

SEQ ID NO: 16387 - protein, 406 aa, unidentified
MVYVQDIDGKPMMPTTRHGKVRRLLKANKATVVNLCPFTIQLTYKSTDHKQPVTLGIDAGAKHIGFSATTEKEELFACETTLRTDIVDLLSMRLQNRRTRRSRLRYRKSRFNNRGSSKKKGWVAPSVKQRIDSHLNEVNEIHKILPITKIVIEVAQFDTQKMKNHDISGADYQNGEQLGFWNVREYVLFRDGHKCSHCKGKSKDPVLNVHHLESRKTGGDSPSNLITLCESCHKAFHKGEIELKKKRGKSLRDAAVMGIMKWKLYEELKSRYDNVSMTFGYITKHNRIKYGIEKNHTSDAFVISKNFNAKRIEYQYLKRLVRRHNRQIHKMKILKGGKKKNNQAPFEVFGFRLFDKVLYNNEINFIYGRRKSGNFNIRDFNGENPKDVSHKKFKLIRGKRHPIILK

SEQ ID NO: 16388 - protein, 450 aa, unidentified; identical to SEQ ID NO: 2935

SEQ ID NO: 16389 - protein, 415 aa, unidentified
MENKIGYCFVVDKNNRPLAPTKVNKGWYLVRKGRAKIKSRYPMVIQLEKEVEPDEDDESHMVCGIDDGSIHVGLAIVQKCPTKNKVVFKGTMEQRRDVKHLIDIRRGYRRYHRCHKRYRQVRFNNRSSSKRSNRLAPSIKQKKDAVLRVLYQLNKWCNIQEYFLEDVCIDIRAMADGYKPCGWQYQKSNRLDENLRKAAILRDNYKCQECGKSNCMLEVHHIRARKYGGADTIGNLITLCKKCHDKTKGRERDFENRYFDMIKSRPKRFDYAMHVMQGKTYLREKISELGILHLTNGGDTANKRINWNIEKSHSNDAICIADSIPDTCDVKEWIVKPMRRKSKAKTDNVLGIKHRDLVSYTYKNGKTYTGYVTALYPEQLVLNFQSKTKHCKKANARKCRLLWRFNNIYWLEQCV

SEQ ID NO: 16390 - protein, 336 aa, Clostridium sp.
MVYVIDINGNPLMPTNEAKARKLLKNKKSIVKELKPFTIQLNYKTSNYTQRITLGIDSGYLNIGFSAITDKKELIVGEVKLLQGVKDRIQEKAMYRRQRRSRLRYRKARWNNRTKSKHKGWLAPSLQHKLDNHIKFVDSLYNILPITKCVVEIANFDIQKIKNPDISGEEYQQGEMMGFWNLREYILHRDNHKCQNPNCKNKSKEQILEIHHIKYRSEGGSDSPNNLITLCSKCHTSPNHKKGKFLYDWCINGKKVRGFKDATFMSMIRWYLINTLKEKHSNISITYGYITKNHRITHKIKKTHYNDAFAIAKGINQIRNNDIFNVSQAKEGIIGL

SEQ ID NO: 16391 - protein, 512 aa, unidentified; identical to SEQ ID NO: 4350

SEQ ID NO: 16392 - protein, 373 aa, unidentified; identical to SEQ ID NO: 3006

SEQ ID NO: 16393 - protein, 458 aa, unidentified; identical to SEQ ID NO: 4474

SEQ ID NO: 16394 - protein, 427 aa, Calothrix sp.; identical to SEQ ID NO: 11551

SEQ ID NO: 16395 - protein, 345 aa, unidentified
KAKVLYESDVELRDDIVKLLATRRQLRRRRRSRKTRYRPARFDNRRRKEGWLTPSIRQKIESHLTVVANVCKILPVSQIIVETASFDIQKIKNPDIQGIEYQQGEQMDFWNIREYVLFRDGHTCQCCKGKSKDKVLNVHHIESRKTGGNAPNNLITLCETCHKGYHNGTVTLPKNIKRGMKFKDAAFMGIMRWTFYNTLKEQYEPDIPVSMTYGYLTKNTRIEHGLPKEHYIDARCISGNPDAVSDGTYYYQKKVRCHNRQIHKQTILKGGIRKSNQAEYLVKGYRLFDKVRYQGREYFIFGRRKSGFFDIRTLSGEKVNKGSINVKRLTFVDTRKNYLTERRTV

SEQ ID NO: 16396 - protein, 443 aa, Anoxybacillus sp.; identical to SEQ ID NO: 2800

SEQ ID NO: 16397 - protein, 512 aa, unidentified; identical to SEQ ID NO: 5621

SEQ ID NO: 16398 - protein, 442 aa, unidentified; identical to SEQ ID NO: 2903

SEQ ID NO: 16399 - protein, 504 aa, Eubacterium hallii; identical to SEQ ID NO: 3854

SEQ ID NO: 16400 - protein, 414 aa, unidentified; identical to SEQ ID NO: 8369

SEQ ID NO: 16401 - protein, 302 aa, unidentified
VEVKIQEHMTAIRRACAILPVSKVVVETAEFDLQLLKAVAEGKPVPQGEDYQKGEMYGHYNVRQYVLWRDSYTCRICGVHGSVRKGVPLHVHHLESRRVGGDAPDNLVTLCTACHDKLHKGIIMAADIKKRKRRSTRDATFMGIMRMTLLRRLREQLPVPVVETRGYITKATRENLLVLPKSHTNDALAIAHGPQGFRAEYLPNIRQADQLYTICPVRHHNRQLHKATILKGGVRKANQAEKYICGFRLYDKVLYNGIECFVWGRRTSGSFLLRQLNGEKVKDGVSYKHLKLLERSQSYLVA

SEQ ID NO: 16402 - protein, 462 aa, unidentified; identical to SEQ ID NO: 10791

SEQ ID NO: 16403 - protein, 421 aa, unidentified
MLVYVLNQNGRPLMPISRCGKVRRLLKDKQAKVVRRCPFTIKLLYEPSTDMVQECYCGVDTGSKYIGTAVIGNDRVLYQSQTELRNDIKKKMDRKRVFRRNRRNRKTRYRKCRFLNRRNSIREDRLPPSVKHKVQAHIDEIEFCKKILPISDLILEVSQFDTALMKTPSLIDEKVRHWGYQQGFNYGYSSRREAVLHRDNYTCQCCGKKNCRLEVHHIRFRSNGGTDDEGNLITLCEDCHKGVHAGTVVLSKKPKKSKNLKYATHMSIIRSQLLKKYPDAVETFGFVTSENRNHLKLKKDHYIDACVIASGGLEFKELDVILYKQRVSKGDYQLCKGIRGEIKIPTGKICGFRKFDKVRYLGKECFIRGRMSSGFTILMNIFGEKIDFSNLLRGLKTPKLSNCNRISARRSCLCIKQIRKV

SEQ ID NO: 16404 - protein, 477 aa, unidentified; identical to SEQ ID NO: 12969

SEQ ID NO: 16405 - protein, 518 aa, unidentified
LANLKLIDELLEKTEYIYVLGTDGKPQMPTNRKVRVRSLFKSGLAKIVDTVPFTIRLLYENDAVLQPITIAEDPGRTNIGAAVLTQLGNLVFSAVVETRNKSIKKLMSDRKAYRQASRRGERKARQRLAKRHGSMIKAGMIMRKLPQYAADKFVTCKIIKNTEARFCNRKRMPDWLTPTVNHLVQTHINLIKKVEKYLPITDVAIEVNRFAFMQMENPDASGVDFQNGPLKGFDDVKAAICEQQHGKCLMCKNDIEHFHHIVPRSKGGSDTIQNQAGLCKKCHTKVHTDAEFQAKFKDKKEGLIKKYGALSALNQSIPFICKELLEIYSVEHVHFCTGKDTSLIRSSLGYEKTKDNQMHEVDAYCIGLAAIGADKAKRPDFNNVFKIKQFRRQDRQLVHYQKERTYYLDGKKIATNRNPRFEQKGDALSDWYKEQIKIYGQYEAEKMRSRLTVKKSKRSYNTTKRLMPGCVFYYDGQRHVMTGQSSYGRYLRAYNCRTKDFPASKCQVIQFNAGLVFV

SEQ ID NO: 16406 - protein, 493 aa, unidentified; identical to SEQ ID NO: 3781

SEQ ID NO: 16407 - protein, 446 aa, Pseudomonas sp.; identical to SEQ ID NO: 12637

SEQ ID NO: 16408 - protein, 417 aa, unidentified
MPCSPAKARLLLKEKKAIVKRRTPFTIQLTIATGEAKQPIALGVDSGYKHIGLSATTEKAEFYASEVELRQDITDLLSARLALRRSRRSLKTRYRAPRFDNRVASKREGRLAPSVENRIAAHMSRVEAVMRVLPVTAITVETAAFDTQLLKNPDIAGAAYQQGEQLGFWNVREYVLFRDGHVCPHCRGKYKDPILNVHHIESRRTGGDAPNNLITLCETCHKAFHRGEIKLKVKRGKSFKAETFMGIMRWTLFERLKKAHPELSVRNTYGYLTKHKRISHGIAKSHCADAYCIADNLGAKRLEGFFFQKQTRKHNRQIHKLSILKGGLRKKNQAPYEVKGFRLFDKVIYKGEEAFIFGRRTSGSFDVRRLDGTRISAGINYKKLRLLEPRTTYLTEFRMEAALPPLHECRGFRAEFL

SEQ ID NO: 16409 - protein, 264 aa, unidentified
MVYVQDINGKPLMPTTRHGKVRRLLKDKKAVVVNLCPFTIKLTYVTSDYKQEIVLGVDAGTKHVGLSATTKSKELYSSEVILRSDIVDLLSTRRELRRTRRNRLRYRKPRFDNRIKSKRPGWVAPSVKYKIDAHIRVVENVCSILPISRIVIEVAQFDTQKIKNPNISGKEYQEGDQLGFWNVREYVLARDGHKCQYCKGKSKDSILNVHHIESRKTGGSSPSNLITLCETCHKEYHKGNIDLKIKRGKSLRDAAVMGIMKWRL

SEQ ID NO: 16410 - protein, 430 aa, unidentified; identical to SEQ ID NO: 4002

SEQ ID NO: 16411 - protein, 408 aa, unidentified
MPCSQKKARLLLKQNKAKITNYNPFTIQLLVPTGETIQECNLGIDSGAKNVGFAITSQDKVLIKGEIELRQDVSKLLTTKRTFRKSRRNRKTRYRKARWENRTRKEGWLPPSIQSRIDNQINWINKFMSLLPNCNLIVEVGKFDTAKLINPDIQGEEYQQGNLYEYENIKSYLIVRENNKCQFCGKEYDGNGWHIHHIKQRKDGGTNKVDNLALVHEQCHKDYHLGLLKVKLKEPKDYKETAFMNILRQQIFKRVNCKITYGSYTKVDRNSLNLDKTHYNDAIAISGIKKVKENPEQLLKIKQFRKKKRSLHEAIPRKGRKEKNITQKRNSKNTKCSNGFYLNDKVKVLDKVGWISGFCNGGCYIKDIEDNYITLEGKTYKQVGFKNLELICHNNNWQYGMLCVSSHE

SEQ ID NO: 16412 - protein, 418 aa, unidentified
MVYVINKDGQALMPTERFGKVRRLLKNGLAHVVCRIPFTIRLDYETTHFVQPISLGVDAGSKHIGISATTSKKELYAADVELRNDIVEKLSTRREQRRTRRNRLRYRKARFNNRVSSKHKGWLAPSVENKIQTHLTVVEKIHKFLPITKIIVETASFDIQKINNPSISSEEYQQGEQLDFFNVREYVLFRDNHTCQHCKGKSKDHILNVHHIESRKTGGNSPSNLITLCESCHKAYHNGKIDIKVKCGASFRDATFMGIARWAIYERLKNIYPNVSMTFGYITKNTRITNGLPKEHHVDARCISGNPKSKPLGYYFYQKKVRCQNRQIHKANFLKGGRKKLNQSPFLVKGYRLFDLVEYQKELYYIFGRRDSGFFDIRRLDGTKVNKGSISCKRIRLVDIRRNIITERRNSCSIPPTN

SEQ ID NO: 16413 - protein, 442 aa, unidentified; identical to SEQ ID NO: 4418

SEQ ID NO: 16414 - protein, 419 aa, unidentified; identical to SEQ ID NO: 6355

SEQ ID NO: 16415 - protein, 411 aa, unidentified; identical to SEQ ID NO: 6901

SEQ ID NO: 16416 - protein, 456 aa, unidentified; identical to SEQ ID NO: 5716

SEQ ID NO: 16417 - protein, 429 aa, Parasutterella sp.; identical to SEQ ID NO: 11579

SEQ ID NO: 16418 - protein, 460 aa, unidentified; identical to SEQ ID NO: 8636

SEQ ID NO: 16419 - protein, 415 aa, unidentified; identical to SEQ ID NO: 3548

SEQ ID NO: 16420 - protein, 536 aa, unidentified; identical to SEQ ID NO: 4526

SEQ ID NO: 16421 - protein, 443 aa, unidentified
MTKTATQKVIQVCVLDQNGQPLMPTQRLGKVYRLLKTKKAHIVNYEPFTIKLNYEPKTHIIQPLTLGVDSGAIHSGYSLANEHREYYNAEVIARDNISKNISDKRMYRRNRRSRKTRYRKPRFNNRKNKGEGWIPPSLEQKVSVQIKEIEHLHQYFPIKDIIIEVAEFDIQKIKNPDISGKEYQQGTLQGYNIRNYLLEKYHHKCFYCDKEVSTFEVEHMIPRARNGSNRIDNLTLSCHDCNQKKGTLTAEEFITQTLSPQKAAQKLRQLPKTKQLLKYMAHMNTTRWVLYNTIKETYDSVSLTYGYITKHNRINAGLPKAHHIDAKCITGFSTVPSFDITVVKTKMRRHNRQLHRATFSKGHIRKAATLPRFVHGFQLYDIVLFNNHQYYIKGRRSSGSFALVSLEGLKDENRNYKKITFLAHTNAYLTNHYVNDTANRANG

SEQ ID NO: 16422 - protein, 419 aa, unidentified; identical to SEQ ID NO: 2658

SEQ ID NO: 16423 - protein, 473 aa, unidentified; identical to SEQ ID NO: 3562
  source 1..473: note = uncultured beta proteobacterium

SEQ ID NO: 16424 - protein, 428 aa, unidentified; identical to SEQ ID NO: 12217

SEQ ID NO: 16425 - protein, 535 aa, unidentified; identical to SEQ ID NO: 6116

SEQ ID NO: 16426 - protein, 420 aa, unidentified
LQFYRKEHGIMQYVYVLSKHGEPMMPCSPGKARLLLKQQKACVVRRTPFTIKLLYGSVGYKQPITLGVDAGSKHVGLSASTEKRELYREEFTPRNDVVELLSTRRQNRRSRRNRKTRYRAPRFDNRVHSKHKGWLAPSVEVKIQEHITIIKRICKILPISLVRVETAEFDTQRLKAMLAGKPLPVGTDYQLGEMYDEYNVRQYVLKRDNYTCQCCGAHTTAKKLVKLHVHHLESRKTGGNAPSNLVTLCTTCHKNLHKGNVTLDGKERGKPLRDAAFMGIMRKTLMARLKEELPIPVQGTYGYITKMRREQNDIKKGHTNDARCISKHPLAEPCSVCYRTKAIRHHNRQTHKANFSKKGIRKRSQMPYLVEGYRLWDKVLYKEQECFVSGRRSSGSFTLKKLDGTSVSKGVTFKKLRLLE

SEQ ID NO: 16427 - protein, 416 aa, unidentified; identical to SEQ ID NO: 3007

SEQ ID NO: 16428 - protein, 442 aa, unidentified; identical to SEQ ID NO: 7396

SEQ ID NO: 16429 - protein, 502 aa, unidentified
MSIIYVQDRHGKPLAPTTRGGHVRRLLDSKQARVVCGNPFTIRLMYGVDPCTQGFILGIDPGRTNIGVTVAAADGTCVFSAKAETNNKDVPKRMKERKAHRQASRQGERKRRQRRARKNGTCFGERKRILPGCKEPITNHYITNTEARFMNRARTKGWLTPTANQLLQSTISLVRKVCKFLPVTDVVLELNEFAFMAMDDPGIQRWEYQKGPLYGYGSVEAAVYTQQDGHCIFCEQAIAHCHHVIPASEGGSDTLENRAGLCGGHHDLVHKEQSWTDKLAELKAGMNKRYAALSVVNQIIPRLADELGKMFPGHAFATNGWSTKQFRDAHGIPKDHNTDADCIACSILENPTIKLPEKVYELRKFRRHDRAQISRMEDRNYYLPGADPKTGKPKKVLAAKNRHKRTEQKTDSLEEFRAAHPNDVGRLMVARGGPKHKDPNRVLPGAIFQVETSSGNVEQLVLQGSHGRDKNGQPLYLEFIGQGNFRPNRCKYVARGRGWQFV

SEQ ID NO: 16430 - protein, 418 aa, unidentified
MQNYVLVIDTNKRPLNPIYPKKARRLLDKGKAAVFRMYPFTIILKTAIYNPVVLPCHIKIDPGSKTTGFALVQNNQVIWGMELEHRGELIKKKLESRKAVRRGRRNRHTRYRKPRFLNRRRKDGWLPPSLEHRILTIQTWVKRLIKFCPVNEIWVERVKFDTQKMQNPEINGIQYQQGELAGYEVREYLLEKWGRECTYCGKQSIPLQIEHIHPKSKGGSNRVSNLCLACEKCNQRKGNKSIEDFLKKKPNLLQKIKTKAKQPLPDAAAVNTTRNKLVKVLRSIKLVVTGTGAQTKYNRTKLGLPKQHWIDAACVGDIETLVLRTSQPLLVTCKGQGGRQKAALNKYGYPIRHNPLKPIKGWVTGDIAKHKKLGIGKVTPRSKGSFGFTPLGTKGYKSCKSQDISAIHRKDGYTYRFC

SEQ ID NO: 16431 - protein, 468 aa, unidentified
LAVFVLDKVGRPLMPCSEKRARLLLARGRARVHRLMPFAIRLVDRELHSSALQPLRIKLDPGSKATGLALVRDAEHVDTSTGEIHRGAVVLNLFELIHRGRQISEALTARRTMRRHRRSTLRYRAPRFLNRTRPAGWLPPSLQHRVDTTLAWVERLRCWAPIAAVSTELVRFDMQALDNPEVTGIEYQHGTLFGYELREYLLQKWTHKCCYCDAQNVPLNIEHLVPRARGGSKRVSNLAIACVACNVSKGARRLDVFVKDEARLARIIAQALRPLKDASAVNTTRWALVNALRATGVPVETASGGRTKHNRSQLGIPKTHALDAVCVGDVSTVLGWRKPTLQVKCTGRGSYQRTRRNKYGFPVGYLMRAKRVQGFGTGDVVRADVPTGKKAGTYHGRVAVRAKGNFNIQTHDRVVQGVAHRYCRLLQRADGYGYSRMATNKGEAGVGAVMRPAPSLPGPAAEVSRDEG

SEQ ID NO: 16432 - protein, 472 aa, unidentified; identical to SEQ ID NO: 7536

SEQ ID NO: 16433 - protein, 417 aa, unidentified; identical to SEQ ID NO: 9081

SEQ ID NO: 16434 - protein, 267 aa, unidentified
MVYVLDKNGQPLMPTDRHRKVRLMLQSGQAKVIKRCPFTIQLNYDSGHQTQEISLGIDAGSKHIGVSATTKIKVLYEVDVELRNDIVDLLSSRRELRRGRRNRKTRYRQAKFNNRRRGNGWLAPSIRQKIGTHLTVVENICKILPISRIMFETASFDIQKIKNPDIQGAEYQQGDQLGFWNVREYVLFRDGHTCQCCKGKSKDKILNVHHIGSRKTGGNAPNNLITLCETCHTGYHKGTVQLPKAIKRGMRFKDAAFMGIMRWAFYE

SEQ ID NO: 16435 - protein, 444 aa, Halanaerobium sp.; identical to SEQ ID NO: 15066

SEQ ID NO: 16436 - protein, 419 aa, unidentified; identical to SEQ ID NO: 3670

SEQ ID NO: 16437 - protein, 507 aa, unidentified
MSEYIYVLGVDGDPQMPTKRKRHVEKLLQAGRARVFRQIPFTIQLTYENKPVLQPITIAEDPGRSNIGMAVVSLSGELLSAAVVQTRNKEIVKLMDKRKQHRRASRNGERKARQRLAKKCHTMIKAGFLMRKLPMYGKDKRVKCLVIKNTESRFCNRKREDGWLTPSAEHLVQTHINLIHKMQKFLPITDVAIEINRFAFLSLEDPSISGVDFQNGPLKGYDDLNAAIEDLQDGHCLMCNSPIEHRHHIVPRSMQGSNTIGNIAGLCCKCHEKVHKDSAFEDSLKKKKAGLNKRYAAVSVLNQAIPFICKRLEQEFGKEHVHYCSGRDTSMVRRSFGYHKTKEEQLHEVDAWCIAVLSLQHVPEKAPEFDHVHEILQFRRQDRSRIKAQTSRAYYYKGKKIAKNRKKAEGQREDSLQEWRKRQVERYGEEQTRKMISQLKVKKSIRRYNRLDRLMPGAVFYYQGIRYVMRGQHCEGTYLQAVGMGSKDFPAKKCKIVAQNEGLVFVS

SEQ ID NO: 16438 - protein, 424 aa, Enterococcus sp.; identical to SEQ ID NO: 4410

SEQ ID NO: 16439 - protein, 418 aa, unidentified; identical to SEQ ID NO: 8661

SEQ ID NO: 16440 - protein, 422 aa, unidentified; identical to SEQ ID NO: 9722

SEQ ID NO: 16441 - protein, 413 aa, unidentified
LKVFVLNMRGKPLMPCSPAKARHMLKAGKAFVVRRTPFTIKLTIATGETKQDVTLGVDAGARHVGISATTEKEEVFASEVALRQDITGLLADRLAFRRARRNRKTRYRAPRFNNRVRSKHKGWLAPSVENRIQAHMSRIEAVCRLLPVTKIVIETASFDIQKIRNPEVEGTGYQQGDQLGFWNVREYVLFRDGHICQHCRGRSKDPILNVHHLESRKTGGDAPNNLITLCETCHKAYHAGKIKLKVKRGQSFRAEAFMGIMRWTLLDRVRKTHPKLPVENTYGYLTKHKRIALGLPKTHCADAFCIAGNLKALRRGDFLFQQQTRKHNRQIHKCSILKGGVRKLNQAPFLVKGFRLFDKVRIGGQIGFVFGRRVRGTFNIRRLDKTVIGTDINCKKLSLLETRKTFLTELRKE

SEQ ID NO: 16442 - protein, 414 aa, unidentified
MPCSPAKARLLLKEKKAIVVRRTPFTIQLTIATGEAKQPVSLGVDAGYKHVGLSASTEKAELYASEVELRQDITDLLSARRALRQSRRNRKTRYRAPRFDNRIRTKRKGWLAPSVENRINAHLSRIKAVLRLLPVTKITVETASFDLQLLKNPDISGKEYQEGEQLGFWNIREYVLCRDGHVCQHCYGRSKDPVLNVHHLESRRTGGDSPGNLITLCETCHKALHRGEITLKAKRGQSFRAEAFMGIMRWEVLNRLKASHPELEVNNTYGYRTKHARIANDIAKSHCADAFCIAGNLGAERLGEFFFQKQTRRNNRQIHKLSILKGGIRKRNQAPFEVNGFRLFDKVACKGEEGFIFGRRSSGFFDVRKLDGTRISAGISYKKLHLLEKRRTYLTEIRKEEALPPLPEGRGLRA

SEQ ID NO: 16443 - protein, 254 aa, unidentified; identical to SEQ ID NO: 9597

SEQ ID NO: 16444 - protein, 512 aa, unidentified
MSTVYVLNKDGKPLMPTTRCGHVRHLLKEQKARVVTSKPFTIQLLYETNDVVQPLYLGIDPGRTNIGVAVVKMDGTAVFTAHLETRNKEIPKLMKRRKESRRARRTNGRRCRRQRRAKANGTISKKCVKQATAQNGSASKRAKEIGVIKRHLPGCDKEVLCIGIKNKEAKFSNRTRPEGWFTPTANQLLQTHINLVKKIRKFLPISDVVLEVNKFAFMQLDNPNIQKRQYQQGPLYQKESLESAVSEMQEHHCLFCKKPIDHYHHVVPQHKNGSNTIDNIVGLCTKHHDLVHKDTTWQKRLAKKKTGLNKKYGALSVLNQIIPALTKELSSLFPKHFFVTNGKSTYDYRATHAVSKDHWLDAYCIACSVLPNDVCDSDINNRVPYELKQFRRHDRRALHKENMNRVYTLNDKKVATNRHKAVEQTTDSLEEFRQRQPNDVCKLKVKEHHPEYRNPKRNFPGCVFLVGKRTHVMQGTSGSHNGKADGYYDTNGSSYSSGKCKLVAKNKGIVFT

SEQ ID NO: 16445 - protein, 442 aa, unidentified; identical to SEQ ID NO: 3791

SEQ ID NO: 16446 - protein, 396 aa, unidentified
VKRRTPFTIQLTIATGETKQPVGLGVDAGYKHVGLSASTDKAELYASQVELRQDITDLLSARRALRRARRNRKTRYRAPRFNNRIRTKRKGWLAPSVENRINAHLSRIEAVLRLLPVTKITVETASFDMLLLKNPDIAGKEYQEGEQLGFWNVREYVLFRDGHVCQHCYGRSKDPVLNVHHLESRRTGGDSPGNLITLCETCHEALHRGEIALKTKRGHSFRAEAFMGMMRWEVLNRLKASHSELEVNNTYGYRTKHARIVNGIDKSHCADAFCIAGNLGAERLCEFFFQKQTRRNNRQIHKLSILKGGIRKRNQAPIEIKGFRLFDKVACKGEESFIFGRRSSGYFDVRKLDGTRISAGISYKKLRLLEKRRTYLTEIRKEEALPPLPEGRGLRA

SEQ ID NO: 16447 - protein, 416 aa, unidentified
  source 1..416: note = Firmicutes bacterium CAG:227
MRGEPLMPCTQRKARLLLKTGKAKIYKYNPFTIQLKYVTGENKQECHVGIDTGSKYIGLAVTSENKVLFKGEVELRQDVKSKIDTKRIYRRSRRNRKTRYRRCRFLNRKRFGKWLPPSLQNRINHTFKWIDKLCSFIPESILHIEVGKFDIAKMINPEVHSVDYSQGQTYGYQGERYFIFARDNYTCQVCGERNKPLQTHHIIYVSNGGTNRVDNQITVCKECHTSTNHKNGGIFYKWQKEHKKVKQYKAPPFMNVLRQQILNQYPQALITYGFETTIKRKNIGLEKTHYNDAIVISGVSTISENLHEWLLIRQFRKKKRSLHEGVPRKGRKEPNRIQKRNSKNTPYYRGFYLNDKVSVFGKSGYITGFTNSGAYVKGVDGEYIVLPNKSYKRVNIASLKFICHNNNWQYITKNAV

SEQ ID NO: 16448 - protein, 473 aa, Actinoplanes sp.; identical to SEQ ID NO: 10707

SEQ ID NO: 16449 - protein, 427 aa, unidentified
LRVFVLNKRGKPLMPCSPAKARLLLKEKKAIVVRRTPFTIQLTIATGESKQPVSLGVDAGYKHVGLSASTEKAELYASEVELRKDITDLLSARRALRQSRRNRKTRYRAPRFDNRIRTKRKGWLAPSVENRINAHLSRIEAVLRLLPITKITVETASFDMQRLKNPDISGKEYQEGEQLGFWNVREYVLFRDGHVCRHCHGRSKDPVLNVHHLESRRTGSDSPDNLITLCETCHKALHRGEITLKAKRGQSFRAQAFMGIMRREVLNRLKASYPELKVHETYGYLTKHARIANGIVKSHGADAFCIAGNLGAERLGEFFFQKQTRRNNRQIHKLSILKGGIRKRNQAPFEAKGFRLFDKVACQGEEGFIFGRRSSGSFDVRKLDGTRISAGISCKKLRLLEKRRTYLTEIRKEEALPPLPEGRGLRA

SEQ ID NO: 16450 - protein, 430 aa, unidentified
MPKVYVLNRHGRPLMPCTPAKARHLLDAGKAKVRHRTPFTIQLLYGSTGYTQEVILGVDAGSKTIGLSAATETEELFSAEVKPRNDVVELMSARRQFRRARRNRTTRYRKPRFDNRVRSKHKGWLAPSVEVKIQEHMTAIRRACAILPVSKVVVETAEFDLQLLKAVAEGKPVPQGEDYQKGEMYGHYNVRQYVLWRDSYTCCICGVHGSVRKGVPLHVHHLESRRVGGDAPDNLVTLCTACHDKLHKGIIMAADIKKRKRRSTRDATFMGIMRMTLLRRLWEQLPVPVVETRGYITKATRENLLVLPKSHTNDALAIAHGPQGFRAEYLPNIRQADRLYTIRPVRHHNRQLHKATILKGGVRKANQAEKYICGFRLYDKVLYNGIECFVWGRRTSGSFLLRQLNGEKVKDGVSHKQLKLLERSQSYLVA

SEQ ID NO: 16451 - protein, 416 aa, unidentified; identical to SEQ ID NO: 4039

SEQ ID NO: 16452 - protein, 398 aa, unidentified
MVRLGDCLKTKKAVVVNLCPFTIRLTYVTSDYKQEIVLGVDAGTKHVGLSATTKSKELYSSEVILRNDIVDLLSTRRELRRSRRNRLRYRKPRFDNRVKSKRPGWIAPSVKYKVDAHIRVIDNVCSILPISRIVIEVAQFDTQKIKNPNISGKEYQEGDQLGFWNVREYVLARDGHKCQYCKGKSKDKILNVHHIESRKTGGDSPSNLITLCETCHKEYHKGNIDLKIKRGSSLRDAAVMGIMKWRLYEELKSKYNNVSITFGYITKYNRIHNSIEKSHVSDAFVISKNFNAIRLGYYYKIRLVRRHNRQIHKQKIQKGGTKRPNQSPFEVFGFRLFDRVMFENSYYFIFGRRKTGRFSIRDIDDKSQKDITYKKLKLSRCKRFMIQKEMDLLIRIKI

SEQ ID NO: 16453 - protein, 431 aa, unidentified; identical to SEQ ID NO: 8901

SEQ ID NO: 16454 - protein, 446 aa, Lactobacillus sp.; identical to SEQ ID NO: 12236

SEQ ID NO: 16455 - protein, 452 aa, unidentified; identical to SEQ ID NO: 13319

SEQ ID NO: 16456 - protein, 242 aa, unidentified
MPNKVYVINKHGRPLMPCSPAKARHLLDAGKAKVKKRTPFTIQLVYGSSGYTQEVILGVDAGSKTIGMSVSTTKEELLSAEVKPRNDVVDLLSTRREFRRARRNRKTRYRKPRFDNRVRSKHKGWLAPSVEVKIQEHITSIKMVCRILPVSKVVVETAEFDLQLLKAIEEGKPVPQGEDYQQGEMYGHYNVRQYVLWRDNYTCQCCGAHPTKKKEVRLHVHHLESRKVGGNAPGNLVTLWRC

SEQ ID NO: 16457 - protein, 434 aa, Marinobacter sp.; identical to SEQ ID NO: 10302

SEQ ID NO: 16458 - protein, 448 aa, unidentified
VTLGKDFDSSLEENSFFLAVNLLGKERDIMYVYVINKHGEPLMPCSSHKARTLLNNKKACVVKRTPFTIKLLHGSAGYKQPITLGVDAGSKHVGLSASTETHELYREEFAPRNDVVDLLSTRREFRRARRNRKTRYRAPRFNNRVHSKHKGWLAPSVDVKIQEHITIIKHACQIIPVSLVRVETAEFDTQRLKAMLEDKPLPVGTDYQLGEMYDEYNVRQYVLKRDNYTCQCCGAHATKTKQVKLHVHHLESRKTGGNAPNNLITLCPTCHKAIHEGKKTLSNKKRGKPFRDAAFMGIMRKTLLARLREELPIPVQQTYGYITKMLREKNNLPKSHMNDALCIAKHPKAEPCDNCYRSKAVRHHNRQIHKASILKGGIRKNNQAPYIVKGFRLWDKVRYDGQECFISGRRVTGYFALKKLDGTVVTNSGSYKKLRLLETTKNYLRERM

SEQ ID NO: 16459 - protein, 516 aa, unidentified; identical to SEQ ID NO: 7332

SEQ ID NO: 16460 - protein, 408 aa, unidentified; identical to SEQ ID NO: 5694

SEQ ID NO: 16461 - protein, 308 aa, unidentified; identical to SEQ ID NO: 10888
  source 1..308: note = Cyanobacteria bacterium UBA11368

SEQ ID NO: 16462 - protein, 476 aa, unidentified; identical to SEQ ID NO: 11248

SEQ ID NO: 16463 - protein, 408 aa, unidentified; identical to SEQ ID NO: 6548

SEQ ID NO: 16464 - protein, 439 aa, unidentified; identical to SEQ ID NO: 3280

SEQ ID NO: 16465 - protein, 417 aa, unidentified
MPCSPAKARLLLKERKAIVKRRTPFTIQLTIATGEAKQPVALGVDSGYKHIGLSATTEKAELYASEVELRQDITDLLSARLALRRSRRSRKTRYRAPRFNNRVASKHKGWLAPSVENRIAAHLSRVEAVMRVLPVTAITVETAAFDTQLLKNPDIAGAAYQQGEQLGFWNVREYVLFRDGHVCQYCRGKSKDPILNVHHIESRRTGGDAPNNLITLCETCHKAFHRGEIKLKVRRGKSFKAETFMGIMRRTLFERLKKAHPELNVRNTYGYLTKHKRISYGIAKSHCADAYCIADNLGAKRLEGFFFQKQTRKHNRQIHKLLILKGGLKKKNQAPYEVKGFRLFDKVICKGEEAFIFGRRTSGSFDVRRLDGTRISAGINYKKLRLLEPRTTYLTEFRKEAALPPLHECRGFRAEFL

SEQ ID NO: 16466 - protein, 429 aa, unidentified
MLVYVLKQNGQPFMPTKRFGKVRRLLKAKKAKVVRREPFTIKLLYEPETDVIQECYCGVDTGSRHIGVAVVSNDKVLYQSQTELRSDIKRKMDARRMHRRNRRSRKTRYRKPRFLNRGNSTKNDRLPPSVKHKVQAHIDEIEFCKKILPVSDLIIEVSQFDTTLMKDPGLISEKVRHWGYQQGFNYGYSSRREAILHRDNYTCQCCGKKSCRLEVHHVKFKSNGGTDDEENLLTLCEDCHKGVHAGTVTLNKKPKKSKNLKYATQMSIIRSYLLKKYPNAIETFGFVTSENRNHLNLEKDHYIDACVVASGGLEFKELDVIYRKRRVPKQDRVLTKGVRGEQKLPTRKIFGFKKFDKVEYLGETCFIKARRSNGAFILMDIDNNSIDFRDRGGKQNPSYMSIKRITARKNVLCISKRIEREVRLIPIPS

SEQ ID NO: 16467 - protein, 498 aa, unidentified; identical to SEQ ID NO: 2448

SEQ ID NO: 16468 - protein, 428 aa, Enterococcus sp.; identical to SEQ ID NO: 4335

SEQ ID NO: 16469 - protein, 464 aa, unidentified
MNVFVIGQNGTRLMPCKPQKARKLIKEKKAKIVRKLPFTIQLTYKTGSTTQPVTVGIDTGSQHIGIAVVTEKAVLYHGEVELRSTMEKRTLMETRSSYRRGRRYRKTRYRKPKFRFQTKRIYSAEPVKRKSTGNMTHWVKVSNQVTSNRPEGWLPPSVQSKVEHHIRWIRRFLNVLPEETNLRLETARFDMARMQNPEIHGELYQRGPQYDAENVKAYVFDRDRYTCAICKRKLGSKQKDGTTLKGKVHHILYRSKGATDNPKYLITVCMDCHTPEAHRESGTLYQMMQDAKPTTRGLRDATMMNVARKRLIQAFPEAEITYGNITKADREAILLPKSHANDAIAVATKENPVILTDPAVQIRQVRKKKRSLHEATPRKGRKEPNRLAVRSQKNTKNVGKYHLYDTVQYRTQTGYITGFTGKAAYVQTFEGVYIKPEGKIYKQISLSELKLLRHNNNWIQRAGA

SEQ ID NO: 16470 - protein, 453 aa, unidentified; identical to SEQ ID NO: 2687

SEQ ID NO: 16471 - protein, 427 aa, Enterococcus sp.; identical to SEQ ID NO: 2410

SEQ ID NO: 16472 - protein, 517 aa, Nocardiopsis sp.; identical to SEQ ID NO: 6685

SEQ ID NO: 16473 - protein, 451 aa, unidentified; identical to SEQ ID NO: 3061

SEQ ID NO: 16474 - protein, 404 aa, unidentified
LLKEKKAIVVRRTPFTIQLTIATGEAKQPVSLGVDAGYKHVGLSASTEKAELYASEVELRQDVSDLLSARRALRQSRRSRNTRYRAPRFDNRIRTKRKGWLAPTVENRINVHLSRIETVLRLLPVTKITVETASFDTQLLKNPDIAGKEYQEGEQLGFWNVREYVLFRDGHVCQHCHGRSKDPVLNVHHLESRRTGGDSPGNLITLCETCHKALHRGEIKLKAKRGRSFRAETFMGIMRWGVLNRLKASHPKLEVHNTYGYRTKHARIANGIAKSHCADAFCIAGNFGAKRLGEFFFQKQTRRNNRQIHKLSILKGGIRKRNQAPFEVKGFRLFDKVACQGEEGFIFGRRSTGYFDVRKLDGTCISAGISYKKLHLLEKRRTYLTEIRKEEALPPPPEGRGLRA

SEQ ID NO: 16475 - protein, 434 aa, Lactobacillus sp.; identical to SEQ ID NO: 2383

SEQ ID NO: 16476 - protein, 420 aa, unidentified
MQYVYVLNKHGEPLMPCSPGKARLLLKQQKACVVKRTPFTIKLLFGSAGYKQPITLGVDAGSKHVGLSASTEKRELYSEEFTPRSDVVELLSTRRQNRRSRRNRKTRYRVPRFDNRVHSKHKGWLAPSVEVKIQEHITVIKHICKILPISLVRVETAEFDTQRLKAMLAGKPLPVGTDYQLGEMYDEYNVRQYVLKRDHYTCQCCGTHNTAKKVVKLHVHHLESRKVGGNAPSNLITLCTTCHDALHKGKVSLDGKERGKPLRDAAFMGIMRKALMARLREELPIPVQGTYGYITKMRREQNDIKKSHVNDARCISKHPLAEPCSVCYRTKAIRHHNRQTHKVNFSKKGIRKRSQMPYLVEGFRLWDKVLYKGQECFVSGRRASGSFTLKKLDGTRISKGVTFKKLRLLEPATNYLIERM

SEQ ID NO: 16477 - protein, 420 aa, unidentified
MQYVYVLNKHGEPLMPCSPGKARLLLKRQKACVVKRTPFTIKLLHESAGYKQPITLGVDAGSKHVGLSASTETHELYCEEFTPRNDVVELLSTRRQNRRSRRYRKTRYRAPRFNNRVHSKHKGWLAPSVEVKIQEHITVIKRICRILPITLVRVETAEFDTQRLKAMLAGKPLPVGTDYQLGEMYDEYNVRQYVLKRDNYTCQCCGAHTTAKKAIKLHVHHLESRKVGGNAPSNLITLCTACHDNLHKGKVTLDGKKRGKTLRDAAFMGIMRNTLLIRLRNELNIPVQNTYGYITKLLREQNDIKKSHINDARCISKHPLAEPCSVCYRTKAIRHHNRQIHKAKILKGGIRKANQAPYIVKGFRLWDKVLYNGQECFISGRRSSGYFALKKLDGTAITNSISFRKLRLLEPAINYLIERM

SEQ ID NO: 16478 - protein, 470 aa, unidentified; identical to SEQ ID NO: 2825

SEQ ID NO: 16479 - protein, 408 aa, unidentified; identical to SEQ ID NO: 5302

SEQ ID NO: 16480 - protein, 417 aa, unidentified; identical to SEQ ID NO: 6596

SEQ ID NO: 16481 - protein, 470 aa, unidentified; identical to SEQ ID NO: 2825

SEQ ID NO: 16482 - protein, 408 aa, unidentified; identical to SEQ ID NO: 6729

SEQ ID NO: 16483 - protein, 442 aa, unidentified; identical to SEQ ID NO: 2903

SEQ ID NO: 16484 - protein, 431 aa, unidentified
MDAWDIIVVLNKRGKPLMPCSPAKARLLLKEKKAIVVRRTPFTIQLTIATGESKQPVSLGVDAGYKHVGLSASTEKAELYASEVELRQDITDLLSARRALRQSRRNRKTRYRAPRFDNRISTKRKGWLAPSVENRINAHLSRIEAVLRLLPVTKITVETASFDMQLLKNPDIAGKEYQEGEQLGFWNVREYVLFRDGHVCQHCHGRSKDPVLNVHHLESRRTGGDSPGNLITLCETCHKALHRGEITLKAKRGQSFRAETFMGIMRWEVLDRLKASHPKLEVHNTYGYRTKHARIANDIAKSHCADAFCIAGNLGAERLGEFFFQKQTRRNNRQIHKLSILKGGIRKRNQAPFEVKGFRLFDKVACQGEEGFIFGRRSSGFFDVRKLDGTRISAGISYKKLHLLEKRRTYLTEIRKEEALPPLPEGRGLRA

SEQ ID NO: 16485 - protein, 373 aa, unidentified
MSNFVFVLDTTKKPLNPVHPAQARRLLKQGKAAVFRRYPFTIILFEEITETPKNITLKLDPGSQTTGIALVQNNQVIWGAELQHRGQQIQDALTSRRQLRRGRRGRKTRYRQPRFLNRKRSEGWLPPSLQHRVDTTLTWVKRLTRYCPINSLAVELVKFDLQKQENPEISGVEYRQGTLYGWEVREYLLAKFNRTCQYCGATDRPFEIDHIHPRSKGGSDRVSNLTLACHNCNQSKGNQDIKDFLKEKPNLVNHILRQAKTSLKDAAAVNSTRLKLFLSLRELGLPIETGSGGLTKFNRKRLKVPKTHWQDASCLGKIPDDLIFKTNQPLLIQATGHGKRQRCRPNKFGFRISHASRAKLFQGFQTGDLVSAS

SEQ ID NO: 16486 - protein, 475 aa, unidentified
HPFGGLRLSHGHKISDALRGRNGDADKKPFPTLTKDENRPSGRTTGLRAEQAEPAGIRKGDTLKVFVLNMRGKPLMPCSPAKARHMLKAGKAVVVRRTPFTIKLTIATGETKQDVTLGVDAGARHVGISATTEKEEVFASEVALRQDITGLLADRLAFRRARRNRKTRYRAPRFNNRVRSKHKGWLAPSVENRIQAHMSRIEAVCRLLPVTKIVIETASFDIQKIRNPEVEGTGYQQGDQLGFWNVREYVLFRDGHICQHCRGRSKDPILNVHHLESRKTGGDAPNNLITLCETCHKAYHAGKIKLKVKRGQSFRAEAFMGIMRWTLLDRVRKTYPKLPVENTYGYLTKHKRIALGLPKTHCADAFCIAGNLKALRRGDFLFQQQTRKHNRQIHKCSILKGGVRKLNQAPFLVKGFRLFDKVRIGGQIGFVFGRRVRGTFNIRRLDKTVIGTDINCKKLSLLETRKTFLTELRKE

SEQ ID NO: 16487 - protein, 424 aa, unidentified
MVYVLSKEGTPLMPTNRRGRVRHLLDAGEAKAVKRCPFTIQLLYQSTTYTQEITLGVDAGSKTIGLSASTEKKELYASETRLRMDITDLLSVRRQFRRTRRNRKTRYRKARFNNRVHAKHKGWLAPGIEAKIGTHFRAVRDVCRILPVTEIIVETASFDIQKIKALENGEPVPEGTDYQEGDQLGFWNVREYVLWRDGYKCRCCNGKSKDQVLNVHHIESRKTGGDAPNNLATLCGYCHKQYHKGTILLPKSVRRGNSFRDAAFMGIMRRTFYNRLKEQYPRVAMTYGYITKNTRIRNSLPKTHYADARCIAGHPQAEPLEVYYFQKKVRCHNRQIHKSNILKGGKKKRNQAEYLVKGYRLYDRVRYQNREYYVFGRRASGFFDIRTLGGNKGNKGSVSCKKLRFLEPRKTMLTERRMQEREAV

SEQ ID NO: 16488 - protein, 450 aa, unidentified; identical to SEQ ID NO: 2935

SEQ ID NO: 16489 - protein, 429 aa, Parasutterella sp.; identical to SEQ ID NO: 3656

SEQ ID NO: 16490 - protein, 397 aa, unidentified
MVYVQDINGKPLIPTTRYGKVRRLLKANKAVVVNICPFTIKLTYVTSDYKQEIVLGVDAGTRHIGLSATTKSKELYSSEVILRNDIVDLLSTRRELRRTRRSRLRYRKPRFNNRIKSKKQEWIAPSVKYKIDAHIRVVEKVYSILPVSHIIIEVAQFDTQKIKNPDISGKEYQEGDQLGFWNVREYVLARDGHKCQHCKGKSKDAILNVHHIESRKTGGNSPSNLITLCETCHKEYHKGNIKLKVKRGTSLRDAAAMGMMKWKLLDKLKSLFPNVSMTFGYITKHNRINNNIEKSHISDAFVISKNFNAKRLNLQHKIKLVRRHNRQIHKMKIQKGGIKRPNQSPFEVFGFRLFDRVKFNDKFYFIYGRRKSGSFNIRDINGENSKDIMYKKLNLLR

SEQ ID NO: 16491 - protein, 414 aa, unidentified
MPCSPAKARLLLKEKKAIVKRRTPFTIQLTIATGESKQPVTLGVDAGYKHVGLSASTEKAELYASEVELRQDVSDLLSARRALRQSRRNRKTRYRAPRFNNRLRTKRKGWLAPSVENRINAHLSRIEAVLRLLPVTKITVETASFDMQLLKNPDIAGKEYQEGEQLGFWNVREYVLFRDRHVCQHCYGRSKDPVLNVHHLESRRTGGDSPDNLITLCETCHKALHRGDITLKAKRGKSFRAEAFMGIMRWEVHNRLRALHPGIEVSNTYGYRTKHARIANGIAKSHCADAFCIAGNLGAERLCEFFFQKQTRRNNRQIHKLSILKGGIRKRNQAPFEVKGFRLFDRVACQGEESFIFGRRSSGFFDVRKLDGTRISAGISCKKLHLLEKRRTYLTEIRKEEALPPLPEGRGLRA

SEQ ID NO: 16492 - protein, 531 aa, Acidithiobacillus sp.; identical to SEQ ID NO: 15629

SEQ ID NO: 16493 - protein, 443 aa, Anoxybacillus sp.; identical to SEQ ID NO: 2800

SEQ ID NO: 16494 - protein, 406 aa, unidentified
MRGKPLMPCSPAKARHMLKAGKAVVVRRTPFTIKLTIATGETKQDVTLGVDAGARHVGISATTEKEEVFASEVALRQDITGLLADRLAFRRARRNRKTRYRAPRFNNRVRSKHKGWLAPSVENRIQAHISRIEAVCRLLPVTKIVIETASFDIQKIRNPEVEGTGYQQGDQLGFWNVREYVLFRDGHVCQHCHGRSRDKILNVHHLESRKTGGDAPNNLITLCETCHKAYHAGKIKLKVKRGQSFRAEAFMGIMRWTLLDRVRKTHPKLPVENTYGYLTKHKRIALGLPKTHCADAFCIAGNLKALRRGDFLFQQQTRKHNRQIHKCSILKGGVRKLNQAPFLVKGFRLFDKVRIGGQIGFVFGRRVRGIFNIRRLDKTVIGTDINCKKLSLLETRKTFLTELRKE

SEQ ID NO: 16495 - protein, 413 aa, unidentified
LKVFVLNMRGKPLMPCSPAKARHMLKAGKAFVVRRTPFTIKLTIATGETKQDVTLGVDAGARHVGISATTEKEEVFASEVALRQDITGLLADRLAFRRARRNRKTRYRAPRFNNRVRSKHKGWLAPSVENRIQAHISRIEAVCRLLPVTKIVIETASFDIQKIRNPEVEGTGYQQGDQLGFWNVREYVLFRDGHICQHCRGRSKDPILNVHHLESRKTGGDAPNNLITLCETCHKAYHAGKIKLKVKRGQSFRAEAFMGIMRWTLLDRVRKTHPKLPVENTYGYLTKHKRIALGLPKTHCADAFCIAGNLKALRRGDFLFQQQTRKHNRQIHRCSILKGGVRKLNQAPFLVKGFRLFDKVRIGGQIGFVFGRRVRGTFNIRRLDKTVIGTDINCKKLSLLETRKTFLTELRKE

SEQ ID NO: 16496 - protein, 432 aa, unidentified; identical to SEQ ID NO: 5479

SEQ ID NO: 16497 - protein, 423 aa, unidentified
MVYVLNFDGQPLMPTDKHGKVRHLLKDGRAEVVKRCPFTIRLLYDSTHYTQDIVLGVDAGSKHIGLSATTETKELYASDVELRNDIVDLISTRRQNRRSRRNRKIRYRKARFQNRVSGKKNWLAPSIRQKVDTHMTVVSRVCMILPVTKIIVETASFDIQKIKDPDISGTGYQQGEQLDFWNVREYVLFRDGHTCQCCKGKSKDLVLNVHHIESRKTGGDAPNNLITLCETCHKGYHSGAVQLPKAIHRGMRFKDAAFMGVMRWNFYNKLKEIYELQGIEIRMTFGYLTKNSRIRHHLPKEHYIDARCISGHPEAIPNNEVFYQKKVRCHNRQIHKNTILKGGIRKRNQTGYLVKGFRLFDKVAYEGREYFIFGRRQSGFFDLRDLSGCKVNKGSLSYRKIRFLEPRQYYLCERRVMDTQGCA

SEQ ID NO: 16498 - protein, 303 aa, unidentified
MYRHRSDVHPNPPLCDNASLEAEVKPKDAADSNRLRPWGRMHYSPSGERTACFGIAVIPKKGETAMQYVYVVGSNGKPLMPCSPAKARKLLKTKSAAVLQRTPFTIKLLHHAGGYKQPITLGVDAGSKHIGLSACTETKELYKEELTPRNDVVKLLSKRRECRRGRRHRKTRYRTPRFNNRVRSKHKGWLAPSVEVKIQEHITAIHHICRRLPVTKIVVETAEFDTQRLKAMLEGKPLPVGTDYQRGEMYDEYNVRQYILKRDNYTCQHCGKRGSAEKGVKLHVHHLETRQTGGNTKHYTKAK

SEQ ID NO: 16499 - protein, 501 aa, unidentified; identical to SEQ ID NO: 9337

SEQ ID NO: 16500 - protein, 431 aa, unidentified; identical to SEQ ID NO: 4463

SEQ ID NO: 16501 - protein, 418 aa, unidentified
MVYVLSQNGQPLMPTGNHAKVRVLLNQRKAKVIKRCPFTIQLQYESTTHTQKINLGIDAGSKTIGVSATTESKVLYESEVVLRNDIVELLSGRRALRRSRRNRKTRYRKPRLDNRRRPDGWLAPSIRQKIKTHVTVVENVMKILPVTKIIVETASFDIQKIKNPEIEGTEYQYGEQLDFWNVREYVLFRDGHTCQCCKGKSKDNILNVHHIESRKTGGNAPNNLITLCETCHKAYHKGVITLPKEIHRGMRFRDAAFMGIMRWAFYDRLKELYTPFGVEVINTYGYITKNTRIEHGLPKEHYVDARCISGNPAAKPLGHYYFQKKVRCHNRQIHKNTILKGGIRKRNQAAYLVKGYRLFDKVKYQNQEYFIFGRRSSGFFDIRTLDGTKVNKGSISCKKLQLVEKSKHYLTEQRKVAA

SEQ ID NO: 16502 - protein, 419 aa, unidentified; identical to SEQ ID NO: 4877

SEQ ID NO: 16503 - protein, 490 aa, unidentified; identical to SEQ ID NO: 6170

SEQ ID NO: 16504 - protein, 412 aa, unidentified; identical to SEQ ID NO: 4932

SEQ ID NO: 16505 - protein, 518 aa, Erysipelotrichaceae sp.; identical to SEQ ID NO: 7410

SEQ ID NO: 16506 - protein, 430 aa, unidentified; identical to SEQ ID NO: 5683

SEQ ID NO: 16507 - protein, 380 aa, unidentified
KPLMPCTSSKARKLLQNRKAKVVKLYPFTIRLNFDCENQTQDISMGIDAGYANIGFSCITTKSELVSGTIILDNKTSERLTERRMYRRGRRNKLWYREPRFDNRKRKEGSLPPSVQRRYDTNLKIINLMKSLMPITKVTVEVANFDIQKIENEAIEGVGYQQGEMLGYQNMRSYLMAREKGVCQLCGKEFEKGNPSHIHHIIERANGGTDRAKNLAILHEKCHDKLHKKGLKLKPNKTYKPNTFMSIIRNRFWNDIPNINVTYGYETFVKRIELRLEKTHYTDAFVIAGGEYQQRCKPIGIKQKHQHNRVLQVNRKGFAPAIRKQRYKIQPKDLVWINGKREVAVGVHCKGAAVIIERNKKSFLIKKVEKIYNFGTFAYS

SEQ ID NO: 16508 - protein, 426 aa, unidentified
YWHEEKFSERKVSEMTNYAFVLDANNKQLTPTKEQKAWFLIRKKRATLVSKYPMVIQLKKKIPDKEICKDEVRCGIDDGGLHVGVALVQKCQTRNKVVFKGVIEQRNDVKHLIDVRCGYRRYHRYHKRYRSARFNNRNSSKREERIAPSILQKRQATIRVINQLNKWINITNYWLEDVAIDIRALTDGYKPYRWQYQKSNRLDENIRKAVILRDGCKCMECGKSNCRLEVHHIKSRRLKGSSTLDNLITLCTKCHQKTESVEELYMDRYFALLNSSDNKNLNYAQHVMIGKKWLREQLSNLGMLYLTNGGDTANKRIDWDIAKSHSNDAICITDLRPDTCEIKEWVIKPMRKQSKAKTDNVLGIKHRDLVEYTFRNETHRGYVTALYPEQNAINFRSPTKHCKKVNAKKCKVLWKYSKIYWLDNVG

SEQ ID NO: 16509 - protein, 478 aa, Lactobacillus sp.
MDNIVDGQQRKSKLGLLIWTSGRNHCFLHYEKGEKNMKHENANRVFLLNRDGKPLMPCRPRKARLLLKSGKAFVAKKYPFTIQLKYGSYGYKQKVSLGVDTGQRHIGFAVVSQEKVLCQSEVELRQDVHKNLYTRKIYRRSRRNRKTRYRQARFLNRVHGKRDGLWLPPSVKGKVNHNIAWIKQYLAVLPNPDLHIEVGKFDMAKMLNPTISGKQYQEGSLKDWKNYEYYVLARDEYTCQLCHKHGEGVKLVVHHIVYRSQGGTNRVDNLITLCTDCHTTKNHQPGGKLYKWMKAKKKVTKQLKGATFMNILRKRIMTAFPEASFQYGSQTYVDRKNLLLPKGHFMDAIAISGIKSVGQMPDTVTLISQFRKKKRSLHEATARKGRKQPNTSSKRNEKNTNHARGLWLNDYVRVIGNHAKGYVKGFKSKGYYVYLTDGLGNYVLNNGKNYINGQQCRLIMHNGNWQKAEQKLSLYEFK

SEQ ID NO: 16510 - protein, 451 aa, unidentified
VLSAWNPFQHWRRITTGRKTEETNLRVLVWNKRGKPLMPCSPAKARLLLKEKKAIVVRRTPFTIQLTIATGESKQPVSLGVDAGYKHVGLSASTEKAELYASEVELRQDITDLLSARRALRQSRRNRKTRYRAPRFDNRIRTKRKGWLAPSVENRINAHLSRIETVIRLLPVTKISVETTSFDMQLLKNSDIAGKEYQESEQLGFWNVREYVLFRDGHVCQHCHGRSKDPVLNVHHLESRRTGGDSPGNLITLCETCHKELHRGEITLKAKRGQSFRAETFMGIMRWEVLDRLKASHPKLEVQNTYGYRTKHARIVNGIAKSHCADAFCIAGNLGAERLGEFLFQKQTRRNNRQIHKLSILKGGIRKRNQVPFEVKGFRLFDKVACKGEEGFVFGRRSSGYFDVRKLDGTRISAGISYKKLRLLEKRQTYLTEIRKEEALPPLPEGRGLRA

SEQ ID NO: 16511 - protein, 453 aa, unidentified; identical to SEQ ID NO: 4050

SEQ ID NO: 16512 - protein, 406 aa, unidentified; identical to SEQ ID NO: 4082

SEQ ID NO: 16513 - protein, 348 aa, Enterococcus sp.; identical to SEQ ID NO: 9214

SEQ ID NO: 16514 - protein, 436 aa, unidentified
MAKTLTRQTTQVCVLDQNGKPLMPTTRLGKVYRLLKTQKAHIVSYEPFTIQLDYEPDTHIIQPLTLGVDSGAIHSGYSVANEHREYYSAEVIARDNISKKLSNKRMYRKQRRSRKTRYRKPRFKNRKNKKKGWLPPSLEQKVAVQLNEIDHLHHYFPIENIIVEVAEFDIQKIKDPNISGIEYQQGTLYGYNIRNYLLEKHGRKCFYCGKTVSDFEVEHMIPKIRGGSDRIDNLTLSCHDCNQKKDTLTAEEFIKQTLPAKKAATKLKQLPNEKHLFKYMTYMNATRWSLYNAIDEKYPNVTMTYGYITKYNRIKAGLPKTHHIDAKCITGFATVPSMGQTVVKIKMRRHNRQLHQATFSKGHVRKIGNLPTVVFGFQLYDIVLFNNHHYYIKGRRSSGYFALVSLEGLKDENRSYKKLTKLAHTNAYLTNRYIET

SEQ ID NO: 16515 - protein, 456 aa, unidentified
MSTCVCVLSNNGERLMPTIRLGKVRHLLKDGKAKIIKHHPFTIQLLYDSKTNTQPIEICEDVGYNYIGISVKSESHEYVSAQYDTLQDEKEHHDDCRKYRRTRRNRLRYRKPRFDNRKRSEGWLAPSLEHKKQLNIRLIERYVSVIPITHATVEVGSFDTMLLQAIQKGKSKPEGVDYQKGPRYNLATLREAVFYRDDYTCQVCGRKITDGAILHMHHMFYWKGRHGYQLDELVTACEKCHTPANHQKGGKLFGFGEDKEFANLSGAAFMNAVRWQIVDALHATYGKEFVTITYGAMTKEKRIILGIEKTHNNDAYAMGDYHPAHRCVFRHYQKRRRNNRVLEKFYDATYIDARTGNKAKGKELFNGRINRNHKKDSEDLHKYRSKKVSKGRRSIRRQRYAIQPYDTVRLESKTYITSGCHNKGTRLLIPVNGKSKSVAISKVQVVCHAGAWIQII

SEQ ID NO: 16516 - protein, 412 aa, unidentified
MIYVLNQNGQPLMPTKNHAKVRILLKSKKAKVIRRCPFTIQLMYSSTNYTQSINLGVDAGSKHIGISATTKNKVLFESDVELRNDIVNLLSTRRQNRRTRRNRKTRYRKPRFDNRKRKDGWLAPSVQNKVDTHLTVIRKVHEILPVSKIIVEAASFDIQKIKNPTIGGTEYQQGSQLDFWNVREYVLFRDNHTCQCCKGKSKDKILNVHHIESRKTGGDAPNNLITLCGTCHTGYHKGTVNLPKRIKRGMSFKDASFMGIMRWAFYNKLKEIYPNVSLTYGYITKNTRIENKLPKDHYIDARCISGNPKAVSDWGVYYQKKVRCHNRKIHKNTILKDGYRKRNQAPYEVMGFRLYDKVRWKQQNCFIFGRRSTGRMDLRLLDGTKVNASVGYKNLKMLEMCKNILIELRMEV

SEQ ID NO: 16517 - protein, 459 aa, unidentified; identical to SEQ ID NO: 3944

SEQ ID NO: 16518 - protein, 465 aa, unidentified; identical to SEQ ID NO: 10727

SEQ ID NO: 16519 - protein, 315 aa, unidentified
LRVFVLNKRGKPLMPCSPAKARLLLKEKKAIVVRRTPFTIQLTIATGEAKQPVSLGIDAGYKHVGLSASTEKAELYASEVELRQDITDLLSARRALRQSRRNRKTRYRAPRFNNRLCTKRKGWLAPSVENRINAHLSRIKAVLRLLPVTKITVETASFDLQLLKNPDISGKEYQEGEQLGFWNIREYVLCRDRHVCQHCYGRSKDPVLNVHHLESRRTGGDSPGNLITLCETCHKALHRGEITLKAKRGQSFRAEAFMGIMRWEVLNRLKASHPELEVNNTYGYRTKHARIANDIAKSHCADAFCIAGNLGAERL

SEQ ID NO: 16520 - protein, 465 aa, unidentified; identical to SEQ ID NO: 10277

SEQ ID NO: 16521 - protein, 415 aa, unidentified; identical to SEQ ID NO: 8474

SEQ ID NO: 16522 - protein, 430 aa, unidentified; identical to SEQ ID NO: 4817

SEQ ID NO: 16523 - protein, 531 aa, unidentified
MPMLWKLNRSRQDRISTGPELAVTGLQQKRRTMRYVYVLDMNGEPLMPTCRYGKVRRMLKSGQAKAVDTLPFTIQLLKPTKTRILQPVIVGQDPGRTNIGMAAVRSDGMELYRAHIETRNKEIVSLMNDRRSFRQASRRGERLARKRLAKKLHTTAKHLNGRILPGCKEPLAVKDIINTEARFNNRLRPEGWLTPTATQLLRTHLEAFRKLSRILPVTEVVLEINRFAFMQLDNPDMEKRDIDFCRGPLHGTGGVKAAVSLQQNELCLLCREREIEHYHHIVPRSRRGSNTISNIAGLCEKCHERVHKDQAAAEKLQSRKDGLSKKYGGTSVLNQIIPSLTEELGIRYPGHTHVTNGWNTKEFREKHELEKDHDIDAYCIAASILKDVQPVMQTKPYEVKQFRRHNRARIHHQTERTYRYDGKIIAKNRKKRMDQKTDSLEDWVADMTKQYGQGTASRMLSKVTVQKSTRHYNTKGRIMPGTVFIYRGKRFVMTGLLTGGAYYRAYGQDKKNFPAKAVRVVQKNKGLVYVA

SEQ ID NO: 16524 - protein, 504 aa, unidentified
MAWEAIQTRRIKPHDIGEGTLRRHAAGTVSFPVLCKNRKETLMSVLVIGRNGRALMPTNPRKARLLLKKKTASVVCRHPFTIQLLYKTGCATQEGCIGIDTGSQHIGVGITCGDRVILKDEHALRSSMEKRSLLATRAVMRRGRRYRKVRYRKPKWRHHTKRMYFEKANRRGQHWRKVKTTTQSPRPKGWLPPSLQSKCDHHFRIIDRYLKYLPDPITRNLVIEAGRFDMARMNDPTIHGEMYQRGPMYDAENLRAYIFARDNYQCACCKAKAGTTRKADGTTVKLVAHHILFRSRGATDNPKYIISVCDHCHTTKAHQPGGILYSWMENNKKVARGLRDAVFMNILRKRLFARYPQSAFTYGNITATDRKQLRLPKSHANDAVAISLFGKEASTVKNICQTMHYKQIRKSKRSLHEAIPRKGRKNPNTKAVRNKKNTTQVNGFKLWDSVLADGKKLFICSFTGTSAYLIDKNGCYISQPGKTYKQWPLSKLKRLHPNGNWLMA

SEQ ID NO: 16525 - protein, 413 aa, unidentified
MRGQPLMPCSPAKARHLLKAGKAAVRRRTPFTIQLRIATGETKQSVTLGVDAGAKHVGLSAATEKEEVFASEVELRQDITGLLAARLSLRRERRQRKTRYRAPRFLNRVRSKHKGWLAPTVENRIQAHMSRIDAICGLLPVTKIVIETASFDIQKIKHPDVEGTNYQQGDQLGFWNVREYVLFRDGHVCQHCHGHAKDKILNVHHLESRQTGGDAPNNLITLCKTCHKACHAGKIKLKVKRGQSFRAEAFMGIMRWTLLDRVRKAHSGLPVENTYGYLTKNTRIALGLPKTHCADAFCIAGNLKAQRSGVYLYQKQTRKHNRQIHKCSILKGGIRKLNQSPYLVKGFRLFDKVKCLGQVGFIFGKRSSGYFDVRTLGGKKLSPAIHAKKLTLLEKRKTFLTELRKESGASSPV

SEQ ID NO: 16526 - protein, 499 aa, unidentified
MRYVYVLDVDGKPLMPTCRFGKVRRMLKSRQAKAVDTLPFTIQLTYKPRTRILQPVTLGQDPGRTNIGMAAVRFDGKELGRFHCITRNKEIPKLMADRMAARKASRRGERLARKRLARKLHTTAKHLNGRILPGCSEPMAVKDIINTESRFNNRLRPEGWLTPTATQLLRTHINLFRKLSGILPVTDVAVELNKFAFMQLDNPEMKKREIDFCHGPLYGTGGLEATVKEQQNGKCLLCGKEPISHYHHIVPRSRRGSNTIANIAGLCPKCHELVHKDADTAERLTEMKTGLTKKYGGTSVLNQIIPKLVETLADLFPGHFHVTNGWNTKEFREKHHLEKDHDVDAYCIACSHLKPEETLVETEPFEILQFRKHNRAIIHHQTERTYKLDGVTVAKNRKKRMEQKTDSLEDWYVDMAKEHGKTQADAMRSRLTVIKSTRYYNTPGRMMPGTVFLYEGKRYVMTGQITNGKYYRAYGQEKRNFPAVKVRILTKNTGLVFVA

SEQ ID NO: 16527 - protein, 433 aa, Lactobacillus sp.
MQNRVFVINRQGEPLMPCKQQKCRKLLQSGKAKVIKKEPFTIQLLFGSTGYKQLVSIGVDSGQHHIGLAVTSQDKVLFQGEVSLRQDVKKLLDTRRIYRRGRRNRNTRYRPPRFLNRAKPAGWLPPSVVSKVQHNINWIRRLRAVLPKAELHIEVGKFDMAKMKQPDITALGYQQGDLYGYETAKQYVLDRDNYTCQICHGKTKDPKLKIHHIIYRSTGGTNQVSNLLTVCATCHTQANHQPGGKLYALQAKKFQSHRSLKGATFMNILRRRLFTAFPEAKFQYGAQTTLDRAKLDLPKAHYNDAVTISGIQKIAQQPTAIVMFHQFRKKKRSLHEATARKGRKTPNRASKRNAKNTKAINGFHLNDYVQLPNGRRGSISGFSGQYKCYVKAGNHYLTINPKYKQVNLCKLKVIRHQNNWNVLEINTSDYMMA

SEQ ID NO: 16528 - protein, 477 aa, unidentified
MIIALDKYKRPLGFLTERRCRILMERKRAVLYRVFPTVVILMDVDARTIPDLPSFRIKIDPGSKYTGIAIIRNDTDEFVYAMQIEHRGDTVRAALNKRKNARRNRRSRETGYRRAKWGNRCLSEKDKRSYDSSREDGWLPPSIRSAADNVISWVRRLGRWINLTECSFEAVRFDTQLMEDPDIEGEEYQHGTLFGLEIKEYLMEKFGHTCQYCGGKSGDPVLEWEHMRPKSRGGSDRVKNALLSCSSCNKDKGNRTPEEWLEQIKARLPREKGKRKELDEERVKLIQKVIDGKPQGSALRYAAWVSSSRRYLEKALFGIFGDVECSSGGRTKYNRTELGYPKEHHYDALCVGTVPEKGYHDRTNGYYLYAKAAGRGTRLRGHLNKCGVIVTKWTDRKKGFFGFQTGDIVVAEVPHKTPKPYKYEGRFVGRVMVRATGSFDIKTTDGKLVTVKEQYCRLLQANSGYHYTMKRAISLGH

SEQ ID NO: 16529 - protein, 554 aa, Actinomadura sp.
VVGRQAGSTRPSHRRKEVTLMATLDARQQTHRRVLPQPAALESMSADNPGAGTKRGVDAAPAAPGVQHGRGEIPGGSPAARGVTHESGERGREAAPRVFVLAKDGTPLDPCHPARARKLLASGRAVVVRHTPLVIRLKRRTADESRVRGVEIGIDPGSKHTGLAVFRDDAGTRTGLFALRLDHRGSRIRDKLTARARYRRRRRAANLRYRPPRFNNRTRSEGWLAPSLRHRVETTVSWVERLSRWAPVQTLHVERVAFDTHALSAGRPLEGIEYQRGTLCGFEVREYLLAKWGRRCAYCGTTGVPVNIDHIHPRGRGGSDRITNLTLACVPCNQAKGAQPVEEFLARRPKVLAQIQARAEAPLRDAAAVNTTRRALWRALEATGRPVRAASGGRTKWNRGRTGAPKSHTLDALHVGHLDTVAAWPGQILTAAATGRGVYSRTRIDRFGFPRLRLPHVKRVHGYATGDLVRADVPVGKHSGTHIGRVAVRATGSFNITTAHGVRQGIHHRHIRLLQRADGYGYTRTKETTMHVPGPGEAPFPPGPEGPGLPGELR

SEQ ID NO: 16530 - protein, 438 aa, Clostridium sp.; identical to SEQ ID NO: 4933

SEQ ID NO: 16531 - protein, 446 aa, unidentified
VAFSLATIQKKEEGIMPNKVYVINKHGRPLMPCSPAKARHLLDEGKAKVKKRTPFTIQLVYGSSGYTQEVILGVDAGSKTIGVSASTKKEELFAANVIPRNDVVDLLSTRRESRRARRNRKTRYRKPRFDNRVRSKHKGWLAPSVEVKIQEHITSIKRACRILPVSKVVIETAEFDLQLLKAIADGKPVPQGEDYQKGEMYGHYNVRQYVLWRDNYTCQCCGAHATKKKEVRLHVHHLESRKTGGDAPGNLVTLCDSCHEKLHKGLIAEKDFKKRKRRSTRDATFMGIMRKTLMQRLCSELPIPVIETRGYITKATREKLLVLPKSHTNDALAIAQGKQGFNVGYLPGIVQINKIYTIRPVRHHNRQLHKATILKGGIRKSNQTEKYVFGYCLFDKVQFNGQDCFIWGRRTTGIFTIKTINGKMIKDGISFKKLKPVEKSTGYLIA

SEQ ID NO: 16532 - protein, 419 aa, unidentified; identical to SEQ ID NO: 3867

SEQ ID NO: 16533 - protein, 452 aa, unidentified
MGTLHLLASWCPWRHSWQVSGFILAAILMGRRASWMPYVLNQHGHPLMPCSPAKARHLLKDGKAKLMKRAPFTIQLLYGSSGYRQDVTLGVDAGSKHIGLSAVAADGQEVFAAEVTPRNDIVGNLSTRREFRRARRNRKTRYRKPKFNNRVRSKHKGWLAPSVEVKIQEHITVICRVCRLLPVTKVVDETAEFDLQLLKTIADGKSVPQGEDYQKGEMLGSYNVRQYVLWRDGYTCQCCGKHGHGVKLHVHHKESRKTGGDAPDNQTTLCDSCHEKFHKGVITLDKLKKRGRQSTRDAAFMGIMRKTLMLRLRQQLDIPVCETRGYITKYTRGERLHLPKSHINDALAIAIGPNGARADQRYTIKPVRHHNRQLHKATTLKGGIRKSNQAPKYVKGFRLFDKVLFEGMECFIWGRRSSGSMLLRRLDGSKVKDGAGFRKLTLLERSSYYLVS

SEQ ID NO: 16534 - protein, 463 aa, unidentified
MAVFVLDRSGRPLMPCTEKRARLLLARGRARVHKVMPFTIRVVDRLAEDNEFQALRVKLDPGSKTTGMALVRETAENGVAVINLFELMHRGKQISEALTARRGHRSLRRSRLRYRPARRLNRGNKKSGWLAPSLQHRVDTTLAWVNRIQRYAPVSAISTELVRFDMQALENPEIEGAQYQQGTLAGYEVREYLLEKWHRTCAYCGAKNVPLQIEHIHPKSKSGSDRISNLTLACQCCNAKKAALPVEVFLAKQPERLKRIQAQAKRPLKDAAAVNATRWALINALKTTGLVVETASGGRTKFNRIELGIPKTHALDAACVGPMNSMTGWRKPTLCIKAMGRGSYQRTRLDKFGCVRGYLTRSKNIQGFQTGDRVKAIVTKGKKAGCHIGRVAVRASGSFNIQTSNGLVQGVSHRYCTVVQRGDGYGYQLVAKTEATGTQPKQGDALHTALYLPGLKAGISRAN

SEQ ID NO: 16535 - protein, 306 aa, unidentified
MSVAVISKTGIVLMPTSEYRARKLLDSGKAIIYGYRPFTIQLTERETGDVQPVELCVDTGYIHIGVSVKSEKHEYLGLQVDTLTDEKAKHDDRRMYRRQRRNRKRYRKSRFDNRKRKSGWLAPSLEHKKEINLQIITAICGVYPIADITLEMGNFDTQVLKAKEEGKQIPQGTDYQHGERYGIATLREAVFTRDGYKCQCCDRGIKDGAILHAHHIQYRSQGGTNRMSNLITVCEKCHTPANHKPGGKLYGWKPKIASFKDATYMTAVRWQLYRKVKEMFPGIHVKITMEQKPRNAVESWISKNPM

SEQ ID NO: 16536 - protein, 407 aa, unidentified
LKTSGAEGVSHPGLPGKYKHKGGQLMSVAVISKTGERLMPTSEYRARKLLKLGKAIKHSYHPFTIQLTERETGDIQPIELCMDTGYIHIGISAKSEKHEYLAEQIDTLTDERGRHDACRMYRRQRRSKKRYRQARFNNRKRDQGWIAPSLEHKKKIHIQAISRINNVMPLTDIALEMGNFDTQVLKAKEEGKPLPQGADYQHGERYGIATLREAVFSRDGYKCQCCGRTIKDGAILHIHHIKYRSQGGTNSMSNLSTVCDKCHTPKNHKPGGKLYSWKPKLPSFKGATFMTTIRWQLYNEVKSLFPDINVHITYGAATKERRRELDIDKSHANDAFVMGQFHPRHRIKAVFYKRNEEIIDALKSSMMQSILTAATERNETVRNYLMAELAVIIRRILKIYINIGYKK

SEQ ID NO: 16537 - protein, 509 aa, unidentified
VYVLNKDGKPLMPTTRCGHVRYLLKEKKARVVKTKPFTIQLLYETNDVVQPLYLGIDPGRTNIGVAVVKADGTAVFTAHLETRNKEIPKLMKKRKDSRRARRTNGRRCRRQRRAKANGTISKKCVKQTTAQNGSVSKRAKKIGVIKRHLPGCEKEVLCIGIKNKEAKFNNRTRPAGWLTPTANQLLQTHINLIKKIQKLLPISDVVLEINKFAFMQLDNPNIQKWQYQQGPLYQKANLEEAVSEMQEHHCLFCKKKIDHYHHVVPQHKNGSNTIDNIVGLCTKHHDLVHKDTAWHEKLTKKKTGLNKKYGALSVLNQIIPALTKELSSIFPKHFFVTTGKSTYDYRAAHGVSKDHWLDAYCIACSVLPNDVCDSSINNRVPYELKQFRRHDRRALHKENMSRVYTLNGKKVATNRHKATEQTADSLEEFRQNHPDDVCKLKVKEHHSEYRNPKRNFPGCVFLVGKRTHVMQGTSGSHNGKADGYYDTNGNSYSSGKCKFVAKNEGIIFA

SEQ ID NO: 16538 - protein, 451 aa, unidentified; identical to SEQ ID NO: 5203

SEQ ID NO: 16539 - protein, 431 aa, unidentified; identical to SEQ ID NO: 2746

SEQ ID NO: 16540 - protein, 427 aa, unidentified
MQNYVFVIDASKQPLNPIHPKKARRLLDIGKAAVFRMYPFTIILKTAINNPTISPCQIKIDPGSKTTGFAIVQNDQVIWGMELEHRGGLIKKKLESRRAVRHRRRNRNTRYRKPRFLNRKRPEGWLPPSLEHRILTTETWVKRLIKFCPVNEIWVERVKFDTQKMQNPEINGTEYQQGEIAGYEVREYLLEKWGRQCTYCGKQNTPLQIEHIHPKSKGGSNRVSNLCLACDKCNQRKGNKPVEDFLRKKPSLLQKIKTKAKQPLSDAAAVNTTRNKIVKVLKGIKPVVTGTGAQTKYNRINFGLPKQHWIDAACVGDVEALVLKTSQPLLVTCIGPGGRQKAALNKYGYPIRHNPLKPIKGWITGDIAKHQKLGIGKVTPRSKGSFGFTPLGEKGYKSCRPQDISAVHRKDGYIYRFCQSLPGTAWK

SEQ ID NO: 16541 - protein, 451 aa, unidentified
MSVAVISKTGMLLMPTSEYRARKLLKSKKAIIHGHNPFTIQLTEREIGCVQQIELCMDTGYIHIGISVKSEKHEYLGLQIDTLTDEKPRHNACRMYRRQRRSRKRYRQPRFNNRKRNNGWIAPSLEHKKNIHIQAVSRICKVMPITDITLEMGNFDTQVLKAREEGRPLPQGVDYQHGERYGIATLREAVFTRDGYTCQCCGRTIEDDAILHVHHIVYRSHGGTNRMSNLITVCDKCHTPANHKPGGKLYNWKPKIVSFKGATYMTAIRWKLYNEVKALFPDVNIRITYGAETKERRRAFNIAKSHINDAFVMGQFHPKHRIKAVLYKKKRRNNRCLEKFYDAKYIDSRDGKKRSGQELFNGRISRNHKKDSENLHRYRQQKISAGRRTIRKQHYAIQPHDIVTFNREKLETSGCHNNGTRAILLPQKKSVAVKKLNIYRYAGGYFKSAFN

SEQ ID NO: 16542 - protein, 415 aa, unidentified
MENKIEYCFVVDKNNRPLAPTKVNKGWYLIRKGRAKLKSKYPMVIQLEKEVEPDDEDESHMVCGIDDGSSHIGIAIVQKCPSKNKVVFKGTIEQRQDVKHLMDVRRGYRQYRRYHKRYRKPRFNNRASSKKTNRLAPSIKQKKDSILRVLYQLNKWINIKEYYLEDVAIDIRAMTDGYKPYNWQYQKNNRLDENLRKATILRDSCKCQECGKTNTVLEVHHIRAKRFGGANTIGNLITLCSSCHQKTEGKEREFEERYFTKIKSKPKRFDYAMHVMQGKNYLRENIKQLGILHLTTGGDTANKRIEWNIEKSHSNDAICITNCFPDTCNIKEWMIKPMRRKSKAKTDNVLGIKHRDLVEYTYRNGETHKGYVTALYPHLNALNFQSPTKHCKKVNVRKCRLLWKYNKIYWLDSVI

SEQ ID NO: 16543 - protein, 413 aa, unidentified
  source 1..413: note = Lachnospiraceae bacterium UBA2888
MTNYSFVLDANDKPLSPTKETKAWYMIRKGKAKLVSKYPMTIQLKRVIPVEEVCKDEIRCGIDDGGLHTGIALVQKCQTKNKVLFKGTIEQRNDVKHLMDVRRGYREYHRFHKRYRKARFNNRKSSKREDRIAPSILQKRQATMRVIYHLNKWINITNYWLEDVSIDIRALTDGYKPYNWQYQKSNRLDENIRKAVILRDGCKCMECGKSNTVLEVHHIKPRRLNGSNTLDNLITLCSKYHQKTEDNEEQYMQHYFDMLGSSDNKNLNYASHVMIGKKWLREQLSELGILHLTNGGDTSNKRIDWNINKSHSNDAVCITNLKPDTTDIKEWIIKPMRRQSKAKTDNVLGIKHRDLVEYTFKNGETHRGYVTALYPELNALNFKSPTKHCKKVNAKKCKLLWKYSKIYWLDNVA

SEQ ID NO: 16544 - protein, 442 aa, Anaerostipes sp.; identical to SEQ ID NO: 2903

SEQ ID NO: 16545 - protein, 414 aa, unidentified
MPCSPAKARLLLKEKKAIVVRRTPFTIQLTIATGESKQPVSLGVDAGYKHVGLSASTEKAELYASEVELRQDITDLLSARRALRQSRRNRKTRYRAPRFDNRIRTKRKGWLAPSVENRINAHLSRIEAVLRLLPITKITVETASFDMQRLKNPDISGKEYQEGEQLGFWNVREYVLFRDGHVCRHCHGRSKDPVLNVHHLESRRTGSDSPDNLITLCETCHKALHRGEITLKAKRGQSFRAQAFMGIMRREVLNRLKASHSELEVNNTYGYRTKHARIVNGIDKSHCADAFCIAGNLGAERLCEFFFQKQTRRNNRQIHKLSILKGGIRKRNQAPFEIKGFRLFDKVACKGEESFIFGRRSSGYFDVRKLDGTRISAGISCKKLRLLEKRRTYLTEIRKEEALPPLPEGRGLRA

SEQ ID NO: 16546 - protein, 415 aa, unidentified
MENKIEYCFVVDKNNRPLAPTKVNKGWYLIRKGRAKLRSKYPMVIQLEKEVESDEGDKSYMVCGIDDGSVHVGLAIVQKCLTKNKVVFKGIIEQRQDVKHLMDVRRGCRRYRRYHKRYRQARFNNRSSSKRICRLAPSIKQKKDAILRVLYQLNKWIDIQGYYLEDVCIDVRAMTDGYKPYRWQYQKSNRLDENLRKATILRDGCKCQECGKSNCRLEAHHIRARRYGGADTIGNLITLCKKCHDKTKSREKDFEERYFNMIKSKPKRFDYAMHVMRGKSYLRKKISELGILHLTNGGETANKRIEWNIVKTHSNDAICIADGIPDTCDIKEWIIKPMRRKSKAKTDNVLGIKHRDLVSYTYKNGETYTGYVTALYPKQLALNFQSKTKHCKKVNARKCRLLWKFNKIYWLEQCV

SEQ ID NO: 16547 - protein, 408 aa, unidentified; identical to SEQ ID NO: 12490

SEQ ID NO: 16548 - protein, 442 aa, unidentified
  REGION 1..442: note = IscB polypeptide
VFKQSCDGRDSDASIVLAGNNSDVDQQSGKTEHNLSVYVINLQKEPVMPCSPCKARHLLEQNEAVVVSRKPFTIQLLKTKGTAKQPITLGVDAGYKYVGVSATSNKKELFSAEVTLRTDIPKKLQNKASYRRNRRSRLWYREPRFNNRSKDKGWLAPSIQHKLDSHIRIVEKIKKLLPITETIVEVASFDIQKIKNPDIESKKYQQGEQFGFWNIREYVLHRDNHTCQHCHGKKKAPVLQTHHINGKKEGATDRPEELLTVCKTCHDEHHRGIDIIPKKKIKNFKPETFMTVVRWKIVNALECKHTYGYITKTNRIKQGLSKSHINDAFVIANGSNQDRCKSYYIKQTKKNSRSIQISRKKFGISVRKQRYPLQPSDIVKYQNKEYIVVGVHCKGSCVCIKESSETKKDVSVNIKKVELICYGKGIQFLPRLKPLSILGEIL

SEQ ID NO: 16549 - protein, 412 aa, unidentified
MTNYVFVLDAAGKQLALTKETKAWFFIRKEHATLVSKYPMVIQLNKEVSDDEICKDEIRCGIDDGGLHVGIALVQKCQTKNKVVFKGTIEQRNDVKHLMDVRRGCRHYHRYHKRYRQSRFNNRSSSKRGRIAPSILQKRQATVRVINQLNRWIHITNYWLEDVSIDIRALTDGYKSYSWQYQKSNRLDENIRKAVILRDECKCMECGKSNCRLEVHHIRPRRLNGSNTLSNLITLCEKCHQKTEGSEELFMDKYFSLLKSSDNKNLNYAQHVMIGKKWLREQLSNLGLLYLTNGGDTANKRIDWNIEKSHSNDAICITDLQPDTCDVKEWTIKPMRRQSKAKTDNVLGIKHRDLVEYTFKNGETHKGYVTALYPKQNAINFQSPTKHCKKVNAKKCRLLWKFNKIYWLDNVS

SEQ ID NO: 16550 - protein, 440 aa, unidentified
MKGVQIMQNRVFVINKHGKALMPCKPRKARILLRDGKAKVLKKEPFTIQLLYGSTGYKQDISIGIDSGQRHIGLAVTSQDKVLFQGEVELRQDVKKLIDTRRIYRRSRRNRKTRYRKAKFLNRIAKKKDNWLPSSVLSKVNHNINWIKRLLSVLPKADLHIEVGKFDIQKMKNPEINGEGYQQGDLYGYQTVKQFVLARDNYTCQVCKKKGGKLKIHHIIYRSLGGTNTVNNLITVCSNCHTTKNHQTEILAKWCKDKKKVNKSYKGATFMNILRRRLFLAFPQAKFQYGAWTTLQRADLELTKSHYNDAVAISGIRKIKAKPTSIMMFKQFRKKKRSLHEVTARKGRKTPNITSKRNSKNTKYARGFWLNDYAKIKNSNKKGYISGFTAKGAGTRLRDIFGEYVSNSDKSYTSTKNISLINHSNNWQEQVITEKQYIMG

SEQ ID NO: 16551 - protein, 475 aa, Blautia sp.; identical to SEQ ID NO: 4128

SEQ ID NO: 16552 - protein, 415 aa, unidentified; identical to SEQ ID NO: 12104

SEQ ID NO: 16553 - protein, 504 aa, unidentified; identical to SEQ ID NO: 5865

SEQ ID NO: 16554 - protein, 456 aa, unidentified; identical to SEQ ID NO: 12153
  source 1..456: note = Competibacteraceae bacterium UBA4410

SEQ ID NO: 16555 - protein, 420 aa, unidentified; identical to SEQ ID NO: 7078

SEQ ID NO: 16556 - protein, 396 aa, unidentified; identical to SEQ ID NO: 4508

SEQ ID NO: 16557 - protein, 417 aa, unidentified
MPCSPAKARLLLKEKKAIVKRRTPFTIQLTIATGEAKQPVSLGVDSGYKHIGLSATTEKAELYASQVELRQDITDLLSARLALRRSRRSRKTRYRAPRFNNRVANKREGWLAPSVENRIAAHVSRVETVIRLLPVTAITVETAAFDTQLLKNPDIAGVAYQQGDQIGFWNVREYVLFRDGHVCQHCRGKSKDPILNVHHIESRRTGGDAPNNLITLCETCHRAFHRGEIELKVKRGKSFKAETFMGIMRRTLLERLKKAHPELNVRNTYGYLTKHKRISHGIAKSHCADAYCIADNLGAKRLEGFFFQKQTRKHNRQIHKLSILKGGLRKKNQAPYEVKGFRLFDKVICKGEEAFIFGRRTSGSFDVRRLDGTRISAGINYKKLRLLEPRTTYLAEFRKEAAHPPLHECRGFRAEFL

SEQ ID NO: 16558 - protein, 431 aa, unidentified
MPNKVYVINKHGRPLMPCSPAKARHLLDDGKAKVKKRTPFTIQLVYGSSGYTQEVILGVDAGSKTIGMSASTTKEELLSAEVKPRNDVVDLLSTRREFRRARRNRKTRYRKPRFDNRVRSKHKGWLAPSVEVKIQEHITSIKRVCRILPVSKVVIETAEFDLQLLKAIEEGKPVPQGEDYQQGEMYGHYNVRQYVLWRDGYTCQCCGAHATKKKEVRLHVHHLESRKVGGDAPDNQVTLCESCHEKLHKGLIAEKDFKKRKRRSTRDATFMGIMRKTLMQRLCSELPIPVIETRGYITKATREKLLVLPKSHTNDALAIAQGKRGFNVGYLPEIAQIDKIYTIRPVRHHNRQLHKATILKGGIRKSNQTEKYVFGYRLFDKVQFNGQDCFIWGRRTTGIFTIKTINGKMIKDGISFKKLKPVEKSTGYLIA

SEQ ID NO: 16559 - protein, 426 aa, unidentified; identical to SEQ ID NO: 9916

SEQ ID NO: 16560 - protein, 351 aa, unidentified
ASEVELRQDVSDLLSARRALRQSRRSRNTRYRAPRFDNRIRTKRKGWLAPTVENRINVHLSRIETVLRLLPVTKITVETASFDTQLLKNPDIAGKEYQEGEQLGFWNVREYVLFRDGHVCQHCHGRSKDPALNVHHLESRRTGGDSPGNLITLCETCHKALHHGEITLKTKRGQSFRAEAFMGIMRWEVLNRLKVSHPELEVNNTYGYRTKHVRIANGIAKSHCADAFCIAGNLGAKRLGEFFFQKQTRRNNRQIHKLSILKGGIRKRNQAPFEIKGFRLFDKVACKGEEGFIFGRRSSGSFDVRRLDGTRISAGISYKKLRLLQKRQTYLTEIRKEEALPPLPEGRDLRA

SEQ ID NO: 16561 - protein, 427 aa, Enterococcus sp.; identical to SEQ ID NO: 2410

SEQ ID NO: 16562 - protein, 423 aa, unidentified; identical to SEQ ID NO: 3951

SEQ ID NO: 16563 - protein, 269 aa, Eubacterium hallii; identical to SEQ ID NO: 5660

SEQ ID NO: 16564 - protein, 434 aa, Microcoleus sp.; identical to SEQ ID NO: 8083

SEQ ID NO: 16565 - protein, 469 aa, unidentified; identical to SEQ ID NO: 3785

SEQ ID NO: 16566 - protein, 411 aa, unidentified; identical to SEQ ID NO: 2663

SEQ ID NO: 16567 - protein, 443 aa, Anoxybacillus sp.; identical to SEQ ID NO: 2800

SEQ ID NO: 16568 - protein, 439 aa, Lactobacillus sp.
MKGVQIMQNRVFVINKHGKALMPCKPRKARILLRDDKAKVVKKEPFTIQLLYGSTGYKQDISLGVDSGQRHIGLAVTSQDKVLFQGEVELRQDVKKLLDTRRAYRQSRRNRKTRYRKARFLNRIAKKKDNWLPPSVASKVNHNINWIKRLLSVLPKADLHIEVGKFDMQKMKNPAINGEGYQQGDLYGYQTVKQFVLARDNYTCQVCKKQGGKLKTHHIIYRSFGGTNTVDNLITVCANCHTTRNHQTGILAKWCKDKKKVSKSYKGATFMNILRRRLFLAFPQAKFQYGAWTTLQRADLNLAKSHYNDAVAISGIEQIKEKPNSVVMFKQFRKKKRSLHEATARKGRKTPNAMSKRNAKNTKYVRGFRLNDYVKIKNSNKKGYICGFSNNNCYIKDIFGDYLTISDRYKQVALSKLDRLSHHNNWNKQEINENVYQMN

SEQ ID NO: 16569 - protein, 466 aa, unidentified
MSTCACVLGKSGERLMPTIRLGKVRHLLKDGKAKIIKHHPFTIQLLYDSETNIQPIEICEDVGYNYIGISVKSESHEYVSVQYDTLQDEKDCHDSCRKMRRIRRNRLRYRKPRFDNRKRNKDWLAPSLEHKKELNVNVIKIYCEVVPITHVTVEVGSFDTMLVKAIQEGKAIPEGADYQKGPRYNLATLREAVFYRDNYTCKVCGRKAKNDSAILHVHHMFYWKGRHGNSLNELLTVCEKCHTPANHQKGSKLYGFGENIKFANLSGAAFMNTVRWQIVNELYATFGKLFVTFTYGAMTKEKRIALHLEKCHNNDAYAMGNFHPVDRCAFEHYKKVKRNNRILEKFHDSQYIDIRTGKVANGRSLFNGRINRSHKKDSENLHKYRGKRTRKGYRALRRKKVALNPGDLVSLNGEILVVHSTHAGKNGYVGVEFKTPSKSGKKSASLKKLKIVKTSNSMHSAWTKVS

SEQ ID NO: 16570 - protein, 416 aa, unidentified
MIYVKSKDGKVIMPSERRGRIGYLLRHGKAHLVSRVPFVVQLDYDSTTYTQEVSLGIDAGSKHIGVSASSEKKELFAAQVELRSDIVKLLSTRRELRRNRRNRKTRYRKARFNNRKKKDGWIAPSVEQKVKSHLKVIRLVRDLLPIAKTTIEVAQFDAQKIKNPDINGEDYQQGEQMGFWNVREYVLTRDGHRCVHCKGKSKDPILNVHHLESRKTGGNSPSNLVTLCETCHKAYHRGEFALKIKRGSSLRDAAVMNIMRLAVYDRAKLEFGNVHLTYGYVTKHTRIENGIAKTHAADAFCIAKNVHARRSRTFFKCRCVPRHTRSLHVCNPKRGGVRRSCIASHKIGKSRFQRYDMVRWKGRECFISGSTGGRPVLRNIEGYKMHENISVNIKTIKFLKRLRNNILVEEKGLPKV

SEQ ID NO: 16571 - protein, 418 aa, unidentified; identical to SEQ ID NO: 4327

SEQ ID NO: 16572 - protein, 454 aa, unidentified; identical to SEQ ID NO: 12421

SEQ ID NO: 16573 - protein, 417 aa, unidentified
MIYVRSKEGMVLMPTERCGKIGYLLRHGKAHVVSRVPFVVQLDYDSTTYTQDVSLGIDAGSKHIGVSASSEKKEMLAAQVELRSDIVKLLSTRRELRRNRRNRKTRYRKARFDNRKKKDGWLAPSVEQKIESHLKVIRLVHKLLPVTKTTIEVAQFDAQKIKNPDIKGDEYQQGEQMGFWNVREYVLARDGHKCVHCKGKSKDPILNVHHLESRKTGGNSPSNLVTLCETCHKAYHRGEFDLKIKRGSSLRDAAVMNIMRWAIYERAKLEFGNVHLTYGYVTKRTRIENGIAKTHAADAFCIAKNVHAMRLSSFFMCRCVPRHTRALHVANPKKGGIRRNTIASHKIGKSNFQRFDMVRWMGKECFIFGSTRGRPVLRDIEGVKMHENASVNIKTIKFLKRLKNNILMEEKNFRRLN

SEQ ID NO: 16574 - protein, 413 aa, unidentified
MTSYSFVLDANGKPLAPTKEQKAWFFIRKKRATLVSKYPMVIQLKKEIPEKEICQDEIRCGIDDGGLHVGIALVQKCKTKNKVVFKGTIEQRNDVKHLMEVRRGYRRYHRYHKRYRQARFDNRKSSKREGRIAPSILQKRQATIRVNHWLNKWINITNYWLEDVSIDIRALTDGYKPYRWQYQKSNRLDENIRKAAILRDGGKCMECGKLNCRLEVHHIKPRRRNGSDTLDNLITLCKSCHQKTEGQEELYMDRYFSLLKSSDHKNLNYAQHVMIGKEWLRKQLSSLGVLYLTNGGDTANKRIDWNIEKSHANDAVCITNLQPDTYDMKEWTVKPMRRQSKAKTDNVLGIKHRDLVEYTLKNGETHRGYVTALYPEQKAINFQSPTKHCKKVNARKCKLLWKYSKIYWFENAS

SEQ ID NO: 16575 - protein, 427 aa, Enterococcus sp.; identical to SEQ ID NO: 5630

SEQ ID NO: 16576 - protein, 473 aa, unidentified
VFRQVPFTIQLTYKNQPVLQPVTIAEDPGRSNIGMAVVSLSGELLSAAVVQTRNKEIVKLMEKRKQHRRASRNGERKARQRLAKKCHTMIKAGFLMRKLPMYGKDKRVQCNVIRNTEARFCNRKREDGWLTPSAEHLVRTHINLIHKMQKFLPITDVAIEINRFAFLSLEDPSISGVDFQNGPLKGYDDLNAAVEDLQDGHCLMCNSPIEHRHHIVPRSMQGSNTIGNIAGLCCKCHERIHKDARFEDHLKKKKAGLNKRYAAVSVLNQAIPFICKRLEQEFGKEHVHYCSGRDSSMVRRSLGYHKTKEEQLHEVDAWCIAVLSLQHVPEKAPEFDHVHEILQFRRQDRSRIKAQTSRAYYYKGKKIAKNRKKAEGQREDSLQEWRKRQVERYGEEQTRKMISQLKVKKSIRRYNRLDRLMPGAVFYYQGVRYVMRGQHCEGTYLQAVGMGSKDFPAKKCKIVAQNEGLVFVS

SEQ ID NO: 16577 - protein, 456 aa, unidentified
MAVFVLDKKKQPLMPCSEKRARLLLARGRAVVHKRYPFTIRLKNRVGGEAQPLRLGIDPGSKTTGLALMHEPDSQQRHVLCLFELIHRGFQIKKALQQRAAFRRRRRSANLRYRAPRFNNRIKPKGWLAPSLQHRVDTVMAWVNRLSKSAPITGISQELVRFDTQKLESPEISGVEYQQGTLLGYEVREYLLEKWGRECAYCGTTDTPLEIEHVVPRSRGGSNRVSNLTLSCHPCNAEKDSQTLTDFFATNKGLKKRLKANGLSADAQLERVQRQLKQPMRDASAVNATRWALFSALKTTDLPVAVSSGGRTKYNRQRLNIPKTHALDAACVGAFGKLYDWTVPTLTIKAMGRGSYQRTRLTKHGFPRGFLMRQKQVHGFQTGDMVRAIVPTGKKAGTHTGRVAIRKTGSFNIQAEYGAVQGISHKYCTLIQRSDGYGYYVTLFSNLTGEAGRAVA

SEQ ID NO: 16578 - protein, 427 aa, Enterococcus sp.; identical to SEQ ID NO: 2410

SEQ ID NO: 16579 - protein, 407 aa, Bacillus sp.
MTVYAFVVDINEKPLSPTRENNAWYLIRKKKAVLKSKYPMVIQLNKEVSNEKQDISTFVCGIDDGSKHVGIGIVQNGKKAVFTGEIEQRQDVKSLMDLRRIYRKYRRRHKRYRKTRFNNRASSKRKDRISPSVKQKREAVLRVVNQLQKWIPIHKIVLEDVQIDVRKLTEGRQLYQWQYQQSNRLDENLRKATLIRDDFMCQQCSKKNCKLEVHHITPRRFRGADTLKNLITLCSVCHESLGTDELNYAEHFYTLIEGKHIRFDYAQHVMQGKHYLRNELAKISPLELTTGCDTANKRIDYDIEKSHTNDALVIAGLKNSNVFIQPYKIRPMRRKLKAKVEGLNGFQHRDFIKYTKKNGEEYIGWITALSQKRKTLNITTIDGKVLKRYGIGRCTLLWRFQYIYWMI

SEQ ID NO: 16580 - protein, 512 aa, unidentified
MSTVYVLNKDGKPLMPTTRGGHVRHLLKEQKARVVRTKPFTIQLLYETNDVVQPLYLGIDPGRTNIGVAVVKTDGTAVFTAHLETRNKEIPKLMKKRKESRRARRTNGRRCRRQRRAKANDTISKKCVKQPTAQNGSISKRAKEIGIIKRRLPGCEKDVLCIGIKNKEARFNNRTRPEGWLTPTANQLLQTHINLVKKIQKFLPISDVVLEVNKFAFMQLDNPNIQKWQYQQGPLYKKESLERAVSEMQEHHCLFCDKPIDHYHHVVPQSENGSNTIANIVGLCAEHHNLVHKDAAWQKKLAEEKVGLNKKYGALSVLNQIIPALTKELSFLFPEHSFVTNGKSTYDYRATHGVSKDHWLDAYCIAYSVLPSNVCDSNINNHVPYELKQFRRHDRRVLHKANTSRVYTLNGKKVATNRHKAAKQTADSLEEFRQSHPDDVCKLKVKEHHPAYRNLSRNYPGSVFLADGQVHVMQGISGSHNGKADGYYDTNGNAYPYYKCKFVAKNEGIVFA

SEQ ID NO: 16581 - protein, 413 aa, unidentified
LKVFVLNMRGKPLMPCSPAKARHMLKAGKAVVVRRTPFTIKLTIATGETKQDVTLGVDAGARHVGISATTEKEEVFASEVALRQDITGLLADRLAFRRARRNRKTRYRAPRFNNRVRSKHKGWLAPSVENRIQAHMSRIEAVCRLLPVTKIVIETASFDIQKIRNPEVEGTGYQQGDQLGFWNVREYVLFRDGHVCQHCHGRSRDKILNVHHLESRKTGGDAPNNLITLCETCHKAYHAGKIKLKVKRGQSFRAEAFMGIMRWTLLDRVRKTHPKLPVENTYGYLTKHKRIALGLPKTHCADAFCIAGNLKALRRGDFLFQQQTRKHNRQIHKCSILKGGVRKLNQAPFLVKGFRLFDKVRIGGQIGFVFGRRVRGIFNIRRLDKTVIGTDINCKKLSLLETRKTFLTELRKE

SEQ ID NO: 16582 - protein, 425 aa, unidentified
MVYVVANDGQPLMPTERHGKVCRMLRSGMAKVIKKCPFTIQLQYESERNVQPVALGIDAGSKHIGISATTKTKVLYESDVELRDDIVKLLATRRQLRRSRRSRKTRYRPARFDNRKRKEGWLAPSIQQKIGSHLTVVANVCKILPINQIIVETASFDIQKIKNPEIQGIEYQQGEQMDFWNVREYVFFRDGHTCQCCKGRSKDKILNVHHIESRKIGGNAPNNLITLCETCHKGYHNGTVILPKNIKRGMQFKDAAFMGIMRWAFYNALKEQYEPAIPVSMTYGYLTKNTRIEHGLLKEHYIDARCISGNPDAVSDGTYYYQKKVRCHNRQIHKQTILKGGIRKSNQAEYLVKGYRLFDKVRYHGREYFIFGRRKTGFFDIRTLSGEKVKKGSISVKKLTFADTRKNYLIERRTVLKMVANSSPA

SEQ ID NO: 16583 - protein, 432 aa, unidentified
MRVFVIDKNLKPLDPCRPARARLLLRRGRAKVYRKYPFTIIILDLEEENCVTHKHQLKIDPGAKTTGFAILALWGRLREQNNVVIWGAELTHRGFQIRDALSSRRQLRRGRRNRKTRYRKSRFLNRTRPDGWLPPSLMHRVLTTITWVKKLIRFCPISGLSQELVRFDMQKIENPQINGYEYQQGKLHGYEVREYLLEKSGRKCGYCGAIDTPLEVDHITPKSKGGSNRVSNLTIACHDCNQTKGNQEIEQFLSGKPEVLKRVLSQVKKPLADAAAVNSTRCSLYEELKLTGLPVEKGSGGLTKYNRCRFNLPKTHWLDAACVGVVDSLYVEVKKPLLIAAKGHGTRQSCRTNKYGFPTRHCSRTKIHKGFQTGDIVKAIVTKGKKIGTYVGRVATRKTGSFNISTVNGLIQGISHKYCSTVHRKDGYSYNF

SEQ ID NO: 16584 - protein, 456 aa, unidentified; identical to SEQ ID NO: 3342
  REGION 1..456: note = IscB polypeptide

SEQ ID NO: 16585 - protein, 423 aa, unidentified; identical to SEQ ID NO: 3951

SEQ ID NO: 16586 - protein, 460 aa, unidentified; identical to SEQ ID NO: 7438

SEQ ID NO: 16587 - protein, 420 aa, unidentified
LVYVISKTGQPIMPTENHAKVRMLLKSGKAEVVKRTPFTIQLTGTSKTFTQEVTLGVDAGSKHVGLSASTTKKELFSAELRPRNDVVDLMSSRRELRRSRRNRTTRYRQARFNNRVQSKHKGWLAPSVEVKIWNHIQGIRLVTKLLPVKTIRVETAEFDLQRLKALEAGEPVPVGTDYQLGEMYGQYNVRQYVLHRDGYTCQCCGAYGTNKKPVKLHVHHLESRKTGGDAPDNLITLCEDCHTGYHAGIVALPITKRRRKSMRDATFMGIMRKTLLERLRNMFPETNICSTYGYITKYWRERKNIAKTHTSDAFVIAKNLDAEWLDKSLLIIPKRQHNRQIHKCKINKGGTRKLNQTPKFVFGYQLFDRVMCMGQEGFVFARRSSGGFDIRKLSGEKIKPNINYKKLKRLESRNTLLVSY

SEQ ID NO: 16588 - protein, 444 aa, unidentified; identical to SEQ ID NO: 3399
  source 1..444: note = uncultured cyanobacterium

SEQ ID NO: 16589 - protein, 532 aa, unidentified; identical to SEQ ID NO: 3169

SEQ ID NO: 16590 - protein, 430 aa, unidentified; identical to SEQ ID NO: 6405

SEQ ID NO: 16591 - protein, 470 aa, unidentified
MSVFVVGLNGCRLMPTSERKARLLLKQGKAFVEQKVPFTIRLNYKTGSTTQLGYLGIDTGSQHIGVSVVREDGTVLHKEEIGLRDSMSKRKLLEAKASLRRGRRYRKTRYRHPKWRPKTKRVYCEVPDRKGRHWQKKKITFTSKRPKGWLPPSLQSKTDHHIRWIKKLQDLLPEGYHLSIELGRFDPARMKNPEIHGDLYQKGPQYDYENVRAYVLDRDRYTCQICKKKGGKLHVHHILYRSHGATDDPQYMVTVCSDCHSAQNHLPGGILYQWMQEQKRFSRGLRDATFMNILRKRLIRAFPEAVFTYGNVTKVDREKLKLPKSHGNDATAIALVKTGITAVKDKESVICIQQVRRKKRSLHEETPRKGRKEPNRTAARNNKNTKAVTVTKRQNKKKVSMTGCLFDRVELNGKKGWISGFTGKSCYVKDADDQYLSTSPKYKQVSLSKLRILHHCGNWIIGAKKTLGKG

SEQ ID NO: 16592 - protein, 431 aa, unidentified
MPNKVYVINKHGRPLMPCSPAKARHLLDEGKAKIKKRTPFTIQLVYGSSGYTQEVILGVDAGSKTIGMSASTKKEEVFAADVTPRNDVVDLMSTRREFRRARRNRKIRYRKPRFDNRVRSKHKGWLAPSVEVKIQEHITSIKRACRILPVSKVVVETAEFDLQLLKAIADGKPVPQGEDYQKGEMYGHYNVRQYVLWRDDYTCQCCGAHATKKKEVRLHVHHLESRKVGGDAPDNQVTLCESCHEKFHKGLITEDDFKKRKRKSTRDATFMGIMRATLLQRLHSELSIPVVETRGYITKATREKLLVLPKSHTNDALAIAQGKQGFNVGYLPGILQIDKIYTIRPVRHHNRQLHKAAILKGGIRKSNQAEKYVFGYRLFDKVQFNGQDCFIWGRRTTGIFTIKTINGKMIKDGISFKKLKLVEKSTSYLIA

SEQ ID NO: 16593 - protein, 461 aa, unidentified; identical to SEQ ID NO: 4910

SEQ ID NO: 16594 - protein, 428 aa, unidentified; identical to SEQ ID NO: 5055

SEQ ID NO: 16595 - protein, 480 aa, unidentified
MKGENMVITLDKNKRPLGFITERRCRILMEKKRAVLYRYFPTVVILKDVDARKISGLASYRIKIDPGAKYTGIAIVRNDINEFVYAMQIEHHGEQVKKNLDTRRGARRNRRSRETGYRRPKWGNQCTAKEQYQSYDSRRDENWLPPSVKSIADNIVSWIRRLSRWINITNCSFESVRFDTQLMENPEIEGIEYQQGTLFGYEVKEYLLEKYGHTCQYCGGKSKDTILEWEHMVPKSRGGSDRIKNATLACHSCNQDKGNHTLEEWHTILQDRISKERGKQKELDQVRQKLVQQVQEGKAPLKGLRYAAWVNSSRRYLLRHLYLRFPKLECSSGGRTKYNRNALGYPKEHHYDALCIGRIPEEGFIDRTHGYYLYAKATGRGTRLRGQLNRCGVIINKWKDRSKTAFGFQTGDLVVANVPKDTKYKYKGRFVGRVMIRKSGSFDIRTLSGALVTVNAKFCKLLQNNSGYQMMVKRAIPFGN

SEQ ID NO: 16596 - protein, 364 aa, Oscillatoria sp.; identical to SEQ ID NO: 15589

SEQ ID NO: 16597 - protein, 443 aa, Ectothiorhodospira sp.
MAVLVLDKRKKPLMPCSEKRARLLLERGRAVVHRMRPFTIRLKDRTVEESVLQPIQIKIDPGSKTTGVTVIREDDADPEQQQVLMLMEIEHRGQQIKDTLTQRRAFRRRRRGQLRYRAPRFHNRTRPQGRLAPSLQHRVDTTMAWVNRLCRLAPVTEITMERVRFDMQAMDNPEISGIEYQQGTLHGYEVREYLLEKWQRCCAYCGARNVPLEIDHIHPKSRGGSDRVSNLTLACRDCNQTKGNQPVAVFLADDPRRLQRIKAQAKAPLKDAAAVNSTRWALFRQLQATGLPVITSSGGRTKYNRQRLGIPKTHALDAACVGPVTAITHWNVPTLTARATGRGSYQRTRLNRFGFPRGYLMRQKQVKGFQTGDLVQANVPTGKKAGTYQGRVAIRASGSFNIQTREGVVQGISHRHCRLLQRADGYGYALQPKPIQEDATKAA

SEQ ID NO: 16598 - protein, 424 aa, unidentified; identical to SEQ ID NO: 11297

SEQ ID NO: 16599 - protein, 439 aa, unidentified
MGEGLQPTERSRRQNLRVFVLNKRGQPLMPCSPAKARLLLKEKKAVVRHRTPFTIQLTQATGETVQPVTLGVDAGSKFIGLSASTEKAEHYASEAELRTEVVDLLSSRREMRRARRNRKTRYRAPRFDNRIHSKNKGWLAPSVENKINTHLSCVDNVRKCLPVTKIVVETAAFDIQKIKNPDIEGTDYQQGDQLGFWNVREYVLCRDGHQCCHCHGKSKDPILNVHHLESRKTGGNASNNLITLCETCHKAYHDGKITLKQKRGQVFRDAAFMGIMRWTFFNRLKAQCPEIEVRNTYGYLTKNTRIRHGLEKSHHTDAFCIAGNLEAKRYFFQKQTRKHNRQIHKMSILKGGVRKLQQAPYEVKGFRLFDKVRYDGREAFIFGRRSSGYFDIRLLTGEKVSAGVSYKKLVLLEKRKTFLTQLIKENAIPPATEVAGFLA

SEQ ID NO: 16600 - protein, 512 aa, unidentified
MSTIYVLNKDGKPLMPTTRGGHVRHLLKEQKARVVRAKPFTIQLLYETNDAVQPLYLGIDPGRTNIGVAVVKADGTAVFTAHLESRNKEILKLMQDRKKARRARRTNGRRHRRQRRAKANGTISKKCVKQDTAQSKNPSKRAKEIGVIKRRLPGHKKDLLCIGIKNKEAKYTNRARPEGWLTPTAIQLLQTHINLVKKIQKFLPISDVVLEVNKFAFMRLDNPDIQKWQYQQGPLYQKGSLENAVSEMQEHHCLFCDKPIDHYHHVVPQSENGSNTIANIVGLCAEHHNLVHKDAAWQKKLAEEKVGLNKKYGALSVLNQIIPALTNKLSVLFPKHFFVTAGKSTHDYRATHGVSKDHWLDAYCIACSVLPSNVCDSNINNHMPYELKQFRRHDRRVLNNENMNRVYTLNNKAVAINRHKAKDQKTVSLEEFRKEHPDDVCKLKVKEHHPTYRNMNRNFPGSVFLVGKQIHVMQGIASSKDGKATKYNDTSATAIAAGKCKFVAKNTGILFV

SEQ ID NO: 16601 - protein, 421 aa, unidentified
MTPMVYVLSKTGQPLMPTENHAKVRVLLKQQKAKVVHRCPFTIQLLYDSTDYTQPVSLGIDAGSRHIGVSATTETKVLYEADVTLRNDIVDLLSTRREARRTRRSRKTRYRKPRFNNRIRKDGWLAPSIQQKVDTHLTTVRKVTEILPVNSITVETASFDIQKIKNPDIAGTGYQQGKQLDFWNVREYVLFRDGHKCQCCKGKSKDPVLNVHHIESRKTGGNSPNNLITLCETCHKGYHNGTVSLPKNIRRGMKFNDAAFMGIMRWTFFNRVKETYEPLGIMVNMTYGYITKNTRIEHNLPKDHFIDARCISGHPDAVSDGTVFYQKKVRCHNRQIHKQKILKGGIRKRNQAPYLVKGFRLFEKVKYHGKQYFIFGRRSSGFFDIRTLDGTKVNKGSVSCKKIRSLDMPRSYLTEERKAIV

SEQ ID NO: 16602 - protein, 413 aa, unidentified
MPCSPAKARLLLKEKKAIVKRRTPFTIQLTIATGETKQPVSLGVDAGYKHVGLSASTEKAELYASEVELRQDITDLLSARRALRQSRRNCKTRYRAPRFDNRIRTKRKGWLAPSVENRINAHLSRIEAVLRLLPVTKITVETASFDLQLLKNPDISGKEYQEGEQLGFWNIREYVLCRDGHVCQHCYGRSKDPVLNVHHLESRRTGGDSPGNLITLCETCHKALHRGEITLKAKRGQSFRAEAFMGIMRWEVLGRLKASHPELEVNNTYGYRTKHARIANDIAKSHCADAFCIAGNLGAERLGEFFFQKQTRRNNRQIHKLSILKGGRRKRNQASFEVKGFRLFDKVACKGEESFIFSRRSSGYFDVRKLDGTRISAGISYKKLRLLEKRRTYLTEIRKEAFPPLPEGRSLRA

SEQ ID NO: 16603 - protein, 420 aa, unidentified
MQYVYVLNKHGEPLMPCSPRKARLLLKQKKAYVIKRTPFTVKLLYGSAGYKQPVTLGVDAGSKHIGISATTEKHELYREEATPRNDVVDLLSARRAFRRSRRNRKTRYRAPRFNNRVHSKHKGWLAPSVEVKIQEHITLIKHACRILPVTLVRVETAEFDTQRLKAMLEGKPLPVGTDYQLGEMYDEYNVRQYVLKRDNYTCQCCGAHSTKTKGVKLHVHHIETRRTGGNAPNNLITLCKACHKALHAEKVTLDGKKRGKPLKDAAFMGIMRKTLMERLRKELKIPVQGTYGYITKCLREKNGIPKSHTNDARCISKNPLAIPCDTCYYTKAVRHHNRQLHKATILKGGIRKANQAPYIIKGYRLWDKVAYNGTECFITGRRTSGYFALKKLDGTVASNSISYKKLRLLEAATNYIIERK

SEQ ID NO: 16604 - protein, 420 aa, unidentified
MQYVYVLSKHGEPLMPCSPGKARLLLKEKKARVVKRTPFTIKLLYGSAGYKQPITLGVDAGSKHVGLSASTEKRELYCEEFTPRNDVVDLLSTRRQNRRSRRNRKTRYRAPRFDNRVHSKHKGWLAPSVEVKIQEHITVIKRICRIIPISLVRVETAEFDTQRLKAMLEGKSLPVGTDYQLGEMYDEYNVRQYVLKRDNYTCQCCGAHTTKKKTVKLHVHHLEGRQVGGNAPNNLITLCVDCHKALHAGKVKLDGKKRGKSFKDAAFMGIMRKTLMARLRDELPIPVQGTYGYITKMRREQNDIKKSHVNDARCISKHPLAEPCSVCYRTKAIRHHNRQTHKANFSKGGTRQRSQMPYVVEGYRLWDKVLYKGQECFVSGRRASGSFTLKKLDGTCISKGVTFKKLRLLEPATNYLIERM

SEQ ID NO: 16605 - protein, 465 aa, unidentified
MSTCVCVLSNSGERLMPTFRLGKVRRLLKDGKAKIVKHHPFTIQLLHDSKTNTQPIEICEDVGYNYIGISVKSESHEYVSAQYDTLQDEKEHHDDCRKYRRTRRNRLRYRKPRFDNRKRDDGWLAPSLEHKKELNVNVIKMYCEVMPITHAIVEVGSFDTMLVKAIEEGKATPESADYQKGPRYKLATLREAVFYQDNYTCQVCGRKANEGAILHVHHMFYWKGRHGNSLSELITVCEKCHTPANHQKGGKLYGFGENVKFADLSGAAFMNTVRWQIVNELYAAFGKGFVTITYGAMTKEKRIALHLEKSHNNDAYAMGSFHPVNRCAFEHYEKVKRNNRILEKFYDSQYIDTRTGELTNGKSLFNGRISRSHKKDSENLHKYRGKRICKGHYALRRKKLALNPGDLVSLNGEILVVHGTHTKKNGSVNVEFKTPSRGGKKSASLKKLKIVKTSNLMHSAWTKVA

SEQ ID NO: 16606 - protein, 456 aa, unidentified
MLTYVLAADGSPLMPTYNIKKVRHMLKDGRAVIAGHKPGFTIRLTYALPDQKVSHTQQVELCEDTGYQHIGVSVKSAKHEFAHLQVDTLTDEKNHHDAQRRYRRTRRGRLRYRAPRFDNRTHSKKPGWIAPSLQHKADIHVRLVSTFQKVLPIRDVSLEVGTFDTQILEAKEKGLPIPEGSDYQHGIRYGIATLREAVFYRDGYQCQCCGKGIKDGRILRVHHTGYWKTPSDHTDRMGNLITVCTKCHTAANHKKGGKLFGWQPKIKPLTGAAFMNTVRWKIVQAVKDLDSNLTVHTTYGAYTKLSRRERSIAKTHANDAYCMGMFQPEHRAAEQLLKKKRRNNRVLSKFYDAKYIDSRDGTKHSGSELSCGRTNRSEPRNGEKNLRIFHGKKVSKGRISVRRQRYPIQPGTVVLYNKRKIAVLGTHGNGTKVLLPTKKDVLSKKVTIVYHAGAFV

SEQ ID NO: 16607 - protein, 473 aa, unidentified; identical to SEQ ID NO: 3562
  source 1..473: note = uncultured beta proteobacterium

SEQ ID NO: 16608 - protein, 473 aa, unidentified; identical to SEQ ID NO: 3510

SEQ ID NO: 16609 - protein, 415 aa, unidentified
MVYVLANDGQPLMPTERHGKVCRMLKSGIAKVVKKCPFTIQLQYESERNVQPVALGIDAGSKHVGVSATTKAKVLYESDVELRDDIVKLLATRRQLRRRRRSRKTRYRPARFDNRRRKEGWLAPSIRQKIESHLTVVANVCKILPVSQIIVETASFDIQKIKNPDIQGIEYQQGEQMDFWNIREYVLFRDGHTCQCCKGKSKDKVLNVHHIESRKTEGNAPNNLITLCETCHKGYHNGTVTLPKNIKRGMQFKDAAFMGIMRWTFYNTLKEQYEPDIPVHYTYGYITKNTRINHNLPKGHCIDARCISGNPDAVSDGTYYYQKKVRCHNRQIHKQTILKGGIRKSNQAEYLVRGFRLFDKVRYQGREYFIFGRRKSGFFDIRTLSGEKVNKGSINVKRLTFVDTRKNYLTERRTV

SEQ ID NO: 16610 - protein, 411 aa, Virgibacillus sp.; identical to SEQ ID NO: 14618

SEQ ID NO: 16611 - protein, 430 aa, unidentified
MVYVLDLDGQPLMPTNRHGKIRHLLKDGLAEVVMRCPFTIRLLYDSTCYTQEVVLGVDTGSKHIGLSATTETKELYASDVELRNDIVDLLSTRRQSRRFRRNRKTRYRKARFKNRVSSKKEGWIAPSVQQKIDTHLTVVSKVCRMLPVTRIVVETAAFDIQKIKNPDIQRAEYQQGDQLGFWNVREYVLFRDEHTCQCCKGKSKDKILNVHHIESRKTGGNAPNNLITLCETCHTGYHKGTVQLPKTIKRGMTFRDATFMGIMRWVFYNKLKEVYRSHGVEVQMTFGYITKNTRIAHHLPKGHCVDARCISGHPDVEPIGEIFYQKKVRCHNRQIHNLTILKNGVRKRNQADYLVKGYRLFDKVSYGNKEYFVFGRRQSGFFDLRDLSGNKVNKGSLSYKKIRFLEPRQSYLCERRRMDTQRMRLIAILP

SEQ ID NO: 16612 - protein, 278 aa, unidentified
LTHQFKKRVPVMVYVLDKNGQPLMPTDRHRKVRLMLQSGQAKVIKRCPFTIQLNYDSGHQTQEISLGIDAGSKHIGVSTTTKIKVLYEVDVELRNDIVDLLSSRRELRRGRRNRKTRYRQAKFNNRRRGNGWLAPSIRQKIGTHLTVVENICKMLPISRIMVETASFDIQKIKNPDIQGAEYQQGDQLEFWNVREYVLFRDGHTCQCCKGKSKDKILNVHHIESRKTGGNAPNNLITLCETCHTGYHKGTVQLPKAIKRGMRFKDAAFMGIMRWAFYE

SEQ ID NO: 16613 - protein, 444 aa, unidentified
LAKDHNRLQGRGEQNLRVFVLNKRRKPLMPCSSGKARILLKEKKTVVVRRTPFTIQLTIATGETKQPVSLGVDAGYKHVGLSASTEKAELYASEVELRQDITDLLSTRLALRRSRRNRKTRYRAPRFDNRVRSKHKGWLAPSVENRINAHLSRIAAVLRILPLTKITVETAAFDTQLLRNPDVSGETYQQGEQLGFWNVREYVLFRDGHVCQHCHGKSKDPVLNVHHLESRRTGGDSPSNLLTLCETCHKALHRGEIKLKTQRGKSFRAETFMGIMRWTVLNRLKSAYPELDVRNTYGYLTKHARITHGIAKSHCADAFCIAGNFGAKRLGYYYFQKQTRRHNRQIHKLSILKGGLRKRNQAPYEVKRFRLFDKVACKGEDAFIFGRRSSGSFDVRKLDGTRISAGISFKKLRLLEKRRTYLTEIRKEAALPPLPKRRGLRVDF

SEQ ID NO: 16614 - protein, 469 aa, unidentified; identical to SEQ ID NO: 14573
  source 1..469: note = SAR202 cluster bacterium bin87

SEQ ID NO: 16615 - protein, 423 aa, unidentified; identical to SEQ ID NO: 13653

SEQ ID NO: 16616 - protein, 430 aa, Eubacterium sp.; identical to SEQ ID NO: 2393

SEQ ID NO: 16617 - protein, 512 aa, unidentified
MSTVYVLNKDGKPLMPTTRCGHVRHLLKEQKARVVASKPFTIQLLYKTNDVVQPLYLGIDPGRTNIGVAVVKANGTAVFTAHLETRNKEIPKLMKKRKDSRRARRTNGRRCRRQRRAKANGTISKKCVKHDTAQNGSVSKRAKEIGVIKRHLPGCKKDVLCIGIKNKEAKFSNRTRPEGWLTPTANQLLQTHINLVKKIRKFLPISDAVLEINKFAFMQLDNPNIQKWQYQQGPLYQKANLEEAVSEMQEHHCLFCKKPIAHYHHVVPQSENGSDTIGNIVGLCTKHHDLVHKDTAWQKKLAKKKTGLNKKYGALSVLNQIIPALTKELSSLFPKHFFATNGKSTYDYRSAHGVSKDHWLDAYCIACSVLPNDVCDSGINNRVPYELKQFRRHDRRALNNENMSRVYTLNDNVVATNRHKATKQTTDSLEEFRQNHPDDVCKLKVKEHHPTYRNMNRNYPGSVFLIGKQVHVMQGIAGSKDGEATTYKDTNANSIAAGKCKFVAKNSGILFV

SEQ ID NO: 16618 - protein, 431 aa, unidentified; identical to SEQ ID NO: 10549

SEQ ID NO: 16619 - protein, 386 aa, unidentified
LTIATGESKQAVNLGVDAGYKHVGLSASTEKAELYASEVELRQDITDLLSARRALRRARRNRKTRYRAPRLDNRIRTKRKGWLAPSVENRINAHLSRIETVLRLLPVTKITVETASFDMQLLKNPDISGKEYQEGEQLGFWNVREYVFFRDGHVCQHCHGRSKDPVLNVHHLESRRTGGDSPGNLITLCETCHKALHRGEITLKAKRGQSFRAEAFMGIMRWEVLNRLKASHPELEVNNTYGYRTKHARISNGIAKSHCADAFCIAGNLGAKRLGEFFFQKQTRRNNRQIHKLSILKHGLRKRNQAPFEIKGFCLFDKVVCKGEEGFIFGRRSSGYFDVRKLDGTRISAGISYKKLRLLEKRRTYLTEIRKEEALPPLPEGRGLRA

SEQ ID NO: 16620 - protein, 458 aa, Lactobacillus sp.; identical to SEQ ID NO: 5912

SEQ ID NO: 16621 - protein, 408 aa, unidentified; identical to SEQ ID NO: 6744

SEQ ID NO: 16622 - protein, 415 aa, unidentified
MVYVLDKNGQTLMPTDRHRKVRLMLQSGQAKVIKRCPFTIQLNYDSGHQTQEISLGIDAGSKHIGVSATTKIKVLYEADVELRNDIVDLLSSRRELRRGRRNRKTRYRQAKFNNRRLGNGWLPPSIRQKIGTHLTVVENICKILPISRITVETASFDIQKIKNPDIQGAEYQQGDQLEFWNVREYVLFRDGHTCQCCKGKSKDKILNVHHIGSRKTGGNAPNNLITLCETCHTGYHKGTVQLPKAIKRGMRFKDAAFMGIMRWAFYEALKQQYEPVALVHNTYGYITKHTRIAYNLPKEHYVDARCISGNPEASSNGEYYYQKKVRCHNRQIHKLTVLKGGIRKQNQATYLVKGYRLFDKVSYQGKGYFVFGRRQSGFFDIRTLSGEKVNKGSLSCKKLKFIATRTYYLTERRAV

SEQ ID NO: 16623 - protein, 420 aa, unidentified; identical to SEQ ID NO: 4671

SEQ ID NO: 16624 - protein, 418 aa, unidentified
MVYVINKEGQALMPTERFGKVRRLLKNGLAHVVCRIPFTIRLDYETTHFVQPISLGVDAGSKHIGISATTSEKELYAADVELRNDIVEKLSTRREQRRTRRNRLRYRKARFNNRVSSKHKGWLAPSVENKIQTHLTVVEKIHKFLPITKIIVETASFDIQKIKNPSISSKEYQQGEQLDFFNVREYVLFRDNHTCQHCKGKSKDHILNVHHIESRKTGGNSPSNLITLCESCHKAYHNGKIDIKIKRGASFRDATFMGIARWTTYERLKNIYPNVSMTFGYITKNTRITNGLPKEHYVDARCISGNPKSKPLGYYFYQKKVRCQNRQIHKANFLKGGRKKLNQSPFLVKGYRLFDLVEYQKKLYYIFGRRDSGFFDIRRLDGTKVNKGSISCKRIRLVDIRRNIITERRNSCSIPPTN

SEQ ID NO: 16625 - protein, 465 aa, unidentified; identical to SEQ ID NO: 10277

SEQ ID NO: 16626 - protein, 475 aa, Petrotoga sp.; identical to SEQ ID NO: 14951

SEQ ID NO: 16627 - protein, 396 aa, unidentified; identical to SEQ ID NO: 4508

SEQ ID NO: 16628 - protein, 412 aa, unidentified; identical to SEQ ID NO: 6751

SEQ ID NO: 16629 - protein, 420 aa, unidentified
MQYVYVLNKHGEPLMPCSPRKARLLLKQKKACVVKRTPFTIKLLYGSTGYKQPITLGVDAGSKHIGISATTEKYEFYREEATPRNDVVDLLSARRAFRRSRRNRKTRYRAPRFNNRVHSKHKGWLAPSVEVKIQEHITLIKRVCRILPVTFVRVETAEFDTQRLKAMLEGKPLPVGTDYQLGEMYDEYNVRQYVLKRDNYTCQCCGAHPTKTKAVKLHVHHIETRRTGGNAPNNLITLCTACHKALHAGKVTLDGKKRGRSLKDAAFMGVMRKTLMERLLKELKIPVQGTYGYITKYLREKHSIPKSHTNDARCISKNPLAIPCDTCYYTKAIRHHNRQLHKATILKGGIRKANQAPYTVKGYRLWDKVSYNGSECFITGRRTSGYFALKKLDGTVVSNSASYKKMRLLEVATNYITERR

SEQ ID NO: 16630 - protein, 414 aa, unidentified; identical to SEQ ID NO: 4822

SEQ ID NO: 16631 - protein, 375 aa, unidentified; identical to SEQ ID NO: 5779

SEQ ID NO: 16632 - protein, 470 aa, Thermoanaerobacterium sp.; identical to SEQ ID NO: 15617

SEQ ID NO: 16633 - protein, 539 aa, Streptomyces sp.; identical to SEQ ID NO: 15425

SEQ ID NO: 16634 - protein, 328 aa, Parasutterella sp.
RRNRKTRYRAPRFDNRIRTKRKGWLAPSVENRIDAHLSRIEAVLRLLPVTKITVETASFDLQLLKNPDISGKEYQEGEQLGFWNIREYVLCRDGHVCQHCYGRSKDPVLNVHHLESRRTGGDSPGNLITLCETCHKALHRGEITLKAKRGQSFRAEAFVGIMRWEVHNRLRALHPGIEVSNTYGYRTKHARIANGIAKSHCADAFCIAGNLGAERLCEFFFQKQTRRNNRQIHKLSILKGGIRKRNQAPFEVKGFRLFDKVACQGEEGFIFGRRSSGFFDVRKLDGTRISAGISCKKLHLLEKRRTYLTEIRKEEALPPLPEGRGLRA

SEQ ID NO: 16635 - protein, 444 aa, unidentified
MTKTATQKVTQVCVLDQNGQPLMPTQRLGKVYRLLETKKAHIVAYEPFTIKLDYEPKTHIIQPLTLGVDSGAIHSGYSIANEHREYYSAEVIARDDISKNISDKRMYRRNRRSRKTRYRKPRFNNRKNKGKGWIPPSLEQKVDVQVNEIEHLHKYFPINNIIIEVAEFDIQKIENPDISGKEYQQGTLQGYNIRNYLLEKYNHKCFYCDKEVVTFEVEHMIPKARNGSNRVDNLTLSCHDCNQKKGTLTAEEFIKQTLSPQKAAQKLRQLPKTKKLLKYMAHMNATRWVLYNTIKEIYNSVSLTYGYITKHNRINTGLPKAHHIDAKCITGFSTVPSFDVIVVKTKMRRHNRQLHRATFSKGHVRRAATLPRIVHDFQLYDIVLFNNHRYYIKSRRSSGSFTIVSLEGLKDEKRSYKKLTFLGHTNAYLTNHHVNDEKDYMASK

SEQ ID NO: 16636 - protein, 427 aa, unidentified; identical to SEQ ID NO: 3577

SEQ ID NO: 16637 - protein, 430 aa, unidentified
LETRNKEVPKLMQDRKKARRARRTNGRRCRRQRRAKANGTISKKCVKQDTAQSKNPSKRAKEIGIIKRRLPGYKKDVLCIGIKNKEAKYTNRTRPEGWLTPTANQLLQTHINLVRKMQKFLPISDVVLEVNKFAFMRLDNPDIQKWQYQQGPLYQKGSLENAVSEMQEHHCLFCDKPIDHYHHVVPQSENGSNTIANIVGLCAEHHNLVHKDAAWQKKLAEEKVGLNKKYGALSVLNQIIPALTNKLSVLFPKHFFVTAGKSTHDYRAAHGVSKDHWLDAYCIACSVLPSNVCDSNINNHMPYELKQFRRHDRRVLNNENMNRVYTLDNKAVAINRHKATEQEAASLEEFRKEHPNDVCKLKVKEHHPTYRNMNRNYPGSIFLVGKHVHIMQGIAGSKDGKATTYKDSNANSITASKCKFVAKNSGILFV

SEQ ID NO: 16638 - protein, 437 aa, Clostridium sp.; identical to SEQ ID NO: 14047

SEQ ID NO: 16639 - protein, 443 aa, Anoxybacillus sp.; identical to SEQ ID NO: 7148

SEQ ID NO: 16640 - protein, 445 aa, unidentified
MPCRPARARQLLCDGKAAVFRRYPFTIVLKERQGGETQPVALNVDPGSKTTGIALVALFQRDQVAVYGQHIVHRGQQIRDALESRRTTRRSRRHRKTRYRKPRFLNRTRPAGWLPPSLMSRVYNVETWTKRLSRFVPITSANVETVRFDTQLIENPDIAGKEYQQGSLFGWELREYLLYRHQHICAYCHGLTKDLVLEKEHVTPKALGGSNRLANHVISCRECNVDKGSLHPNAWMSLCKQRGDKLNLTRARNMQRIMDGYRPSLRDAAAVNATRYAVGNSIKYIIPNTQFWSGGLTKKNRSEQGYTKDHWIDAACIGQNGSAVVLECHHILVASAKGHGSRQMCRVDKYGFPRTSAKTSSVVYGFRTGDLVTANVPTGKKQGLHIGRVAVRKNGYFNIQSESGAVQGISHKHCRIIQRSDGYNFNYGAAIPPGTKVPGFLALTR

SEQ ID NO: 16641 - protein, 471 aa, Streptomyces sp.; identical to SEQ ID NO: 14708

SEQ ID NO: 16642 - protein, 438 aa, Petrotoga sp.; identical to SEQ ID NO: 8698

SEQ ID NO: 16643 - protein, 480 aa, unidentified
LYTKPLDNIGEGSLLPSGEINLKGMTFMVYVKSIDGKALMPTSNAKARKLLKQKKAKVVSLRPFVVKLTYKTKTEYTQKLNLGVDSGYSNIGFSVIDAKQEYIAGEVKLLEGMKKRLLEKASYRRIRRSRLRYRKARWNNRVKSKKKGWLAPSLKHKLDTHIKFIDYLKNILPIGKITIEVANFDIQKMKDDLISGVDYQNGDMFGFWNVREFVLHRDGHKCQNPNCKHKDKKEQILKIHHIRYRSKGGSDRPENLITLCSKCHTPANHKKGKFLYDWCVNGKKVRGFKDATFMSMIRWYLVNDLKSKHNNVSITYGYITKNHRIQNGIEKSHLNDAFAIAKGTNQARTKDRFLVIQDRLKNRSLEKFYDSKIIDIRTGKKVSGGDLSCGRSTRNKNLNTENLRKYRGAKISKGQRRIRKQKYFYQPNDLVKYDGKVYTVKGTQNEGKYIALKEIKKVPKVELLIPYVFKKGLNWSYGLC

SEQ ID NO: 16644 - protein, 471 aa, Acidiferrobacter sp.
MAVLVLDRRKRPLMPCSERRARVLLARGRARIHRIVPFTIRLVDRLQEDSTLQPLRLQADLGSKGTGLALVREQETVDEVTGAMIRTIVVVMLLEIAHRGQTLHEVLTQRRAFRRRRRGNLRHRPARFDNRTRPEGWLAPSLQHRVDTTASWVDRLCRWAPVTSLSQELVRFDTQQMQDPEIAGVMYQQGTLAGYEVREYLLEKWGRKCVYCGQEGVPIEIDHIHPKSRGGSDRVSNLTLACHDCNQAKGNSPLEQFLAKQPEVLRRIQAQAKTPLKDAAAVNSTRWALVQRLKATGLEVEVASGGRTKWNRHRLHLPKTHSLDAACVGHVDAIHCWQQPVLTIKATGRGSYQRTRLTRHGFPRGYLTRNKSAFGFQTGDLVRAFVTSGKKAGRYLGRVAIRASGSFNIQTATGLVQGIPHRFCTLIQRADGYGYALTQRAFDVGEAGTGAAYAAALSLPGLNPRVSRVIG

SEQ ID NO: 16645 - protein, 346 aa, Arthrospira sp.; identical to SEQ ID NO: 2872

SEQ ID NO: 16646 - protein, 415 aa, unidentified
MVYVLDKNGQPLMPTDRHRKVRLMLQSGQAKVIKRCPFTIQLNYDSGHQTQEISLGIDAGSKHIGVSTTTKIKVLYEVDVELRNDIVDLLSSRRELRRGRRNRKTRYRQAKFNNRRRGNGWLAPSIRQKIGTHLTVVENICKILPISRIMVETASFDIQKIKNPDIQGAEYQQGDQLGFWNNREYVLFRDNHTCQCCKGKSKDKILNVHHIESRKTGGNAPNNLITLCEICHTGYHKGAVQLPKTVKRGMRFKDAAFMGIMRWAFYEALKQQYEPVALVHNTYGYITKHTRIEHNLPKEHYVDARCISGNPDAFPSGEYYYQKKVRCHNRQIHKLTILKGGIRKQNQATYLVKGYRLFDKVSYQGKGYFVFGRRQSGFFDIRTLSGEKVNKGSLSCKKLKFIATRTYYLTERRAV

SEQ ID NO: 16647 - protein, 266 aa, unidentified
MQYVYVLNKHGEPLMPCSPRKARLLLKQKKACVVKRTPFTIKLLFGSAGYKQPITLGVDAGSKHVGLSASTEKRELYSEEFTPRSDVVELLSTRRQNRRSRRNRKTRYRVPRFDNRVHSKHKGWLAPSVEVKIQEHITVIKHICKILPISLVRVETAEFDTQRLKAMLAGKPLPVGTDYQLGEMYDEYNVRQYVLKRDHYTCQCCGTHNTAKKVVKLHVHHLESRKTGGNAPSNLVTLCTTCHKNLHKGRVTLDVTIRYTCYLDRF

SEQ ID NO: 16648 - protein, 406 aa, unidentified; identical to SEQ ID NO: 3157

SEQ ID NO: 16649 - protein, 412 aa, unidentified
MVYVLNQNGQPLMPTKNYAKVRVLLKQGKAKVVNKCPFTIQLLYSSTNYTQKVTLGVDSGSKHIGVSATIKDKVLFEADVELRNDIVDLLSTRRELRRSRRNRKTRYRKPRFNNRRRKDGWLAPSVKQKIDSHLTMVSKVCKILPISNIVVEVASFDIQKIKNPTISGTDYQQGEQLDFWNVREYVLFRDGHICQCCKGKSKDKILNVHHIESRKTGSDAPNNLITLCETCHKGYHKGTVKLPKTIHRGMSFRDATFMGVMRWAFYNKLKKTYPNVSLTYGYITKNTRIENGLPKDHYIDARCIGGNPNAVSNGEVFYYKKVRCHNRQIHKCKVLSGGIRKRNQATYYVMDYRMYDKVSYQGKPYIVFGRRNSGFFDIRTLDGTKVNKGSISYKKIRLIEPQSNYIVEKRTA

SEQ ID NO: 16650 - protein, 419 aa, unidentified; identical to SEQ ID NO: 2658

SEQ ID NO: 16651 - protein, 431 aa, unidentified
MPDKVYVISRLGHPLMPCSPAKARHLLDDKKAKVVKRMPFTIRLLYGSTKYIQPIILGVDAGSKTIGLSASTAKEEVFAAEVMPRNDVVENLSTRREFRRARRNRTTRYRKPRSDNRVRSNHERWLAPSVKVKIQEHITSIKRVCTILPISKVVIETAEFDLQLLKAIQEGKPIPEGEDYQKGEMYGSYNVCQYVLWRDNYTCICCGVRGTPKNPVRLHVHHFESRKYGGNAPDNHGTLCDDCHKKFHLGIIADVKLKTRRRQSTRDAAFMGIMRKTLMWRLRTELFIPVAETKGYITKATREKLLVLPKSHTRDALAIAQGRHGFSIKEYAYVEPANHIYTVRPVRHHNRQLHKASILKGGIRKRNQASKYVFGFRLYDKVLYQGKACFVWGRRTSGTFLLRTIDGIKVKDGVSYRNLTLLERSSNYLIA

SEQ ID NO: 16652 - protein, 428 aa, unidentified
MQRVFVLDKNKKPLMPCHPARARQLLRKGRAAVFRHYPFTIILKDRETGNTQDVRIKIDPGSKYTGVALVAEFKRGKRVVWGAVIEHRGDKIHRALEKRRAVRRSRRTRKTRYREPRFLNRRRSEGWLPPSLESRVLNISTWVRRLLKLCPITAISMELVRFDIQKLQNPEISGVEYQRGELFGYEVREYLLEKWGHKCAYCGATNVPLEIEHIIPKSRGGTDRISNLTLACRKCNLAKGNKTAAEFGYPEIQEQAKKPLRDAAAINSTRWKLYDKLKKFNLPIECGSGGRTKYNRVKQGHPKEHWIDAACVGKSGENIFIIRDGVIYTPDLTSALAGITRDTIFTLASDLGYKIIEKRITRDEVYCADEAFFTGTAAEVTPIRELDNRPIGNGTRGPITEQLQTLYFDCVYGRNDKYKKWIAKGVCQ

SEQ ID NO: 16653 - protein, 515 aa, unidentified
MATVYVLNKDGKPLMPTTRCGHIRHLLKEKKARVVRTNPFTIKLVYETDDVVQPLYLGIDPGRTNIGVAVVKVDGTAVFTAHLETRNKEIPKLMAKRKEHRQGRRHYRRCKRQRRAAAHGTLSKKCKKQDTAQGGNISKRAQTIGVFERNLPGCENSVLCIGIKNKEARFNNRVRPARWLTPTANQLLLTHVNFVKKICKFLPISDVVLEINKFALMALDNPNIQKWQYQQGPLYQKGSLENAVSEQQDHHCLFCEKTIEHYHHVILRSENGSDTIANIVGLCAEHHDLIHKDDKLKEELAKKKQGLNKKYGALSVLNQIIPALTYELGSRFQGHFYVTTGKSTYDYRAAHSVSKDHWLDAYCIACSVLPDGCFDNTINSRVPYELKQFRRHDRQVCQQQNVKRKYYLDKKLVATNRHKAIKQETDSLEEYRNNGGTTDKLVVKEHKPTNKRLNRILPGALMAANGKLNVMVASRGLHNGIPDNYVFDNNSKAKPSKCTLINKNKGIVFVSNSVS

SEQ ID NO: 16654 - protein, 420 aa, unidentified; identical to SEQ ID NO: 10448

SEQ ID NO: 16655 - protein, 427 aa, Enterococcus sp.; identical to SEQ ID NO: 5630

SEQ ID NO: 16656 - protein, 422 aa, unidentified; identical to SEQ ID NO: 11478

SEQ ID NO: 16657 - protein, 405 aa, unidentified
  source 1..405: note = Syntrophaceae bacterium UBA2280
MVYVLNKNGRPLMPCSSRKARMLLSAGKAAVVKRTPFVVRLIHGSSGYVQPVALGVDSGFTHVGLSAVTNTAEVYAADVELRKDLVDLNSERRMFRRNRRNRKTWYRQPRFDNRRKPEGWLAPSIQHKLDSHKKLIAGIKSILPVSRVIIEVAAFNIQKIKNPSIEGCGYQNGDQAGFWNVREYVLYRDGHRCQAPKCSRKDKILNVHHIEGRKTGGNRPDNLITLCESCHDKHHKGLLDLIIKRSNGFKAETFVSMVRWRLVNETGADHTYGYITKTNRIALGLAKSHINDAYAIAGGTSQKRVDPFRIKQVRKCNRKLFKGERSHIRNTAPRFVKGFQRYDKVSFQGKECFVFGRRSTGYFDLRLLDGTKVHASANVKEINRLERGNTFLIERKSARTERIAA

SEQ ID NO: 16658 - protein, 430 aa, unidentified
MPKVYVLNRHGRPLMPCTPAKARHLLDAGKAKVRHRTPFTIQLLYGSTGYTQEVILGVDAGSKTIGLSAATETEELFSAEVKPRNDVVELMSARRQFRRARRNRTTRYRKPRFDNRVRSKHKGWLAPSVEVKIQEHMTAIRRACAILPVSKVVVETAEFDLQLLKAVAEGKPVPQGEDYQKGEMYGHYNVRQYVLWRDSYTCRICGVNGSVRKGVPLHVHHLESRRVGGDAPDNLVTLCTACHDKLHKGIIMAADIKKRKRRSTRDATFMGIMRMTLLRRLREQLPVPVVETRGYITKATRENLLVLPKSHTNDALAIAHGPQGFRAEYLPNIRQADRLYTIRPVRHHNRQLHKATILKGGVRKANQAEKYICGFRLYDKVLYNGIECFVWGRRTSGSFLLRQLNGEKVKDGVSYKHLKLLERSQSYLVA

SEQ ID NO: 16659 - protein, 424 aa, unidentified; identical to SEQ ID NO: 3232

SEQ ID NO: 16660 - protein, 435 aa, unidentified
LGRTTGLRAEQAEPAGIRKGDTLKVFVLNMRGKPLMPCSPAKARHMLKAGKAFVVRRTPFTIKLTIATGETKQDVTLGVDAGARHVGISATTEKEEVFASEVALRQDITGLLADRLAFRRARRNRKTRYRAPRFNNRVRSKHKGWLAPSVENRIQAHISRIEAVCRLLPVTKIVIETASFDIQKIRNPEVEGTGYQQGDQLGFWNVREYVLFRDGHICQHCRGRSKDPILNVHHLESRKTGGDAPNNLITLCETCHKAYHAGKIKLKVKRGQSFRAEAFMGIMRWTLLDRVRKTHPKLPVENTYGYLTKHKRIALGLPKTHCADAFCIAGNLKALRRGDFLFQQQTRKHNRQIHKCSILKGGVRKLNQAPFLVKGFRLFDKVRIGGQIGFVFGRRVRGIFNIRRLDKTVIGTDINCKKLSLLETRKTFLTELRKE

SEQ ID NO: 16661 - protein, 512 aa, unidentified
MSTVYVLNKDGKPLMPTTRCGHVRRLLKEQKAQVVTSKPFTIQLLYETDDVVQPLYLGIDPGRTNIGVAVVKIDGTAVFTAHLETRNKEIPKLMQGRKKARRARRTNGRRCRRQRRAKANGTISKKCVKQATAQNGSASKRAKKIGVIKRHLPGCEKEVLCIGIKNKEAKFNNRTRPAGWLTPTANQLLQTHINLIKKIQKLLPISDVVLEINKFAFMQLDNPNIQKWQYQQGPLYQKANLEEAVSEMQEHHCLFCKKKIDHYHHVVPQHKNGSNTIGNIVGLCAKHHDLVHKDTSWQEKLAKKKTGLNKRYGALSVLNQIIPALTKELSSLFPKHFFATNGKSTYDYRAAHGVSKDHWLDAYCIAGSVLPNDACDNNINSHVPYELKQFRRHDRRALHKENMSRVYTLNGKKVATNRHKATEQTADSLEEFRQNHPDDVCKLKVKEHHSEYRNPKRNFPGCVFLVGKRTHVMQGTSGSHNGKADGYYDTNGNSYSSGKCKFVAKNEGIVFA

SEQ ID NO: 16662 - protein, 512 aa, unidentified; identical to SEQ ID NO: 3769

SEQ ID NO: 16663 - protein, 426 aa, unidentified
MVYVQNHLGQPLMPTQDHRKVRLLLKAGAAVVVRRTPFTIRLTTRTKTYVQPVILGVDTGSKTVGMSAATHEEEVFAAELTPRNDVVKNLADRRKFRSSRRGRTTRYRQPRFNNRVHSKHKGWLAPSVEVKIQEHITSIKRACELLPISKVVVETAEFDLQLLKSIADGMPVPQGEDYQKGEMYGFYNVRQYVFFRDGYTCQCCGAHGKGIKFHTHHLESRKTGGNAPDDLVTVCDKCHKAFHAGLITDAKLKKRRRKSTRDAAFMGIMRKTLLQRLRAELPIPVVETRGYITKATRERLLKLPKSHTNDALAIAMGRHGFGIEEVTYMPQSDRIYQIKPVRHHNRQLHKAIPKKGGRRQRNQGPKYVQGFRRFDKVLYRGQECFIWGLRTRGYFQLKLLDGTKVHESAKVSELILLEHSSGYLIA

SEQ ID NO: 16664 - protein, 422 aa, unidentified; identical to SEQ ID NO: 5333

SEQ ID NO: 16665 - protein, 480 aa, unidentified
LYTKPLDNIGEGSLPPSGEINLKGMTFMVYVKSIDGKALMPTSNAKARKLLKQKKAKVVSLRPFVVKLTYKTKTEYTQKLNLGVDSGYSNIGFSVIDAKQEYIAGEVKLLEGMKKRLLEKASYRRIRRSRLRYRKARWNNRVKSKKKGWLAPSLKHKLDTHIKFIDYLKNILPIGKITIEVANFDTQKMKDDLISGIDYQNGDMFGFWNVREFVLHRDGHKCQNPNCKHKDKKEQILKVHHIRYRSEGGSDRPENLITLCSKCHTPANHKKGKFLYDWCVNGKKVRGFKDATFMSMIRWYLVNELKSKHNNVSITYGYITKNHRIQNGIEKSHLNDAFAIAKGTNQARTKDRFLVIQDRLKNRSLEKFYDSKIIDIRTEKKVSGGDLNCGRSTRNKNLNTENLRKYRGVKISKGQRRIRKQKYFYQPNDLVKYDGKVYTVKGTQNEGKYIALKEIKKVPKVELLISYVFKKGLNWSYGLC

SEQ ID NO: 16666 - protein, 442 aa, unidentified; identical to SEQ ID NO: 7529

SEQ ID NO: 16667 - protein, 416 aa, unidentified
MPCSPAKARLLLKEKKAIVKRRTPFTIQLTIATGEAKQPVSLGIDAGYKHVGLSASTEKAELYASEVELRQDITDLLSARRALRQSRRNRKTRYRAPRFDNRISTKRKGWLAPSVENRINAHLSRIEAVLRLLPVTKITVETASFDLQLLKNPDISGKEYQEGEQLGFWNIREYVLCRDGHVCQHCYGRSKDPVLNVHHLESRRTGGDSPSNLITLCETCHKALHRGEITLKAKRGQSFRAEAFMGIMRWEVHNRLRALHPGIEVSNTYGYRTKHARIANGIAKSHCADAFCIAGNLGAERLCEFFFQKQTRRNNRQIHKLSILKGGIRKRNQAPFEVKGFRLFDKVACQGEEGFIFGRRSSGFFDVRKLDGTRISAGISCKKLHLLEKRRTYLTEIRKEEALPPLPEGRGLRAKM

SEQ ID NO: 16668 - protein, 395 aa, Succinivibrio sp.; identical to SEQ ID NO: 11057

SEQ ID NO: 16669 - protein, 465 aa, unidentified
MSTCVCVLSNSGERLMPTFRLGKVRHLLKDGKAKIVKHHPFTIQLLYDSKTNTQPIEICEDVGYNYIGISVKSQSHEYVSAQYDTLQDEKACHDSCRKLRRTRRNRLRYRKPRFDNRKRGEGWLAPSLRHKKELNVNVVKMYCAVMPITHATVEVGSFDTMLVKAIQEGKAIPEGADYQKGPRYNLATLREAVFYRDNYTCQVCGRKVADGAILHMHHMFYWKGRHGDSLNELLTVCEKCHTPANHQRGGKLYGFGENVKFADLSGAAFMNTVRWQIVNELYAAFGKDFVTVTYGAMTKEKRIALRLEKSHNNDAYAMGEFHPNCRCTFEHYEKVRRNNRILEKFYDSRYIDIRTGEIATGKELFNGRINRNHKKDSENLHRYRGKRTYAGHRALLRKKVNLNPGDLVSLNGEVLVVHSTHTNKKGAVNVEFKTPGKSGQKSASLKKLKIVKAADSMHSAWEKIS

SEQ ID NO: 16670 - protein, 515 aa, unidentified
MTALEERLSKTEYIYVLGFDGKPQMPTRRKRHVLKLLKTGRARIAEDIPFTIRLTYRNAPVLQPVTLAEDPGRTNIGAAVLSPLGGLLFAAVIETRNKEIKKLMTDRQKSRQASRRGERKARQRLAKRYGSMVKSGMVMRKLPMYAADRFVICKFIRNTQAWFCNRKRCPDWITPTVHHLVQTHLNIIRKISRYLPVTDIAFEVNRFAFMHMENPEAMGVDFQNGPLKGYDDVKEAICTQQHGKCLMCKKPIAHFHHIVPRSRGGSDTIQNLAGLCPECHTKVHTDTAFRKDFDEKKSGQLKKYGALSALNQAVPFICKKLLEEYGKEHVHFCRGLDTSLIRTALGFEKTKKNQMHEVDAYCIGLAALEVNEVETPAFDHTFQIRQFRRQDRSIIHHQTGRSYYQGKEKVAQNRKPGFEQKTTALSQWYEEQVRIHGEKEAEKLRSQLRVEKSCRHYNDVDRFLPGAVFLYEGKRYVLSGRITNGKYLRACGQGMKNFPAAECTFIRHNAGLVFI

SEQ ID NO: 16671 - protein, 241 aa, unidentified
VRSKTTTHHVKLRQSRQVWLYQAVYNLGEGFLPSSEERTAFYWLLIYRKEHGIMQYVYVLNKHGEPLMPCSSGKARLLLKQQKACVVKRTPFTIKLLFGSTGYKQPITLGVDAGSKHVGLSASTEKRELYCEEFTPRNDVVDLLSTRNQNRRSRRNRKTRYRAPRFDNRVHSKHKGWLAPSVEVKIQEHITVIKRICRILPITLVRVETAEFDTQRLKAMLEGKPLPVGTDYQRGEMYDEY

SEQ ID NO: 16672 - protein, 512 aa, unidentified
MSTVYVLNKDGKPLMPTTRGGHVRHLLKEQKARVVRAKPFTIQLLYETNDVVQPLYLGIDPGRTNIGVAVVKANGTAVFTAHLETRNKEIPKLMQDRKKARRARRTNGRRHRRQRRAKANGTISKKCVKQTTAQNGSVSKRAKDIGVIKRRLPGCEKDVLCIGIKNKETKFTNRTRPEGWLTPTANQLLQTHINLVKKIQKFLPISDVVLEVNKFAFMRLDNPNIQKWQYQQGPLYKKESLESAVSEIQEHHCLFCKKPIDHYHHVVPQHKNGSNTIGNIVGLCAKHHDLVHKDSAWEKKLAKKSTGLYKKYGALGVLNQIIPTLTNELSSLFPKHSFVTNGKSTYDYRAAHGVSKDHWLDAYCIACSVLPSNVCDSNINNHMPYELKQFRRHDRRVLNNENMNRVYTLNNKAVAINRHKAKDQKTVSLEEFRKEHPDDVCKLKVKEHHPTYRNMNRNFPGSVFLVGKQIHVMQGIASSKDGKATKYNDTSATAIAAGKCKFVAKNTGILFV

SEQ ID NO: 16673 - protein, 443 aa, Anoxybacillus sp.; identical to SEQ ID NO: 4769

SEQ ID NO: 16674 - protein, 416 aa, unidentified
MVYVLSQNGQPLMPTENHAKVRVFLKQGKAKVVQRCPFTIQLLYESTTHTQKINLGIDAGSKTIGVSATTDSKVLYESEVVLRNDIVELLSGRRALRNSRRSRKTRYRKPRFDNRKKPDGWLAPSIRQKIETHVTVVGNVMKILPVTKIIVETASFDIQKIKNPEIEGVGYQHGEQLDFWNVREYVLFRDGHTCQCCKGKSKDNILNVHHIESRKTGGNAPNNLITLCETCHKAYHKGIITLPKEIHRGMRFRDAAFMGVMRWAFYDRLKELYNPLGVEVINTYGYITKNTRIEHGLPKEHYVDARCISDNPAAKPLDHYYFQKKVRCHNRQIHKNTILKGGIRKRNQASYEVKGFRLYDQVLWKGQKCFIFGRRSTGRMDLRLLDGTHINASVGHKNLKLLSMRKNYLIEQRKAG

SEQ ID NO: 16675 - protein, 427 aa, unidentified; identical to SEQ ID NO: 4977

SEQ ID NO: 16676 - protein, 437 aa, unidentified
MSKTNYVFVLDTNRQPLAPCHPARARELLAKGKAAVFRRYPFAIVLNRAVGDVPPESQLKIDPGSQTTGLAVVNGDKLVWGAELQHRGDRIQAKLETRRVCRRNRRNRQTRYRKPRFLNRTRPKGWLPPSLNHRVETTLTWVNRLRKLCPIASISQELVRFDTQKLQNPEISGASYQQGELFGYEVREFLLEKWGRKCAYCRAENVPLEVEHIVPKSKGGSDRVSNLTLSCRPCNQSKGNRDVREFLSGKPSVLERILRQAKTPLKNAAAVNATRWKLYQRLKETGLPVEVGTGGQTKFNRTRLEFPKAHWLDAACVGKTPSLHLATETPMAIASKGHSTRFRTLIDRYGFPRAVRKTKAQVNGLQAGDIVRAIVPNGKYRGQWTGAIAGVRKKRPPALRPFGKKQIDLTAKTQIQIVHKQDGYEYNINPCGHSSRR

SEQ ID NO: 16677 - protein, 421 aa, unidentified
MLVYVLSKNGQPLMPTHRCGFVRRLLNSQKAKVVRRCPFTIQLQYDTDCKTQPVTLGIDAGSKHIGVSATTESKVLYEADIELRNDIVDLLATRRQMRRARRSRKTRYRKARFDNRKRNDKWLAPSIQHKVNCHLEAVRFVHKLLPISKIIVEVASFDIQKIKNPLITSTDYQNGELLDWKNVREYVLFRDSHICQCCKGKSKDPVLQVHLIESRKTGGNAPNNLITLCKTCHNGYHHGTVKLPAKIKRGMKFNDATFMGIMRWGFYNQLKSLYPDVSLTYGYITKDIRISNGLAKTHFIDARCISGNPLATSDNTVYFLKKRRRHNRQIHKFNILKGGRKKRNQAAYLVKGYRLFDKVNYNRKEYFIFGRRASGFFDIRTLSGEKVNKGSISCKKLKLLEASKGYLTERRNAFLSPLNSV

SEQ ID NO: 16678 - protein, 431 aa, unidentified; identical to SEQ ID NO: 6117

SEQ ID NO: 16679 - protein, 514 aa, unidentified; identical to SEQ ID NO: 11607

SEQ ID NO: 16680 - protein, 425 aa, unidentified; identical to SEQ ID NO: 3148

SEQ ID NO: 16681 - protein, 424 aa, unidentified; identical to SEQ ID NO: 3434

SEQ ID NO: 16682 - protein, 250 aa, unidentified
MPNKVYVINKHGRPLMPCSPAKARHLLDAGKAKVKKRTPFTIQLVYGSSGYTQEVILGVDAGSKTIGMSASTTKEELLSAEVKPRNDVVDLQSTRREFRRARRNRKTRYRKPRFDNRVRSKHKGWLAPSVEVKIQEHITSIKMVCRILPVSKVVIETAEFDLQLLKAIADGKPVPQGEDYQKGEMYGHYNVRQYVLWRDDYTCQCCGAHATKKKEVWLHVHHLESRKVGGDAPDNQVTLCESCHEKLHKG

SEQ ID NO: 16683 - protein, 416 aa, unidentified; identical to SEQ ID NO: 11196

SEQ ID NO: 16684 - protein, 443 aa, unidentified
LTKDENRPSGRTTGLRAEQAEPAGIRKGDTLKVFVLNMRGKPLMPCSPAKARHMLKAGKAVVVSRTPFTIKLTIATGETKQDVTLGVDAGARHVGISATTEKEEVFASEVALRQDITGLLADRLAFRRARRNRKTRYRAPRFNNRVRSKHKGWLAPSVENRIQAHMSRIDAVCRLLPVTKIVITTASFDVQKIKNPTIEGTDYQQGDQLGFWNVREYVLFRDGHVCQHCHGRSRDRILNVHHLESRKTGGDAPNNLITLCETCHKAYHAGKIKLKVKRGQSFRAEAFMGIMRWTLLDRVRKTHPELPVENTYGYLTKHKRIALGLPKTHCADAFCIAGNLKALRRGDFLFQQQTRKHNRQIHKCSILKGGVRKLNQAPFLVKGFRLFDKVRIGGQIGFVFGRRVRGIFNIRRLDKTVIGTDINCKKLSLLETRKTFLTELRKE

SEQ ID NO: 16685 - protein, 416 aa, Parasutterella sp.; identical to SEQ ID NO: 10114

SEQ ID NO: 16686 - protein, 406 aa, unidentified; identical to SEQ ID NO: 6079

SEQ ID NO: 16687 - protein, 264 aa, unidentified; identical to SEQ ID NO: 12077

SEQ ID NO: 16688 - protein, 428 aa, unidentified
MVFVKSINNTSLMPCSARKARLLLNSNRAKIIDYKNFTIQLNYNTTNFCQKTIIAVDTGAKFLGIILRNGKNILLARQVKLRTDISSLLTTRRILRRARRNKLRYRQPRFLNRTKSKQSGWLPPSIQSRVNNTINMIDNLISKLPVYKLIIEVGNFDVQKMKNPAINGKEYQQGEMAGFNEIKEFVLTRDNYTCKHKQCDHTDKKLQVHHIQFRSNGGSDKPDNLITLCKTCHSNLHSGLIDDKFKKVANYKEPPFMNSLKTRLQKHYINATFCFGYQTKTTRQEMQLPKSHINDAIAISCYQNKISNLKYLEVNEYVIQVRIKKRSLHEQTSRKGIKEKNITQKRNCKNVFQVNQFKIGTKVSFVNQVGFISGFTGKSAYIKDINDNYITEDNKSYKQISLIKLNLICYNNGWIKFYDNLSHQLVKP

SEQ ID NO: 16689 - protein, 430 aa, unidentified
MLVYVLKQTGQPFMPTERFGKVRRLLKEGKAKVVRREPFTIRLLYESETDVVQECYCGVDTGSKHIGVAVIGNDKVLYQSQTELRDDIKKKMDRRRQFRKIRRNKLCYRPMRFNNRNASKRKERYSPTLISKFQGHKREIEFIKSILPISDVILEVGEFDLQLLQDPILAYHKWDYAKGELYQQENFKQATKARDGYQCQCCGKKNCRLEVHHLLPRSRGGSDKLANLITLCTDCHHLAHSSEEQLLAFQKKFGNRVKGTLNYATQMNVLRSMLQKEYPDAELTYGFITKEMRRVFGLEKSHTIDACCIASRGSEFYNENSNKYKKKCVPKGSYPRTGVKGGKFVVLPKGKISGLKRYDKVLYNGKEYFVVGRRTTGYIYLIDVDNNRVQTERTKRTTGEKYMSKAIIKVALVRKVASAKSCVCVRECED

SEQ ID NO: 16690 - protein, 414 aa, unidentified
MPCSPAKARLLLKEKRAIVVRRTPFTIQLTIATGESKQPVSLGVDAGYKHVGLSASTEKAELYASEVELRQDVSDLLSARRALRQSRRSRNTRYRAPRFDNRIRTKRKGWLAPTVENRINVHLSRIETVLRLLPVTKITVETASFDTQLLKNPDIAGKEYQEGEQLGFWNVREYVLFRDGHVCQHCHGRSKDPVLNVHHLESRRTGGDSPGNLITLCETCHKALHRGEIKLKAKRGRSFRAETFMRIMRWGVLNRLKASHPKLEVHNTYGYRTKHARIANGIAKSHCADAFCIAGNFGAKRLGEFFFQKQTRRNNRQIHKLSILKGGIRKRNQAPFEVKGFRLFDKVACQGEEGFIFGRRSTGYFDVRKLDGTCISAGISYKKLHLLEKRRTYLTEIRKEEALPPPPEGRGLRA

SEQ ID NO: 16691 - protein, 428 aa, Microcoleus sp.
VSKVFVLDTDKKPLNPIHPGRARMLLSQGKAAVLRAHPFTIILKEAVFNPDVEPLRIKIDPGAQTSGLALVNDSTGEVVWIGELQHRGFQIRDALTSRRQLRRSRRNRKTRYRKPRFLNRTRNTGWLPPSLTSRVANILTWVKRLSALCQITAISQELVRFDTQQMENSEISGVGYQQGTLAGYEIREFLLSKWNRTCAYCGVKDTRLEIEHIQPRSKGGSNRVSNLCLACVPCNQKKGNQDIKDFLKGKPDLLKRILAQGKKPLADTAAVNATRWNLYENLKKTGLPVEVGTGGRTKYNRTIRGLDKTHYWDAACVGASTPERLITNGVKPLLIAAKGHGTRQQCRTDKFGFPVRYCSRTKCHKGFQTGDIVKANVTSGKKVGTYVGRVATRATGSFNISTTDGLVQGISHKYCIHIHKKDGYAYVA

SEQ ID NO: 16692 - protein, 442 aa, unidentified; identical to SEQ ID NO: 3234

SEQ ID NO: 16693 - protein, 457 aa, unidentified
MGDGYFTAKRLSGLIFSRNLEKEEGIMQNKVYVINKHGRPLMPCSPAKARHLLDDGKAKVKKRTPFTIQLLFGSTGYTQEVILGVDAGSKTIGLSASTETEELFSAEVKPRNDVVDLLSTRREFRRARRNRKTRYRKPRFDNRVRSKHKGWLAPSVEVKIQEHMTAIRRICRILPVSKVVVETAEFDLQLIKAVEEGKPVPQGEDYQKGEMYGHYNVRQYVLWRDGYTCQCCGAHATQKKEVRLHVHHLESRKIGGDAPSNLIALCESCHEKFHKGIITTADFKKRKRKSTRDATFMGIMRKTLIQRLRAELTIPVIETRGYITKATREKLLVLPKSHTNDALAIAQGPQGFHTGYLPGIRQATHIYTIRSVRHHNRQLHRATILKGGVRKANQAEKYVYGFRLYDKVLYNGTECFVWGRRASGSFLLRKLDRAKVKDGVSYKHLKLLERSQNYLIA

SEQ ID NO: 16694 - protein, 444 aa, unidentified
MLVFVLNHHGKPLMPCKPRKARLLLKEGKAKVIRKDPFTIKLYYGSSGYKQEVTASIDTGSKKIGCAATANNKVIYQSEIELRDDVSRKMQQRKMYRRTRRGRKTRYRKPRFNNRGKEGKLAPSIKSKIDSHFREKRFVESILPVTKWKVELTSFDIHKITNPKVEGEGYQEGNQKGFYNVKAYVLHRDNYTCQNCKGKSHERKVSEALTPRKKLCVHHIRFRSEKGTDTPSNLITLCKKCHADVHDGRIEFKSKSSKTKPATEMGIIKSQLKKSNAEGLQMETHCAPHGTAWEFEETFGYETKFKREQVLQLPKTHYYDAVAICCDDGEIVKPNDTVYFKKHVSKGDYKQTRGKRSEVRIPTGKLFGLRKFDLVKTSKGTGFVKGKRTSGFFCISNISADVLSASVNVKKNCVRLQARTTTLTERFVLSRRSRIERKATSSPD

SEQ ID NO: 16695 - protein, 447 aa, unidentified
MYWLIALNISKKEVSCMVYVLDIDGQPLMPTTRHGKVRRLLNSHLAKVVKRCSFTIQLLYQSTKETQPVSLGVDAGSKHIGLAATTDKKVVYQEELVSHNDVVKLISARRILRRSRRNRKTRYRKARFNNRVHSKHKGWLAPSVEVKIQEHITAIKRICQILPISDIHVETAEFDLQRLKAMEEGRPLPVGTDYQLGEQYDFYNTRQYVLHRDEYTCQCCGTHDNNVKLHVHHIESRQTGGDAPNNLITLCEHCHKLLHAGKTILPKGKKRGKSYRDATFMGIMRKTLLERLKKEIDVPVEGTYGYITKYWRERAGLEKSHINDAICISKHPYARPLETYYLTKAVRHHNRQIHKTKFSKGGIRKRNQAPYLVKGFRLFDKVLYQGESYFIFGRRITGYFDIRTLDGTKVNKGSTSYKKLRIQDTAEAYLTEVRAIPHMNEFTCVLA

SEQ ID NO: 16696 - protein, 416 aa, unidentified
MVYVLSQNGQPLMPTENHVKVRVLLKQGKAKVVQKCPFTIQLLYESTTHTQEINLGIDSGSKTIGVSATTESRVLYESEVVLRNDIVELLSGRRTLRRSRRNRKTRYRQPRFDNRKRPDGWLAPSIRQKIETHVTVVENVMKILPVTKIIVETASFDIQKIKNPDVAGVGYQQGEQLDFWNVREYVLFRDGHQCQCCKGKSKDNILNVHHIESRQTGGNAPNNLITLCETCHKAYHKGLITLPKEIHRGMRFSDAAFMGIMRWAFYDRLKELYTPLDVEVINTYGYITKNTRIEHGLPKEHYVDARCISGNPAAKPLGYYYFQKKVRCHNRQIHKCKIGKGGIRKRNQAVYEVKGFRLYDKVQWKGQKCFIFGRRSTGYMDLRLLNGTKINASACYKNLKLLNMRKNYLIEQRKVG

SEQ ID NO: 16697 - protein, 512 aa, unidentified; identical to SEQ ID NO: 3776

SEQ ID NO: 16698 - protein, 421 aa, unidentified
MVYVVNVNGKPLMPCKEAKARRLLKNNKAKIRKKEPFTIQLLFECENQVQDITLGIDAGSKHIGLSATSEQKELYAADVELRNDIVELLSTRRQYRQARRNRLRYRAPRFFNRVHSKNRGQLVPSIEQKIGTHLRVVSDVCGILPISKIIVETASFDIQKIKNPDINGEEYQQGSQLGFWNVREYVLWRDNHECQYCHGKSKDKILNVHHIESRKTGGDSPENLTVLCEYCHGRYHMGKIKLDLKYGKSLRDAAFMGIMRWSFYNRLKETYPNVLMTYGFVTKNTRIQHDLPKEHYTDARCISGNPQAEPLGYYFYQKKVRCHNRQIHKANILKGGIRKRNQAEYKVKGFRLFDKVRYDNQMGFIFGRRASGYFDIGKLNGEVIHRSVSYMKLELLDTRKTLLTERRQAVPLMAKVMSIPA

SEQ ID NO: 16699 - protein, 415 aa, Bacillus sp.; identical to SEQ ID NO: 5843

SEQ ID NO: 16700 - protein, 456 aa, Halomonas sp.; identical to SEQ ID NO: 16097

SEQ ID NO: 16701 - protein, 417 aa, unidentified
MFVYVISKDGQPLMPTTRFGKVRRLLKNKKAKVIRSCPFTIKLLYEPENLIVQEVVLGQNTGSKHVGTACVTNDKVLYQSEVALRDDIKKKMDSRRAFRKNRRQRKARYRKPRFLNRANSTKKDRLPPSVRSKVQSHIDEIEFCKKILPVSKIVFEVSQFDTALMKSPSLISKKVKHWGYQKGFDYEYSSRREAVLHRDNYTCQCCGKKHVRLEVHHIIFRSMGGTDDERNLITLCEKCHKAIHDGMLILTKKPKKLNLKYATQMSIIRSQLLKIYPDAIETFGFVTKENRNNLNLPKEHFIDACVIASGGEIFKQSSWLFKKRRVAKQNRQLCKGVRGEKQIPTGKVFGFRRFDKVKYLKEICFIKGRRSKGAFTLMDIDNNTIDFRDRGGRGTPSYKLLERLNTRRNTLCISQRI

SEQ ID NO: 16702 - protein, 465 aa, unidentified
MSTCVCVLSNSGERLMPTIRLGKVRRLLKDGKAKIIKHHPFTIQLLYDSKANTQPIEICEDVGYNYIGISVKSQSHEYVSAQYDTLQDEKACHDSCRKLRRTRRNRLRYRKPRFDNRKRGEGWLAPSLEHKKQLNIRLIERYVSVIPITHATVEVGSFDTMLVKAIEEGKATPESADYQKGPRYNLATLREAVFYRDNYICKVCGRKATEGAILHMHHMFYWKGRHGNSLSELITVCEKCHTPANHQKSGKLYGFGENVKFADLSGAAFMNTVRWQIVNELYAAFGKDFVTVTYGAMTKEKRIALHLEKSHNNDAYAMGSFHPVNRCAFEHYEKVKRNNRILEKFYDSQYIDTRTGELTNGKSLFNGRISRGHKKDSENLHKYRGKRICKGHRALRRKKLALNPGDLVSLNGEILVVHGTHTKKNGSVNVEFKTPSRGGKKSASLKKLKIVKTSNLMHSAWTKVS

SEQ ID NO: 16703 - protein, 515 aa, unidentified; identical to SEQ ID NO: 3339

SEQ ID NO: 16704 - protein, 405 aa, unidentified
  REGION 1..405: note = IscB polypeptide
VGQRKQVSGLKVTVPVLSINGSPLMPCSLTKARHLLERRKAKIINLNPFAIRLTFECENKVQEVSLGVDSGYNHIGFSAITKTKEITSGEISLDDKTSKRLTERRMYRRNRRNRLRYRKPRFNNRKTPEGWLPPSVQRKLDTHINMVNKLKELTPVKKVTVEIGEFDIQKLMNPDIYGKEYQQGDLYGYNNLKAFLFSREHGRCQFCGKNIVKGEKAHTHHIKPRSETGTDSPSNMALLHEDCHDELHKRGLYRKLKAPKEYKAEIFMSIIAARLKKALNCGVTYGYETATKRNLLGIEKSHVNDAFIIAGGINQERCLPYKVEQKRINNRTLQTNRKGFVPSIRTQRYVIQNRDFIWISDKKYLCGGVANRGIMIYYFDDTKKKLIYYKKVNKFYSTGSLTWIN

SEQ ID NO: 16705 - protein, 413 aa, Petrotoga sp.
LMPCHSARARELLKKGKAAVFRYHPFTIILKEREGGDTQPIQVKIDPGSKTTGVALVADFKRGKKIIWASVIYHRGHIIKKDLDVRRAVRRFRRNRKTRYRKPRFLNRKRKEGWLPPSLISRAENILTWVKRIRRFSPVTSISMELVRFDTQKLQNPEIKGVEYQRGTLYGYEVKEYLLEKWGRKCAYCGNENVPLEIEHIVPKSKGGSNRVSNLTLACHECNQKKNNQSIDEFLANNPKKLNQIKARAKGPLKDVAAVNITRWYLFNQLKKEKLPIEVGTGGQTKYNRETQGYPKEHWIDATCVGESGYNVQLEPDMQVLEITANGHGMRRMCFVDKYGFPKSYRPKERTYMGYKTGDIVLANVPKGKNKGIHIGRIAIRHRPSFLLNGVGDVHPKYLTLLQKNDGYGYQMS

SEQ ID NO: 16706 - protein, 396 aa, unidentified; identical to SEQ ID NO: 4508

SEQ ID NO: 16707 - protein, 420 aa, Moorena sp.; identical to SEQ ID NO: 14851

SEQ ID NO: 16708 - protein, 502 aa, unidentified; identical to SEQ ID NO: 11560

SEQ ID NO: 16709 - protein, 470 aa, unidentified; identical to SEQ ID NO: 2825

SEQ ID NO: 16710 - protein, 416 aa, unidentified; identical to SEQ ID NO: 7823

SEQ ID NO: 16711 - protein, 460 aa, unidentified; identical to SEQ ID NO: 7734

SEQ ID NO: 16712 - protein, 444 aa, unidentified
MKIKNIKYIYVLDSNGKPLMPTKRLGMVRRWLTTGQAHWYKNSRNIIQFDRPTTHHLQKITQGCDLGDHLGISAITNKQEVYSSESYCDGNQVHKRMQARKMYRRTRRNCLRYRAIRFANRKHAKYAPSIKRKLAFQIKEIARISKFLPINNYIFEGSIFDINKLTCHMQQQKGYHNVLDFLYARDNGCDALDGIRYPKSDLVVHHLVHRANGGTNNPDNLVLLTRWHHNQANHNNGILDNLAKTRQQTFKNIDTRGAYFMNILNVELPKYFDYLPTFGYITAQRRKQYGINKTHHDDAFVIAGGTNHTLRLDYTIYREKLRCNNRSLEKFYDATYCDLRDSKIKKGAVLSSGRTSRSKELPYNNQRTYRANKIKKGRRTIRKQHYRLRPHDLVKYQNQIWQVKGVQNKGKYIKLTKKSAKDVVTNIKNVAILLHVNGCLISLD

SEQ ID NO: 16713 - protein, 370 aa, Lactobacillus sp.
MKHENANRVFLLNKDGKPLMPCRPRKARLLLKSGKAFVVKKYPFTIQLKYGSYGYKQKVSLGVDTGQRHIGFAVVSQDKVLHQSEVELRQDVHTNLYTRKIYRRGRRNRKTRYRQARFLNRVHGKRDGLWLPPSVKSKVSHNIAWIKRYLAVLPNPDLHIEVGKFDMAKMVNPDISGKQYQEGSLKDWKNYEYYVLARDEYTCQLCYKHGEGVKLVVHHIVYRSQGGTDRVDNLITLCTNCHTTKNHQPGGKLYKWMKAKKKVTKQLKGATFMNILRKRIMTTFPEASFQYGSQTYVERKNLLLPKGHFMDAIAISGIKPVGQMPETVTMISQFRKKKRSLHEATARKGRKQPNMSSKRNEKNTKYACGL

SEQ ID NO: 16714 - protein, 442 aa, Selenomonas sp.; identical to SEQ ID NO: 4776

SEQ ID NO: 16715 - protein, 431 aa, unidentified
MPNKVYVINKHGRPLMPCSPAKARHLLDEGKAKVKKRTPFTIQLVYGSSGYTQEVILGVDAGSKTIGMSASTTKEELLSAEVKPRNDVVDLLSTRREFRRARRNRKTRYRKPRFDNRVRSKHKGWLAPSVEVKIQEHITSIKRVCRILPVSKVVIETAEFDLQLLKAIADGKPVPQGEDYQQGEMYGHYNVRQYVLWRDGYTCQCCGAHATKKKEVRLHVHHLESRKVGGDAPDNQVTLCESCHEKLHKGLIAEKDFKKRKRRSTRDATFMGIMRKTLMQRLCSELPIPVVKTRGYITKATREKLLVLPKSHTNDALAIAQGKQGFNVGYLPGIVQINKIYTIRPVRHHNRQLHKATILKGGIRKSNQTEKYVFGYRLFDKVQFNGQDCFIWGRRTTGIFTIKTINGKMIKDGISFKKLKLVEKSTSYLIA

SEQ ID NO: 16716 - protein, 430 aa, unidentified; identical to SEQ ID NO: 4817

SEQ ID NO: 16717 - protein, 415 aa, unidentified; identical to SEQ ID NO: 5047

SEQ ID NO: 16718 - protein, 415 aa, unidentified
MVYVVANDGQPLMPTERHGKVCRMLKSGMAKVIKKCPFTIQLQYESKRNVQPVSLGVDAGSKHIGISATTKTKVLYESDVELRDDIVKLLATRRQLRRSRRNRKTRYRPAKFDNRKRKEGWLAPSIRQKMESHLTVVANVCKILPVSRIIVETASFDIQKIKNPDIQGVEYQQGEQMDFWNIREYVFFRDGHTCQCCKGRSKDKILNVHHIESRKTGGNAPNNLITLCETCHKGYHNGTVILPKNIKRGMKFKDAAFMGIMRWAFYNALKEQYEPAIPVSMTYGYLTKNTRIRHNLPKEHHIDARCISGNPDAVSDGTYYYQKKVRCHNRQIYKQTILKGGIRKSNQAEYLVKGYRLFDKVRYHGREYFIFGRRKTGFFDIRTLSGEKVNKGSISVKKLTFADTRKNYLTERRTV

SEQ ID NO: 16719 - protein, 475 aa, unidentified
MVAVVTSTGKPLIPTSAYRARKLLKKGRAVIFKYRPYFTIQLVDRADGEVQEVEYKSDTGSVHVGISVCTEKKELLSEQRDLLENEPEHHNDRKKNRRTRRNRKRYRKPRFDNRKKKPQEGHEKWLPPTLLHKMEVQVRLFREFCRVVPVTSACFEMGKFDTQALKAVSKGEPVPEGEGYQKGERYGTDTLRAAVFLRDGHTCRFCGRSVKDGAILHVHHVGYWKGDRTNRPANLASACEQCHTPANHGKNGILYGKEPEFKTLKDASYMTSVRWIMLDEIKKAAPGVQVSVTYGVTTKRKRQELHLPKSHVNDAFSMASFHPKKRSDTEYWKKIPRHDRVLQKFYDAIYLDTRDGSEKKGSELSNGRISRNHKKDSENLHQYRGHKVSKGHNSIRRGASSLKPGSIVMYKGEKMTVHGTHTRYVKGKDGKTAKKVNVQFTCPASDGKKSASLEKCTPVSRVYNTGWKRYWPDKK

SEQ ID NO: 16720 - protein, 427 aa, unidentified; identical to SEQ ID NO: 7162

SEQ ID NO: 16721 - protein, 420 aa, unidentified
MQYVYVLNKHGEPLMPCSPGKARLLLKQQKAHVVKRTPFTIKLLYGSTGYKQPITLGVDAGNKHVGLSASTEKREFYCEEFTPRNDVVDLLSTRKQSRRSRRNRKTRYRAPRFDNRVHSKHKEWLAPSVEVKIQEHITIIKRICRILPITLVRVETAEFDTQRLKAMLEGKPLPVGTDYQLGEMYDEYNVRQYVLKRDHYTCQCCGAHTTTKKTVKLHVHHLESRKVGGNAPSNLITLCTTCHDALHKGKVSLDGKERGKPLRDAAFMGIMRKALMARLREELPIPVQGTYGYITKMRREQNDIKKSHVNDARCISKHPLAEPCSVCYRTKAIRHHNRQTHKANFSKGGIRKRSQMPYVVEGYRLWDKVLYKGQECFVSGRRASGSFTLKKLDGTRISKGVTFKKLRLLEPATNYLIERM

SEQ ID NO: 16722 - protein, 457 aa, unidentified
VWLYQAVYNLGEGFLPSSEERTAFYWLLIYRKEHGIMQYVYVLNKHGEPLMPCSPGKARLLLKQQKACVVKRTPFTIKLLYGSAGYKQPITLGVDAGSKHVGLSASTEKRELYREEFTPRNDVVDLLSTRRQNRRSRRNRKTRYRAPRFDNRVHSKHKGWLAPSVEVKIQEHITVIKRICRILPVTLVRVETAEFDTQRLKAMLKGKSLPVGTDYQLGEMYDEYNVRQYVLKRDNYTCQCCGAHPTEKKPVRLHVHHLESRHVGGNAPNNLITLCVACHKALHEGKITLDKGKKRGKPLRDAAFMGIMRNTLLARLKDELNIPVKQTYGYITKLLREKNKIPKSHVNDARCIAKAPNAKPCDTMLYTRALRHHNRQIHKAKILNGGIRKKNQAPYLVKGFRLWDKVRYNGEECFITGRRSSGYFALKKYDGTVISNSASYKKLMLLEAATNYITERS

SEQ ID NO: 16723 - protein, 403 aa, unidentified
LRVFVLNKRGKPLMPCSPAKARLLLKEKKAIVKRRTPFTIQLTIATGETKQPVGLGVDAGYKHVGLSASTDKAELYASQVELRQDITDLLSARRALRRARRNRKTRYRAPRFNNRIRTKRKGWLAPSVENRINAHLSRIEAVLRLLPVTKITVETASFDMLLLKNPDIAGKEYQEGEQLGFWNVREYVLFRDGHVCQHCYGRSKDPVLNVHHLESRRTGGDSPGNLITLCETCHEALHRGEIALKTKRGHSFRAEAFMGMMRWEVLNRLKASHSELEVNNTYGYRTKHARIVNGIDKSHCADAFCIAGNLGAERLCEFFFQKQTRRNNRQIHKLSILKGGIRKRNQAPFEIKGFRLFDKVACKGEESFIFGRRSSGYFDVRKLDGTRISAGISYKKLRLLEKR

SEQ ID NO: 16724 - protein, 481 aa, unidentified
MWTTVLRDEKPYGRSSALPVRECVSITKKRGHRMVAVLSKTGIRLMPTSSYRARKLLAKKKAVICGYRPFTIRLTERETGDVQPVELAVDTGYFHVGNSLKTAKHELAAVEIRTLMDEKQRYDDRRRYRRMRRSRLRYRAPRFDNRRRPEGWLAPSIQGRMEQNLAFLRRVLSVVPVTRIVMEMGQFDTQVLKAVEEGRPLPEGADYQQGERYGIATLREAVFTRDNYTCQCCEKTVHDGVILHVHHIVYRSQGGTNRMGNLITVCEKCHTPKNHKPGGKLYKWKPTVKSFKGATFMTAVRWIVYRSVKESFPDVDVRITYGAKTKLQRRALDITKSHVNDAYVMGNFHPKHRARPVILQKKRRNNRILEKFYDAKYIDTRDGSKKTGQQLFNGRTNRNHNTDTENLRPYRGIKLSKGKRAIRTTRYKIQPHDILVYQGQEMEASGCHNKGTRVMTTAKKSLPIGKVHVRQYSGGYYAVAE

SEQ ID NO: 16725 - protein, 421 aa, unidentified; identical to SEQ ID NO: 2738

SEQ ID NO: 16726 - protein, 415 aa, unidentified; identical to SEQ ID NO: 12104

SEQ ID NO: 16727 - protein, 414 aa, unidentified
MPCSPAKARLLLKEKKAIVVRRTPFTIQLTIATGEAKQPVSLGVDAGYKHVGLSASTEKAELYASEVELRQDVSDLLSARRTLRQSRRNRKTRYRAPRFDNRIRTKRKGWLAPSVENRINAHLSRIGAILRLLPVTKITVETASFDTQLLKNPDISGKEYQEGEQLGFWNVREYVLFRDGHACQHCHGRSKDPVLNVHHLESRRTGGDSPGNLLTLCETCHKALHRREIKLKTKRGQSFRAEAFMGIMRWEVLNRLKASHPELEVHNTYGYRTKHTRIVNGIDKSHCADAFCIAGNLGAKRLGEFFFQKQTRRNNRQIHKLSILKHGLRKRNQAPFEVKGFRLFDKVVCQGEEGFIFGRRSSGSFDVRKLDGTRISAGISYKKLRLLEKRRTYLKEIRKEEALPPLPEGRSLRA

SEQ ID NO: 16728 - protein, 449 aa, unidentified
LTKRTNPSNRSIHIMRVFVLDKNRKPLDPCHPAKARKLLKSGRAKVLRRYPFTIIIKDLEVENCSTHDHQLKIDPGAKTTGLAIVQGDRVIWGAELTHRGFQIKEALTSRRQLRRSRRNRKTRYRKPRFLNRTRPKGWLPPSLMSRVHNILTWVKKLIKFCPVTGISQELVRFDTQKMLNPEISGIEYQQGTLYGYELREYLLEKWNITCAYCGANNTRLEIEHIKPKSKGGSDRVSNLAIACHNCNQAKGNLEIEEFLSSKPNILKRILSQAKKPLADAAAVNATRWKLHDELKLIGLPVEVGSGGLTKYNRCRQNLPKTHWLDAANVGKVETLYIEDYQPLLITAKGHGTRQICRTDKFGFPRLHCSPKKIHKGFQTGDIVRAVVTKGKKIGTYMGRIATRKTGSFDITTHLAGFQELAINIAKLSIAKMDIVINLRRINPPSQLHP

SEQ ID NO: 16729 - protein, 489 aa, unidentified; identical to SEQ ID NO: 12744

SEQ ID NO: 16730 - protein, 455 aa, unidentified
MNTCVCVLSNSGERLMPTFRLGKVRRLLKDGKAKIIKHHPFTIQLLYDSKTNTQPIEICEDVGYNYIGISVKSQSHEYVSAQYDTLQDEKACHDSCRKLRRTRRNRLRYRKPRFDNRKRGEGWLAPSLKHKKELNVNIVKMYCTVMPITHATVEVGSFDTMLVKAIQEGKAVPEGADYQKGPRYNLATLREAVFYRDNYVCKICGRKATEGAILHMHHMFYWKGRHGNSLNELLTVCEKCHTPANHQKSGKLYGFGEKIKFADLSGAAFMNTVRWQIVNELYVAFGKPFVTITYGAMTKEKRIALQLEKSHNNDAYAMGEFHPNLRCMFEHYEKARRNNRILEKFYDSRYIDIRTGEIATGKELFNGRINRNHKKDSENLHKYRGKRTYAGHRALLRKKVNLNPGDLVSLNGENLIVHSTHTKKNGAVNVEFETPAKSGQKSASLKKLKIVKSAN

SEQ ID NO: 16731 - protein, 418 aa, unidentified
MLVYVLKQNGQPFMPTSRFGKVRRLLKEGKAKVVRREPFTIRLLYESETDVVQECYCGVDTGSKHIGVAVVSDDKVLYQSQTELRDDIKQKMDNRRMYRHNRRSRKTRYRKQRFLNRRNSIREDRLPPSVRHKVQAHIDEIEFCKKILPVSDLILEVSQFDTALMKNPSLMNEKIRHWGYQQGFNYGYSSRREAVLHRDNYTCQCCGKKNCRLEVHHIKFKSNGGTDDEENLITLCKECHDRVHAGTVVLDKKPKKMRLKHATHMSIIRSWLLKIYPDTIETFGFVTSENRNHLNLSKDHYIDACVIASGGLEFKPLDVVFYKRRMSKGNYRLTRKSFGKEIICKGKILGFKSFDKVEYFGVECFIGSRRNSGIATLVDIFRNTLDFSHLQKGFKLPKMRLLKRISSRKTTAISIINV

SEQ ID NO: 16732 - protein, 410 aa, Bacillus sp.
MTKIKEYCFVLDSEGRKLAPTDVNNAWHLIRKKKAKLISKYPMVIQLNRAVESEDIDYKIKLGIDDGSLHGGVGLVQECKTKNKPVFKATIEHRKDVSKLMEQRRDYRRYKRSHKRYCQARFNNRASSKRERRIAPSILQKRQTIIRFVEKISKWIDIANIYLEDVAIDIRALTDDKKLYRWQYQKSNRLDENIRKAVIIRDKCKCMECGKSNCILEVHHIIPRRLKGSNTLGNLITLCSKCHQKTEGKEEGFIDRYQKMINGKSLRLDFAKHVMQGKTWLQNQLNQYAELFLTSGGDTSNRRIDWNIEKSHSNDALVICGLEINDTNIKEWIIKPIRKKTKAIHSETYGFKHRDIAQYTDTKGATHVGYVTGMYPDRLQINIQTKEKHLKRVNARKSILKWRFRGLYFL

SEQ ID NO: 16733 - protein, 406 aa, unidentified
VVYIQDIDGNPLMPTTRHGKVRRLLKSNKAIVINLCPFTIQLTYATSGYKQEVVLGVDAGTKHVGLSATTKSKELYASEIILRSDIVELLSSRRESRRRRRNRLRYRKPRFMNRIKTKKEEWVAPSVRQKIDSHLKIIGFVYSILPISKLIIEVAQFDTQKIKNPEISGKEYQEGEQLGFWNVREYVLARDGHKCQHCKGKSKDPILNVHHIESRKTGGNSPSNLITLCETCHKEFHKGKIKLKVKRSASIRDAAVMGIMKWRLYNKLKSLYPNVKMTFGYITKHDRINHGIEKSHVSDAFVISRNFNSCRLGYYYKRKLVRRHNRKIHKMKILKGGIRKRNQAPFKVFGFRLFDKVMFQGEEYFIYARRLSGQFNIRDINGENKKDVSCKKLRYIIHGLISIETG

SEQ ID NO: 16734 - protein, 416 aa, unidentified; identical to SEQ ID NO: 11239

SEQ ID NO: 16735 - protein, 416 aa, unidentified
MVYVLDIDGNPLMPTERHGKVRRLLKDGKAKVVKRCPFTIQLLYDSTRYTQEVNLGIDAGSKHIGVSATTEEKVLYEADVELRNDIVDLISTRKEARKRRRYRNTRYRKARFNNRVSTKKAGWLAPSIKQKIQTHLTVVANVYEILPVKNLIVETASFDIQKIKNPNLSSEEYKQGKQLGFWNVREYVLFRDNHICQCCKGKSKDKILNVHHIESRKTGGDAPNNLITLCETCHRGYHNGFVKLPKTIHRGMSFRDATFMGIMRKSLLFELRKICPNVKETYGYITKNTRITHSLPKDHYIDARCITGNPDAKPLRYYFYQKKVRCHNRQIHKMNFSSGRVRKNNQAEYLVKGFRLFDKVGYNNKEYFVFGRRQRGCFAVRNLLGGKPNKSGDVDYKKLKFLDTKHNILTEICKGW

SEQ ID NO: 16736 - protein, 443 aa, unidentified
MSVFVLDKRKKPLMPCTEKRARLLLERKKAVIHRTVPFTIRLKERVGGEVQPVAVKLDPGSKVTGIALTREVGTETTHPMFLAELHHRGASIKKSLEQRSGYRRRRRSANLRYRAHRFSNRTKPKGWLAPSLLHRVETTLSWVNRFRRLVPVSRISMELVRFDLQKHLNPEISGIEYQQGELQGYEVREYLLEKWGRKCAYCGVEGVPLQVEHIVPKASGGSNRVSNLTLSCHTCNQKKGSRSVKTFLAKKPEVLKRVLVGAKAPLRDAAAVNSTRCVLYDTLKATELPVETASGGQTKWNRSRFSIPKTHALDALCVGILKGIKNWLQPTLAIYSTGRGVYQRTRVTLCGFPRGYLMRKKSAFGFQTGDLVQAVVLKGKNVGTHTGRVAIRVTGSFNIQTSHGLIQGISYRYCRMVQRGDGYRYEIGLFPTFKDGVFAPKNQ

SEQ ID NO: 16737 - protein, 502 aa, unidentified
MSIIYVQDRHGKPLAPTTRGGHVRRLLDSKQARVVCGNPFTIRLMYGVDPCTQGFILGIDPGRTNIGVTVAAADGTCVFSAKAETNNKDVPKRMKERKAHRQASRQGERKRRQRRARKNGTCFGERKRILPGCKEPITNHYITNTEARFMNRARTKGWLTPTANQLLQSTISLVRKVCKFLPVTDVVLELNEFAFMAMDDPGIQRWEYQKGPLYGYGSVEAAAYTQQDGHCIFCEQAIAHCHHVIPASKGGSDTLENRAGLCGGHHDLVHKEQSWTDKLAELKAGMNKRYAALSVVNQIIPRLADELGKMFPGHAFATNGWSTKQFRDAHGIPKDHNTDADCIACSILENPTIKLPEKVYELRKFRRHDRAQISRMEDRNYYLPGADPKTGKPKKVLAAKNRHKRTEQKTDSLEEFRAAHPNDVGRLMVARGGPKHKDPNRVLPGAIFQVETRSGNVEQLVLQGSHGRDKNGQPLYLEFVGQGNFRPNRCKYVARGRGWQFV

SEQ ID NO: 16738 - protein, 413 aa, unidentified; identical to SEQ ID NO: 10655

SEQ ID NO: 16739 - protein, 431 aa, unidentified; identical to SEQ ID NO: 4463

SEQ ID NO: 16740 - protein, 408 aa, unidentified; identical to SEQ ID NO: 4826

SEQ ID NO: 16741 - protein, 512 aa, unidentified
LMLLQIKAGTETFWTAPCGSGPKAEGVSPERKAMNTVAVVTNTNKPLMPTSPYRARKLLSSGKAKIVKHRPFTILLVNRSDGNVQEIEYKSDTGYLHVGISVCSEKREFVREQRDLLPDKREKHNDRRKYRRTRRKRKRYRKARFDNRIGKIRKAEKNKHVWLPPSLDHKVDAQVQLFLRLYQVMPIKRAVFEMGQFDPALMKALEKGEAAPQGIDYQMGERYQIATRRAAAFTRDRYACVFCGRSIKDHAILHVHHIGFWKQDRSNRLDNLATCCEQCHTSENHRPGGILYGVEPKLESLASATYMNVVRFELLQRLKEAAPDVEFHISYGAKTSVIRKQRSISKSHTNDAYCLGQYFPKLRAEEIGFQKIRRNDRILQKFYDAEYLDSRDGTTKKGKELTNGRISRNHMKDHKNLHQYRGKKLSKGRVTIRRGRSSLKTGSLVRFDGEVLTVHGTHRSRRKNKAGHIKVSVNVEFERPSKTGRKSAALSKCQIISQSYNTGWKKFSYERR

SEQ ID NO: 16742 - protein, 422 aa, unidentified
LNKRGKPLMPCSPAKARLLLKEKKAIVVRRTPFTIQLTIATGESKQPVSLGVDAGYKHVGLSASIEKAELYASEVELRKDITDLLSARRALRQSRRNRKTRYRAPRFDNRIRTKRKGWLAPSVENRINAHLSRIEAVLRLLPITKITVETASFDMQRLKNPDISGKEYQEGEQLGFWNVREYVLFRDGHVCRHCHGRSKDPVLNVHHLESRRTGSDSPDNLITLCETCHKALHRGEITLKAKRGQSFRAQAFMGIMRREVLNRLKASYPELKVHETYGYLTKHARIANGIVKSHGADAFCIAGNLGAERLGEFFFQKQTRRNNRQIHKLSILKGGIRKRNQAPFEAKGFRLFDKVACQGEEGFIFGRRSSGSFDVRKLDGTRISAGISYKKLRLLEKRRTYLTEIRKEEALPPLPEGRGLRA

SEQ ID NO: 16743 - protein, 462 aa, unidentified; identical to SEQ ID NO: 8000

SEQ ID NO: 16744 - protein, 408 aa, unidentified
MVYVQDINGKPMMPTTRHGKVRRLLKDKKAVVVNLCPFTIRLTYVTSDYKQEIVLGVDAGTKHVGLSATTKSKELYSSEVILRSDIVDLLSTRRELRKTRRNRLRYRKPRFDNRVKSKRSGWIAPSVKYKIDAHIRIVDNVCSILPISRIVIEVAQFDTQKIKNPNISGKEYQEGDQLGFWNVREYVLARDGHKCQYCKEKSKDKILNVHHIESRKTGGDSPYNLITLCETCHKEYHKGNIDLKIRRGKSLRDAAVMGIMKWRLYEELKSKYDNISMTFGYVTKYNRIKHGIEKSHVSDAFVISKNFNAIRLGYYYKVRLVRRHNRQIHKQKIPKGGVKRLNQSPFEVFGFRLFDRVMFENSYYFIFGRRKTGRFNIRDIDGKNQRDITYKKLKLSRCKCFMVQNEMN

SEQ ID NO: 16745 - protein, 430 aa, unidentified; identical to SEQ ID NO: 3681

SEQ ID NO: 16746 - protein, 348 aa, Enterococcus sp.; identical to SEQ ID NO: 9214

SEQ ID NO: 16747 - protein, 415 aa, unidentified
MENRIEYCFVVDKNNRPLTPTKVNKGWYLVRKSRAKLKSKYPMVIQLEKEVKSDEDDESHIVCGIDDGSAHVGLAIVQKCHTKNKVVFKGTIEQRQDVKHLMDVRRGHRRYHRYHKRYRQARFNNRSSSKRTCRLAPSIKQKKDAILRVLYQLNKWVNIQEYHLEDVCIDIRALTDDYKPYRWQYQKSNRLDENLRKATILRDECRCQECGKSNCVLEVHHIRARKYGGADTIGNLITLCSGCHQKTEGRERDFEDRYFNMIKSKPKRFDYAMHVMQGKTYLREKISELGSLHLTNGGETANKRIEWNMEKSHGNDAICVTDCIPDNCDVKEWIIKPMRRKSKAKTNNLLGIRHRDLVSYTYKNGETHTGYVTALYPEQLVLNFQSKTKHCKKVNARKCRLLWKFNKIYWLEQCV

SEQ ID NO: 16748 - protein, 431 aa, unidentified
MPNKVYIINKHGRPLMPCSPAKARHLLDEGKAKVKKRTPFTIQLVYGSSGYTQEVILGVDAGSKTIGLSASAETEELLSAEVKPRNDVVDLLSTRREFRRARRNRKTRYRKPRFDNRVRSKHKGWLAPSVEVKIQEHITSIKRVCRILPVSKVVIETAEFDLQLLKAIADGKPVPQGEDYQKGEMYGHYNVRQYVLWRDDYTCQCCGAHATKKKEVRLHVHHLESRKVGGDAPDNQVTLCESCHEKLHKRLITAKDFKKRKRRSTRDATFMGIMRKTLMQMLCSELPIPVVKTRGYITKATREKLLVLPKSHTNDALAIAQGKHGFNVGYLPGILQIDKIYTIRPVRHHNRQLHKATILKGGIRKSNQTEKYVFGYRLFDKVQFNGQDCFIWGRRTSGYFVVKTIDGKVIHNSASFKKLNLVERASNYLIA

SEQ ID NO: 16749 - protein, 396 aa, unidentified
  source 1..396: note = Lachnospiraceae bacterium UBA7730
NHAKVRILLKQGKAKVANKCPFTIQLMYSSTNYTQKVTLGVDSGSKHIGLSATTKDKVLFESDVELRNDIVDLLSTRRELRRSRRNRKLRYRKPRFDNRRRSDRWLAPSVKQKVDSHITMIAKVHKILPITNIIVEVASFDIQKIKNPTISGVDYQQGEQLGFWNVREYVLFRDGHECQCCHGKSGDKILNVHHIESRKTGGNAPNNLITLCETCHTGYHKGTVKLPKTIHRGMSFKDATFMGIMRWALYGKLKAIYSDVKLTYGYITKNTRIKNSLPKDHYIDARCISGNPNAASNGDIYYYKKVRCHNRQIHKNTILKGGYRKRNQAPYEVMGFRLFDKVQWKGCKCFIFGRRSTGRMDLRLLDGTHINASVGYKNLKLLKMRSSYLIEQRKVG

SEQ ID NO: 16750 - protein, 443 aa, unidentified
MQRVLVVSHTRQQLMPCTPARARMLLTDNKAAVLRKYPFTIILKDRADGDVQPIELKADPGSKVTGVALVADYAKPGKTVVWAGEIQHRGQVIKDALDSRRGIRRSRRSRKTRYRAPRFDNRTRHEGWLPPSLMSRVHNVTIWALRLQRVAPLASIAVETVRFDMQKMVSPEISGVEYQQGTLAGYELKEYLFEKWGRKCAYCNKKNLPLQVEHIIPKTRGGTDRVSNLTLSCEGCNHKKDNLTAAEFGHPEVQNHALAPLKDAAAVNTTRYAIGNALKSLGLPVSFWSGGRAKFNRTHQGYPKAHWIDAACVGESGEHVKLDSSMQEIQVKATGHGSHQMCRMDRFGFPRTSAKTTRVVNGFRTGDIVRAVLPYVKKTGTYDDKVAVRASGSFNVSTATGVVQGISYKYCSVVHRADGYSYLTKTGAPLGNELPSIRAQELS

SEQ ID NO: 16751 - protein, 465 aa, unidentified; identical to SEQ ID NO: 7042

SEQ ID NO: 16752 - protein, 451 aa, unidentified; identical to SEQ ID NO: 5203

SEQ ID NO: 16753 - protein, 495 aa, Nonomuraea sp.; identical to SEQ ID NO: 11981

SEQ ID NO: 16754 - protein, 374 aa, unidentified
LNYDSGHQTQEISLGIDAGSKHIGVSATTKIKVLYEADVELRNDIVDLLSSRRELRRGRRNRKTRYRQAKFNNRRLGNGWLPPSIRQKIGTHLTVVENICKILPISRIMVETASFDIQKIKNTDIQGAEYQQGDQLGFWNIREYVLFRDNHTCQYCKGKSKDKILNVHHIESRKTGGNAPNNLITLCEICHTGYHKGAVQLPKTVKRGMRFKDAAFMGIMRWAFYEALKQQYEPVALVHNTYGYITKHTRIEHNLPKEHYVDARCISGNPDAFPSGEYYYQKKVRCHNRQIHKLTILKGGIRKQNQATYLVKGYRLFDKVSYQGKGYFVFGRRQSGFFDIRTLSGEKVNKGSLSCKKLKFIATRTYYLTERRAV

SEQ ID NO: 16755 - protein, 512 aa, unidentified
MSTIYVLNKDGKPLMPTTRGGHVRHLLKEQKARVVQSNPFTIQLLYETNDVVQPLYLGIDPGRTNIGVAVVKADGTAVFAAHLETRNKKIPKLMQDRKKARRARRTNGRRCRRQRRAKANGTISKKCVKQDTAQSKNPSKRAKEIGVIKRHLPGCKKDVLCVGIKNKEAKYTNRARLEGWLTPTANQLLQTHINLVKKIQKFLPISDVVLEVNKFAFMRLDNPNMQQWQYQRGPLYQKGSLENAVSEMQEHHCLFCEKPIEHYHHVVPKSENGSNTIANIVGLCAEHHNLVHKDVAWQEKLVEEKTGLNKKYGALSVLNQIIPALTKELSFLFPKHSFMTNGKSTHDYRAAHGISKDHWLDAYCIACSVLPIDVCDSTINNCVPYELKQFRRHDRRALNNENMNRVYTLNDKVVATNRHKATEQEAASLEEFRKEHPNDVCKLKVKEHHPTYRNMNRNYPGSVFLVGKQIHVMQGIASSKDGKATKYNDTRATTIAAGKCKFVAKNSGILFV

SEQ ID NO: 16756 - protein, 356 aa, Arthrospira sp.; identical to SEQ ID NO: 13293
  VARIANT 169: note = X can be any naturally occurring amino acid
  VARIANT 350: note = X can be any naturally occurring amino acid
  VARIANT 356: note = X can be any naturally occurring amino acid

SEQ ID NO: 16757 - protein, 420 aa, unidentified
MQYAYVLNKRGEPLMPCSPGKARILLKQQKACVIKRTPFTIKLLHGSAGYKQPITLGVDAGSKHVGLSASTEKRELYSEEFTPRNDVVELLSTRRQNRRSRRYRKTRYRAPRFNNRVHSKHNGWLAPSVEVKIQEHITVIKRICRILPITLVRVETAEFDTQRLKAMLAGKLLPVGTDYQLGEMYDEYNVRQYVLKRDNYTCQCCGAHTTAKKTVKLHVHHLESRKVGGNAPSNLITLCTTCHNNLHKGKITLDGKKRGKTLRDAAFMGIMRNTLLTRLRNELNIPVQNTYGYITKLLREQNDIKKSHVNDARCISKHPLAKPCSVCYRTKAIRHHNRQIHKAKILKGGIRKANQAPYIVKGFRLWDKVLYNEQECFISGRRSSGYFALRKFDGTTITNSISFKKLRLLEPATNYLIERK

SEQ ID NO: 16758 - protein, 634 aa, Nocardiopsis sp.
MTRAPSRARSSLGGASSTFPMGTPASVRVPVPPLVPAPPSTTVIPVLSRYGWLVTPSETWFRGPSAKDNHLRPQPTSRGNAFPARRRGFRPPGRGPGVTSTSQHQGGDQLATFHTGEKTHQAVLPQRPALESASADIPRNGNETGRGSHVRVAPGVEHVRGETTGGSPTAGGVTPVPSGAGEQAREGRPPKTTPRKGHPYVFVLDRHGTPLQPTHPARARRLLAKGRAIVARHTPFVIRLKDRTTAESEVDGVETGIDPGSKRTGIAVFTDRHGERRGRYAIRLDHRGGQIAKRMRQRAAYRKGRRSRNLRYRTARFDNRTRPRGWLPPSLRHRVDTTLAWAGRLARWAPVRAVHVERVAFDVHALSAGRPVEGVEYQHGTLHGYEVREYLLAKWGQACAYCGATGAPLNIDHVRPRSRGGSDRVANLALACVPCNRAKADQPVEEFVTNPRALAGISAQTKAPLRDAAAVNATRWALWRSLDGCLPTRVGSGGRTKWNRTRNHLPKSHTLDALAVGRVEAITTAVSTVLVVGAAGRGSYARTRADRHGFPRLRLPRRKRFFGFQTGDLARAAVPSGMNAGTHTGRVAVRSSGSHTLQTSYGPIKTSWKNLCLLQRADGYGYTTQKEAGAPSTA

SEQ ID NO: 16759 - protein, 409 aa, unidentified
MLVYVINKNGKPLMPCKPAKARKLLRDGKAKIVNRCPFTIQLQWDCEENVQAVTLGIDKGSHHTGLCNVGNGKILLSGIINHRTDITDKMKARRGNRRQRRDQIWYRPKRFLNRASSNRSGRLPPSIFANANEVVRVVDKIPLPISRIVAEDVQVDIARLNKQNLTGTEYQQSNRLDENLRIATLMRDKYQCVSCGKKKVQLQAHHIVPQCQGGKDTIKNLITLCQQCHKKVHSGQITLDVDGVSGLKDQIAQRTMQGKSLIYKRLETVAPVFKVFGYQTASFRKSLDLPKDHDVDALCVATLDRRTVVPYHRENFYTIKFRPRQTRRRYHSLPQKGKGRVPYQVNAELDGFRKGSIVRVKDKWTKQINSIYSNGRLAFARVKGEPGSAKPDDCQLLLRGQTVVWNYSV

SEQ ID NO: 16760 - protein, 457 aa, unidentified
MDAVAVISASGKPLMPTNPMRARKLIKKGKAVIYKYRPLFTIRLTERTDGDIQTIEYCCDTGYQHIGLSIKSRKHEYVNEQRDLLPNETERHNDSRKYRKARRRRKLRHRACRRDNRHDNQICKDGYAPSIRNKRDQHISLYRSYTEILPVERAVFEMGQFDTQVLKAIEKGEPLPQGKDYQHGERYGYATLREAVFARDDYTCICCGKNSFKDKRILCVHHLGFRIGDRTNRLANLATVCTKCHTPKNHQPKGKLYNLKPELKDFKGATFMTMVRWDMLDKLKVVSKDIQVDVTYGAATKEARRDLKIKKSHANDAYCMGSFHPSHRTDLKRYEKCRRNNRVLSKFYDATYIDIRDGKKKKANALGCNRTKRRESRRSEKNERIYRGEKVSKGRIVLRTKRAVIRPGDIVYVGKKKYIVASSKNLGAQLKLADGSLLTTSKVTKIIHCGGWKTVTM

SEQ ID NO: 16761 - protein, 420 aa, unidentified; identical to SEQ ID NO: 4588

SEQ ID NO: 16762 - protein, 431 aa, unidentified
MPNKVYVINKHGRPLMPCSPAKARHLLDEGKAKVKKRTPFTIQLVYGSSGYIQEVILGVDAGSKTIGISASTKKEEVFAADVTPRNDVVDLLSTRREFRRARRNRKTRYRKPRFNNRVRSKHKGWLAPSVEVKIQEHITSIKMVCRILPVSKVVVETAEFDLQLLKAIEEGKPVPQGEDYQQGEMYGHYNVRQYVLWRDNYTCQCCGAHLTKKKEVRLHVHHLESRKVGGNAPGNLVTLCDRCHEKLHKGLITEKDLKKRKHRSTRDATFMGIMRKTLMQRLCSELPIPVAETRGYITKATREKLLVLPKSHTNDALAIAQGKHGFNVGYLPGIEQIDKIYTIRPVRHHNRQLHKAIILKGGIRKSNQAEKYVFGYRLFDKVQFNGQDCFIWGRRTSGYFVVKTIDGKVIHNSASFKKLRLVERASNYLIA

SEQ ID NO: 16763 - protein, 409 aa, Microcoleus sp.; identical to SEQ ID NO: 3702

SEQ ID NO: 16764 - protein, 424 aa, Mastigocoleus sp.; identical to SEQ ID NO: 6040

SEQ ID NO: 16765 - protein, 286 aa, unidentified
LNKEKEKVVIETAEFDLQLLKAIQEGKPIPEGEDYQKGEMYGSYNVRQYVLWRDNYTCICCGVRGTPKNPVRLHVHHFESRKHGGNAPDNHGTLCDDCHKKFHLGIITDVKLKTRRRQSTRDAAFMGIMRKTLMWRLRTELFIPVAETKGYITKATREKLLVLPKSHTRDALAIAQGRHGFGIKEYAYVEPANHIYTVRPVRHHNRQLHKASILKGGIRKRNQASKYVFGFRLYDKVLYQGKECFMWGRRTSGSFLLRTIDGIKVKDGVSYRNLTLLERSSNYLIA

SEQ ID NO: 16766 - protein, 432 aa, Microcoleus sp.
MQPTKQQNWVFQINGDKQPLDMIHPGRCRELQNRGKLASFRRFPYVAIQQQTIESIKTKEYILKIDPGSQWTGFAIQCGNDILFRAELNHRGEAIKLDLVKRAGFRRGRRSRNLRYRKKRLNRAKPEGWLAPSIRHRVLTVETWIKRFMRYCPIAWIEIEQVRFDTQKLANPEIDGVEYQQGELQGYEVREYLLQKWGRKCAYCGTENVPLEVEHIQPTSKGGSSRVGNLTLACHVCNVKKGNLDVRDFLAKSPDILNQVLENSTKPLKDAAAVNSTRYAIVKMAKSICQNVKCSSGARTKMNRARQGIEKTHSLDAACVGESGASIQVRTDRPLLITCKGHGSRQSIRVNASGFPAVKNAKTVFTHIAAGDVVRFTIDKNRKKVKAGTYTARVKTPTPKGFEVLIDGARISLSTMSNVVFVHRSDGYGYEL

SEQ ID NO: 16767 - protein, 465 aa, unidentified; identical to SEQ ID NO: 3306

SEQ ID NO: 16768 - protein, 408 aa, unidentified; identical to SEQ ID NO: 6548

SEQ ID NO: 16769 - protein, 418 aa, unidentified
MPCSPAKARLLLKEEKAIVKRRTPFTIQLTIATGETKQPVSLGVDAGYEHVGLPASTEKAELYASEVELRQDITDLLSARRALRQSRRNRKTRYRAPRFDNRIRTKRKGWLALSLENRINAHLSRIEAVLRLLPVTKITVETASFDLQLLKNPDISGKEYQEGEQLGFWNIREYVLCRDGHVCQHCYGRSKDPVLNVHHLESRRTGGDSPGNLITLCETCHKALHRGEITLKAKRGQSFRAEAFMGIMRWEVHSRLRALHPGIEVSNTYGYRTKHARIANGIAKSHCADAFCIASNLGAERLCEFFFQKQTRRNNRQIHKLSILKGGIRKRNQAPFEVKGFRLFDKVACQGEEGFIFGRRSSGFFDVRKLDGTRISAGISCKKLHLLEKRRTYLTEIRKEEALPPLPEGRGSAPKCDE

SEQ ID NO: 16770 - protein, 462 aa, unidentified; identical to SEQ ID NO: 15460

SEQ ID NO: 16771 - protein, 406 aa, unidentified
MVYVQDIDGRPLMPTTRHGKVRRLLKSKKATVVNLCPFTIRLLYDTTGYKQEITLGVDTGTKHVGLSATTKSKELYASEVILRSDVVDLLSTRRELRKIRRYRLRYRKPRFMNRIKSKKRGWIAPSIRQKIDSHIRIIGFVYSILPVSKLIIEVAQFDTQKIKNPEISGKEYQEGEQLGFWNVREYVLARDEHKCQHCKGKSKDSILNVHHIESRKTGGDSPSNLITLCKTCHKEFHKGNIKLKVNRGESLRDAAVMGIMKWELYDELKSLYPNVKMTFGYITKYNRINHGIEKSHVSDAFVISRNFDSERLGYYYKRKLVRRHNRQIHKMKAPKGGNKRMNQSPFKVFGFRLFDKVMFQGKERFIYARRLRGIFNIRDINGENKKDISYKKLEYVSHGLISIVAG

SEQ ID NO: 16772 - protein, 434 aa, unidentified
MTKTLTKQTRQACVLDQQGKPLMPTTRLGKVYRLLKTQKAHIVSYEPFTIQLNYEPDTHIIQPMTLGVDSGAIHSGYSVANEHREYYSAEVIARDDISKRLSNRRMYRQNRRSRKTRYRKPRFKNRKNKKKGWLPPSLEQKIAVQVNEIDHLHRYFPIETIIVEVAEFDIQKIKNPDISGIEYQQGTLQGYNIRNYLLEKHGRKCFYCGKSVSKFEVEHMLPKSRGGSNRIDNLTLSCHECNQKKDTLTEEEFIKQTLPAKKAVTKLKQLPNKKRLFKYMAHMNATRWALYNAIDKKYPNVKMTYGYVTKYNRIKAGLPKAHHIECITGFSTVPSMKQTVVKVKMRRHNRQLHRATFSKGHIRKAACLPTIVFGFQLYDFVLFDNHYYYIKGRRSSGKFALVSIEGLKDTDRNYKKLTLLAHTNAYLINRYISV

SEQ ID NO: 16773 - protein, 430 aa, Vibrio sp.; identical to SEQ ID NO: 8414

SEQ ID NO: 16774 - protein, 444 aa, unidentified
  source 1..444: note = Chlamydiae bacterium
MLVFVLNKLKKPLMPCSPAKARRLLKKGLAKVISKKPFTIKLLFGSSRYKQEVIAGMDTGSKTIGIAAIANGKVLYQAETKLRGEEIKKKMDQRRMYRRSRRSRKLRYRKPRFLNRRASIATDRLAPSVKHKVFAHLREKKFIESILPVSVWIVETASFDIHKITNPKGVSKALGKGWTYQKGRMLDFYNVKQYVLNRDKYQCQVCKKKNGLKLHVHHIQFRSNGGTNSPDNLTSLCETCHDKLHKLKKEEAEKSSKKLQKSAQKQTKHATEISILRSQLCKHFRNLGSSQVFEETFGYITKFNRESANLLKSHHIDAICIASRGERIEVQNQNNPSDLFLRRCVSKGDYQQTRGIRSELKIPTGKLFGLKKFDLVKTSKGVGFVKGKRSSGFFAISDINGTIISDSVNIKKNISRTQARKSILIWRSQFVSDLKDKVSLREKR

SEQ ID NO: 16775 - protein, 352 aa, unidentified
MVYIKDIDGRPLMPTKRYGKVRWLLKENKAVVINLCPFTIQLTYKSTDHKQPVTLGIDAGAKHIGFSATAEKEELFACETTLRTDIVDLLSTRLQNRRTRRSRLRYRKPRFNNRGSSKKKGWVAPSVKQRIDSHLNEVNEIHKILPITKIVIEVAQFDTQKMKNHDISGSDYQNGEQLGFWNVREYVLFRDGHKCSHCKGKSKDPVLNVHHLESRKTGGDSPSNLVTLCESCHKAFHKGEIELKKKRGKSLRDAAVMGIMKWKLYEELKSRYDNVSMTFGYITKYNRIKYGIEKSHTSDAFVISRNFNAKRIERQYLKRLVRRHNRQIHKMKILKGGKKKNNQAPFGVFRFR

SEQ ID NO: 16776 - protein, 501 aa, unidentified; identical to SEQ ID NO: 9337

SEQ ID NO: 16777 - protein, 420 aa, unidentified; identical to SEQ ID NO: 5136

SEQ ID NO: 16778 - protein, 408 aa, Bacillus sp.; identical to SEQ ID NO: 4228

SEQ ID NO: 16779 - protein, 413 aa, unidentified; identical to SEQ ID NO: 3587

SEQ ID NO: 16780 - protein, 413 aa, unidentified; identical to SEQ ID NO: 2636

SEQ ID NO: 16781 - protein, 418 aa, unidentified
MVYVTNRQGKALMPTDRHGKVRRLLKSGLAHVVRRIPFTIQLDYDTTEITQPITLGIDAGSKFIGVCATTDKKELYAANVELRNDIVDKLSTRREQRRTRRSRLRYRKARFNNRVSSKHKGWIAPSIDNKIQTHLTVVGNAYKILPISKIVVETASFDIQKIKNPNVDGEDYQHGEQMGFWNIREYVLWRDRHTCQHCHGKNGDKILNVHHLESRKTGGNSPSNLITLCETCHKAYHRGKFELKVKRGPSFRDASFMGIMRWGFLERLKQIYPNVSMTFGYITKSTRIANGLPKEHYVDARCISGNPQAKPLGYYFYQKKVRCQNRQLHKANILKGGKKKLNQAPFTVKGFRLFDLVEYQKELFYVFGRRKSGYFDIRRLNGIKVNKGSINCKELRLVGIRRTLLIERRNSGSIPPRS

SEQ ID NO: 16782 - protein, 424 aa, Enterococcus sp.; identical to SEQ ID NO: 12747

SEQ ID NO: 16783 - protein, 378 aa, Moorena sp.; identical to SEQ ID NO: 11223

SEQ ID NO: 16784 - protein, 432 aa, unidentified
MLTGLLAEQVDPAGIRKGDTLKVFVLNMRGKPLMPCSPAKARHMLKAGKAVVARRTPFTIKLTIATGETKQDVTLGVDAGAKHVGISATTEKEEVFASEVELRQDITGLLADRLAFRRSRRNRKTRYRAPRFNNRVRSKHKGWLAPSVENRIQAHISRIEAVCRVLPITKIVIETASFDIQKIKNPEVEGTDYQQGDQLGFWNVREYVLFRDGHVCQHCRGRSKDPILNVHHLESRKTGGDAPNNLITLCETSHKAYHAGKIKLKTRRGTSFRAEAFMGIMRRTLLDRVRKAHPELSVENTYGYLTKHKRIALGLPKTHCADAFCIAGNLNALRRGDFLYQRQTRKHNRQIHKCSILKGGVRKLHQAPFLVKGFRLFDKVKCTGRIGIIFGRRSTGSFDVRTLDGTRLSAGISSKKLTLLEKRTTFLTQLRK

SEQ ID NO: 16785 - protein, 435 aa, unidentified
MICAGLQHKTYQKGVPVMVYVLDKNGHPLMPTNRHGKVRRILKSGNAKVIRRCPFTIQLLYDSTDYTQLISLGIDAGSRHIGVSATTETKVLYEADVTLRNDIVDLLSTRREARRARRNRKTRYRKPRFNNRTRKDGWLAPSVQQKVDTHLTVVHKTTEILPVSSITVETASFDIQKIKNPDISGTGYQQGEQLNFWNVREYVLFRDGHKCQCCKGKSKDPVLNVHHIESRKTGGNAPNNLITLCETCHKGYHKGTVTLPKAIHRGMKFKDAAFMGIMRWAFYDRVKEIYEPLGFRVNMTYGYITKNTRITHGLPKEHFIDARCISGHPDAVSDGTVFYQKKVRCHNRQIHKQKILKGGIHKRNQAPYRVKGFRLFEKVKYRGKQYFIFGRRNSGFFDIRTLNGNKVNKGSVSCRKIRSLDAPHSFLTEQRKVMA

SEQ ID NO: 16786 - protein, 470 aa, unidentified; identical to SEQ ID NO: 2825

SEQ ID NO: 16787 - protein, 431 aa, Nostoc sp.
MEGLMSKIFVIDTQKRPLDPIHSAQARQLLRNKKAAIFRRFPFTIILKESHPDSTVQPLRLKLDPGAKNTGIALVNDATGEVVFAAELKHRGFAIRDALTSRRQLRRSRRNRKTRYRKPRFLNRTRPEGWLAPSLQSRVENIKTWVNKLCKLAPTEAISQELVRFDMQLMRNPEIQGEEYQQGTLAGYETREYLLEKWNRQCAYCGVKDVPFQVEHIHPRAKGGSNSITNLTLSCEKCNTKKGTKEIKEFLKKDPSKLTKILAQAKRPLADAAAVNTTRWALFKALRETGLPVETGSGGLTKFNRSQQKLEKTHWLDAACVGKSTPKLIIKCVKPLLIISNGHGSRQSCRTDKFGFPNRHVPREKIHFNFQTGDIVKAVVTTGKKLGNYVGKVAIRSSGSFNISTKKGLIQGISHKFCKRIHAKDGYSYAQ

SEQ ID NO: 16788 - protein, 425 aa, unidentified; identical to SEQ ID NO: 13021

SEQ ID NO: 16789 - protein, 477 aa, unidentified; identical to SEQ ID NO: 2707

SEQ ID NO: 16790 - protein, 447 aa, unidentified
MVAVLSKTGIRLMPTSSYRARKLLARKKAVIAGYRPFTIRLTERESGEIQPIEYTIDTGYYHIGNSVKTVKHELAAVEVRTLMDEKLRQEDRHRYRRQRRSRLRYRAARFDNRRRREGWLAPSVRHRMEQNLSVLNRIARVVPVSRIVMEMGQFDTQVLKAVASGIPLPQGADYQQGDRYGIATLREAVFTRDNYTCQCCGKKGTYGVILHVHHIRYRSQGGTDAMSNLATVCYKCHTPKNHKPGGILYGWKLKLPSFKGATFMTSVRWMLYHQVKELYPELEIQLTYGAATKEQRRILDVPKSHVNDAYTMGDFHPSHRVRPVIYQKKRRNNRVLEKFYDAKYIDLRDGKKHSGQELFNGRTNRNHNRDTENLHKYRGKKVSKGRRSIRRRRYPFQPHDLVVYRGKSLETAGCHNKGTRLLIGKRSIAVKEVKIRQYCGWYFAVEI

SEQ ID NO: 16791 - protein, 281 aa, unidentified
LKVFVLNMRGQPLMPCSPARARHLLKAGKAVVRRRTPFTIQLRIATGETKQSVTLGVDAGAKHVGLSAATEKEEVFASEVELRQDITGLLAARLSLRRDRRHRKTRYRAPRFLNRVRSKHKGWLAPSVENRIQAHMSRIDAVCRLLPVTKIVIETASFDIQKIRNPEVEGTGYQQGDQLGFWNVREYVLFRDGHICQHCRGRSKDPILNVHHLESRKTGGDAPNNLITLCETCHKAYHAGKIKLKVKRGQSFRAEAFMGIMRWTLLDRVRKAHPGLPVENT

SEQ ID NO: 16792 - protein, 446 aa, unidentified
VRVFVKNIRGEPLMPCSPRKSRMLLKEKKAKIIQHRPFTIQLTMATGETIQENHLGIDVGSKHVGVAITSEEKVFAKGEIELRQDVKSLLETRKIYRRSRRSRKTRYRRCKFTYKSKRIYDIKKKKWIKKKVQFESTRPKGWLPPSIQSRVNNTFYWIDQYSSLLPDCQLHIEVGKFDVQKMMNPDIKGKEYQEGDVFGYYDVRYFVLARDKYTCQVCKKKNKIFHTHHIIYRSHGGSDRADNFITVCTDCHTPENHQKGEIFWEWMRKKKKTKQYKEPPFMNSLRIRIFNRYPDAAVTYGSVTTPHRKELKLEKTHYNDAIAITGIEKIKTNPTELFLIKQIRKKKRSLHEAIARKGRKEKNTTQKRNEKNTITSKGFFLNDEVKTACGNRGFISGFTGKTACYVKSMEGEYIVIKGKSHKQQLLKSLSAIRHNGNWQYQIKRKA

SEQ ID NO: 16793 - protein, 418 aa, unidentified; identical to SEQ ID NO: 15678

SEQ ID NO: 16794 - protein, 368 aa, Geobacillus sp.; identical to SEQ ID NO: 9251

SEQ ID NO: 16795 - protein, 389 aa, unidentified
LELKVDPGSKTTGIALVIHGKNKRKVVVGINLQHRGQSIKNRLLQRRGVRRSRRNRHTRHRESRFLNRHRRDGWLPPSLMSRVHNIETWAKRIQRLSPLSFCAVETVRFDMQKMQDPEMSGVEYQQGELLGYEVREYLLEKWGRKCAYCGKENVPIEVEHIQPKSKGGTNRISNLTLACRECNEKKRDQNVREFLKRKPGALERILRDAKAPLKDAAAVNATRLVCGNAVQSIGLPSTFWSGGRTKKNRISQGHPKDHWIDAACVGETGEKIHLPSLRVKSVKATGHGDRQLCLVDKHGFQRSKAMPIRVVNGFKTGDIVVAHVTTGKKIGIYRGKVAVRTSGFFNVSTENGVVQGISHRFCRKQHNADGYSYLCCRDGAGSGQLGVGM

SEQ ID NO: 16796 - protein, 431 aa, unidentified; identical to SEQ ID NO: 6299

SEQ ID NO: 16797 - protein, 331 aa, Anoxybacillus sp.
VVGSASVLHITSIYNMVEENMTCFMQRKGENPMVFVLDTNKRPLAPCHGAVARKLLKQGKAAIYKRFPFTIILKKSVDESENETTYRLKIDYGSRHTGLAILRGQEVVWLGQLDHRTDIKERIDKRRAFRRARRNRKTRYRKPRFLNRKRKEGWLPSSLESRVQNIQTWVNRLKKLCPIGYISYENAKFDTQLMRNPEINGVEYQQGTLQGYEVREYLLEKFGRKCCYCGKENVPLEVEHIIPKSRGGTDRVDNLCLACHDCNQRKGSKTAEEFGYPHIQKQVKESLKDASAINSTRWKAYEVLKQTGLDVECGTGARTKMNRIRLDLPKT

SEQ ID NO: 16798 - protein, 420 aa, unidentified; identical to SEQ ID NO: 3884

SEQ ID NO: 16799 - protein, 433 aa, Lactobacillus sp.; identical to SEQ ID NO: 16527

SEQ ID NO: 16800 - protein, 338 aa, unidentified; identical to SEQ ID NO: 10776

SEQ ID NO: 16801 - protein, 402 aa, unidentified
CRRQRRAKANGTISKKCVKQTTAQNGSVSKRAKDIGVIKRRLPGCEKDVLCIGIKNKETKFTNRTRPEGWLTPTANQLLQTHINLVKKIQKFLPISDVVLEVNKFAFMRLDNPNIQKWQYQQGPLYKKESLESAVSEIQEHHCLFCKKPIDHYHHVVPQHKNGSNTIGNIVGLCAKHHDLVHKDSAWEKKLAQKSTGLNKKYGALGVLNQIIPTLTNELSSLFPKHSFVTNGKSTYDYRAAHGVSKDHWLDAYCIACSVLPSNVCDSNINNHMPYELKQFRRHDRRVLNNENMNRVYTLNNKAVAINRHKAKDQKTVSLEKFRKEHPDDVCKLKVKEHHPTYRNMNRNFPGSVFLVGKQIHVMQGIASSKDGKATKYNDTSATAIAAGKCKFVAKNTGILFV

SEQ ID NO: 16802 - protein, 518 aa, unidentified; identical to SEQ ID NO: 10514

SEQ ID NO: 16803 - protein, 431 aa, unidentified
MDAWDIIVVLNKRGKPLMPCSPAKARLLLKEKKAIVKRRTPFTIQLTIATGESKQPVTLGVDAGYKHVGLSASTEKAELYASEVELRQDITDLLSARRALRQSRRNRKTRYRAPRFDNRIRTKRKGWLAPSVENRINAHLSRIEAVLRLLPVTKITVETASFDMQLLKNPDISGKEYQEGEQLGFWNVREYVLFRDRHVCQHCYGRSKDPVLNVHHLESRRTGGDSPGNLITLCETCHKALHRGEITLKTKRGQSFRAEAFMGIMRWEVQNRLKASHPELEVNNTYGYRTKHARIANGIAKSHCADAFCIAGNLGAERLGEFFFQKQTRRNNRQIHKLSILKGGIRKRNQAPFEVNGFRLFDKVACQGEEGFIFGRRSSGYFDVRKLDGTRISAGISYKKLHLLEKRRTYLTEIRKEEALPPLPEGRGLRA

SEQ ID NO: 16804 - protein, 426 aa, unidentified
MQVYVLNKHGQPLMPCSPAKTRRLLEAGKAKVIKRTPFTIQLLYGSTGYKQTIIHGVDAGSKTIGMSASTKSAELFAGEVTPRNDVVKNMSTRREFRRARRNRKTRYRKPRFNNRVRSKHKGWLAPSVEVKIQEHITAIQKVCSILPISKVVVETAEFDLQLLKAIADGKPVPEGEDYQKGEMLGQYNVRQYVLWRDGYTCQCCGAHGDGVKLHVHHKESRKVGGNAPDNLVTLCDKCHKGFHEGIISLGQLGKRDRKATRDAAFMGIMRKTLMERLRAALPVPVVETKGYITKGTRVELLKLPKSHINDALAIVQGKHGFGITEPTTITRADRQYTVKPVRHHNRQLHKAAILKGGIRKSNQAAKYVKGFRLFDKVLYQAQECFIWGRRTSGSFLLRTLDGAKVKDGVGAKYLKLLERSSNYLIA

SEQ ID NO: 16805 - protein, 434 aa, Anoxybacillus sp.; identical to SEQ ID NO: 3421

SEQ ID NO: 16806 - protein, 470 aa, unidentified; identical to SEQ ID NO: 15353

SEQ ID NO: 16807 - protein, 420 aa, unidentified; identical to SEQ ID NO: 15458

SEQ ID NO: 16808 - protein, 296 aa, unidentified
MPKVYVLNRHGRPLMPCTPAKARHLLDAGKAKVRHRTPFTIQLLYGSTGYTQEVILGVDAGSKTIGLSAATETEELFSAEVKPRNDVVELMSARRQFRRARRNRTTRYRKPRFDNRVRSKHKGWLAPSVEVKIQEHMTAIRRACAILPVSKVVVETAEFDLQLLKAVAEGKPVPQGEDYQKGEMYGHYNVRQYVLWRDSYTCRICGAHGSVRKGVPLHVHHLESRRVGGDAPDNLVTLCTACHDKLHKGIIMVADIKKRKRRSTRDTTFMGIMRMTLLRRLWEQLPVPVVETRGYI

SEQ ID NO: 16809 - protein, 472 aa, unidentified; identical to SEQ ID NO: 8142

SEQ ID NO: 16810 - protein, 442 aa, unidentified
MVTVQQNTHHLPFGRVFIRRNLFMVYVISQDSKPLMPCSNPIARLLLKQGKAKVKRREPFTIKLIYETTDYTQDLTLGVDTGSGTIGAAVSKDNGDIVYMSEVVVRNDITDKMTQRAKYRRNRRNRKTRYRKARWLNRSNSIKKDRFSPTMQSKLHSHVKEIEYIQSILPITEMVFETGQFDMHLMKNPSLANPKVRPWGYQKGTNYGFENTKAMVLNRDNYTCQCCKGKHKDSKLEVHHIVFRSQGGSDEESNLITLCHTCHKDLHSGKINLKLSGKVKGNLKYATQMNSIRKQLFRLYPNAIETFGYVTKANRLHLGVDKEHYYDACTIATQGNAFNVKSDLYKKKCVSDGDFQKTKGIRSEQPIVTDKICGFRKFDKVRYFGKDYFIKGRMSTGYAILMDIDGNKIDFSTMPRGYKTPKLSNCKRITARSTVMTQVKVV

SEQ ID NO: 16811 - protein, 441 aa, unidentified
KANGTAVFTAHLETRNKEVPKLMQDRKKARRARRTNGRRCRRQRRAKANGTISKKCVKQDTAQSKNPSKRAKEIGVIKRHLPGCKKDVLCVGIKNKEAKYTNRARLEGWLTPTANQLLQTHINLVKKIQKFLPISDAVLEVNKFAFMRLDNPNIQKWQYQQGPLYQKGSLENAVSEMQEHHCLFCEKPIEHYHHVVPKSENGSNTIANIVGLCAEHHNLVHKDVAWQEKLVEEKTGLNKKYGALSVLNQIIPALTKELSFLFPKHSFMTNGKSTHDYRAAHGISKDHWLDAYCIACSVLPIDVCDSTINNCVPYELKQFRRHDRRALNNENMNRVYTLNDKVVATNRHKATEQEAASLEEFRKEHPNDVCKLKVKEHHPTYRNMNRNYPGSVFLVGKQIHVMQGIASSKDGKATKYNDTRATTIAAGKCKFVAKNSGILFV

SEQ ID NO: 16812 - protein, 340 aa, Anoxybacillus sp.
MVFVLDTNKCPLAPCHEAVARKLLKQGKAAIYKRFPFTIILKKSVDESENETTYRLKIDYGSRHTGLAILRGQEVVWLGQLDHRTDIKERIDKRRAFRRARRNRKTRYRKPRFLNRKRKEGWLPPSLESRVQNIQTWVSRLKKLCPIGHISYENAKFDTQLMRNPEISGIEYQQGTLQGYEVREYLLEKFGRKCCYCGKENVPLEVEHIIPKSRGGTDRIDNLCLACRDCNQRKGNQTAEEFGCPHIQKQVKESLKDTSIINATRWKVYEVLKQARLDVECGTGARTKMNRIRLGLPKTHYFDACCVGESTPNHLYFKTKEVLFINAKGRGSRSRTNLDR

SEQ ID NO: 16813 - protein, 431 aa, unidentified
MPDKVYVISRLGHPLMPCSPAKARHLLDDKKAKVVKRMPFTIRLLYGSTKYIQPIILGVDAGSKTIGLSASTAKEEVFAAEVMPRNDVVENLSTRREFRRARRNRTTRYRKPRSDNRVRSNHERWLAPSVKVKIQEHITSIKRVCTILPISKVVIETAEFDLQLLKAIQEGKTIPEGEDYQKGEMYGSYNVCQYVLWRDNYTCICCGVRGTPKNPVRLHVHHFESRKYGGNAPDNHGTLCDDCHKKFHLGIITDVKLKTRRRQSTRDAAFMGIMRKTLMWRLRTELFIPVAETKGYITKATREKLLVLPKSHTRDALAIAQGRHGFGIKEYAYVEPANHIYTVRPVRHHNRQLHKASILKGGIRKRNQASKYVFGFRLYDKVLYQGKACFVWGRRTSGTFLLRTIDGIKVKDGVSYRNLTLLERSSNYLIA

SEQ ID NO: 16814 - protein, 518 aa, unidentified; identical to SEQ ID NO: 2751

SEQ ID NO: 16815 - protein, 423 aa, Moorena sp.
MRVFVLNKNRQPLDPCKPARARIILSKGKAKVYRRYPFTIILTEEIEEPITHGSQLKIDPGSKTSGLAIIQNNRVVWGCELTHRGFQIRDALTSRRQLRRARRHRKTRYRQPRFLNRTRPKGWLAPSLMSRVHNILTWVKKLTRLCPITGLYQELVRFDTQKLQNPEISGIEYQQGTLYGYELREYLLEKWNRKCAYCGAKGTHLEIEHIKPLSKGGSNRVSNLAIACHSCNHAKSNQEIEQFLSGKPEILKRILSQAKRPLSDAAAVNTTRWKLYHELKLFGLPVEVGSGGLTKFNRCRQNLPKTHWLDAANVGKVDTLIVEDYKPLLVAAKGHGTRQICRINKYGFPIRYCSRVKIHKGFQTGDIVRAVVTKGKKIGTYVGRVATRKSGYFNISTKSGMVQGISHKYCQFIHRKDGYAYTD

SEQ ID NO: 16816 - protein, 520 aa, unidentified; identical to SEQ ID NO: 9945

SEQ ID NO: 16817 - protein, 442 aa, unidentified; identical to SEQ ID NO: 2903

SEQ ID NO: 16818 - protein, 423 aa, Arthrospira sp.; identical to SEQ ID NO: 3521

SEQ ID NO: 16819 - protein, 334 aa, unidentified
LRVISFFKTKGCRPSRVAAFFFCLVGVVAHMLEINKFAFMRLDNPNVQKWQYQQGPLYQKASLEEAVSEMQEHHCLFCKKPIAHYHHVVPQSENGSDTIGNIVGLCTKHHDLVHKNTAWQKKLAKKKTGLNKRYGALSVLNQIIPALTKELSFLFPKHFFATNGKSTYDYRAAHGVSKDHWLDAYCIAGSVLPNDACDNNINSHVPYELKQFRRHDRRALHKENMGRVYTLNGKSVATNRHKAIKQTTDSLEEFRQRQPNDVCKLKVKEHHPEYRNPKRNFPGCVFLVGKHTHVMQGTSGSHNGKADGYYDTNGNSYSSGKCKFVAKNKGIVFA

SEQ ID NO: 16820 - protein, 431 aa, unidentified; identical to SEQ ID NO: 2915

SEQ ID NO: 16821 - protein, 239 aa, unidentified
MTDDYKPYKWQYQKSNRLDENLRKAAIIRDNYKCQECGKSNCKLEIHHIRARKYSGADTIGNLITLCSKCHQKTEGKEQDFEDKYFKIIDSKPKRFDYAMHVMQGKNYLRNKISELGLLHLTNGGETANKRIEWNIEKSHSNDAICIADGIPDTCNIKEWIIKPMRRKSKAKTDNVLGIKHRDLVSYTYKNGETHAGYVTALYPKQLALNFQSRIKHCKKVNARKCRLLWQFNKIYWLE

SEQ ID NO: 16822 - protein, 428 aa, unidentified
MLVYVLKQNGQPFMPTERFGRVRRLLKEGKAKVVRREPFTIRLLYEPETNVVQECYCGVDTGSKHIGVAVVGNDKVLYQSQTELRNDIKKKMDRRRAFRQNKRFRKTRYRKCRFLNRRNSIKEGRLPPSVKHKVQAHIDEIEFCKKILPVLDENIILEVSQFDTSLMKSPSLINEKVRHWGYQQGFNYGYSSRRSAILHRDNYTCQCCGKKNCRLEVHHIKFKSNGGTDDEENLITLCKECHDGVHAGTVVLNKKPKKNKNLKYATHMSIIRSRLLREYPNAIETFGFVTSENRNHLQLPKDHYIDACVIASGGLEFKPSDVIYYKRRVAKGSYKLCRGARGEIPLTTGKIHGFRRFDKVKYFGKEYFIESRRSIGTVELMDVYGTKIDFSFMPRGYKTPKLVNCKRISSRVSCLCMKKCLKTYNTME

SEQ ID NO: 16823 - protein, 442 aa, unidentified; identical to SEQ ID NO: 3161

SEQ ID NO: 16824 - protein, 431 aa, unidentified
MPNKVYVINKHGRPLMPCSPAKARHLLDAGKAKVKKRTPFTIQLVYGSSGYTQEVILGVDAGSKTIGMSASTTKEELLSAEVKPRNDVVDLLSTRREFRRARRNRKTRYRKPRFDNRVRSKHKGWLAPSVEVKIQEHITAIRRVCGILPVSKVVVETAEFDLQLLKAIADGKPVPQGEDYQQGEMYGHYNVRQYVLWRDNYTCQCCGAHATKKKEVRLHVHHLESRKVGGDAPDNQVTLCESCHEKLHKGLITEKDFKKRKRRSTRDATFMGIMRKTLMQRLCSELPIPVIETRGYITKATREKLLVLPKSHTNDALAIAQGKHGFNVGYLPGILQIDKIYTIRPVRHHNRQLHKATILKGGIRKSNQAEKYVFGYRLFDKVQFNGQDCFIWGRRTTGIFTIKTINGKMIKDGISFKKLKPVEKSTSYLIA

SEQ ID NO: 16825 - protein, 529 aa, unidentified; identical to SEQ ID NO: 10867

SEQ ID NO: 16826 - protein, 420 aa, unidentified; identical to SEQ ID NO: 6017

SEQ ID NO: 16827 - protein, 569 aa, unidentified
MVYVVANDGQPLMPTERHGKVCRMLKSGMAKVVKKCPFTIQLQYESERNVQPVALGIDAGSKHVGVSATTKAKVLYESDVELRDDIVKLLATRRQLRRRRRSRKTRYRPARFDNRRRKEGWLAPSIRQKIESHLTVVANVCKILPVSQIIVETASFDIQKIKNPDIQGIEYQQGEQMDFWNIREYVLFRDGHTCQCCKGKSKDKVLNVHHIESRKTGGNAPNNLITLCETCHKGYHNGTVTLPKNIKRGMKFKDAAFMGIMRWTFYNTLKEQYEPDIPVHYTYGYITKNTRINHNLLKGHCIDARCISGNPDAVSDGTYYYQKKVRCHNRQIHKQTILKGGIRKSNQAEYLVRGFRLFDKVRYQGREYFIFGRRKSGFFDIRTLSGEKISSVVCSDDVHLDKFMEEKTVLFVNSKKIDVSSKTTDLSGLLYHQMCSIAENNAINHIPFTYRVTLLIDDITCYEDIPYFVYWIEYGKGYGISITATLQSLEQLNCAYEETCLAILEHIDKLVFLSDDFLLCFDKQLSKYLEFKYGNGFLSELEDMTKEEIMVCITDKAYKILQRKENLWQ

SEQ ID NO: 16828 - protein, 339 aa, unidentified
LLSARRALRQSRRNRKTRHRAPRFNNRLRTKRKGWLAPSVENRINAHLSRIEAVLRLLPVTKITVETASFDLQLLKNPDISGKEYQEGEQLGFGNIREYVLCRDGHVCQHCYGGSKDPVLNVHHLESRRTGGDSPDNLLTLCETCHKALHRGEITLKTKRGQSFRAETFMGIMRWEVLNRLKASHSELKVHNTYGYWTKHARIANGIAKSHCADAFCIAGNLGAERLGEFFFQKQTRRNNRQIHKLSILKGGIRKRNQAPFEVKGFRLFDKVAYKGEEGFIFGRRSSGFFDVRKLDGTRISAGISYKKLHLLEKRQTYLMEIRKEEAFPPLPEGRGLRA

SEQ ID NO: 16829 - protein, 387 aa, unidentified
LKVFVLNMRGRPLMPCSPAKARHLLKAGKAVVRRRTPFTIQLRIATGETKQSVTLGVDAGAKHVGLSAATEKEEVFASEVELRQDITGLLAARLSLRRERRQRKTRYRAPRFLNRVRSKHKGWLAPSVENRIQAHMSRIDAICGLLPVTKIVIETASFDIQKIKHPDVEGTDYQQGDQLGFWNVREYVLFRDGHVCQHCHGHAKDKILNVHHLESRQTGGDAPNNLITLCETCHKAYHAGKIKLKVKRAQSFRAEAFMGIMRWTLLDRMRKAHSGLPVENTYGYLTKNTRITLGLPKTHCVDAYCIAGNLKAVRRGVCLHQRQVRKHNRQIHKCTVLSKTLKDGTKIGYRKLNQTPHLVKNFRLFDKVRCLGQTGFIFGRRSSGYFD

SEQ ID NO: 16830 - protein, 428 aa, unidentified; identical to SEQ ID NO: 5055

SEQ ID NO: 16831 - protein, 424 aa, Coprobacillus sp.; identical to SEQ ID NO: 13009

SEQ ID NO: 16832 - protein, 443 aa, unidentified
LTKDENRPSGRTTGLRAEQAEPAGIRKGDTLKVFVLNMRGKPLMPCSPAKARHMLKAGKAVVVRRTPFTIKLTIATGETKQDVTLGVDAGARHVGISATTEKEEVFASEVALRQDITGLLADRLAFRRARRNRKTRYRSPRFNNRVRSKHKGWLAPSVENRIQAHMSRIEAVCRLLPVTKIVIETASFDIQKIRNPEVEGTGYQQGDQLGFWNVREYVLFRDSHICQHCRGRSKDPILNVHHLESRKTGGDAPNNLITLCETCHKAYHAGKIKLKVKRGQSFRAEAFMGIMRWTLLDRVRKTHPKLPVENTYGYLTKHKRIALGLPKTHCADAFCIAGNLKALRRGDFLFQQQTRKHNRQIHRCSILKGGVRKLNQAPFLVKGFRLFDKVRIGGQIGFVFGRRVRGTFNIRRLDKTVIGTDINCKKLSLLETRKTFLTELRKE

SEQ ID NO: 16833 - protein, 471 aa, unidentified
  VARIANT 471: note = X can be any naturally occurring amino acid
MQKLKERNTYTPTVIPQDCSNCGLSLNSPFEVRDSVASLKTSFNSSDAALTAREQAGQNLRVSVVNVLNKRGVPLMPCKPQKARRLLKEGKAKVLKRTPFTIQLLYTTGESKQNLTLGVDAGYSNVGLSVVSADKELYSAELKLRTDMVKLNSERATYRRTRRSRKTWYRKARFLNRKKPQGWLAPSIQNKLDTHLKIIERIRGILPISNVVIEVAAFDTQKIQNPEITGVEYQQGELVGYKIREYLLEKWKRKCAYCGEKDIPLEIEHIIPKSRGGSSRISNLTISCNKCNLKKGNKTAEEFGHQEIQKQAKESLRATVFMNNVRWKLVNLLGCKWTYGYITKHNRIKLGLKKSHSNDAFIIAGGSTQKRNDQIFWIKQVRKCNRKLFKGKRSHLKNTAPRFVKEFQRFDKVLWKNIECFIFGRRSTGYFDIRMLNGHKLSSSAKAKDLKLLETFKTLLTEKMRFLPYLX

SEQ ID NO: 16834 - protein, 512 aa, unidentified
MSTVYVLNSDGKPLMPTTRCGHVRYLLKKQKARVVTSNPFTIQLLYETDDVVQPLYLGIDPGRTNIGVAVVKADGTAVFTAHLETRNKEIPKLMKKRKDSRRARRTNGRRCRRQRRAKANDTLSTKRVKQTTAQNGSASKRAKEIGVIRRRLPGCEKDVLCIGIKNKEAKFNNRTRPEGWLTPTANQLLQTHINLVKKIQKFLPISDVVLETNKFAFMQLDNPNIQKWQYQQGPLYKKESLESAVSEMQEHHCLFCKKQIDHFHHVVPQHKNGSNTIGNIVGLCAKHHDLVHKETAWQEKLAKKKTGLNKKYGALGVLNQIIPALTKELGVLFPKHFFVTTGKSTYDYRAAHGVCKDHWLDACCIACSVLPNDVCDSSINNRVPYELKQFRRHDRRVLHKENMNRVYTLNSKKAATNRHKATEQESASLEEFRKEHPDDVCKLKVKEHHPTYRNMNRNYPGSVFFVDKQVHVMQGIARSKDGKATTYKDTNANLITAEGCKFVAKNSGILFV

SEQ ID NO: 16835 - protein, 435 aa, Moorena sp.
MQNYVFVIDTKNQPLNPISPKKARRLLDKGKAAVFRMYPFTIILKTAIDNPTISPCQIKIDPGSKVTGFALVQNNQVIWGMELEHRGGLIKKKLESRKAVRHRRRNRNTRYRKPRFLNRRRKEGWLAPSLEHRVLTIETWVKRLIKFCPINQVWVERVKFDTQKMQNPEINGVEYQQGELAGYEVKEYLLEKWGRECTYCGKQSVPLQIEHIHPKSLGGSNSAKPTLRERVSNLCLACEKCNQRKGNKPIEEFLKKKPNLLQKIKTKTKQPLPDAAAVNTTRNKLVKVLRSIKFVVTGTGAQTKYNRTRLGLPKQHWIDAACVGNIETLVLKTSQPLLVTCKGQGGRQKAALNKYGYPIRHNPLKPIKGWLTGDIAKHQKLGIGKVTPRSKGSFGFTPLGMKGYKSCFPQDISAIHRKDGYTYSFCQHMPEFTWK

SEQ ID NO: 16836 - protein, 269 aa, Aphanothece sp.; identical to SEQ ID NO: 3170

SEQ ID NO: 16837 - protein, 443 aa, Shewanella sp.
MAVFVLSKNKKPLMPCSEKRARLLLSKKQAVVHKTYPFTIRLKKQTGNATQPLQLKIDPGSRYTGVALVMDLPTLMRALCLFELQHRGHQISEALTQRRAFRRRRRNQLRYRPARFDNRTRKDGWLPPSVQHRLDTTLALVQKLKRLCPVSAIVFERVKFDMQKMLNPDIQGVEYQQGTLFQYEVREYLLERHQRTCAYCAGESLDPILEVEHKHPRAQGGTNSIHNLVIACRTCNQAKGSLTLSEFLSTLKNTKLDKVRKVKITQILAGKVFRLKDAGAVNACRNQLGRDLASQQLPVSTGTGAQTKYNRMRYQLPKTHALDALMTGELTKPVEGWSRPTLVVKAMGRGCYQRTRLDQYGFPRGYLQRKKTYFGFQTGDLVISTVTKGKKQGIHVGRVAVRDSGYFNVQTKTGGVQGVSYKTCQIIQRNTGYHYYFNSKVAH

SEQ ID NO: 16838 - protein, 459 aa, Petrotoga sp.; identical to SEQ ID NO: 12917

SEQ ID NO: 16839 - protein, 396 aa, unidentified; identical to SEQ ID NO: 4508

SEQ ID NO: 16840 - protein, 424 aa, unidentified; identical to SEQ ID NO: 6292

SEQ ID NO: 16841 - protein, 408 aa, unidentified; identical to SEQ ID NO: 5302

SEQ ID NO: 16842 - protein, 442 aa, unidentified
MVTVQQSTHHLPFGRVFIRRNLFMVYVISQDGKPLMPCSDPIARLLLKQGKAKVKKREPFTIKLTYETTNHTQGLTLGVDTGSGTIGTAVSKDNGDIVYMSEVVVRNDITDKMTQRAKYRRNRRNRKTRYRKARWLNRASSIKKDRFSPTMQSKLHSHVREIEYIQSILPVTEMVFETGQFDMHLMKNPSLANPKVRPWGYQKGANYGFENTKAMVLNRDNYTCQCCKGKHKDSKLEVHHIVFRSQGGSDEESNLLTLCHTCHKDLHSGKINPKLSGKVKGNLKYATQMNSIRKQLFRFYPNAIETFGYVTKANRLHLGVDKEHYYDACTIATQGNAFNVKSNLYKKKCVSDGDFQKTKGIRSEQPIVTDKICGFRKFDKVRYFGNDYFIKGRMSTGYAILMDIDGNKIDFSTMPRGYKTPKLSNCKRITARTSQMLQIMAI

SEQ ID NO: 16843 - protein, 461 aa, Parasutterella sp.; identical to SEQ ID NO: 3646

SEQ ID NO: 16844 - protein, 422 aa, Petrotoga sp.; identical to SEQ ID NO: 5403

SEQ ID NO: 16845 - protein, 420 aa, unidentified
MQYVYVLNKHGEPLMPCSPRKARLLLKQKKACVIKRTPFTVKLLHGSAGYKQPVTLGVDAGSKHIGISATTEKHELYREEATPRNDVVDLLSARRAFRRSRRNRKTRYRAPRFNNRVHSKHKGWLAPSVEVKIQEHITLIKHVFRILPVTLVRVETAEFDTQRLKAMLEGKPLPVGTDYQLGEMYDEYNVRQYVLKRDNYTCQCCGAHSTKTKGVKLHVHHIETRRTGGNAPNNLITLCKACHKALHAEKVTLDGKKRGKPLKDAAFMGIMRKTLMERLRKELKIPVQGTYGYITKYLREKNGIPKSHTNDARCISKNPLAIPCDTCYYTKVVRHHNRQLHKATILKGGIRKANQAPYIVKGYRLWDKVAYNGTECFITGRRTSGYFALKELDGTVVSNSISYKKLRLLEAATNYITERK

SEQ ID NO: 16846 - protein, 422 aa, unidentified; identical to SEQ ID NO: 5333

SEQ ID NO: 16847 - protein, 414 aa, unidentified
MPCSPAKARLLLKEKKAIVVRRTPFTIQLTIATGETKQPVSLGVDAGYKHVGLSASTEKAELYASEVELRQDVSDLLSARRALRQSRRNRKTRYRAPRFDNRIRTKRKGWLAPSVENRINAHLSRIEAILRLLPVTKITVETASFDMQLLKNPDISGKEYQEGEQLGFWNVREYVLFRDGHVCQHCHGRSKDPVLNVHHLESRRTGGDSPGNLITLCETCHKALHRGEITLKAKRGQSFRAEAFMGIMSWEVLNRLKASHSELEVNNTYGYRTKHARIVNGIDKSHCADAFCIAGNLGAERLCEFFFQKQTRRNNRQIHKLSILKGGIRKRNQAPFEIKGFRLFDKVACKGEESFIFGRRSSGYFDVRKLDGTRISAGISYKKLRLLEKRRTYLTEIRKEEALPPLPEGRGLRA

SEQ ID NO: 16848 - protein, 447 aa, unidentified; identical to SEQ ID NO: 8397

SEQ ID NO: 16849 - protein, 431 aa, unidentified
MPNKVYVINKHGRPLMPCSPAKARHLLDAGKAKVKKRTPFTIQLVYGSSGYTQEVILGVDAGSKTIGLSASAETEELLSAEVKPRNDVVDLLSTRREFRRARRNRKTRYRKPRFDNRVRSKHKGWLAPSVEVKIQEHITSIKRVCRILPVSKVVIETAEFDLQLLKAIADGKPVPQGEDYQKGEMYGHYNVRQYVLWRDGYTCQCCGAHTTKKKEVRLHVHHLESRKVGGDAPDNQVTLCESCHEKLHKGLIAEKDFKKRKRKSTRDATFMGIMRKTLMQRLCSELPIPVIETRGYITKATREKLLVLPKSHTNDALAIAQGKQGFNVGYLPGIVQIDKICTIRPVRHHNRQLHKATILKGGIRKSNQTEKYVFGYRLFDKVQFNGQDCFIWGRRTTGIFTIKTINGKMIKDGISFKKLKPVEKSTSYLIA

SEQ ID NO: 16850 - protein, 414 aa, unidentified; identical to SEQ ID NO: 6490
  source 1..414: note = Lachnospiraceae bacterium UBA4265

SEQ ID NO: 16851 - protein, 443 aa, Anoxybacillus sp.; identical to SEQ ID NO: 5909

SEQ ID NO: 16852 - protein, 470 aa, unidentified; identical to SEQ ID NO: 2825

SEQ ID NO: 16853 - protein, 406 aa, unidentified
MVYVQDIDGSPLMPTTRYGKVRRLLKANKATVISLCPFTIKLLYKTSDYKQEIVLGVDAGTKHVGLSATTKSKELYASEVILRSDVVDLLSTRRELRRTRRSRLRYRKPRFMNRIKSKKDRWIAPSVYHKIDSHIRIIGFVYSILPVSKLIVEVAQFDTQKIKNPEISDKEYQKGDQLGFWNVREYVLTRDGHKCQHCKGKSKDPILNIHHIESRKTGGDSPSNLITLCETCHKEYHKGNIDLKVKRGKSLRDAAVMGIMKWKLYEELKSRYDNVSMTFGYITKYNRINHGIEKSHVSDAFVISGNFDSYRLGYYYKRKLVRRHNRQIHKMKILKGGIKKPNQAPFKVFGFRLFDKVRYQDNVYFVYGRRTSGCFNIRDIDGDNNKNPTFKKLTYISHGLISVETG

SEQ ID NO: 16854 - protein, 414 aa, unidentified
MPCSPAKARLLLKEKKAIVVRRTPFTIQLTIATGESKQPVSLGVDAGYKHVGLSASTDKAELYASQVELRQDITDLLSARRALRRARRNRKTRYRAPRFDNRIRTKRKGWLAPSVENRINAHLSRIEAVLRLLPITKITVETASFDMQRLKNPDISGKEYQEGEQLGFWNVREYVLFRDGHVCRHCHGRSKDPVLNVHHLESRRTGSDSPDNLITLCETCHKALHRGEITLKAKRGQSFRAQAFMGIMRREVLNRLKASYPELKVHETYGYLTKHARIANGIVKSHGADAFGIAGNLGAERLGEFFFQKQTRRNNRQIHKLSILKGGIRKRNQAPFEAKGFRLFDKVACQGEEGFIFGRRSSGSFDVRKLDGTRISAGISCKKLRLLEKRRTYLTEIRKEEALPPLPEGRGLRA

SEQ ID NO: 16855 - protein, 446 aa, Azotobacter sp.; identical to SEQ ID NO: 13678

SEQ ID NO: 16856 - protein, 414 aa, unidentified
MPCSPAKARLLLKEKKAIVKRRTPFTIQLTIATGESKQPVSLGVDAGYKHVGFSASTEKAELYASEVELRQDVSDLLSARRALRQSRRNRKTRYRAPRFDNRIRTKRKSWLAPSVENRINAHLSRIEAVLRLLPVTKITVETASFDMQLLKNPDISGKEYQEGEQLGFWNVREYVLFRDGHVCQHCHGRSKDPVLNVHHLESRRTGGDSPGNLITLCETCHKALHRSEITLKTKRGQSFRAEAYMGLMRWEVLNRLKTSHPGLEVHNTYGYRTKYTRIVNGIDKSHCADAFCIAGNLGAERLGEFFFQKQTRRNNRQIHKLSILKGDIRKRNQAPFEVNGFRLFDKVACKGEEGFIFGRRSSGFFDVRKLDGTCISAGISYKKLHLLEKRRTYLTEIRKEEVLPPLPEGRGLRA

SEQ ID NO: 16857 - protein, 456 aa, unidentified; identical to SEQ ID NO: 3956

SEQ ID NO: 16858 - protein, 408 aa, unidentified; identical to SEQ ID NO: 5302

SEQ ID NO: 16859 - protein, 268 aa, unidentified
LTFTTDGHKCQNPNCKHKDKKEQILKVHHIRYRSEGGSDRPENLITLCSKCHTPANHKKGKFLYDWCVNGKKVRGFKDATFMSMIRWYLVNELKSKHNNVSITYGYITKNHRIQNGIEKSHLNDAFAIAKGTNQARTKDRFLVIQDRLKNRSLEKFYDSKIIDIRTEKKVSGGDLNCGRSTRNKNLNTENLRKYRGVKISKGQRRIRKQKYFYQPNDLVKYDGKVYTVKGTQNEGKYIALKEIKKVPKVELLIPYVFKKGLNWSYGLC

SEQ ID NO: 16860 - protein, 371 aa, unidentified
MSKVFVIDSEKRQLDPMHSAQARQLLRNKKAAVFRRFPFTIILKESKPESPVSPLRLKLDPGAKTTGIALVNDSTGEIVFAAELKHRGFAIRDALTSRRQLRRGRRNRKTRYRKPRFLNRTRPEGWLAPSLQSRVENIKTWVNKLRKFAPIKAISQELVRFDMQLMRNPEIQGEEYQQGTLAGYETREYLLEKWNRQCAYCGVKDVPFQVEHIHPRAKGGSNSIANLTLSCEKCNTKKGTKDIKEFLKKDPSKLTKILGQAKRPLADAAAVNTTRWALFKTLRETGLPVETGSGGLTKFNRSQQKLEKTHWLDATCVGKSTPKLIIKCVKPLLIISNGHGSRQSCRTDKFGFPNRHVPREKYILIFKLETS

SEQ ID NO: 16861 - protein, 419 aa, unidentified
MLVYVLKQNGQPFMPTERFGKVRRLLKEVKAKVVRREPFTIRLLYEPETDVVQECYCGVDTGSKHVGVAVVGNDKVLYQSQTELRSDIKGKMYRRRISRCNRRNRKTRYRKPRFLNRRNSIKKDRLPPSVKHKVQAHIDEVEFCKKILPVSDLILEVSQFDTALMKNPGLMNEKVKHWGYQQGFNYGYSSRREAVLHRDNYTCQCCGKKNCRLEVHHIKFKSNGGTDDEENLITLCKECHDGVHTGTVELNKKPKKSKGLKHATHMSIIRSRLFREYPNAIETFGFVTAENRNHLKLEKDHYIDACVIASGGLEFKELDVIYRKRRVSKGDYQVTRGVRGERKLPTGKIYGFRKFDKVKYFGKEHFIKGRMSSGFAGLMDIFGNEVDFDFMPKGSKTPKLSNCERISARRSILCIRERK

SEQ ID NO: 16862 - protein, 442 aa, unidentified; identical to SEQ ID NO: 2903

SEQ ID NO: 16863 - protein, 431 aa, unidentified
MPNKVYVINKHGRPLMPCSPAKARHLLDDGKAKVKKRTPFTIQLVYGSSGYTQEVILGVDAGSKTIGMSVSTTKEELLSAEVKPRNDVVDLQSTRREFRRVRRNRKTRYRKPRFDNRVRSKRKGWLAPSVEVKIQEHITSIKRVCRILPVSKVVIETAEFDLQLLKAIADGKPVPQGEDYQKGEMYGHYNVRQYVLWRDNYTCQCCGAHATKKKEVRLHVHHLESRKVGGDAPDNQVTLCESCHEKLHKGLIAEKDFKKRKRRSTRDATFMGIMRKTLMQRLCSELPIPVVKTRGYITKATREKLLVLPKSHTNDALAIAQGKHGFNASYLPGIAQIDKIYTIRPVRHHNRQLHKATILKGGIRKSNQAEKYVFGYRLFDKVQFNGQDCFIWGRRTTGIFTIKTINGKMIKDGISFKKLKPVEKSTSYLIA

SEQ ID NO: 16864 - protein, 420 aa, unidentified; identical to SEQ ID NO: 4588

SEQ ID NO: 16865 - protein, 427 aa, Oscillatoria sp.; identical to SEQ ID NO: 5140

SEQ ID NO: 16866 - protein, 504 aa, Moorena sp.
MIPGGDLQLPALSLTIKTKAKCVVGKTQAITTWPRKTLPIRGALKMQNYVLVIDTNKRPLNPISPKKARRLLDKGKAAVFRMYPFTIILKTAIASPTISPCQIKIDPGSKFTGFALVQDNQVIWAMELEHRGGLIKKKLESRRAVRRGRRNRNTRYRKPRFLNRKRPEGWLAPSNQHRVLTIQTWVKRLIKFCPVNEIWVERVKFDTQKMQNPEVSGVEYQQGELAGYEVREYLLEKWGRECTYCGKQNVPLQVEHIHPKSRGGSNRVSNLCLACEKCNQRKGNKPIEEFLKKKPSLLQKIKTKALSPLRDAAVVNTTRNKLVRILREMKPVVTGTGAQTKYNRTKLGLPKQHWIDAACVGGVETLTLKTSQSLLVICKGQGGRQKAALNKYGYPIRHNPLKPIKGWCSGDIAKNLLTGEFGRVNPRSKSNSFNYTVSGKKAISLHVKNLARVHRKDGYTYSFNESSTIPDIKKTRTITKNEANKNEPVNRMVLEYDEDGELWF

SEQ ID NO: 16867 - protein, 424 aa, unidentified; identical to SEQ ID NO: 8578

SEQ ID NO: 16868 - protein, 414 aa, unidentified
MKVYVRNQDGAPLMPCTEAKARKLLRAGKARVVARSPFTIQLAWQCEGHVQDVTVGIDKGSSVTGISCVGNGAVLLAAEIHHRRDVKEKLDIRRTHRKSRRARTWYRPARFANRASSTRSGRLPPSIKANVEEVIRVVKQLPLPISRIVVEDVQVDIAQLNNPTLRGSRYQDPTRLDENLRIACLMRDGYTCRHCGKGNCRLEAHHIVYREHGGKDTLANLLTLCERCHDRVHDGTITLSVTGVSGHLDQIAQRSMQGKTYLYATLGASVPLTTVFGYATSAFRKRRGLAKTHTADALCVATLGSGEIVAPECPNTYQINFRPRQTRRQFHDLPRKGKGRVRYQVNEELAGFRKGDIVRVKGWWVKQVYSIYSPTATTQGRLAFARVTGEPPSALPKDCVLLERGRTVRWKPIQ

SEQ ID NO: 16869 - protein, 475 aa, unidentified
MVAVVTSTGKPLMPTSAYRARKLLKKGRAVIFKYRPYFTIQLVDRADGEVQEVEYKSDTGSVHVGISVCTEKKELLSEQRDLLENEPEHHNDRKKNRRTRRNRKRYRKPRFDNRKKKPQEGHEKWLPPTLLHKMEVQVRLFREFCRVVPVTSACFEMGKFDTQALKAVSKGEPVPEGEGYQKGERYGTDTLRAAIFLRDGHTCRFCGRSVKDGAILHVHHVGYWKGDRTNRPANLASACEQCHTPANHGKNGLLYGKEPEFKTLKDASYMTSVRWIMLDEIKKAAPGVQVSVTYGVTTKRKRQELHLPKSHVNDAFSMASFHPKKRSDTEYWKKIPRHDRVLQKFYDAVYLDTRDGSEKKGSELSNGRISRNHKKDSENLHQYRGHKVSKGHNSIRRGASSLKPGSIVMYKGEKMTVHGTHTRYVKGKDGKTAKKVNVQFTCPASDGKKSASLEKCTPVSRVYNTGWKRYWPDKK

SEQ ID NO: 16870 - protein, 442 aa, unidentified; identical to SEQ ID NO: 6360

SEQ ID NO: 16871 - protein, 406 aa, unidentified; identical to SEQ ID NO: 3980

SEQ ID NO: 16872 - protein, 456 aa, unidentified
MGTLHLLASWCPWRHSWQVSGFILAAILMGRRASWMPYVLNQHGHPLMPCSPAKARHLLKDGKAKLMKRAPFTIQLLYGSSGYRQDVTLGVDAGSKHIGLPAVPADGQEVFAAEVTPRNDIVGNLSTRREFRRARRNRKTRYRKPKFNNRVRSKHKGWLAPSVEVKIQEHITVICRVCRLLPVTKVVDETAEFDLQLLKTIADGKSVPQGEDYQKGEMLGSYNVRQYVLWRDGYTCQCCGKHGHGVKLHVHHKESRKTGGDAPDNQTTLCDSCHEKFHKGVITLDKLKKRGRQSTRDAAFMGIMRKTLMLRLRQQLDIPVCETRGYITKYTRGERLHLPKSHINDALAIAIGPNGAQSVARADQRYTIKPVRHHNRQLHKATTLKGGIRKSNQAPKYVKGFRLFDKVLFEGMECFIWGRRSSGSMLLRRLDGSKVKDGAGFRKLTLLERSSYYLVS

SEQ ID NO: 16873 - protein, 422 aa, unidentified; identical to SEQ ID NO: 5333

SEQ ID NO: 16874 - protein, 424 aa, unidentified; identical to SEQ ID NO: 3434

SEQ ID NO: 16875 - protein, 443 aa, unidentified
VVKANGTAVFTAHLETRNKEVPKLMQDRKKARRARRTNGRRCRRQRRAKANGTISKKCVKQDTAQSKNPSKRAKEIGIIKRRLPGYKKDVLCIGIKNKEAKYTNRTRPEGWLTPTANQLLQTHINLVRKIQKFLPISDVVLEVNKFAFMRLDNPDIQKWQYQQGPLYQKGSLENAVSEMQEHHCLFCDKPIDHYHHVVPQSENGSNTIANIVGLCAEHHNLVHKDAAWQKKLAEEKVGLNKKYGALSVLNQIIPALTNKLSVLFPKHFFVTAGKSTHDYRATHGVSKDHWLDAYCIACSVLPSDVCDSNINNHMPYELKQFRRHARRALNNENMNRVYTLNDKAVAINRHKATEQEAASLEEFRKEHPNDVCKLKVKEHHPTYRNMNRNYPGSIFLVGKHVHIMQGIAGSKDGKATTYKDSNANSITASKCKFVAKNSGILFV

SEQ ID NO: 16876 - protein, 442 aa, Anaerostipes sp.; identical to SEQ ID NO: 2903

SEQ ID NO: 16877 - protein, 430 aa, unidentified; identical to SEQ ID NO: 4504

SEQ ID NO: 16878 - protein, 415 aa, unidentified
MVYVLDKNGQTLMPTDRHRKVRLMLQSGQAKVIKRCPFTIQLNYDSGHQTQEISLGIDAGSKHIGVSATTKIKVLYEADVELRNDIVDLLSSRRELRRGRRNRKTRYRQAKFNNRRCGNGWLAPSIRQKIGTHLTVVENICKILPISRIMVETASFDIQKIKNTDIQGAEYQQGDQLGFWNIREYVLFRDNHTCQCCKGKSKDKILNVHHIESRKTGGNAPNNLITLCEICHTGYHKGAVQLPKTVKRGMRFKDAAFMGIMRWAFYEALKQQYEPVALVHNTYGYITKHTRIAYNLPKEHYVDARCISGNPDAFPNGEYYYQKKVRCHNRQIHKLTILKGGIRKQNQATYLVKGYRLFDKVSYQGKGYFVFGRRQSGFFDIRTLSGEKVNKGSLSCKKLKFIATRTYYLTERRAV

SEQ ID NO: 16879 - protein, 442 aa, unidentified; identical to SEQ ID NO: 2903

SEQ ID NO: 16880 - protein, 444 aa, unidentified
VGGVLDAKSLYNIVDGIITAVRLIYPEKDFNLLIYVISKNNNPLMPTNRFGRVRRLLKDKMAKVISYEPFVIQLLYDSEEYVQPITIGVDAGSKTIGISVSTETKELFVAEVQLRNDIVNLLSTKRQYRRIRRSRLRYRKPRFLNRVKSKHKGWIAPSIEQKINSHIKIIDKIHQILPISKIIVETAQFDIQKIKNLDIDGIEYQQGEQFGFWNVREYVLFRDNHQCQGKKGCKNKIFQVHHLESRKTGGNRPDNLITLCKECHSNYHEGKLKLDKKKKNIFRDASHMNIMRWKLFKQLKDKFETVECTYGYITKFNRIKNSLEKSHINDAWCISGNFKAKRLNLYFYIKKVRCHNRQIHKAKILKGGKKKLNKSSYLVKGFRLFDKVEFKGIKCFIFGRRATGYFDIRKLDGEVVNRSASYEKLKFIQIMNYLLIEDRKNFRN

SEQ ID NO: 16881 - protein, 415 aa, Selenomonas sp.; identical to SEQ ID NO: 8317

SEQ ID NO: 16882 - protein, 429 aa, Streptomyces sp.
VFVLDRHGHPLQPCTPARARKLLTKGRAVVHRHTPFVIRLKDRAASESAVDGVEVGIDPGSKHTGLAVFTAVAGQRRARYALQLGHRGAQIRKKLQQRADYRRGRRSRNLRYRAPRFFNRRRPEGWLAPSLRHRVETTVSWVGRIARWAPVCAVHVERVAFDTHVISAGRPLQGAEYCRGTLHGYEIREYLLAKWGRTCAYCGSKGVPLNIEHIRPRSRGGSDRVSNLAIACIRCNQAKDNQPIEDFLKGKPKLLARILAQAKAPMRDAAAVQSTRWALWRSLSAMLPTYTASGGRTKWNRTRNKLPKSHTLDALAVGKLDTITETVTTVLVAACTGRGVHQRTSPDKHGFPRRTSPRTKRVHGFATGDLVTATVPAGKYAGTHTGRVMVRTSGLFDIRTPHGLAAAVKHTHVRLIQRSDGYAYTRHPE

SEQ ID NO: 16883 - protein, 431 aa, unidentified
MPNKVYVINKHGRPLMPCSPAKARHLLDAGKAKVKKRTPFTIQLVYGSSGYTQEVILGVDAGSKTIGLSASAETEELLSAEVKPRNDVVDLLSTRREFRRARRNRKTRYRKPRFDNRVRSKHKGWLAPSVEVKIQEHITSIRRVCRILPVSKVVIETAEFDLQLLKAIEEGKPVPQGEDYQQGEMYGHYNVRQYVLWRDGYTCQCCGAHATKKKEVRLHVHHLESRKVGGDAPDNQVTLCESCHEKLHKGLIAEKDFKKRKRKSTRDATFMGIMRKTLMQRLCSELPIPVIETRGYITKATREKLLVLPKSHTNDALAIAQGKQGFNVGYLPGIVQINKIYTIRPVRHHNRQLHKATILKGGIRKSNQAEKYVFGYRLFDKVQFNGQDCFIWGRRTSGYFVVKTIDGKVIHNSASFKKLNLVERASNYLIA

SEQ ID NO: 16884 - protein, 536 aa, unidentified; identical to SEQ ID NO: 2718

SEQ ID NO: 16885 - protein, 417 aa, unidentified
MPCSPAKARLLLKEKKAIVKRRTPFTIQLTIATGEAKQPVALGVDSGYKHIGLSATTEKAELYASEVELRQDITDLLSARLALRCSRRSRKTRYRAPRFDNRVASKREGWLASSVENRIAAHMSRVEAVMRVLPVTAITVETAAFDTQLLKNPDIAREAYQQGEQLGFWNVREYVLFRDGHVCQHCRGKYKDPILNVHHIESRRTGGDAPNNLITLCETCHKAFHRGEIKLKVKRGKSFKAETFMGIMRWTLFERLKKAHPELRVRNTYGYLTKHKRISHGIAKSHCADAYCIADNLGAKRLEGFFFQKQTRKHNRQIHKLSILKGGLRKKNQAPYEVKGFRLFDKVICKGEEAFIFGRRTSGSFDVRRLDGTRISAGINYKKLRLLEPRTTYLTEFRKEAALPHLHECRGFRAEFL

SEQ ID NO: 16886 - protein, 442 aa, Lactobacillus sp.; identical to SEQ ID NO: 12143

SEQ ID NO: 16887 - protein, 414 aa, unidentified; identical to SEQ ID NO: 2588

SEQ ID NO: 16888 - protein, 443 aa, unidentified
MTKTTTQKVTQVCVLDQNGQPLMPTQRLGKVYRLLKTKKAHIVAYEPFTVQLDYEPKTHIIQPMTLGVDSGAIHSGYSLANEHREYYSAEVIARDDISKNISDKRMYRRSRRSRKTRYRKPRFNNRKNKGKGWIPPSLEQKVNVQLNEIEHLHRYFPIETIIIEVAEFDIQKIKNPDISGKEYQQGTLQGYNIRNYLLEKYHHKCFYCDKDVSTFEVEHMIPKARNGSNRIDNLTLSCHDCNSNKGTLTAEEFITQTLSPQKAAQKLRQLPKTKQLLKYMAHMNTTRWVLYNTIKETYDSVSLTYGYITKHNRINAGLPKAHHIDAKCITGFSTVPSFDITVVKTKMRRHNRQLHRATFSKGHIRKAATLPRFVHGFQLYDIVLFNNHQYYIKGRRSSGSFALVSLEGLKDENRNYKKITFLAHTNAYLTNHYVNDTANRANG

SEQ ID NO: 16889 - protein, 429 aa, Moorena sp.; identical to SEQ ID NO: 3068

SEQ ID NO: 16890 - protein, 409 aa, Arthrospira sp.; identical to SEQ ID NO: 8750

SEQ ID NO: 16891 - protein, 428 aa, unidentified; identical to SEQ ID NO: 6748

SEQ ID NO: 16892 - protein, 437 aa, Clostridium sp.; identical to SEQ ID NO: 8734

SEQ ID NO: 16893 - protein, 416 aa, unidentified; identical to SEQ ID NO: 15082

SEQ ID NO: 16894 - protein, 432 aa, unidentified
YMVYVLDIDGQPLMPTSRHGKVRRLLNSHLAKVVKRCPFTIQLLYQSTKETQPVSLGVDAGSRHIGLSATTEQEVVYQEELVPRNDIVKLLSARRALRRSRRNRKTRYRKVRFNNCVHSKHKGWLAPSVEVKIQEHITAIKRICQILPISDIHVETAEFDLQRLKAMEEGRPLPVGTDYQLGEQYDFYNTRQYVLHRDEYTCQCCGTHDNNVKLHVHHVESRQTGGEAPNNLITLCEHCHKSIHAGKMMLPKGKKRGKSYRDAAFMGIMRNTLLERLKKEVNVPVTMTYGYITKYWREKAGLEKSHINDAICISKHPYARPLETYYLTKAVRHHNRQIHKTKFSKGGIRKRNQAPYLVKGFRLFDKVLYQGESYFIFGRRITGYFDIRTLDGTKVNKGSTSYKKLRIQDTAEAYLTEVRAIPHMNEFTCVLA

SEQ ID NO: 16895 - protein, 465 aa, unidentified; identical to SEQ ID NO: 4641

SEQ ID NO: 16896 - protein, 512 aa, unidentified
MSTIYVLNKDGKPLMPTTRGGHVRHLLKEQKARVVRTKPFTIQLLYETDDVVQHLYLGIDPGRTNIGVAVVKTDGTAVFTAHLETRNKEIPKLMKKRKDSRRARRTNGRRCRRQRRAKANGTISKKCVKQTTAQNGSVSKRAKEIGVIKRHLPGCEKEVLCIGIKNKEAKFSNRVKPEGWLTPTANQLLQTHINLVKKIQKFLPISDVVLEVNKFAFMQLDNPNIQKWQYQQGPLYQKASLEEAVSEMQEHHCLFCKKPIDHYHHVVPQHKNGSNTIGNIVGLCAKHHDLVHKDTTWQKKLAKKKTGLNKKYGALSVLNQIIPTLTKELSSLFLKHFFVTNGKSTYDYRAAHGVSKDHWLDAYCIACSVLPNDTCDKTINSRVPYEFKQFRRHDRRALNNENMSRVYTFNGKMVATNRHKATEQTTDSLEEFRQRQPNDVCNLKVKEHHPTYRNMNRNYPGSVFLIGKQVHVMQGIAGSKDGEATTYKDTNANSIAAGKCKFVAKNSGILFV

SEQ ID NO: 16897 - protein, 271 aa, unidentified
MVYVQDIDGKPMMPTTRHGKVRRLLKDSKAVVVNTCPFTIKLMYKTSGYKQEIVLGVDAGTKHVGLSATTKSKELYSSEVILRSDIVELLSTRRESRRARRNRLRYRKPRFENRVKSKRLGWVAPSVRHRIDAHIRVIDNVCSILPVSRVIVEVAQFDTQKIKNPDISGDEYQEGDQLGFWNVREYILARDGHKCQHCKGKSKDPILNVHHIESRKTGGDSPSNLITLCETCHKEYHKGNIDLKVKRGKSLRDAAVMGIMKWKLYEELKSR

SEQ ID NO: 16898 - protein, 426 aa, unidentified
LAKDLYRSTDREETNLRVYVLNKRGEPLMPCSAAKARILLKEKKAVVKRRTPFTIQLTIATGETKQSVTLGVDAGYKHIGLSASTEKAELYASEIELRQDVSELLAGRSALRQARRSRKTRHRAPRFDNRKREKGWLAPSVENRIGAHVSRVEAVLRILPVTKIIVETASFDVQRLKNPDMQGVEYQQGEQLGFWNVREYVLFRDGHECQHCHGKSKDQVLNVHHIESRRTGGDAPNNLITLCETCHKAFHRGEIELKVKRGRSFQAETFMGVMRRTFFERLRASHPEIEVRNTYGYLTKDTRIANKIEKSHCADAFCIAGNLKAKRLGYYFFQKQTRRHNRQIHKLTILKGGVRKRHQTPYEIKGFRLYDKVLYRGKVAFIFSRRSSGYFDIRTLDGERIAASGSYKKLRLLEKRRTFLIELRRN

SEQ ID NO: 16899 - protein, 494 aa, unidentified; identical to SEQ ID NO: 13959

SEQ ID NO: 16900 - protein, 440 aa, unidentified
MSTGLRAEQAEPAGIRKGDTLKVFVLNMRGKPLMPCSPAKARHMLKAGKAFVVRRTPFTIKLTIATGETKQDVTLGVDAGAKHVGLSATTEKEEVFASEVELRQDITGLLADRLAFRRARRNRKTRYRAPRFNNRVRSKNKGWLAPSVENRIQAHISRIEAVCRVLPITKIVIETASFDIQKIKNSEVEGSGYQQADQLGFWNVREYVLFRDGHVCQHCRGRSKDPILNVHHLESRKTGGDTPNNLITLCETCHKAYHAGKIKLKARRGTSFRAEAFMGIMRWTLLDRVRRAHPELPVENTYGYLTKHNRIALALPKTHCADAFCIAGNLNALRRGDFLFQRQTRTHNRQIHKCSILKGGVRKLNQAPFLVKGFRLFDKVKCKGGIGFVYGRRSSGFFDVRTLDGVRLSAGISYKKLMLVEKRTTFLTQLKKEHGASSPS

SEQ ID NO: 16901 - protein, 447 aa, unidentified; identical to SEQ ID NO: 12599

SEQ ID NO: 16902 - protein, 480 aa, unidentified
LYTKPLDNIGEGSLPPSGEINLKGMTFMVYVKSIDGKALMPTSNAKARKLLKQKKAKVVSLRPFVVKLTYKTKTEYIQKLNLGVDSGYSNIGFSVIDAKQEYIAGEVKLLEGMKKRLLEKASYRRIRRSRLRYRKARWNNRVKSKKKGWLAPSLKHKLDTHIKFIDYLKNILPIEKITIEVANFDIQKMKDDLISGIDYQNGDMFGFWNVREFVLHRDGHKCQNPNCKHKDKKEQILKVHHIRYRSEGGSDRPENLITLCSKCHTPANHKKGKFLYDWCVNGKKVRGFKDATFMSMIRWYLVNELKSKHNNVSITYGYITKNHRIQNGIEKSHLNDAFAIAKGTNQARTKDRFLVIQDRLKNRSLEKFYDSKIIDIRTEKKVSGGDLNCGRSTRNKNLNTENLRKYRGVKISKGQRRIRKQKYFYQPNDLVKYDGKVYTVKGTQNEGKYIALKEIKKVPKVELLIPYVFKKGLNWSYRLC

SEQ ID NO: 16903 - protein, 428 aa, unidentified
MNRVFVLDDRKIPLMPCRSARARRLLAAGKAAVYRRVPFTIILKYEVDPDNQPVEFKVDPGSKTTGIALVGQFNRGNELLWGANLSHRGQSIKDKLESRRSLRRGRRNRKTRYRAARFLNRRKKTGWLPPSLQSRVDNVSSWLKKLRSRAPISECHVETVRFDLQKIVNPEISGIEYQKGELTGYEVREYLLEKWRRQCVYCDSKDTALEIEHIVPRSKGGSNRVSNLTISCRYCNQGKGNMPVEQFVKDPARLNRILAYAKAPLKDASAVNATRYAIGNAIKEFGLPTSFWTGGRTKLNRSKQHYAKDHYSDAACVGETGANVVISENPKPLLIKATGRGTRQTVRTDKFGFPRNAAGRVKRVFGFQTGDLVRLDLSKGKYAGTHVGRLAGIRANGRLDIATMAGRITASFKNFTIIQRGDGYAYTN

SEQ ID NO: 16904 - protein, 450 aa, unidentified; identical to SEQ ID NO: 2935

SEQ ID NO: 16905 - protein, 414 aa, unidentified; identical to SEQ ID NO: 2588

SEQ ID NO: 16906 - protein, 557 aa, unidentified; identical to SEQ ID NO: 11277

SEQ ID NO: 16907 - protein, 431 aa, unidentified
MPNKVYVINKHGRPLMPCSPAKARHLLDAGKAKVKKRTPFTIQLVYGSSGYTQEVILGVDAGSKTIGVSASTKKEEFFAANVIPRNDVVDLLSTRREFRRARRNRKTRYRKPRFDNRVRSKHKEWLAPSVEVKIQEHITSIKRVCRILPVSKVVVETAEFDLQLLKAIADGKPVPQGEDYQQGEMYGHYNVRQYVLWRDNYTCQCCGTHPSKKKEVRLHVHHLESRKVGGDAPDNQVTLCESCHEKLRKGLIAEKDFKKRKRRSTRDATFMGIMRKTLMQRLCSELPIPVVKTRGYITKATREKLLVLPKSHTNDALAIAQGKRGFNVGYLPKIAQIDKIYTIRPVRHHNRQLHKATILKGGIRKSNQTEKYVFGYCLFDKVQFNGQDCFIFGRRTSGYFVVKTIDGKVIHNSASFKKLKLVERASNYLIA

SEQ ID NO: 16908 - protein, 456 aa, unidentified
MSTCVCVLSNNGERLMPTFRLGKVRRLLKDGKAKIVKHHPFTIQLLYDSKTNKQPIEICEDVGYNYIGISVKSESHEYVSAQYDTLQDEKEHHDDCRKMRRARRNRLRYRKPRFDNRKRSEGWLAPSLEHKKQLNISLVERYVSVIPITHATVEVGSFDTMLLQAIQKGETKPEGADYQEGPRYNLATLREAVFYRDNYTCQVCGRKITDGAILHMHHMFYWKGRHGYKLDELVTACEKCHTPANHQKGGKLFGFGEDKEFADLSGAAFMNAVRWQIVNALHTTYSKEFVTITYGAMTKEKRIALQLEKSHNNDAYAMGDFHPVHRCGFRHYQKRRRNNRVLEKFYDATYIDARTGNKAKGKELFNGRISRNHKKDSENLHKYRNKKVSRGRRSIRRQRYAIQPYDTVRLEGKTYITSGCHNKGTRLLIPVNGKSKSVAISKVQVVCHAGAWIQII

SEQ ID NO: 16909 - protein, 376 aa, unidentified
MVYVLNKQGKPLMPCKEAKARKLLKQHKARTVKYEPFTIQLLFDCENQTQDIALGVDAGSKYIGVSATTEKQVLYEAEVELRNDIVEKLSSRREARRTRRSRLRYRPARFNNRVHSKHKGWLAPSIEQKINAHIQVIRHLYEILPITKLIVETAQFDIQKINNPEISGEEYQQGNQLGFWNVREYVLFRDNHECQCCHGKSKDNVLNVHHLESRKTGGNAPNNLITLCETCHKAYHKGEVELKLKRGKNYRDAAFMGIMRKTLLLRLNQTYPNVHETFGYVTKNIRIENGLPKEHHVDARCISGNPLAKPLEYYLYQKCVRRQNRQIYKNNLCKNGRKISNQLIGDIFGFKLFDTVKYQNKQYFVFGRRKSGYFKI

SEQ ID NO: 16910 - protein, 451 aa, unidentified; identical to SEQ ID NO: 3581

SEQ ID NO: 16911 - protein, 289 aa, unidentified
CQILPISEIHVETAEFDLQRLKAMDEGSPLPVGIDYQLGEQYDFYNTRQYVLHRDGYTCQCCGTHDNNIKLHVHHIESRQTGGDAPNNLIILCEHCHKALHEGKLELPKGKKRGKSYRDATFMGVMRKTLLERLKKEIDVPVEGTYGYITKYWRERAGLEKSHIHDAVCISKYPYAKPLDIYYLTKTVRHHNRQIHKSNFSKGGIRKRNQAPYLVKGFRLFDKVLYQGKEYFIFGRRATGYFDIRTLDGTKVNKGSISYKKLRIQDTAKAYLKEARAIPHMNKFTCVLA

SEQ ID NO: 16912 - protein, 477 aa, unidentified; identical to SEQ ID NO: 5307

SEQ ID NO: 16913 - protein, 512 aa, unidentified; identical to SEQ ID NO: 3769

SEQ ID NO: 16914 - protein, 507 aa, unidentified; identical to SEQ ID NO: 2446

SEQ ID NO: 16915 - protein, 465 aa, unidentified
MSTCVCVLSNSGERLMPTFRLGKVRHLLKDGKAKIVKHHPFTIQLLYDGKTNTQPIEICEDVGYNYIGISVKSQSHEYVSAQYDTLQDEKACHDSCRKYRRTRRNRLRYRKPRFDNRKRSEGWLAPSLRHKKELNVNVVKMYCAVMPITHATVEVGSFDTMLVKAIQEGKAIPEGADYQKGPRYNLATLREAVFYRDNYVCKVCGRKATEGAILHVHHMFYWKGRHGNSLSELITVCEKCHTPANHQKGGKLYGFGENVKFADLSGAAFMNTVRWQIVNELYAAFGKDFVTVTYGAMTKEKRIALRLEKSHNNDAYAMGEFHPNCRCTFEHYEKVRRNNRTLEKFYDSRYIDIRTGEIATGKELFNGRINRSHKKDSENLHKYRGKRIRKGYRALRRKKVALNPGDLVSLNGEILTVHGTHTKKNGSVNVEFKTPSKSGKKSTSLKKLKIIKTISPMRSAWDKVS

SEQ ID NO: 16916 - protein, 507 aa, unidentified; identical to SEQ ID NO: 6546

SEQ ID NO: 16917 - protein, 426 aa, unidentified; identical to SEQ ID NO: 15348

SEQ ID NO: 16918 - protein, 408 aa, unidentified; identical to SEQ ID NO: 5694

SEQ ID NO: 16919 - protein, 416 aa, unidentified; identical to SEQ ID NO: 6623

SEQ ID NO: 16920 - protein, 514 aa, unidentified
MSVLVIGRNGRALMPTNPRKARLLLKKKTASVVCRHPFTIQLLYKTGCATQEGCIGIDTGSQHIGVGITCGDRVILKDEHALRSSMEKRSLLATRAVMRRGRRYRKVRYRKPKWRHHTKRMYFEKANRRGQHWRKVKTTTQSPRLKGWLPPSLQSKCDHHFRIIDRYLKYLPDPITRNLVIEAGRFDMARMNDPTIHGEMYQRGPMYDAENLRAYIFARDNYQCACCKAKAGTTRKADGTTVKLVAHHILFRSRGATDNPKYIISVCDHCHTTKAHQPGGILYSWMENNKKVARGLRDATFMNILRKRLFARYPQAAFTYGNITAADRKQLRLPKNHANDAVAISLFGKEASTVKNICQTMHYKQIRKSKRSLHEAIPRKGRKNPNTKAVRNKKNTTQVNGFKLWDSVLADGKKLFICSFTGTSAYLIDKNGCYISQPGKTYKQCPLSKLKRLHPNVDILPRINPWDSLDYNNITTPYRSGYSMIFQDLATIGVPHLGWYFLAAGQMPVPISLS

SEQ ID NO: 16921 - protein, 420 aa, Petrotoga sp.; identical to SEQ ID NO: 6357

SEQ ID NO: 16922 - protein, 445 aa, Scytonema sp.; identical to SEQ ID NO: 2723

SEQ ID NO: 16923 - protein, 411 aa, Orenia sp.; identical to SEQ ID NO: 7492

SEQ ID NO: 16924 - protein, 418 aa, unidentified
MSYVFVIDQEKRPLDPVHPGRARKLLSSGKAAVYRRFPFVLILKHPVSEAHPQPLRLKIDPGSKTTGLAVLNDTSGQVLWAAELVHRGEEVHQALQKRAGVRRGRRSRHTRYRAARFSNRRRKRGWLAPSLCSRMQNVQTWTRRLMRWCPLGAISYEAVRFDTQAIQNPEIKGVAYQHGTLAGLEVKEYLLLKWRHKCVYCQKGDIPLEVEHIVPKRRGGSDRITNLTLACEACNQQKGSQTAQAFGFPHLQAQALQPLKDAAAVNSTRWALYERLKATGLPIEVSTGGQTKWNRKQRGIPKSHWLDAVCVGPSTPERVQWQHVIPLLITARGRQCRQLCNVDGWGFPRSRPKGPSKVFGFQTGDMVQAVVTRGKRNGGGHSWKTLPMTLITLSVSWLLQIRCKRSREEIFSISLFDN

SEQ ID NO: 16925 - protein, 428 aa, unidentified; identical to SEQ ID NO: 5036

SEQ ID NO: 16926 - protein, 413 aa, unidentified; identical to SEQ ID NO: 3220

SEQ ID NO: 16927 - protein, 423 aa, unidentified; identical to SEQ ID NO: 4024

SEQ ID NO: 16928 - protein, 423 aa, Arthrospira sp.; identical to SEQ ID NO: 3091

SEQ ID NO: 16929 - protein, 416 aa, unidentified
MVYVLDKNGQPLMPTDRHRKVRLMLQSGQAKVIKRCPFTIQLNYDSGHQTQEISLGIDAGSKHIGVSATTKIKVLYEADVELRNDIVDLLSSRRELRRGRRNRKTRYRQAKFNNRRRGNGWLAPSIRQKIGTHLTVVENICKILPISRIMVETASFDIQKIKNPDIQGAEYQQGDQLEFWNVREYVLFRDGHTCQCCKGKSKDKILNVHHIESRKTGGNAPNNLITLCETCHTGYHKGTVQLPKAIKRGMRFKDAAFMGIMRWAFYEALKQQYEPVGTPVHNTYGYITKHTRIAYNLPKEHYVDARCISGNPEASSNGEYYYQKKVRCHNRQIHKLTVLKGGIRKQNQATYLVKGYRLFDKVSYQGKGYFVFGRRQSGFFDIRTLSGEKVNKGSLSCKKLKFIATRTYYLTERRAV

SEQ ID NO: 16930 - protein, 431 aa, unidentified
MDAWDIIVVLNKRGKPLMPCSPAKARLLLKEKKAIVKRRTPFTIQLTIATGESKQPVTLGVDAGYKHVGLSASTEKAELYASEVELRQDVSDLLSARRALRQSRRNRKTRYRAPRFDNRIRTKRKGWLAPSVENRINAHLSRIEAVLRLLPVTKITVETASFDMQLLKNPDIAGKEYQEGEQLGFWNVREYVLFRDGHVCQHCHGRSKDPVLNVHHLESRRTGGDSPGNLITLCETCHKALHRSEITLKTKRGQSFRAEAYMGLMRWEVLNRLKTSHPGLEVHNTYGYRTKYTRIVNGIDKSHCADAFCIAGNLGAERLGEFFFQKQTRRNNRQIHKLSILKGGIRKRNQAPFEVKGFRLFDKVACQGEEGFIFGRRSSGYFDVRKLDGTCISAGISYKKLHLLEKRRTYLTEIRKEEALPPLPEGRGLRA

SEQ ID NO: 16931 - protein, 426 aa, Geobacter sp.; identical to SEQ ID NO: 2608

SEQ ID NO: 16932 - protein, 430 aa, unidentified; identical to SEQ ID NO: 7436

SEQ ID NO: 16933 - protein, 427 aa, Moorena sp.
MQNYVFVIDASKQPLNPIHPKKARRLLDKGKAAVFRMYPFTIILKTAINNPTISPCQIKIDPGSKTTGFAIVQNDQVIWGMELEHRGGLIKKKLEYRRAVRRGRRNRNTRYRKPRFLNRKRPEGWLPPSLEHRILTTETWVKRLIKFCPVNEIWVERVKFDTQKMQNPEINGTEYQQGELAGYEVREYLLEKWGRQCTYCGKQNTPLQIEHIHPKSKGGSNRVSNLCLACEKCNQRKGNKPVEDFLRKKPSLLQKIKTKAKQPLSDAAAVNTTRNKIVKVLKGIKPVVTGTGAQTKYNRINFGLPKQHWIDAACAGDVEALVLKTSQPLLVTCKGPGGRQKAALNKYGYPIRHNPLKPIKGWITGDIAKHQKLGIGKVTPRSKGSFGFTPLGEKGYKSCRPQDISAVHRKDGYIYRFCQSLPGTAWK

SEQ ID NO: 16934 - protein, 419 aa, unidentified; identical to SEQ ID NO: 5742

SEQ ID NO: 16935 - protein, 431 aa, unidentified
MPNKVYVINKHGRPLMPCSPAKARHLLDAGKAKVKKRTPFTIQLVYGSSGYTQEVILGVDAGSKTIGMSASTTKEELLSAEVKPRNDVVDLLSTRREFRRARRNRKTRYRKPRFDNRVRSKHRGWLAPSVEVKIQEHITSIKRVCRILPVSKVVVETAEFDLQLLKAIADGKPVPQGEDYQQGEMYGHYNVRQYVLWRDGYTCKCCGAHTTKKKEVRLHVHHLESRKVGGDAPDNQVTLCESCHEKLHKGLIAEKDFKKRKRRSTRDATFMGIMRKTLMQRLCSELPIPVIETRGYITKATREKLLVLPKSHTNDALAIAQGKQGFNVGYLPGIVQIDKICTIRPVRHHNRQLHKATILKGGIRKSNQTEKYVFGYCLFDKVQFNGQDCFIWGRRTTGIFTIKTINGKMIKDGISFKKLKPVEKSTGYLIA

SEQ ID NO: 16936 - protein, 296 aa, unidentified
INAHLSRIEAVLRLLPVTKITVETASFDLQLLKNPDISGKEYQEGEQLGFWNIREYVLCRDGHVCQHCYGRSKDPVLNVHHLESRRTGGDSPGNLITLCETCHKALHRGEITLKAKRGQSFRAEAFMGIMRWEVHNRLRALHPGIEVSNTYGYRTKHARIANGIAKSHCADAFCIAGNLGAERLCEFFFQKQTRRNNRQIHKLSILKGGIRKRNQAPFEVKGFRLFDKVACQGEEGFIFGRRSSGFFDVRKLDGTRISAGISCKKLHLLEKRRTYLTEIRKEEALPALPEGRGPRA

SEQ ID NO: 16937 - protein, 428 aa, unidentified; identical to SEQ ID NO: 8908

SEQ ID NO: 16938 - protein, 423 aa, Moorena sp.
MRVFVLNKNLQPLDPCRPARARILLSTGKAKVYRRYPFTIILVEEISNPVTHEHQLKIDPGAKTTGLAVVQRQRVVWGAELTHRGFQIRDNLTSRRQLRRSRRNRKTRYRKPRFLNRTRAKGWLAPSLVSRIENILTWVKKIIRFCPITGISQELVRFDTQKLQNPELSGIEYQQGTLHGYEIREYLLEKWNRKCAYCGGKDTRLEVEHIKPKSKGGSNRISNLTLACHSCNQAKSNQDIELFLAKKPDLSKRILSQAKRPLSDAASVNITRWKLYHDLKSITLPVEVGSGGLTKFNRCRQNLPKTHWLDAANVGKVETLIIEVNNPLLITAKGHGTRQLCRTNKYGFPIRYCSRIKFHKGFQTGDIIRAVVTKGKKIGTYVGRVATRKSGSFNISTKSGLVQGISHKYCQFIHRKDGYAYTN

SEQ ID NO: 16939 - protein, 544 aa, unidentified
MKQKKQKVMVYILNKKGKPLMPTTRCGHVRKLLDSKKAVIVNSNPFTIRLKYDTPNGVQDVFAGIDSGRENIGSGASNKDGDCLYLGELKTSNKSIKMKMTERAGFRRERRRHDRQNKQRKARKDHTEIQNGKDDICRTTISCKSVQISYPTAEKSVTHKIIRGKEGKFANHNRDEGWITPSARQLVQMHINDLKSMCKILPISHVTLERVAFDFQKLENENIKVWEYGKGKLYGYDSPKEYINDVQDGKCLACGKPHIDYLHHIIPRSKGGSDKVSNIAGLCYDCHYGPMGVHNCQNTQDRLPELKNEINKQYKVSLLNSVMPVLIEEMDKFCKANSIILSICEGHDTAKLRDMYDLQKDHCLDGFAISLVGRNVKSVDVMPDRIHQKQRYKKKSKNIIQKHNCREYYDGKKLVAVNRHKGTDQKADSLEEYMNTYAETHTADECKKHFESLTVKPAKRTYTFHKEGRICPFHIGDKVRYEKKNKIKGNTKVETFICEGIYFTKDKNKAKVEHNKTKSKKMKFCRVLEPGCTPYINYRKLALM

SEQ ID NO: 16940 - protein, 440 aa, Lactobacillus sp.
MKGVQIMQNRVFVINKHGKALMPCKPRKARILLRDGKAKVLKKEPFTIQLLYGSTGYKQDISIGIDSGQRHIGLAVTSQDEVLFQGEVELRQDVKKLIDTRRIYRRSRRNRKTRYRKAKFLNRIAKKKDNWLPPSVLSKVNHNINWIKRLLSVLPKADLHIEVGKFDIQKMKNPEINGEGYQQGDLYGYQTVKQFVLARDNYTCQVCKKKDGKLKIHHIIYRSLGGTNTVNNLITVCSNCHTTKNHQTGILAKWCKDKKKVNKSYKGATFMNILRRRLFLAFPQAKFQYGAWTTLQRADLELTKSHYNDAVAISGIRKIKAKPTSIMMFKQFRKKKRSSHEATARKGRKTPNITSKRNSKNTKYARGFWLNDYAKIKNSNKKGYISGFTAKGAGTRLRDIFGEYVSNSDKSYTSTKNISLINHSNNWQEQVITEKQYIMG

SEQ ID NO: 16941 - protein, 493 aa, unidentified; identical to SEQ ID NO: 3781

SEQ ID NO: 16942 - protein, 406 aa, unidentified; identical to SEQ ID NO: 2874

SEQ ID NO: 16943 - protein, 489 aa, unidentified
MTMVYVQNKDGKPLMPTTRYCYVRLLLKENKARVVSTTPFTIQLNYDTPDITQDLILGIDPGRTNIGVAVVKEDGQCVFSAHLETRNKDVPLLMQKRAGFRKQHRTLDRRRKRQRRAKAAGTTVAEGSVERLLPGYEKPVVCHYIRNKEARFNNRSRPAGWLTPTANHLLQTHINLIAKVAKFLPITKVVVELNRFAFMAMDNPNIRRWEYQQGPLCGLGSVEDAVYAQQDGHCLFCKKPIDHYHHVIPRHKRGSETLANRCGLCAKHHDLVHTDKAWADKLVTRKEGMNKKYHALSVLNQIIPHLMEYIGSETLYDAYATDGKSTKGFRIAKNVPKEHYTDAYCIACSILDTDIEVSAPVEPFKLKQFRRHDRQACIRQMVDRKYLLDGKVVAANRHKAFEQKSDSLQEFREAYSDVAVSQLTVKPHPPQYKDMSRIMPGAVMDFDGIVGVMQSSIVGQFYKSTKGHKATPKRCALLSQNAGMVFIPT

SEQ ID NO: 16944 - protein, 415 aa, unidentified; identical to SEQ ID NO: 10904

SEQ ID NO: 16945 - protein, 424 aa, unidentified; identical to SEQ ID NO: 8578

SEQ ID NO: 16946 - protein, 512 aa, unidentified
MSTVYVLNKDGKPLMPTTRGGHVRHLLKEQKARVVRAKPFTIQLLYETNDVVQPLYLGIDPGRTNIGVAVVKANGTAVFTAHLETRNKEVPKLMQDRKKARRARRTNGRRCRRQRRAKANGTISKKCVKQDTAQSKNPSKRAKEIGIIKRRLPGYKKDVLCIGIKNKEAKYTNRTRPEGWLTPTANQLLQTHINLVRKIQKFLPISDVVLEVNKFAFMRLDNPDIQKWQYQQGPLYQKGSLENAVSEMQEHHCLFCDKPIDHYHHVVPQSENGSNTIANIVGLCAEHHNLVHKDAAWQKKLAEEKVGLNKKYGALSVLNQIIPALTNKLSVLFPKHFFVTAGKSTHDYRATHGVSKDHWLDAYCIACSVLPSDVCDSNINNHMPYELKQFRRHARRALNNENMNRVYTLNDKAVAINRHKATEQEAASLEEFCKEHPNDVCKLKVKEHHPTYRNMNRNYPGSVFLVGKQIHVMQGIASSKDGKATTYKDSNANSITASKCKFVAKNSGILFV

SEQ ID NO: 16947 - protein, 414 aa, unidentified
MPCSPAKARLLLKEKKAIVKRRTPFTIQLTIATGETKQPVSLGVDAGYKHVGLSASTEKAELYASEVELRQDITDLLSARRALRQSRRNRKTRYRAPRFDNRIRTKRKGWLAPSVENRINAHLSRIEAVLRLLPVTKITVETASFDLQLLKNPDISGKEYQEGEQLGFWNIREYVLCRDGHVCQHCYGGSKDPVLNVHHLESRRTGGDSPGNLITLCETCHKALHRGEITLKAKRGQSFRAEAFMGIMRWEVLNRLKASHPELEVNNTYGYRTKHARIANDIAKSHCADAFCIAGNLGAERLGEFFFQKQTRRNNRQIHKLSILKGGIRKRNQAPFEVKGFRLFDKVACQGEEGFIFGRRSSGFFDVRKLDGTRISAGISYKKLHLLEKRRTYLTEIRKEEVLPPLPEGRGLRA

SEQ ID NO: 16948 - protein, 438 aa, unidentified; identical to SEQ ID NO: 4848

SEQ ID NO: 16949 - protein, 486 aa, unidentified
MQKLEERNTYTPTDIPHVSGNCDRILNREETLSVSGLKTSSNNSDAALIAKEHAKQNTSVSAVYVLNMRGQPLMPTTPRKAKQLLNEDKAKVIKRTPFTIQLKYATGETKQEITLGVDSGFENIGFSAITAKKEVYSAEVKLRTDMVKLNSERRQYRRARRNRKTWYRQPRFDNKKKPDGWLAPSIQHKLDSHIKLIEKVKAILPITKIEIEVAAFDIQKIKNPEISGIKYQNGVQKDSWNTREYVLYRDNHTCQHCKGKSRNPILQVHHIVSRQIGGDAPDNLLTLCETCHDKVSKGKLILDVKIPTGFKPETFMSIVRWKLVNLLRGAGNIVNHTYGYITKFNRIALGLEKSHSIDAFVIAGGTMQERNSISFLIKQVRKCNRKLFKGDRSHIKNTATRIIHGFQRYDKVLWNKIEGFVFGRRKTGYFELRKLDGTKIHASAKIKDLTLLETANTLLISYLGGVRSSPDYKSGVSATPTPHGDL

SEQ ID NO: 16950 - protein, 456 aa, unidentified; identical to SEQ ID NO: 3956

SEQ ID NO: 16951 - protein, 512 aa, unidentified; identical to SEQ ID NO: 5824

SEQ ID NO: 16952 - protein, 424 aa, unidentified
MRVFVFNMRGRPLMPCSQRKARLLLRENKAKIYKYHPFTIQLTYTTGETKQDCHIGIDTGSKYIGAAVRSEDKVFWKGEIELRQDIRSNLDTKRIYRRSRRNRKTRYRKPRFLNRKRRDEWLQPSLQSRINHTFHWIDTLSSLVPNPILHIEVGKFDVAKMINPEIHGVDYQHGQTYGFFDERYFVFARDNYTCQCCGKSKNKILNTHHIIYRSNGGTNRVDNLITVCTDCHTSQNHRKGGIFYQWQEQHKKVKQYKEPPFMNTLRKRIFVAYPDAEITYGSETTPKRKAMKLDKTHYNDAIVISGINEIKENPEEWLLIKQFRKKKRSLHEATARKGRKKPNRNQTRNSKNTPYYKGFYLNDKVSVFGKSGYITGFTSNAAYIKDENNDYITLPNKTYKQVSINKMKLECHNNNWQYIIKNAV

SEQ ID NO: 16953 - protein, 458 aa, unidentified
MSTCVCVLSNNGERLMPTFRLGKVRRLLKDGKAKIVKHHPFTIQLLYDSKTNTQPIEICEDVGYNYIGISVKSESREYVSAQYDTLQDEKEHHDDCRKMRRSRRNRLRYRKPRFDNRKRGEGWLAPSLKHKKELNVNIVKMYCAIMPITHATIEVGSFDTMLVKAIQEGKVIPEGADYQKGPRYKLATLREAVFYRDNYVCKVCGRKATEGAILHMHHMFYWKGRHGNSLDELLTVCEKCHTPANHQKGGKLYGFGEGVKFTDLSGAAFMNTVRWQIVNELYAAFGKPFVTITYGAMTKEKRIALQLEKSHNNDAYAMGEFHPSCRCKFRHYQKRRRNNRVLEKFYDATYIDTRTGNKAKGKELFNGRISRNHKKDSENLHKYRAHKITKGRRSIRSKHYDIQSGDTVLYAGRKCITTGCFNKGKWLRIPVGSTAKSVAISKVKLINHVGAWKKGSSI

SEQ ID NO: 16954 - protein, 396 aa, unidentified; identical to SEQ ID NO: 4508

SEQ ID NO: 16955 - protein, 442 aa, unidentified; identical to SEQ ID NO: 2807

SEQ ID NO: 16956 - protein, 430 aa, unidentified; identical to SEQ ID NO: 3681

SEQ ID NO: 16957 - protein, 428 aa, unidentified
LKVFVLNMRGQPLMPCSPAKARHLLKAGKAAVRRRTPFTIQLRIATGETKQSVTLGVDAGAKHVGLSAATEKEEVFASEVELRQDITGLLAARLSLRRDRRHRKTRYRAPRFLNRVRSKHKGWLAPSVENRIQAHMSRIDAVCRLLPVTRIVIETASFDVQKIRNPEVEGTGYQQGDQLGFWNVREYVLFRDGHVCQHCHGHAKDKILNVHHLESRQTGGDAPNNLITLCETCHKACHAGKIKLKVKRGQSFRAEAFMGIMRWTLLDRVRKAHPGLPVENTYGYLTKNTRITLGLPKAHCVDAYCIAGNLKAVRRGVYLHQRQVRKHNRQIHKCTVLSKTLKDGTKIGYRKLNQTPHLVKSFRLFDKVRCLGQTGFIFGRRSSGYFDVRRLDGVKLSSGISYRKLTLLEKRSTYLTELRKEDGASSPV

SEQ ID NO: 16958 - protein, 446 aa, unidentified; identical to SEQ ID NO: 9324

SEQ ID NO: 16959 - protein, 423 aa, unidentified
MQYVFVLDQNKKPLDPCHSGRARKLLNSGKTAVFREFPFTIILKERLQEDSVVHEYRVKIDPGSKTTGVALLRDDENKVVWAAEIQHRGQNIRDALISRRDNRRGRRDRNCRYRPARFNNRSRRAGWLPPSLESRLANIETWVRRLAWSSPVTAFSMELVKFDTQLMETPEISGVQYQQGELVGYEVREYLLEKWSRKCAYCGATDVPLEIEHIIPRVRGGSNRVSNLSLACHGCNQSKNTQTAAEFGHPEIQAKAKLPLKDAAAVNATRWELWRRLSAWGISVECGTGGRTKYNRIGQNLPKEHWLDAACVGQSGENISVPNGMTPIFIKAYGHGSRQMCRVDKFGFPRTSSKAAKVVFGFQTGEIVKAIVKKGKKIGTHVGRLAVRSSGFFNIQTRTQVVQGISWKYCQSLHKPDGYSYLF

SEQ ID NO: 16960 - protein, 460 aa, unidentified
MVAVVDMSGRPLMPTNEYRARKLLKQKKAKIFGYRPFTIQLTERKSTEIQPIELCMDTGYIHIGISAKSERHEYLGMQIDTLTDEKLKRDDKRQYRRQRRNRKRYRAPRFDNRRRKEGWIAPSLEHKKEIHIDAIQRICKVMPITDITLEMGNFDTHVLKAVEEGKPLPQGSDYQHGERYGIATLREAVFLRDGYKCQCCEKSVKDGAILHVHHIKYRSQGGTNRMSNLITVCDKCHTPKNHKPGGKLWNWKPKLAEFKGASYMTSIRWMLYNEVTAMLPNSSVHITYGAKTKESRRKLDIKKSHVNDAYVMGLFCPKHRTKPVYFKKKRRNNRVLEKFYDAKYIDSRDGKKQSGQELFNGRINRNHRKDSENLHLYRKQKVTKGKRSIRNKHYPIQPHDILLYQKKKYENAGCHNNGSRVILLPEKKSVALKQLTIYQYAGGYYRVPYESNKKEERTGS

SEQ ID NO: 16961 - protein, 424 aa, unidentified; identical to SEQ ID NO: 3351

SEQ ID NO: 16962 - protein, 424 aa, Enterococcus sp.; identical to SEQ ID NO: 8320

SEQ ID NO: 16963 - protein, 456 aa, Halomonas sp.
MAIFVLDKKKQPLMPCSEKRARLLLARGRAVVHKRYPFTIRLKDRVGGETQPLRLGIDPGSKTTGLALMREPDSQQRHMLCLFELVHRGLQIKKALQQRAAFRRRRRSANLRYRAPRFNNRTKPKGWLAPSLQHRVDTVTAWVKRLSRLAPVTAISQELVRFDTQKLENPEISGVEYQQGTLLGYEVREYLLEKWERECAYCGTGDTPLEIEHVVPRSRGGSNRVSNLTLSCHPCNAEKDSQTLTDFFATNKGLKKRLKANGLSADAQLERVQRQLKQPMRDASAVNATRWALFSALKTTDLPVAVSSGGRTKYNRQRLNIPKTHALDAACVGAFGKLYDWTVPTLTIKAMGRGSYQRTRLTKHGFPRGFLMRQKQVHGFQTGDMVRAIVPTGKKAGTHTGRVAIRKTGSFNIQAEYGAVQGISHKYCTFIQRSDGYGYYVTLFSNLTGEAGRAVA

SEQ ID NO: 16964 - protein, 438 aa, Clostridium sp.; identical to SEQ ID NO: 4933

SEQ ID NO: 16965 - protein, 420 aa, unidentified
MQYAYVLNKRGEPLMPCSPGKARILLKQQKACVVKRTPFTIKLLHGSAGYKQPITLGVDAGSKHVGLSASTEKRKLYSEEFTPRNDVVELLSTRRQNRRSRRNRKTRYRAPRFNNRVHSKHKGWLAPSVEVKIQEHITVIKRICRILPITLVRVETAEFDTQRLKAMLAGKPLPVGTDYQLGEMYDEYNVRQYVLKRDNYTCQCCGAHTTAKKTVKLHVHHLESRKVGGNAPSNLITLCTTCHNNLHKGKITLDGKKRGKTLRDAAFMGIMRNTLLTRLRNELNIPVQNTYGYITKLLREQNDIKKSHVNDARCISKHPLAKPCSVCYRTKAIRHHNRQIHKAKILKGGIRKANQAPYIVKGFRLWDKVLYNEQECFISGRRSSGYFALRKFDGTTITNSISFKKLRLLEPATNYLIERK

SEQ ID NO: 16966 - protein, 412 aa, unidentified
PAKARHLLDDGKAKVVKRTPFTIKLLYGSTEYTQPVILGVDAGSKTIGLSASTTKEELFAAEVMPRNDVVENLSTRREFRRARRNRTTRYRKPRFNNRVHSKNNGWLAPSVEVKIQEHITSIKRVCAILPISKIVVETAEFDLQLLKAVQDGKPVPEGEDYQKGEMYGSYDVRQYVLWRDNYTCTCCGVKGTDKKPVKLHVHHFESRKHGGNAPDNYGTLCEDCHKKLHLGIITDISLKTRKRPSTRGAAFMGIMRKTLMQRLITGLFIPVAETKGYITKAAREEILKLPKTHTNDALAIAQGRHGFGIREQAYVKPTNRIYTVRPVRHHNRQLHKATMLKGGIRKLNQASKYIFGFRLYDKVLYQGGECFVWGRRRSGSFLLRTIDGTKVKDGVGYRNLTLLERSTNYLIA

SEQ ID NO: 16967 - protein, 544 aa, unidentified
MKQKKQKVMVYILNKKGKPLMPTTRCGHVRKLLDSKKAVVVNSNPFTIRLKYDTPNGVQDVFAGIDSGRENIGSGVSNEDGDCLYLGELRTSNKSIKMKMTERVGFRRERRKHDRQNKQRKARKDHTEIQNGKDDICRATISCKSVQISYPTAEESVTHKIIRGKEGKFANRHRDGDWITPSARQLVQMHMNDLKSICKILPISHVTLERVAFDFQKLENENIKAWEYGKGKLYGYDSPEEYIHDVQDGKCLVCGKPHIDYLHHIIPRSKGGSDKVSNIAGLCYDCHYGPIGVHNCQDTQDRLPELKNEVNKQYKVSLLNSVMPVLIEEIDKFCKANSIMFSICEGHDTAKVRDMYDLQKDHCLDGFAISLVGRNVKSVDVMPDRIHQKQRYKKKSKNIIQKRNYREYYDDKKLVAINRHKGTDQKADSLEEYMNTYAETHTTDECKKHFDSLVVKPARRTYTFHKEWRICPFHIGDKVRYEKKNKIKGNTKVDTFICEGIYFSKDENKAKVEHNKTKSKKMKFCRAIESGCIPYIDYIKLALI

SEQ ID NO: 16968 - protein, 298 aa, unidentified
IQEHITAIRRDCGILPVSKVVVETAEFDLQLLKAIEEGKPVPQGEDYQKGEMYGHYNVRQYVLWRDDYTCQCCGAHATKKKEVRLHVHHLESRKVGGDAPDNQVTLCESCHEKLHKGLIAEKDFKKRKRKSTRDATFMGIMRKTLMQRLCSELPIPVVKTRGYITKATREKLLVLPKSHTNDALAIAQGKRGFNVGYLPEIAQIDKIYTIRPVRHHNRQLHKATILKGGIRKSNQAEKYVFGYRLFDKVQFNGQDCFIWGRRTTGIFTIKTINGKMIKDGISFKKLKPVEKSTSYLIA

SEQ ID NO: 16969 - protein, 499 aa, unidentified
MRYVYVLDVDGKPLMPTCRFGKVRRMLKSGQAKAVDTLPFTIQLTYKPRTRILQPVTLGQDPGRTNIGMAAVRFDGKELGRFHCLTRNKEIPKLMADRMAARKASRRGERLARKRLARKLHTTAKHLEGRMLPGCSEPIAVKDIINTESRFNNRLRPEGWLTPTATQLLRTHINLFRKLSGILPVTDVAVELNKFAFIQLDNPEMKKREIDFCHGPLCGTGGLEAAVKEQQDGKCLLCGKESIGHYHHIVPRSRRGSNTIANIAGLCPKCHELVHKDADTAERLTEMKTGLTKKYGGTSVLNQIIPKLVETLADLFPGHFHVTNGWNTKEFREKHHLEKDHDVDAYCIACSHLKPEETLVETEPFEILQFRKHNRAIIHHQTERTYKLDGVTVAKNRKKRMEQKTDSLEDWYVDMAKEHGKTQADAMRSRLAVIKSTRYYNTPERMMPGTVFLYEGKRYVMTGQITNGKYYRAYDQEKRNFPAVKVRILTKNTGLVFVA

SEQ ID NO: 16970 - protein, 515 aa, unidentified
MSTVYVLNKDGKPLMPTTRCWHVRRLLKEQKARVVTSKPFTIQLLYETDDVAQPLYLGIDTGRTNIGVAVVRTDGTAVFTAHLETRNKEIPKLMQERKKARRARRTNGRRCRRQRRAKANGTISKKCVKQDTAQNGSVSKRAKKIGVIKRHLPGCEKEVLCIGIKNKEAKFSNRTRPEGWLTPTANQLLQTHINLVKKIQKFLPISDVVLEINKFAFMRLDNPNVQKWQYQQGPLYQNASLEEAVSEMQEHHCLFCKKPIAHYHHVVPQSENGSNTIGNIVGLCTKHHDLVHKDTAWQKKLAKKKTGLNKKYGALSVLNQIIPALTKELSSLFPKHFFATNGKSTYDYRAAHGVSKDHWLDAYCIACSVLPNDVCDSNINSRVPYELKQFRRHDKRALHKANMNRVYTLDGKKVATNRHKAIKQTTDSLEEFRQRQPDDVCKLKVKEHHPEYRNPERNFPGCVFLVGKHTHVMQGTSGSHNGQADGYYDTNGNSYSSGKCKFVAKNKGIDFCINW

SEQ ID NO: 16971 - protein, 420 aa, unidentified; identical to SEQ ID NO: 7078

SEQ ID NO: 16972 - protein, 462 aa, unidentified
MSVLVIGRNGRALMPTTPRKARILLKKETVSVVCRHPFTIQLLYKTGCATQEGSIGIDTGSQHIGVGITCGDRVILKDEHELRSSMEKRSLLATRAAMRRGRRYRKVRYRKPKWRHHTKRMYFEKPNRRGRHWRKVKTTTQSPRPKGWLPPSLQSKCDHHFRIIDRYLKYLPDPITRNLVIETGRFDMARMNDPTIHGEMYQRGPMYDAENLKAYIFARDNYQCACCKAKAGTTRKTDGTTVKLVAHHILFRSRGATDNPKYMISVCDHCHTTKAHQPGGVLYSWMENNKKVTRGLRDAAFMNILRQRLFTRYPQAAFTYGNITAAGRKQLRLPKSHANDAVAISLFGKEVTAVRDTCQTVHYKQVRKSKRSLHEAIPRKGRKNPNTKAVRNKKNTTQVNGFKLWDSVLADGKKLFICSFTGTSAYLVDKNGCYVSQPGKTYKQWPLSKLKRLHPNGNWLMA

SEQ ID NO: 16973 - protein, 570 aa, Streptomyces sp.; identical to SEQ ID NO: 3191

SEQ ID NO: 16974 - protein, 425 aa, unidentified
MSNYVLVIDAKNQPLSPCHSSVARKLLNQNKATVFLRYPFTIILKRAVEHSQIEPVELKLDPGSKTTGIALVQGNKVIWGAELTHRGQAIKASLESRRSLRRCRRNRQTRYRQARFLNRKRSEGWLAPSLQHRVETTLTWVKRLMRSAPISSIAQELVRFDLQKLENPEISGIEYQQGELQGYEVREYLLNKWDRKCAYCQAENVPLQIEHIHPKSKGGSDRISNLCLACEKCNLKKGTQDIEKFLVKQPDVLKRILAQSKRPLKDATAVNTTRWSLFNQLKETGLPVSTGSGGLTKFNRTRLNLPKTHWLDAACVGKVESLKILTRQPLLIEATGHGSRQMCRTDKWGFPSRYVPRFKFVKGFQTGDIVKAVVTKGKKIGTYIGRVAVRSSGSFNITSKGVIVQGISYKYCTIIHRKDGYLYAT

SEQ ID NO: 16975 - protein, 453 aa, Solobacterium sp.; identical to SEQ ID NO: 12809
  source 1..453: note = isolate UBA2881

SEQ ID NO: 16976 - protein, 470 aa, Rhodanobacter sp.; identical to SEQ ID NO: 3168

SEQ ID NO: 16977 - protein, 412 aa, unidentified; identical to SEQ ID NO: 3155

SEQ ID NO: 16978 - protein, 443 aa, Tepidimonas sp.; identical to SEQ ID NO: 15842

SEQ ID NO: 16979 - protein, 428 aa, unidentified; identical to SEQ ID NO: 5036

SEQ ID NO: 16980 - protein, 418 aa, unidentified; identical to SEQ ID NO: 4950

SEQ ID NO: 16981 - protein, 420 aa, unidentified
MVYVLDKNGHPLMPTCRHGKIKHLLKDGKAKVVKRCPFTIKLLYESTNHTQNLTLGIDTGSGTVGTAVSKDNGDIIYISEVVVRNDITDKMTRRSKYRRNRRNRKTRYRKARWLNRKNSIKTDRFSPTMTSKFHSHIKEIEYIKSILPITTMVFETGQFDTHLMKNPSLAAPDIKHWGYQKGSNYGFENTKAMVLNRDGYTCQYCKGKHKDSKLEVHHIVFRSKGGSDEESNLITLCHTCHKDLHSGKIHPDFKGETKGTLKYATQMNSIRKQLFRSYPEAVETFGYVTKTNRLSLGVEKEHYYDACTIATQGNPFVVRTNLYKKKCVSDGDFQKTKGIRSEQPIVTDKICGFRKFDKVQYFGKEYFIKGRMSTGYAFLMDIDGNKADFSAMPKRCKTPKLSNCKRLTARSTQMVLAVAV

SEQ ID NO: 16982 - protein, 451 aa, unidentified
MSVAVISKTGERLMPTSEYRARKLLKSGKAIKYSYHPFTIQLTERKTGNIQPIELCMDTGYIHIGISVKSEKHEYLTEQIDTLTDERSRHNARRMYRSQRRNRKRYRQPRFNNRKKDKGRIAPSLEHKKNIHVQTISRINNVMPLTDITMEMGNFDTQVLKAKEEGRPLPQGVDYQHGERYSIATLREAVFARDGYKCQCCGRTIKDGAILHVHHIKYRSQGGTNSISNLATVCDKCHTPKNHKPGGKLYGWKPKLPSFKGATFMTTIRWQLYNEAKALFPDIDIHITYGAATKERRRELNIDKSHINDAFVMGQFHPRHRIKAVLYKKKRRNNRCLEKFYDAKYIDSRDGKKRSGQELFNGRINRNHKKDSENLHQYRLQKVTAGKRTVRKQHYSVQPHDIIIYESRKRETTGCHCNGARVMLLPDKKSVSIKKIKIYRYAGGYFKSTFN

SEQ ID NO: 16983 - protein, 431 aa, unidentified; identical to SEQ ID NO: 6230

SEQ ID NO: 16984 - protein, 442 aa, Ktedonobacter sp.
MSKVLLLDMTKQPLDPVHPGRARLLLKEGKAAVYRRYPFTLILKTQVDSPAVSALRLKLDPGAKTSGLALVDDASGEVVWAAELGHRGASIKKRIDARRGVRRKRRSRFTRYRKPRFHNRKSSRRKGRLPPSLESRVANMLTWVGRLRRLCPIEVISMELVKFDMQAMQNPEITGAQYQQGERMGYETREYLLAKWGRRCAYCGAEDVPLEIEHILCRARGGTHRVSNLTLACEPCNVKKGTQLIEDFLNKKPDVLARILAQAKTPLKAAAAVNATRWHLFERLKATGLPLETSSGGLTKYNRAKRHLPKTHWLDAACVGQSTPKPLETSQVVPLLIEATGHGNRQMCGVDEHGFPIRHRQRKKVHFGYQTGDLVRAVVPTGARAGTHVGRVLARASGSFDLRTKAGRQAGISYRYCRPIHRNDGYRYQQGGRHAVPATQST

SEQ ID NO: 16985 - protein, 453 aa, unidentified; identical to SEQ ID NO: 7420

SEQ ID NO: 16986 - protein, 433 aa, unidentified
MVYVLSIEGKPLMPTNRRGKIRRLLKEGKAKVVKVKPFTIQLLYQTKEYTQPITLGIDSGYTYIGFSAITEKRELISGEVNLRNDVSELIKEKHMYRRIRRNRLRYRKPRFNNRKRKEGWLAPSIQHKLDSHVRFIQKLKTILPITNIIVEVANFDTQKIKNPNIGGIEYQQGEQKGFWNIREYVLYRDNYICQLCGKQGIPLEVHHIGYWIPDRTDRPDNLITLCIKCHTPKNHQEGGKLWGMKPKSKPLKEATFMSTVRWKLVNTLSCKHTYGYITKSKRIILGLEKTHYNDAFCIAGGTNQERITPIMFEQIKRNNRSLEKFYDAKYVDIRTGKILSGQELFSGRRCRNKNLNSENLHKYRGHKQSKGRRSIRTQRYFYQPKDIVTYDRKQYIVKGIQSKGSYIKLEGLSKPVKVELVKPYIFRKGICTI

SEQ ID NO: 16987 - protein, 431 aa, unidentified; identical to SEQ ID NO: 2952

SEQ ID NO: 16988 - protein, 408 aa, unidentified; identical to SEQ ID NO: 8232

SEQ ID NO: 16989 - protein, 442 aa, unidentified; identical to SEQ ID NO: 3791

SEQ ID NO: 16990 - protein, 470 aa, unidentified; identical to SEQ ID NO: 2925

SEQ ID NO: 16991 - protein, 427 aa, Enterococcus sp.; identical to SEQ ID NO: 5630

SEQ ID NO: 16992 - protein, 424 aa, Oscillatoria sp.; identical to SEQ ID NO: 13249

SEQ ID NO: 16993 - protein, 420 aa, unidentified
MQYVYVLNKHGEPLMPCSPGKARILLKQQKACVVKRTPFTIKLLYGSAGYKQPITLGVDAGSKHVGLSASTEKRELYSEEFTPRNDVVELLSTRRQNRRSRRNRKTRYRAPRFNNRIHSKHKGWLAPSVEVKIQEHITVIKRICRILPITLVRVETAEFDTQHLKAMLSGKPLPVGTDYQLGEMYDEYNARQYVLRRDNYTCQRCGAHTTKKKTVKLHVHHLESRKTGGNAPSNLITLCVDCHKAFHAGKVKLDGKKRGKSLKDAAFMGAMRNTLLTRLRNELNIPVQNTYGYITKLLREQNDIKKSHVNDARCISKHPLAEPCSVCYRTKAIRHHNRQTHKANFSKKGIRKRSQIPYLVEGFRLWDKVLYKGQECFVSGRRASGSFTLKRLDGTRISKGVTFKKLRLLEPATNYLIERM

SEQ ID NO: 16994 - protein, 431 aa, unidentified; identical to SEQ ID NO: 13432

SEQ ID NO: 16995 - protein, 461 aa, unidentified
VQPLYLGIDPGRSNIGVAVVKTDGMAVFTAHLETRNKEIPKLMKKRKDSRRARRTNGRRCRRQRRAKANGTISKKCVKQTTAQNGSVSKRAKEIGVIKRHLPGCEKDVLCIGIKNKEAKFNNRTRPTGWLTPTANQLLQTHINLVKKIQKFLPISDVVLEVNKFAFMQLDNPNIQKWQYQKGPLYQKESLKSAVSEMQEHHCLFCKKKIDHYHHVVPQHKNGSNTIDNIVGLCTQHHDLVHKDATWQKRLAKKKTGLNKKYGALSVLNQIIPALTKELSSLFPKHFFVTNGKSTYDYRAAHGVSKDHWLDAYCIACSVLPNDTCDKTINSRVPYELKQFRRHDRRALNNENMSRVYTFNGKMVATNRHKATEQTTDSLEEFRQRQPNDVCNLKVKEHHPTYRNMSRNYPGSIFLVEKQVHIMQGIAGSKDGKATTYKDTNANSIAAGKCKFVAKNSGILFV

SEQ ID NO: 16996 - protein, 406 aa, unidentified; identical to SEQ ID NO: 15669

SEQ ID NO: 16997 - protein, 470 aa, unidentified
MSVFVVGLNGCRLMPTSERKARLLLKHGKASVYRKVPFTIKLNYKTGSTTQSGYLGIDTGSQHIGVSVVREDGAVLHKEEIGLRDSMSKRKLMQSRASSRRGRRHRKTRYRHPKWRPKAKRVYCEIPDRKGRHWKKKEITFASKRPKGWLPPSLQSKTDHHIRWIKKLQELLPEEYRLSIELGRFDPARLKDPEIHGELYQKGPQYDYENVRAYVLNRDRYTCQVCGKKGGKLHVHHILYRSHGATDDPQYMATVCSDCHNTENHQQGGILYQWMQKQKKFTRGLRDATFMNILRKRLIEAFPGATFTYGNITKADRERLRLPKSHGNDATAIAIVKTGIMTVKDKEPVIYIQQVRRKKRSLHEETPRKGRKEPNRTASRYDKNTKAVTVTKRKNKKKITITGCLFDRVELNGKKGWISGFTDKSCYVKDVNDQYIRTSPKYKQVSLSKLKILHHCGNWAIGARQSLGKG

SEQ ID NO: 16998 - protein, 415 aa, unidentified
MVYVVANDGQPLMPTERHGKVCRMLKSGIAKVVKKCPFTIQLQYESERNVQPVALGIDAGSKHVGVSATTKAKVLYESDVELRDDIVKLLATRRQLRRRRRSRKTRYRPARFDNRRRKEGWLAPSIRQKIESHLTVVANVCKILPVSQIIVETASFDIQKIKNPDIQGIEYQQGEQMDFWNIREYVLFRDGHICQCCKGRSKDKILNVHHIESRKTGGNAPNNLITLCETCHKGYHNGTVILPKNIKHGMQFKDAAFMGIMRWTFYNTLKEQYEPDIPVSMTYGYLTKNTRIEHGLPKEHYIDARCISGNPDAVSDGTYYYQKKVRCHNRQIHKQTILKGGIRKSNQAEYLVKGYRLFDKVRYQGREYFIFGRRKSGFFDIRTLSGEKVNKGSINVKRLTFVDTRKNYLTERRTV

SEQ ID NO: 16999 - protein, 415 aa, unidentified; identical to SEQ ID NO: 4916

SEQ ID NO: 17000 - protein, 413 aa, unidentified
MTSYAFVLDANGKQLAPTKEPKAWFLIRKKRAALVSKYPMVIQLKKEIPEKEICQDEIRCGIDDGGLHVGIALVQKCKTRNKVVFKGIIEQRNDVKHLMEVRRGYRRYHRYHKRYRQARFDNRKSSKREGRIAPSILQKRQATIRVIHWLNKWINITNYWLEDVSVDIRALTDGYQSYRWQYKKSNRLDENIRKAAILRDDGKCMECGKSNCRLEVHHIKPKRRNGSNTLDNLITLCESCHQKTEGQEELYMDRYFSLLKSSDNKNLNDAQHVMIGKMWLRKQLSGLGVLYLTSGGDTANKRIDWNIEKSHTNDAVCITDLQPDTCDIKEWAIKPMRRQSKAKTDHVLGIHHRDLVEYTFKNGETHRGYVTALYPEQKAINFQSQTKHCKKVNARKCKLLWNYSKIYWFENAS

SEQ ID NO: 17001 - protein, 518 aa, unidentified; identical to SEQ ID NO: 9967

SEQ ID NO: 17002 - protein, 414 aa, unidentified; identical to SEQ ID NO: 2588

SEQ ID NO: 17003 - protein, 415 aa, unidentified
MKMIYTRSKENKALMPTERGGRIGYLLRHGKAHVVSRVPFVVQLDYESPTYTQAISLGIDTGSKHIGVSASNEKKELFAAQVELRSDVTKLLSDRRELRRTRRYRKTRYRKPRFDNRRKKVGWLAPSVEQKVGSHLKVIRLVRGLLPLSRITIEVVQFDIQKIKSPNIEGEEYQQGEQSGFWNVREYVLARDGHRCVHCKGKSKDPILNVHHLESRKTGGNSPSNLVTLCESCHKAYHRGEFELKIKCGRPFRDASVMSIMRWAVYERARSEFGNINLTYGYATKHTRIENGIAKTHAADAFCIARNVHARRSDFFFLCRCVPRHTRALHVANPKKGGLRRSTIAPHKVGGSRFQRFDMVRWKGKDCFIFGSTNGRPVLRNCSGDKIHETSSVNIKNVKFIKRLRNNILIEIKYL

SEQ ID NO: 17004 - protein, 419 aa, unidentified; identical to SEQ ID NO: 3867

SEQ ID NO: 17005 - protein, 489 aa, unidentified
MLLQFQPLEAPVADTLQGKDETNRSGMPLINTVEESRRGTSTSARHQPRKGFRKEGTDVVFVLDKHKRPLMPCTEKRARLLLRQARAVVHRRAPFTIRLKDRSVADSALQPVVLKLDPGSKTTGVALARAADTPDGSVHHALHLAEITHKGALIAERMRKRAQARQRRRTANLRYRAPRFDNRRRSAGWLTPSMRSRLDNLLTWARRYGRWAPIHSIELEHVRFDTQLLQNPEISGAAYQRGDLYDYELWHYLLEKWGRACVYCGATNLPLERDHIIPRSRGGSDRASNLTVACRRCNQDKGDRTASEYGYPEVQARARVPLADVAAVNTLRWALRNRLQALGITVGCWSGGRTHWNRVRFGLPKTHAIDALCVGQLVGVRGDDVPVLGVRAMGRGAYCRTRYTRYGFPRGYLLRQKHVHGFATGDLVRAELPAGKHAGVHIGRVAVRASGSFRVGTVDGISWRHCRLLQRADGYEYAWKGGVALPPQP

SEQ ID NO: 17006 - protein, 429 aa, unidentified
MIFVIDSNKKTLDMCHPAKARKLLRDGKAAIYRKEPFTIILKKEIKNDVEKDYRLKIDYGSRHTGLAILKGEKVCWLGQIEHRTDIKELLDKRRGYRRRRRNTNLRYRKARFLYRIKPRGWLSPSLMSRVNNIKTFVRRLVRILPLGAISYENVKFDTQKLQNPDISGIEYQQGTLAGYEVREYLSERFEHKCCYCGISEGEGRKFEVEHIIPKSRGGSNRINNLAWSCHDCNKEKGNRTAEEYGHPEVQAQVQRSLKDAALVTATRWKVLNVLKSFELPVECGTGGLTRYNRTQRNIPKDHYFDACCVGVSTPQELRFSTNIVHIITAIGRGKHCRTNVNAFGFPRGYLARQKKFFGFQTGDIVKAVVIRGKKIGTYFGKVLCRKTGSFDIRTKTGRVQGIGYRYFRLIQHLDGYSYDRKQCRIPPHV

SEQ ID NO: 17007 - protein, 396 aa, unidentified
VVRRTPFTIQLTIATGESKQPVSLGVDAGYKHVGLSASTEKAELYASEVELRKDITDLLSARRALRQSRRNRKTRYRAPRFDNRIRTKRKGWLAPSVENRINAHLSRIEAVLRLLPITKITVETASFDMQRLKNPDISGKEYQEGEQLGFWNIREYVLCRDGHVCQHCYGRSKDPVLNVHHLESRRTGGDSPGNLITLCETCHKALHRGEITLKPKRGQSFRAEAFMGIMRWEVLGRLKASHPELEVNNTYGYRTKHARIANDIAKSHCADAFCIAGNLGAERLGEFFFQKQTRRNNRQIHKLSILKGGIRKRNQAPYEIKGFRLFDKVACQGEEGFIFGRRSSGFFDVRKVDGTRISAGISYKKLHLLEKRRTYLTEIRKEEALPPLPEGRGLRA

SEQ ID NO: 17008 - protein, 429 aa, Parasutterella sp.; identical to SEQ ID NO: 3656

SEQ ID NO: 17009 - protein, 457 aa, unidentified; identical to SEQ ID NO: 3236

SEQ ID NO: 17010 - protein, 465 aa, unidentified; identical to SEQ ID NO: 6446

SEQ ID NO: 17011 - protein, 466 aa, unidentified
LSIKPLINIGEGVIYSSICTGLSLQTYQKRKEVPYMVYVLDIDGQPLMPTTRHGKVRRLLNNHLAKVVKRCPFTIQLLYQSTKETQPVSLGVDAGSKHIGMAATTEKKVVYQEELSPRNDVVKLLSARRTLRRTRRNRKTRYRKPRFNNRAHSKHKGWLAPSVEVKIQEHITAIKRICQILPISEIHVETAEFDLQRLKAMDEGSPLPVGIDYQLGEQYDFYNTRQYVLHRDGYTCQCCGTHDNNIKLHVHHIESRQTGGDAPNNLIILCEHCHKALHEGKLELPKGKKRGKSYRDATFMGVMRKTLLERLKKEIDVPVEGTYGYITKYWRERAGLEKSHIHDAVCISKYPYAKPLDIYYLTKTVRHHNRQIHKSNFSKGGIRKRNQAPYLVKGFRLFDKVLYQGKEYFIFGRRATGYFDIRTLDGTKVNKGSISYKKLRIQDTAKAYLKEARAIPHMNKFTCVLA

SEQ ID NO: 17012 - protein, 443 aa, Anoxybacillus sp.; identical to SEQ ID NO: 5909

SEQ ID NO: 17013 - protein, 430 aa, unidentified; identical to SEQ ID NO: 6608

SEQ ID NO: 17014 - protein, 470 aa, unidentified; identical to SEQ ID NO: 2825

SEQ ID NO: 17015 - protein, 451 aa, unidentified
VSANQETMLMFCIDNRETHIPSMTLARRKMLRKEGYPEMENIKKEYCFVVDKNNHPLAPTKMNKGWYLIRKNKAKLKSMYPMVIQLKKEIKFNKNDKSYMVCGIDDGSLHVGLAIVQKCPTKNKIIFKGTIEQRQDVKHKMDTRRGYRRYHRYHKRYRPARFNNRISSKRIGRLAPSIKQKKDAILRVLYQLNKWINIKEYYLEDVCIDIRAMTDDYKPYKWQYQKSNRLDENLRKAAIIRDNYKCQECGKSNCKLEIHHIRARKYSGADTIGNLITLCSKCHQKTEGKEQDFEDKYFKIIDSKPKRFDYAMHVMQGKNYLRNKISELGLLHLTNGGETANKRIEWNIEKSHSNDAICIADGIPDTCNIKEWIIKPMRRKSKAKTDNVLGIKHRDLVSYTYKNGETHAGYVTALYPKQLALNFQSRIKHCKKVNARKCRLLWQFNKIYWLE

SEQ ID NO: 17016 - protein, 425 aa, unidentified; identical to SEQ ID NO: 13021

SEQ ID NO: 17017 - protein, 409 aa, Desulfosporosinus sp.; identical to SEQ ID NO: 2993
  source 1..409: note = isolate UBA5179

SEQ ID NO: 17018 - protein, 422 aa, unidentified
LNKRGKPLMPCSPAKARLLLKEKKAIVVRRTPFTIQLTIATGESKQPVSLGVDAGYKHVGLSASTEKAELYASEVELRKDITDLLSARRALRQSRRNRKTRYRAPRFDNRIRTKRKGWLAPSVENRINAHLSRIEAVLRLLPITKITVETASFDMQRLKNPDISGKEYQEGEQLGFWNVREYVLFRDGHVCRHCHGRSKDPVLNVHHLESRRTGSDSPDNLITLCETCHKALHRGEITLKAKRGQSFRAQAFMGIMRREVLNLLKASYPELKVHETYGYLTKHARIANGIVKSHGADAFCIAGNLGAERLGEFFFQKQTRRNNRQIHKLSILKGGIRKRNQAPFETKGFRLFDKVACQGEEGFIFGRRSSGSFDVRKLDGTRISAGISCKKLRLLEKRRTYLTEIRKEEALPPLPEGRGLRA

SEQ ID NO: 17019 - protein, 442 aa, unidentified
MGEGLQPTERSRRQNLRVFVLNKRGQPLMPCSPAKARLLLKEKKAVVRHRTPFTIQLTQATGETVQPVTLGVDAGSKFIGLSASTEKAEHYASEAELRTEVVDLLSSRREMRRARRNRKTRYRAPRFDNRIHSKNKGWLTPSVENKINTHLSCVDNVRKCLPVTKIVVETAAFDIQKIKNPDIEGTDYQQGDQLGFWNVREYVLCRDGHQCCHCHGKSKDPILNVHHLESRKTGGNAPNNLITLCETCHKAYHDGKITLKQKRGQVFRDAAFMGIMRWTFFNRLKAQCPEIEVRNTYGYLTKNTRIRHGLEKSHHTDAFCIAGNLEAKRLGVYFFQKQTRKHNRQIHKMSILKGGVRKLQQAPYEVKGFRLFDKVRYDGREAFIFGRRSSGYFDIRLLTGEKVSAGVSYKKLVLLEKRKTFLTQLIKENAIPPATEVVGFLA

SEQ ID NO: 17020 - protein, 414 aa, unidentified; identical to SEQ ID NO: 2588

SEQ ID NO: 17021 - protein, 431 aa, Microcoleus sp.
MSNFVFVLDTNKQPLDPVTSGLARRMLTQGKAAVYKRYPFTIILKYSCDKPQTKSHEIKIDPGSKTTGLALLQGDEVIWAAELAHRGNHITGDLASRSAIRRNRRNRKTRYRQPRFLNRTRTPGWLPPSLASRVSNIVTWVNRLRRYVPVTAISQELVKFDTQAMLAPEISGIEYTQGELAGYEIRQYLLEKWGRKCAYCGVENTPLEVEHIHPKSKGGSSRVSNLTLACRNCNLAKCNRDIKDFLSEKPDILSRVLKFACLPLKDAAVVNSTRWSLFEKLQQTGLPVTTGTGGRTQYNRTRMGLPKSHWLDAACVGEVEQLVILTRQPLLITAKGWGNRQMCTPNKYGFPNKHRTRCKTFFGFQTGDMVRAVLPSGKFAGTHVGRLAVRESGVFDLRTAWGKISPMRHKYCKTVHRNDGYMYGFSTLVRY

SEQ ID NO: 17022 - protein, 413 aa, unidentified
MTSYSFVLDANGKQLAPTKEQKAWFFIRKKRASLVSKYPIVIQLMKEIPEKEICQDEIRCGIDDGGLHVGIALVQKCKTKNKVVFKGTMEQRNDVKHLMEVRRGYRRYHRYHKRYRQARFDNRKSSKREGRIAPSILQKRQATIRVIHWLNKWINITNYWLEDVSVDIRALTDGYQSYRWQYQKSNRLDENIRKAAILRDGGKCMECGKSNCRLEVHHIKPRRRNGSNTLDNLITLCESCHQKTEGQEELYMDRYFSLLKSSDNKNLNYAQHVMIGKMWLRKQLSGLGVLYLTSGGDTANKRIDWNIEKSHANDAVCITDLRPDTCDVKEWTMKPMRRQSKAKTDHVLGIHHRDLVEYTFKNGETHRGYVTALYPEQKAINFQSPTKHCKKVNARKCKLLWKYSKIYWFENAS

SEQ ID NO: 17023 - protein, 414 aa, unidentified
MPCSPAKARLLLKEKKAIVKRRTPFTIQLTIATGESKQPVTLGVDAGYKHVGLSASTEKAELYASEVELRQDITDLLSARRALRQSRRNRKTRYRAPRFDNRISTKRKGWLAPSVENRINAHLSRIEAVLRLLPVTKITVETASFDLQLLKNPDISGKEYQEGEQLGFWNIREYVLCRDGHVCQHCYGRSKDPVLNVHHLESRRTGGDSPGNLITLCETCHKALHRGEITLKAKRGQSFRAEAFMGIMRWEVLGRLKASHPELEVNNTYGYRTKHARIANDIAKSHCADAFCIAGNLGAERLGEFFFQKQTRRNNRQIHKLSILKGGIRKRNQAPFEVKGFRLFDKVACKGEEGFIFGRRSSEYFDVRKLDGTRISAGISYKKLHLLEKRRTYLTEIRKEEALPPLPEGRGLRA

SEQ ID NO: 17024 - protein, 391 aa, unidentified
YIGISAKSKSREYVSTQYDTLQDEKEHHDDCRKMRRSRRNRLRYRKPRFDNRKRDEGWLAPSLEHKKQLNISLIERYVSVIPITHATVEVGSFDTMLLQSIQKGEAKPEGADYQKGPRYNLATLREAVFYRDNYTCQVCKRKITDGAILHMHHMFYWKGRHGYQLDELVTVCEKCHTPANHQKGGKLYGFGKDKKFANLSGAAFMNAVRWQIVNALYATYGKEFVTITYGAMTKEKRIALQLEKTHNNDAYAMGDYHPARRCKFRHYQKRRRNNRVLEKFYDATYVDTRTGNKAKGKELFNGRISRNHKKDCENLHKYRSKKVSKGRRSIRRQHYAIQPYDTVRFEGKTYITSGCHNKGTRLLIPVNGKSKSVAISKVQVVCHAGAWIQII

SEQ ID NO: 17025 - protein, 428 aa, unidentified; identical to SEQ ID NO: 5036

SEQ ID NO: 17026 - protein, 413 aa, unidentified; identical to SEQ ID NO: 3220

SEQ ID NO: 17027 - protein, 442 aa, unidentified; identical to SEQ ID NO: 3791

SEQ ID NO: 17028 - protein, 424 aa, unidentified; identical to SEQ ID NO: 3232

SEQ ID NO: 17029 - protein, 431 aa, unidentified
MPNKVYVINKHGRPLMPCSPAKARHLLDEGKAKIKKRTPFTIQLVYGSSGYTQEVILGVDAGSKTIGVSALTKKEELFAANVIPRNDVVDLLSTRREFRRARRNCKTRYRKPRFDNRVRSKHKGWLAPSVEVKIQEHITSIKMVCRILPVSKVVIETAEFDLQLLKAIADGKPVPQGEDYQKGEMYGHYNVRQYVLWRDDYTCQCCGAHATKKKEVWLHVHHLESRKVGGDAPDNQVTLCESCHEKLHKGLITEGDFKKRKRRSTRDATFMGIMRKTLMQRLCSELPIPVVETRGYITKATREKLLVLPKSHTNDALAIAQGKRGFNVGYLPGIIQTDKIYTIRPVRHHNRQLHKAAILKGGIRKSNQVGKYVFGYRLFDKVQFNGQDCFIWGRRTTGIFTIKTINGKMIKDGISFKKLKPVEKSTSYLIA

SEQ ID NO: 17030 - protein, 419 aa, Moorena sp.
MQNYVFVVDTNKRPLNPISPKKARRLLGKSKAAVFRMYPFTIILKTAVDNPTISPCQIKIDPGSKVTGFALVQNNQVIWGMELEHRGGLIKKKLESRRAVRRGRRSRHTRYRKPRFLNRKRPESWLPPSLEHRIMTIETWVKRLIKFCPVNEIWVERVKFDTQKMPNPEINGVEYQQGDLVGYEVREYLLEKWGRECTYCGKQSVPLQIEHIHPKSKGGSDRVSNLCLACEKCNQRKGNKPIEEFLKKKPSLLQKIKSKAKQPLRDAAAVNATRNKLVKVLLRIKSVVTGTGAQTKYNRTKLGFPKEHWIDAACVGDIETLILRTSQPLLVTCKGQGSRQKAALNKYGYPIRHNPLKPIKGWVTGDIAKHQELGIGKVTPRSKGSFGFTPLGMKGYKSCKPQDISAIHRKDGYIYSFYK

SEQ ID NO: 17031 - protein, 396 aa, unidentified
VVRRTPFTIQLTIATGEAKQPVSLGIDAGYKHVGLSASTEKAELYASEVELRQDITDLLSARRALRQSRRSRNTRYRAPRFDNRIRTKRKGWLAPTVENRINVHLSRIETVLRLLPVTKITVETASFDTQLLKNPDIAGKEYQEGEQLGFWNVREYVLFRDGHVCQHCHGRSKDPVLNVHHLESRRTGGDSPGNLITLCETCHKALHRGEIKLKAKRGRSFRAETFMGIMRWGVLNRLKASHPKLEVHNTYGYRTKHARISNGIAKSHCADAFCIAGNLGAERLGEFFFQKQTRRNNRQIHKLSILKGGIRKRNQAPFEVKGFRLFDKVACQGEEGFIFGRRSTGYFDVRKLDGTCISAGISYKKLHLLEKRRTYLTEIRKEEALPPPPEGRGLRA

SEQ ID NO: 17032 - protein, 366 aa, unidentified
KHVGLSASTEKAELYASEIELRQDITDLLSARRALRQSRRNRKTRYRAPRFDNRIRTKRKGWLAPSVENRINAHLSRIEAVLRLLPVTKITVETASFDLQLLKNPDISGKEYQEGEQLGFWNIREYVLCRDGHVCQHCYGRSKDPVLNVHHLESRRTGGDSPGNLITLCETCHKALHRGEITLKAKRGQSFRAEAFMGIMRSEVLNRLKASHPELEVNNTYGYRTKHARIANDIAKSHCADAFCIAGNLGAERLGEFLFQKQTRRNNRQIHKLSILKGGIRKRNQVPFEVKGFRLFDKVACKGEEGFIFGRRSSGFFDVRKLDGTRISAGISYKKLRLLEKRQTYLTEIRKEEALPPLPEGRGLRA

SEQ ID NO: 17033 - protein, 456 aa, unidentified
MAIFVLDKKKQPLMPCSEKRARLLLARGRAVVHKRYPFTIRCKDRVGGETQPLRLGIDPGSKTTGLALMREPDSQQRHVLCLFELIHRGFQIKKALQQRAAFRRRRRSANLRYRAPRFNNRIKPKGWLAPSLQHRVDTVTAWVNRLSRLAPVTAISQELVRFDTQKLDNPEISGVEYQQGTLLGYEVREYLLEKWGRECAYCGTTDTPLEIEHVVPRSRGGSNRVSNLTLSCHPCNAEKDSQTLTDFFATNKGLKKRLKANGHAADARLDRVQRQLKQPMRDASAVNATRWALFSALKTTDLPVAVSSGGRTKYNRQRLNIPKTHALDAACVGAFEKLHDWTVPTLTIKAMGRGSYQRTRLTKHGFPRGFLMRQKQVHGFQTGDMVRAIVPTGKKAGTHTGRVAIRKTGSFNIQAEYGAVQGISHKYCTLIQRSDGYGYYVTLFSNLTGGAGQAVA

SEQ ID NO: 17034 - protein, 456 aa, unidentified; identical to SEQ ID NO: 9766

SEQ ID NO: 17035 - protein, 430 aa, Nostoc sp.; identical to SEQ ID NO: 7739

SEQ ID NO: 17036 - protein, 295 aa, unidentified
MRLDNPNIQKWQYQQGPLHQKASLEEAVSEMQEHHCLFCKNTIDHYHHVVPQHKNGSNTIDNIVGLCTKHHDLVHKETEWQEKLAKKKTGLNKKYGALSVLNQIIPALTKELSSLFPKHFFVTTGKSTYDYRAAHGISKDHWLDAYCIAGSVLPNDVCDNSINNRIPYELKQFRRHDRRASHKENVNRVYTLNGKKVATNRHKAIEQTADSLEEFRQRQPNDVYKLKVKEHHPEYRNPKRNFPGCVFLVGKHTHVMQGTSGSHNGKADGYYDTNGNSYSSGKCKFVVKNKGIVFA

SEQ ID NO: 17037 - protein, 453 aa, unidentified
MLMAVAVVSRTGVPLMPTSPYRARKLLASGKAEKYGYDPFTIRLTERETGDTQPVELCMDTGYIHIGVSVKSEKHEYLALQIDTLTDEKKKHEKCREKRRNRRSRKRYRKPRFDNRKRDKGWLAPSLEHKKEIHVRAAERICRVVPVTDITMEMGNFDTQVLKAREEGRPLPQGTDYQQGERYGTATLREAVFSRDNYTCLCCGRTMKDGAYFHVHHIRYRSQGGTDRMANLATVCEKCHTPANHQPGGKLYNWKPEIKSFKGATFMTAVRWQMYREIKEKIPDISVHLTYGAATKERRRALDIEKSHVNDAFVMGRFHPGHRARPELYIKKRRNNRVLESFYDARYIDSRDGKRKSGKELFNGRISRNHKKDSENLHKYRLRKVSKGKRSIRKKHYPIQPHDILVYCGRKYETAGCHNLGTGAILLPERRSIAVSKLKIYRYSGGYYKAEFN

SEQ ID NO: 17038 - protein, 456 aa, unidentified; identical to SEQ ID NO: 15919

SEQ ID NO: 17039 - protein, 405 aa, unidentified
GRRCRRQRRAKANGTISKKCVKHDTAQNGSVSKRAKEIGVIKRHLPGCEKDVLCIGIKNKEAKFSNRTRPEGWLTPTANQLLQTHINLVKKIRKFLPISDAVLEINKFAFMQLNNPNIQKWQYQQGPLYQKANLEEAVSEMQEHHCLFCKKPIAHYHHVVPQSENGSDTIGNIVGLCTKHHDLVHKDTAWQKKLAKKKTGLNKKYGALSVLNQIIPALTKELSSLFPKHFFATNGKSTYDYRSAHGVSKDHWLDAYCIACSVLPNDVCDSGINNRVPYELKQFRRHDRRALNNENMSRVYTLNDNVVATNRHKATKQTTDSLEEFRQNHPDDVCKLKVKEHHPTYRNMNRNYPGSVFLIGKQVHVMQGIAGSKDGEATTYKDTNANSIAAGKCKFVAKNSGILFV

SEQ ID NO: 17040 - protein, 364 aa, unidentified
YKHVGLSASTEKAELYASEVELRQDITDLLSARRALRQSRRNRKTRYRAPRFDNRIRTKRKGWLAPSVENRINAHLSRIEAVLRLLPVTKITVETASFDLQLLKNPDISGKEYQEGEQLGFWNIREYVLCRDGHVCQHCYGRSKDPVLNVHHLESRRTGGDSPGNLITLCETCHKALHRGEITLKAKRGQSFRAEAFMGIMRWEVHSRLRALHPGIEVSNTYGYRTKHARIANGIAKSHCADAFAGNLGAERLCEFFFQKQTRRNNRQIHKLSILKGGIRKRNQAPFEIKGFRLFDKVVCKGEEGFIFGRRSSEYFDVRKLDGTRISAGISYKKLHLLEKRRTYLTEIQKEECPPLPEGRGLRA

SEQ ID NO: 17041 - protein, 416 aa, unidentified; identical to SEQ ID NO: 7050

SEQ ID NO: 17042 - protein, 415 aa, unidentified
MVYVLDKNGQPLMPTDRHRKVRLMLQSGQAKVIKRCPFTIQLNYDSGHQTQEISLGIDAGSKHIGVSATTKIKVLYEADVELRNDIVDLLSSRRELRRGRRNRKTRYRQAKFNNRRRGNGWLAPSIRQKIGTHLTVVENICKMLPISRIMVETASFDIQKIKNPDIQGAEYQQGDQLEFWNVREYVLFRDGHTCQCCKGKSKDKILNVHHIESRKTGGNAPNNLITLCETCHTGYYKGTVQLPKAIKRGMRFKDAAFMGIMRWAFYEALKQQYEPVALVHNTYGYITKHTRIEHNLPKEHYVDARCISGNPDAFPNGEYYYQKKVRCHNRQIHKLTVLKGGIRKQNQATYLVKGYRLFDKVSYQGKGYFVFGRRQSGFFDIRTLSGEKVNKGSLSCKKLKFIATRTYYLTERRAV

SEQ ID NO: 17043 - protein, 406 aa, unidentified; identical to SEQ ID NO: 3415

SEQ ID NO: 17044 - protein, 442 aa, unidentified
MSTSVFVLDKKHRPLMPCRPARARRLLRAGRARVVKRFPFVIRLVDRTVEQSEVQPVLIKLDPGSRETGAAVVRDDEKKRHHALAFFVIEHRGGAIRDALKARSAFRRRRRSQNLRCRSPRFLNRVKPKGWLPPSLRHRVETTLSFVRRMCRYLPVSGIATELVKFDSQKLQNPEVSGVKYQQGTLFEYEVREYLLEKFGRKCVYCGAEGVPLNIDHVVPRAKGGSNRVSNLVLACVSCNQKKGARSLEDFLKGKPEVLARVRRELKTPLRDAAAVNATRWVLFNELKATGLPVETGSGALTKFNRHAFGVEKEHWLDALCVGRLNGAVTRKGLNVLEIRCMGRGSRQRTRLTKYGFPRGYLMRQKCVHGFATGDMVEANVPKGKKAGLWRGRVAVRVSGSFNIQTPKGVIQGVGWKHCRLISHNDGYGYAWLGHAPHSSPA

SEQ ID NO: 17045 - protein, 470 aa, unidentified; identical to SEQ ID NO: 2825

SEQ ID NO: 17046 - protein, 442 aa, unidentified; identical to SEQ ID NO: 16306

SEQ ID NO: 17047 - protein, 515 aa, unidentified; identical to SEQ ID NO: 4372

SEQ ID NO: 17048 - protein, 322 aa, Lactobacillus sp.; identical to SEQ ID NO: 5618

SEQ ID NO: 17049 - protein, 455 aa, Streptomyces sp.
LATFRVGEKTHQAVLHQQLALELDPADNPRDRDETGAERREATGAEHVRGEIPAASPGSGGVTPNQPVGEEPRERHPFVFVLDKHGRPLQPCTPARARKLLKKGRAVVHRHTPFAIRLKDRTIAESEVDGVELGIDPGSKHTGIATFTAQAGERRGRYAVQLDHRGAVIRKKMGQRAAYRRRRRTSNLRYRAPRFNNRTRPDGWLAPSLQHRVTTTVSWVRRLARWAPVRAVHVERVAFDTHAISAGRPLEGAEYQHGTLHGTEIREYLLAKFGRACVYCGIAGVPLNIDHVHPRSRGGSDRISNLVIACIPCNESKSHRPVEEFVRDKSKLAKILAQAKAPLRDAAAVQSTRWALWRALDQMLPTHIASGGRTKWNRTRCGLPKSHTLDALNVGKLDTVTETANPILVAGCSGRGQHQRTSPDRHGFPRRTSPRIKTVHGYATGDLVTASVPKG

SEQ ID NO: 17050 - protein, 426 aa, Anoxybacillus sp.
MVFVLDTNKRPLAPCHEAVARKLLKQGKAAIYKRFPFTIILKKSVDESEIKATYRLKIDYGSRHTGLAILRGQEVLWLAQLDHRTDIKERLDKRRAFRRARRKRKTRYRKPRFLNRRRKDGWLPPSLESRVQNIQTWVERLRKICPIEHISYENAKFDTQLMRNPEINGVEYQQGTLQGYEVREYLLEKFGRKCCYCGKENVPLEVEHIIPKSRGGTDRVDNLCLACHDCNQRKGSKTAEEFGYPHIQKQVKESLKDTSAINSTRWKAYEVLKQTGLDVECGTGARTKMNRIRLDLPKTHYFDACCVGESTTNHLYFKTKEVLFIKAKGRGSRSRTNLDRYGFPRGYLARQKFFFGFQTGDMVKAVVPRGKYQGVWFGEVACRKTGSFDIKGKDGKRIAQGINYRYVQVIQRFDGYAYGKGVAELA

SEQ ID NO: 17051 - protein, 391 aa, Methanobrevibacter sp.; identical to SEQ ID NO: 13532

SEQ ID NO: 17052 - protein, 418 aa, unidentified
MIYVRSKDGKALMPSERGGRIGYLLRHGKAHVVSRVPFTVQLDYESTTYTQEVSLGVDAGSKHIGVSASSEKKELLAAQVELRNDVVNLLSTRRELRRTRRNRKTRYRKVRFDNRKKKDGWLAPSVEQKVDSHLKVIRLVHKLLPITKTTIEVAQFDAQKIKSPDIKGEEYQQGEQMGFWNVREYVFARDGHRCVHCKGKSKDPILNVHHLESRKTGGNSPSNLVTLCETCHKAYHRGEFELKTKRGSSLRDAAVMNIMRRAVYERAKLEFGNVHLTYGYVTKHTRIENAIAKAHAADAFCIAKNVHATRLRTFFLCRCVPRHTRALHVANPKKGGIRRSTIASHKIGKSHFQRFDMVRWKSKECFIFGSTNGRPVLRDIEGIKMHENTSVNIKTIKFLKRLRNNILVEEKNFRKLSN

SEQ ID NO: 17053 - protein, 566 aa, unidentified
MEEKRMYHVKIKNEVKEYEAAITYHDIAKEYQKDYEHEIVLVFVDGKLQELHKRLKKDCEISFVTTADPIGHEAYKRSMSFLLVKAVYDVAGHKNIDKVRMHFAIGPGYYCTIQLMSVAVISKTGERLIPASEYRARKLLKSGKAIKHSYHPFTIQLTERETGDIQPIELCMDTGYIHIGISVKSEKHEYLAEQIDMLTDERGRHDACRMYRRQRRGRKRYRQARFNNRKRDQGWIAPSLEHKKKIHIQAISRINNVMPITDITLEMGNFDTQVLKAKEEGKPLPQGADYQHGERYGIATLREAVFARDNYKCQCCGRTIKDGAILHAHHIKYRSKGGTNSMSNLATVCDKCHTPKNHKPGGKLYDWKPKLSSFKGATFMTTIRWQLYSEVKTLFSDIDIYITYGAVTKERRRELDIDKSHVNDAFVMGQFHPKHRIKAVLHKKKRRNNRCLEKFYDAKYIDSRDGKKRSGQELFNGRINRNHKKDSENLHPYRLQKVTPGKRTIRKQHYKIQPHDIVIYENRKREAIGCHCNGARVMLLPDKKSASIKKIKIYKYAGGYFKSAFN

SEQ ID NO: 17054 - protein, 440 aa, unidentified; identical to SEQ ID NO: 5150

SEQ ID NO: 17055 - protein, 455 aa, unidentified
MVFVLDRHHKPLMPCHPARARRLLGKGRARIHKLYPFTIRLVDRELKDSTVQPVVLKLDPGSKETGMALVREDETKTHHALYFVNLKHRGSEIKQSLLQRSSFRRSRRSRNLHYRAPRFLNRTRPQGWLAPSLQHRVDTTLSWVERLRKLAPVATLEMELVKFDTQKMQNPEIDGVAYHQGELAGFEVREYLLEKFGRKCIYCGAEGVPLNIDHIVPKSAGGSNRVSNLVLACVDCNQKKNNLPLEVFLKGDKAKINRIRSQLKTPLKDAASVNTTRWQLFEALKLTGLSLTTATGARTKYNRHQFGVPKEHWLDALCVGETAAVRGWQPLGVLVVKCTGRGAYKRTRLTKDGFPRGYLTRTKRFFGFGTGDMVVATVFASKKKGSYKGRVAVRKSGSFAIQTASRKVDGISYRYCRLLSRADGYGYSWHSSKSLINSTKETALLPRINTQVSAP

SEQ ID NO: 17056 - protein, 423 aa, Moorena sp.
MRVFVLNKNRQPLDPCKPARARILLSTGKAKVYRRYPFTIFLTEEIKEPITHEHQLKIDPGAKTSGLAIVQGKRVIWGAELTHRGFQIREALTSRRQLRCSRRNRKNRYRKPRFLNRTRPKGWLAPSLMSRVQNILTWVKKLTRLCPVTGISQELVRFDTQKLQNPEISGIEYQQGTLYGYELREYLLEKWNRKCAYCGATGTQLEIEHIKPKSKGGSDRVSNLAIACRPCNQAKSNQDIELFLSKKPSILKRILNQAKRPLADAASVNTTRWKLYHELKSIGLPIEVGSGGLTKFNRCRQSLPKTHWLDAANVGKVETLIIEVTHPLIMTAKGHGTRQLCRTNKYGFPIRHCSRIKFHKGFQTGDIVRAVVTKGKKIGTYVGRVATRKSGSFNISTKSGLVQGISHKYCQFIHRKDGYAYTN

SEQ ID NO: 17057 - protein, 414 aa, Parasutterella sp.
MPCSPAKARLLLKEKKAIVVRRTPFTIQLTIATGESKQPVSLGVDAGYKHVGLSASTEKAELYASEVELRPDVSDLLSARRTLRQSRRNRKTRYRAPRFDNRIRTKRKGWLAPSVENRINAHLSRIGAILRLLPVTKITVETASFDTQLLKNPDISGKEYQEGEQLGFWNVREYVLFRDGHACQHCHGRSKDPVLNVHHLESRRTGGDSPGNLLTLCETCHKALHRREIKLKTKRGQSFRTEAFMGIMRWEVHNRLRALHPGIEVSNTYGYRTKHARIANGIAKSHCADAFCIAGNLGAERLCEFFFQKQTRRNNRQIHKLSILKGGIRKRNQAPFEVKGFRLFDKVACQREESFIFGRRSSGVFDVRKLDGTRISAGISCKKLHLLEKRRTYLTEIRKEEALPPLPEDRGLRA

SEQ ID NO: 17058 - protein, 415 aa, Bacillus sp.; identical to SEQ ID NO: 2671

SEQ ID NO: 17059 - protein, 416 aa, unidentified
  source 1..416: note = Syntrophaceae bacterium UBA6255
MCVYVINKNGNPLMPCKPAKAKHLLKAGKAKVIKRTPFTIKLLWDCEENTQEVVAGMDTGSKTIGCAVIANGKVVYQSEVQIRQDVSKKMEQRRMYRRIRRGRKTRYRKARWQNRASMRKEGRLAPSITSKVDSHLREKKFVESILPVFCWKVEIASFDIHKISNPDVKRWDYQKGNQKGFYNVKAYVLHRDGYQCQKCKTRKGKLHVHHVVFRSNGGTDTPSNLITLCEGCHDKLHNGEFQIKGSRSKTKHATEVGVVTSQLKKRFGDFEETFGYETKFKREQILQLPKSHHFDAVAICCEEGEIVELSDNIYFKKHVSNGDYQQTKGSRSEKRIPTGKLFGLRKFDYIQTPKVTGFIKGKRSTGFFAISDLEGKVINPSVNVKKNCTRLTARTTTLIERRGTFLHGASPVVSCA

SEQ ID NO: 17060 - protein, 265 aa, unidentified
MPNKVYVINKHGRPLMPCSPAKARHLLDEGKAKIKKRTPFTIQLVYGSSGYTQEVILGVDAGSKTIGMSTSTKKEEVFAVDVTPRNDVVDLMSTRREFRRARRNRKTRYRKPRFDNRVRSKHKEWLAPSVEVKIQEHITAIKMVCRILPVSKVVIETAEFDLQLLKAIADGKPVPQGEDYQKGEMYGHYNVRQYVLWRDDYTCQCCGAHATKKKEVRLHVHHLESRKVGGDAPDNQVTLCESCHEKLHKGLITAKDFKKRKRRST

SEQ ID NO: 17061 - protein, 513 aa, unidentified; identical to SEQ ID NO: 3179

SEQ ID NO: 17062 - protein, 413 aa, unidentified
MTNYAFVLDADGKQLAPTKEQKAWFLIRKKRAALVSKYPMVIQLNKEVPDEEICKDEIRCGIDDGGLHVGIALVQKCQTQNKVVFKGTIEQRNDVKHLMDIRRGYRHYHRYHKRYRQARFNNRSSSKQKGRITPSILQKRQATVRVINQLNKWINITDYWLEDVAIDIRAMTDGYKPYKWQYQKSNRLDENIRKAVILRDGCKCMECGKSNCKLEVHHIKPRRSKGSNTLGNLITLCAKCHHKTKGVEELYMDRYFALLNSSDNKNLNYAQHVMIGKKWLREQLSSLVILHLTNGGDTANKRIDWDIAKSHSNDAICITNLRPDECEIKEWTIKPMRRQSKAKTDNVLGIKHRDFVEYTFKNGETHRGYVTALYPEQNALNFQSPTKHCKKVNVRKCKVLWKYSKIYWLDNVS

SEQ ID NO: 17063 - protein, 457 aa, unidentified; identical to SEQ ID NO: 14039

SEQ ID NO: 17064 - protein, 470 aa, unidentified; identical to SEQ ID NO: 2825

SEQ ID NO: 17065 - protein, 430 aa, Thiothrix sp.
MAVFVWDKRKQPLMPCSEKRARLLLARGRAVVVKHYPFSIRLKDRVGGEAQPLQVKLDPGSRHTGMALVREDKEKLTVLNLFQLNHRGLSISENLTSRRAMRNRRRGTSRYRPARFNNRPKPQSWLAPSLQHRIDTVMAWVNKLQRLAPVAAFSQELVRFDMQLLNNPEISSIGYQQGELQGYEVREYLLEKWGRQCAYCGAEHIPLEIEHIVPKANGGSNRVSNLTLACRTCNQRKGSQPVETFLAKKPVLLQKIKAQAKRPLKDAAAVNSTRWALANHLKATGLPVELASGGRTKFNRVQQSIPKSHALDAVCVGDTARIVRWNIPTLEIKCTGRGSYQRTRLDKYGFPRGYLLRQKAVHGFQTGDQVTANVTKGKKIGAYKGRVAVRASGFFNITTATGVVQGISHKHCQLIARNDGYGYIFQPKMA

SEQ ID NO: 17066 - protein, 423 aa, Arthrospira sp.; identical to SEQ ID NO: 3160

SEQ ID NO: 17067 - protein, 440 aa, unidentified; identical to SEQ ID NO: 5150

SEQ ID NO: 17068 - protein, 424 aa, Anabaena sp.
MSNYALVMDTNKQPLSPCHPSVARKLLDSGKAALFRIYPFTIILNKSCSDVVNQAIELKIDPGSKTTGIALVQGEKIIFGAELSNRGSAIKASLESRRSLRRGRRNRHTRYRQARFLNRTRTKNWLAPSLQHRVETTLTWVNKLIKFAPLTRISQELVRFDLQQIDNPEISGIEYQQGTLSGYEVREYLLEKWQRKCAYCGIENVPLQVEHIHPKARGGTNRISNLCLACEKCNIKKGTQDIEKFLAKKPDILKCILAQAKRPLKDAAAVNSTRWALFSRLQETGLPVSTGSGGQTKFNRTRLKFPKTHWLDAACVGQIGELEILINKPLLIKATGHGTRQMCRTDKFGFPSRYVPRIKFVKGFQTGDIVEAIVTTGKKIGKYIGRVAVRGTGSFNISASKLVQGISYKYCKIIHRKDGYDYAF

SEQ ID NO: 17069 - protein, 404 aa, unidentified
MPNKVYVINKHGRPLMPCSPAKARHLLDAGKAKVKKRTPFTIQLVYGSSGYTQEVILGVDAGSKTIGMSASTTKEELLSAEVKPRNDVVDLLSTRREFRRVRRNRKTRYRKPRFDNRVRSKHKEWLAPSVEVKIQEHITSIKRVCRILPVSKVVIETAEFDLQLLKAIADGKSVPQGEDYQKGEMYGHYNVRQYVLWRDNYTCQCCGAHATKKKEVRLHVHHLESRKVGGDAPSNLITLCDSCHEKFHKGIITAANLKKRKRRSMRDATFMGIMRKTLIQRLRAELTIPVAETRGYITKTTREKLLVLPKSHTNDALAIALGKHGFNVGYLPEIAQIDKIYTIRPVRHHNRQLHKVTILKGGIRKSNQAEKYVFGYRLFDKVQFNGQDCFIWGRRTTGIFTIKT

SEQ ID NO: 17070 - protein, 408 aa, unidentified; identical to SEQ ID NO: 10304

SEQ ID NO: 17071 - protein, 457 aa, unidentified; identical to SEQ ID NO: 6126

SEQ ID NO: 17072 - protein, 470 aa, unidentified
MSVFVVGLNGCRLMPVSERKARLLLKGGKASVYRKVPFTIKLNYKTGSTVQPGYLGIDTGSQHIGVSVVQKDGTVLHKEEIGLRDSMSKRKLLESRASSRRGRRYRKTRYRHPKWKPKTKRTYNEKADRKGRHWKKQKNTFTSKRQAGWLPPSLQSKTDHHIQWIRKLLDLLPEGYRLSIELGRFDPARMKDPEIHGELYQKGPQYDYENVRAYVLARDGYTCRVCKKKGGKLHVHHILYRSRGASDNPKYMAAVCSKCHTTENHLPGGILYQWMQDQKKFTRGLRDATFMNILKKRLRKAFPDAVFTYGNITKADREKLELPKSHGNDATAIALVKTEVKSVKDEEPVIHIQQVRRKKRSLHEETPRKGRKEPNRTASRSDKNTKSVTVTKGSGEKKASMTACLFDRVELDGKKGWITGFTGTSCYVKDKEDNYICTSPKYKQVSISRLRILHHCGNWAIGAEKPLGKG

SEQ ID NO: 17073 - protein, 432 aa, Moorena sp.
MRVFVLDKNKKPLDPCQPARARILLKQGRAKVFRRYPFTIMMRDLEELECVTHNHQIKLDPGSQTTGLAIIQEKVVVWGAELTHRGLQIRDGLTSRRKLRRSRRNRKTRYRQPRFLNRKRPDGWLAPSLMSRVYNILTWVKKLTRFCPITGISQELVRFDTQKMENPEISGTEYQQGTLYGYEVREYLLSKWNRKCAYCGVSDTQLEVEHIKPKSKGGSDRLSNLAIACRKCNQIKGNQEIEQFLSGKPDVLKRILSQAKRPLVDAAAVNSTRSRSVANGEWKLYNELKALGLPIETGSGGLTKYNRCRQNLPKTHWLDAANVGEVDTLYIESYQPLLISAKGHGTRQMCRTNKFCFPTRYVPRFKFVKGFQTGDIAKAVVTKGKKIGTYTGRIATRKTGSFNISTKHELVQGISHKYCSIVHRKDGYSYSF

SEQ ID NO: 17074 - protein, 456 aa, unidentified; identical to SEQ ID NO: 10734

SEQ ID NO: 17075 - protein, 428 aa, unidentified; identical to SEQ ID NO: 15134

SEQ ID NO: 17076 - protein, 414 aa, unidentified
  source 1..414: note = Bacteroidales bacterium
MVYVINLDNTPLMPCTSAIARLLLSQGKAKCIKRTPFTIKLLYQTTNYTQPITLGVDTGSGKIGSSAVNDKGDVLYMSQVEIRNDISDKLKQRSKYRRNRRNRKTRYRKARWLNRKNSIKNDRFSPTMTSKINSHLREIEFVQTILPISKIILETATFDPHALKNPAVLNNKWLYQKGINYGFANTKAYVLDRDNHTCQHCKGKSKDSKLEVHHIVFRRNGGSDEASNLVTLCKICHEDLHSGSITLKGGKTKGHLKHATQMNSIRTQLLRLLPCAEETFGFVTKEHRQLLDLPKEHHIDAVAIASQGNEVQFKTNVVLFKKCVSDGDYQQSKGIRSEQRITTGKIQGFRKFDKVRYLGVEYFIKGRMSTGYAILMDAKGTKITLKPIPKFGKMERVQARKSWIISQETIQNIS

SEQ ID NO: 17077 - protein, 494 aa, unidentified; identical to SEQ ID NO: 6359

SEQ ID NO: 17078 - protein, 460 aa, unidentified; identical to SEQ ID NO: 7734

SEQ ID NO: 17079 - protein, 435 aa, unidentified; identical to SEQ ID NO: 4695

SEQ ID NO: 17080 - protein, 541 aa, unidentified
MSTVYVLNKDGKPLMPTTRGGHVRHLLKEQKARVVQSNPFTIQLLYETDDAVQPLYLGIDPGRTNIGVAVVKADGTAVFTAHLKSRNKEIPKLMQDRKRARRARRTNGRRHRRQRRAKANGTISKKCVKQTTTQNGSVSKRAKEIGIIKRHLPGCEKDVLCIGIKNKEAKYTNRERPEGWLTPTANQLLQTHVNLVKKVQKLLPISDVVLEVNKFAFMRLDNPDIQKWQYQQGPLYKKESLESAVSEMQEHHCLFCKKPIDHYHHVVPKSENGSNTIANIVGLCAEHHNLVHKDVAWQEKLAEKKTGLNKKYGALSVLNQIIPALTNKLSVLFPKHFFVTAGKSTHDYRAAHGVSKDHWLDAYCIACSVLPSNVCDSNINNHVPYELKQFRRHDRRVLHKANMSRVYTLNGKAVATNRHKAIKQTTDSLEEFRQNYPDDVYKLKVKEHHPAYRNLNRNYPGSVFLVGEQAHVMQGIASSKDGKTTKYNDTNATTIIAGKCKFVAKNSGILFVQCKFRKALSGQQPRLNRLAGYRRGLRGNP

SEQ ID NO: 17081 - protein, 374 aa, Oscillatoria sp.
  VARIANT 291: note = X can be any naturally occurring amino acid
ANPEPLELKLDPGSKVSGMALKQGNQIIFAAELQHRGEPIKKALLSRRQLRRSRRNRKTRYRPARFLNRTRSKGWLAPSLQHRVDTLMTWVNRFRRLAPVGQITQELVRFDLQLMENPEISGVQYQQGELQGYEVREYLLQKWDRTCAYCGAQNVPLEVEHIQPRSKGGSDRVSNLTLTCHSCNQAKGNGDIRDFLSGQPDLLGRILKQAKSPLKDAAVVNSTRWALFKALKATGLRVTTGTGGQTKFNRLRLNLPKAHWLDAACVGPVESLEVMTSKPLLIIAKGHGTRXMCGTDKYGFPTRHRSRIQVHKGFRTGDIVAATVTAGKTIGSYVGRVLCRASGSFDITTASVRVAGISHKYCKPIHRKDGYAYA

SEQ ID NO: 17082 - protein, 442 aa, unidentified; identical to SEQ ID NO: 2903

SEQ ID NO: 17083 - protein, 327 aa, unidentified
LRVFVLNKRGKPLMPCSPAKARLLLKEKKAIVKRRTPFTIQLTIATGETKQPVSLGVDAGYKHVGLSASTEKAELYASEVELRQDITDLLSARRALRQSRRNRKTRYRAPRFDNRISTKRKGWLAPSVENRINAHLSRIEAVLRLLPVTKITVETASFDLQLLKNPDISGKEYQEGEQLGFWNIREYVLCRDGHVCQHCYGRSKDPVLNVHHLESRRTGGDSPGNLITLCETCHKALHRGEITLKAKRGQSFRAEAFMGIMRSEVLNRLKASHPELEVNNTYGYRTKHARIANDIAKSHCADAFCIAGNLGAERLGEFFFQKQTRRN

SEQ ID NO: 17084 - protein, 450 aa, unidentified; identical to SEQ ID NO: 4205

SEQ ID NO: 17085 - protein, 406 aa, unidentified
MVYVQDIDGKPMMPTTRHGKVRRLLKDNKAVVVNTCPFTIKLTYKTSDYKQEIVLGVDAGTKHVGLSATTKSKELYSGEVILRNDIVELLSTRRESRRARRNRLRYRKPRFENRVKSKRLGWVAPSVRHKVDAHIRVIDNICSTLPISRIIVEIAQFDTQKIKNPDISGNEYQEGDQLGFWNVREYVLARDGHKCQHCKGKSKDPILNVHHIESRKTGGDSPSNLITLCETCHKEYHKGNIDLKVKRGKSLRDAAVMGIMKWKLYEELKSRYPNVSMTFGYITKYNRIKYGIEKSHTSDAFVISRNFNAKRIERQYLKRLIRRHNRQIHKMKILKGGKKKNNQAPFEVFGFRLFDKVLYNNEICFIYGRRKSGCFDIRDFDGKNSKNVTYKKLKLIRGKRYPIILK

SEQ ID NO: 17086 - protein, 342 aa, unidentified
MIIALDKYKRPLGFLTERRCRILMERKRAVLYRVFPTVVILMDVDARTIPDLPSFRIKIDPGSKYTGIAIIRNDTDEFVYAMQIEHRGDTVRAALNKRKNARRNRRSRETGYRRAKWGNRCLSEKDKRSYDSSREDGWLPPSIRSAADNVISWVRRLGRWINLTECSFEAVRFDTQLMEDPDIEGEEYQHGTLFGLEIKEYLMEKFGHTCQYCGGKSGDPVLEWEHMRPKSRGGSDRVKNALLSCSSCNKDKGNRTPEEWLEQIKARLPREKGKRKELDEERVKLIQKVIDGKPQGSALRYAAWVSSSRRYLEKALFGIFGDVECSSGGGKKNNPTGLWLFI

SEQ ID NO: 17087 - protein, 501 aa, Streptomyces sp.; identical to SEQ ID NO: 5519

SEQ ID NO: 17088 - protein, 419 aa, unidentified; identical to SEQ ID NO: 5032

SEQ ID NO: 17089 - protein, 431 aa, unidentified; identical to SEQ ID NO: 11494

SEQ ID NO: 17090 - protein, 458 aa, Lactobacillus sp.; identical to SEQ ID NO: 4474

SEQ ID NO: 17091 - protein, 504 aa, unidentified
LLKEQKARVVRTKPFTIQLLYETNDVVQPLYLGIDPGRTNIGVAVVKTDGTAVFTAHLETRNKEIPKLMKKRKESRRARRTNGRRCRRQRRAKANDTISKKCVKQPTAQNGSISKRAKEIGIIKRRLPGCEKDVLCIGIKNKEARFNNRTRPEGWLTPTANQLLQTHINLVKKIQKFLPISDVVLEVNKFAFMQLDNPNIQKWQYQQGPLYKKESLERAVSEMQEHHCLFCDKPIDHYHHVVPQSENGSNTIANIVGLCAEHHNLVHKDAAWQKKLAEEKVGLNKKYGALSVLNQIIPALTKELSFLFPEHSFVTNGKSTYDYRATHGVSKDHWLDAYCIACSVLPSDVCDSNINNHMPYELKQFRRHDRRVLHKANTSRVYTLNGKKVATNRHKAAKQTADSLEEFRQSHPDDVCKLKVKEHHPAYRNLNRNYPGSVFFVGKQVHVMQGIASSKDGKATKYNDTSATTIAAGKCEFVAKNSGILFVQCKFRKVFSDETTKKLQ

SEQ ID NO: 17092 - protein, 431 aa, unidentified; identical to SEQ ID NO: 5054

SEQ ID NO: 17093 - protein, 417 aa, unidentified; identical to SEQ ID NO: 6596

SEQ ID NO: 17094 - protein, 451 aa, unidentified; identical to SEQ ID NO: 15478

SEQ ID NO: 17095 - protein, 413 aa, unidentified; identical to SEQ ID NO: 3476

SEQ ID NO: 17096 - protein, 419 aa, unidentified
  source 1..419: note = Campylobacterales bacterium
MVFVLSKNKTPLAPTSKAKARILLKKGKATVDKIFPFTIRLKENKECQKSFEIKFDVGSSVTGVAIVDAIKCFFFAQIVHRGKTVKKAMDSRRATRRSRRNRKTRYREPRFDNRTRPKGWLPPSIKSRADNVINFAKKYSKLISINSIVVERVSFDISSMTQDRKLYGVEYQNGELKDRKLREYIFAKNNNKCVYCGKKGQEIEHIVPKSKGGTNLIYNLTLSCRNCNIKKGKLTLKEFGKKIGKDLSPLEPKKTPKNASIIQSAREYTIKELKKDFEVKIGEGWETYANREEIDLPKEHYFDAMCIGDTYKYKIFTNSVLEVKAQGRGKRQVCLMDRFGFPRTKAKGEKIIKGFQTGDIVKAVVTKGKKLGTYLGKVAVRSSGYFNITTKLGTIQGINHKYCKTIQKGDGYSYATIKI

SEQ ID NO: 17097 - protein, 549 aa, unidentified
VQFAWWLCHPKPSDNIEDVNHETALMLLQIKAGTETFGTAPCGSGPKAEGVSPERKAMNTVAVVTNTNKPLMPTSPYRARKLLSSGKAKIVKHRPFTILLVNRSDGNVQEIEYKSDTGYLHVGISVCSEKREFVREQRDLLPDEKEKHNDRRKYRRTRRNRKRYRKRYRKARFDNRIGKIRKKEKNEHVWLPPSLEHKVDAQVQLFLRLYQVMPVKRAVFEMGQFDPALMKALEKGEAAPQGIDYQMGERYQIATRRAAVFTRDRYACVFCGRSIKDHAILHVHHIGFWKQDRSNRLDNLATCCEQCHTSENHRPGGILYGVEPKLESLASATYMNVVRFELLRRLKEAAPDVEFHISYGAKTSVIRKQRSISKSHTNDAYCLGQYFPKLRAEEIGFQKIRRNDRILQKFYDAEYLDSRDGTTKKGKELTNGRISRNHKKDHENLHQYRGKKLSKGRITIRRGRSSLKPGSLVRFDGEVLTVHGTHRSRKKNKAGHIKVSVNVEFERPSKTGRKSAALSKCQIISRSYNTGWKQIQLRKEEQGRIAAVV

SEQ ID NO: 17098 - protein, 426 aa, unidentified
LAKDHYRSIDREETNLRVYVLNKRGEPLMPCSAAKARILLKEKKAKVKRRTPFTIQLTIATGETKQPVTLGVDSGYRHVGLSASTEKAELYASEIELRQDISELLAARRALRGARRSRKTRYRAPRFDNRKRDKGWLAPSVENRIGAHVSRVEAVLRILPVTKIIVETASFDVQRLKNPDIQGVEYQEGEQLGFWNVREYVLFRDGHECQHCHGKSKDRVLNVHHIESRRTGGDAPNNLITLCETCHKAFHRGEIELRVKRGRSFQAETFMGVMRWTFFERLRARHSEIEVRNTFGYLTKNTRITHGIEKTHCADAFCIAGNLKAKRLGYYFFQKQTRRHNRQIHKLTILKGGARKRHQTPYEIKGFRLYDKVLFQGKTAFIFGRRSSGYFDIRTLDGERISASVSYKKLRLLEKRRTYLIELRRN

SEQ ID NO: 17099 - protein, 470 aa, unidentified; identical to SEQ ID NO: 2825

SEQ ID NO: 17100 - protein, 470 aa, unidentified; identical to SEQ ID NO: 2825

SEQ ID NO: 17101 - protein, 419 aa, unidentified
LSTVFVIDQKRTPLGPVHPGWARKLLSSGQAVVSKRYPFTIILKNVVEEPAVQPLRVKLDPGSKTTGIAVLNDATGTVVFAAELTHRGNAIKSSLDDRRASRRSRRTRHTRYRAARFNNRTRPKGWLAPSLLSRVCNVETWVKRLQRVCPITAISMELVRFDLQQMENAEISGVEYQQGTLQGYEVREYLLNKWNRMCAYCGKKDVPLQVEHIHPRARGGTNRISNLCLACEPCNTAKGTLDIAVFLAKKPDILKRILAQAKAPLKDASAVNSTRWALYERLKAFSVPVECGSGGMTKFNRMTRTLDKAHWRDAACVGKSTPETLHTQGIRPLLIAATGHGRRQMCVPDKYGFPKQHKERCKMFLGYRTGDVVKAITPKLTVTGRIAIRHRPSFRIGKSDIHPKYMRRVHRADGYTYAW

SEQ ID NO: 17102 - protein, 424 aa, unidentified; identical to SEQ ID NO: 8578

SEQ ID NO: 17103 - protein, 419 aa, unidentified
MVYVINKDGQALMPTERFGKVRRLLKNGLAHVICRIPFTIRLNYETTHFVQPISLGVDAGSKHIGISATTSEKELYAADVELRNDIVDKLSTRREQRRTRRSRLRYRKARFNNRVSSKHKGWLAPSVENKIQTHLTVVEKIHKFLPITKIIVETASFDIQKIKNPSISSKEYQQGEQLDFFNVREYVLFRDNHTCQHCKGKSKDHILNVHHIESRKTGGNSPSNLITLCESCHKAYHNGKIDIKIKRGASFRDATFMGIARWTTYERVKNIYPNVSMTFGYITKNTRITNGLPKEHYVDARCISGNPKSKPLGYYFYQKKVRCQNRQIHKANFLKGGRKKLNQSPFLVKGYRLFDLVEYQKELYYIFGRRDRGFFDIRKLDGTKVNKGSISCKHIRLVSKRRSILTERRNSCSIPPTKL

SEQ ID NO: 17104 - protein, 418 aa, unidentified; identical to SEQ ID NO: 11314

SEQ ID NO: 17105 - protein, 431 aa, unidentified
MPNKVYVINKHGRPLMPCSPAKARHLLDAGKAKVKKRTPFTIQLVYGSSGYTQEVILGVDAGSKTIGVSALTKKEELFAANVIPRNDVVDLLSTRREFRRARRNCKTRYRKPRFDNRVRSKHKGWLAPSVEVKIQEHITAIRRVCGILPVSKVVVETAEFDLQLLKAIADGKPVPQGEDYQKGEMYGHYNVRQYVLWRDNYACQCCGAHATKKKEVRLHVHHLESRKVGGDAPDNQVTLCESCHEKLHKGLIAEKDFKKRKRRSTWDATFMGIMRKTLMQRLCSELPIPVVKTRGYITKATREKLLVLPKSHINDALAIAQGKHGFNVGYLPGILQIDMIYTIRPVRHHNRQLHKATILKGGIRKSNQTEKYVFGYRLFDKVQFNGQDCFIWGRRTTGIFTIKTINGKMIKDGISFKKLKLVEKSTSYLIA

SEQ ID NO: 17106 - protein, 452 aa, unidentified
MVFVLSSTNKKLMPTNEYRARKLLKSGKAAVYKHRPFTIILTKRKDGYTQPIEYCCDTGYQHIGISIKSQKHEYVNEERILLKDETERHNDCRKYRRTRRNKLRYRKARWNNRHNNLICKDGFAPSIRNKRDVHINLFKMYHEVCPITSATFEMGQFDTQLLKAVENGDNVPQGTDYQHGERYGYSTLREAVFARDNYKCVCCRKSAIKSGLILKMHHLGYRIGDRSNRMSNLATVCSNCHTSKNHQKGGKLYDLKPKLKTFKGATFMTMARYDMFSKLKESAPDIKFNMTYGALTKLKRKDYSIKKSHSNDAYCMGVFHPKHRTDFKCYQKLRRNNRILSKFYDAKYIDLRDGTVKSGKQLSCNRTNRRELRNSNKNERIYRGPKISKGKTVVRKQHYQYRPYDFVWYKNVKYAVKGVQDKGKRIALQNHLPVSISKIKRSVHVNGWKLVI

SEQ ID NO: 17107 - protein, 406 aa, unidentified; identical to SEQ ID NO: 4082

SEQ ID NO: 17108 - protein, 420 aa, unidentified; identical to SEQ ID NO: 5662

SEQ ID NO: 17109 - protein, 419 aa, unidentified; identical to SEQ ID NO: 14613

SEQ ID NO: 17110 - protein, 436 aa, unidentified
MTKTLTKQTTQACILDQQGKPLMPTTRLGKVYRLLKTQKAHIVSYEPFTIQLDYEPDTHIIQPMTLGVDSGAIHSGYSLANEHREYYSAEVIARDDVSKRLSDRRMYRQNRRSRKTRYRKTRFNNRKNKKKGWLPPSLEQKVAVQVNEIDHLHRYFPIETIVVEVAEFDIQKIKNPDISGVGYQQGTLQGYNIRNYLLEKHGRKCFYCGKTVSKFEVEHMLPKSRGGSNRIDNLTLSCHDCNQKKDTLTAEEFIRQTLPAKKAATKLKQLSNEKRLFKYMTQMNATRWALYNTINEKYANVKMTYGYITKYKRIQADLPKAHHIDAKCITGFVTVPSMKQTVVKIKMRRHNRQLHRATFSKGHVRKAACLPTIVFGFQLYDHVLFDNHHYYIKGRRSSGYFKLTSIEGLKDEERSYKKLTQLAHTNAYLINRYVNA

SEQ ID NO: 17111 - protein, 420 aa, unidentified
LRVFVLNKRGQPLMPCSPAKARLLLKEKKAIVKRRTPFTIQLTIATGEARQPVTLGVDSGYKHIGLSATTEKAELYASQVELRQDITDLLSARLALRRSRRSRKTRYRAPRFNNRVASKRKGWLAPSVENRIAAHMSRVEAVMRVLPVTAITVETAAFDTQLLKNPDIAGEAYQQGEQLGFWNVREYALFRDGHVCQHCRGKSKDPILNVHHIESRRTGGDAPNNLITLCETCHKAFHRGEIELKVRRGKSFKAETFMGIMRWTLFERLKKAHPELRVRNTYGYLTKHKRISHGIAKSHCADAYCIADNLGAKRLSGYLFQKQTRKHNRQLHKLSILKGGLRKKNQAPYEVKGFRLFDKVICKGEEAFIFGRRTSGSFDVRRLDGTRISSGISYKKLRLLEPRTTYLTEFRKEAALPPLH

SEQ ID NO: 17112 - protein, 470 aa, unidentified; identical to SEQ ID NO: 5320

SEQ ID NO: 17113 - protein, 409 aa, unidentified
EPLMPCSPRKARLLLKQKKACVVKRTPFTIKLLYGSTGYKQPITLGVDAGSKHIGISATTEKYELYREEATPRNDVVDLLSARRAFRRNRRNRKTRYRAPRFNNRVHSKHKGWLAPSVEVKIQEHITLIKRVCRILPVTLVRVETAEFDTQRLKAMLEGKPLPVGTDYQLGEMYDEYNVRQYVLKRDNYTCQCCGAHPTKTKAVKLHVHHIETRKTGGNAPNNLITLCTACHKTLHARKVTLDGRKRGKPLKDAAFMGIMRKTLMERLLKELKIPVQGTYGYITKYLREKHSIPKSHTNDARCISKNPLAIPCDTCYYTKAIRHHNRQLHKATILKGGIRKANQALYTVKGYRLWDKVSYNGSECFITGRRTSGYFALKKLDGTVVSNSASYKKMRLLEVATNYITERR

SEQ ID NO: 17114 - protein, 413 aa, unidentified; identical to SEQ ID NO: 3587

SEQ ID NO: 17115 - protein, 446 aa, Lactobacillus sp.; identical to SEQ ID NO: 12236

SEQ ID NO: 17116 - protein, 453 aa, unidentified
RLMPTIRLGKVRHLLKDGKAKIIKHHPFTIQLLYDSKTDTQPIEICEDVGYNYIGISVKSESHEYVSAQYDTLQDEKDCHDDCRKMRRSRRNRLRYRQTRFDNRKRGEGWLAPSLEHKKELNVNVIKMYCEVAPITHATVEVGSFDTMLVKAIEEGKAAPEGVDYQKGPRYNLATLREAVFYRDNYTCQVCGREAQKDSAILHVHHMFYWKGRHGNSLSELLTVCEKCHTPANHQKGGKLYGFGENIKFANLSGAAFMNTVRWQIVNELYAAFGKPFVTFTYGVMTKEKRIALNLEKSHNNDAYAMGSFHPADRCAFEHYEKVKRNNRILERFHDSQYIDIRTGNVTNGKSLFNGRINRSHKKDSENLHKYRGKRIRKGYRALRRKKVALNPGDSVSLNGEILIIQSTHTKKNGSVNVEFKTPSKSGKKSASLKKLKIVKMSNSMHSAWTKVS

SEQ ID NO: 17117 - protein, 450 aa, unidentified; identical to SEQ ID NO: 2935

SEQ ID NO: 17118 - protein, 414 aa, unidentified; identical to SEQ ID NO: 4492

SEQ ID NO: 17119 - protein, 422 aa, unidentified
IVKHHPFTIQLLYDSKTNTQPIEICEDVGYNYIGISAKSKSREYVSTQYDTLQDEKEHHDDCRKMRRSRRNRLRYRKPRFDNRKRDEGWLAPSLEHKKQLNISLIERYVSVIPITHATVEVGSFDTMLLQSIQKGEAKPEGADYQKGPRYNLATLREAVFYRDNYTCQVCKRKITDGAILHMHHMFYWKGRHGYQLDELVTACEKCHTPANHQKGGKLFGFGKDKKFANLTGAAFMNAIRWQIVNALYATYGKEFVTITYGAMTKEKRIALQLEKSHNNDAYAMGKLHPSRRCTFVHYEKIKRNNRVLEKFYDATYIDARTGNKAKGKELFNGRISRDHKKDSENLHKYRNKKVSRGRRSIRRQRYAIQPYDTVRLEGKTYITSGCHNKGTRLLIPVNGKSKSVAISKVQVVCHAGAWIQII

SEQ ID NO: 17120 - protein, 417 aa, unidentified
MPCSPAKARLLLKEKKAIVKRRTPFTIQFTIATGEARQPVALGVDSGYKHIGLSATTEKDELYASQVELRQDITDLLSARLALRRSRRSRKTRYRAPRFDNRVASKRKGWLAPSVENRIAAHMSRVEAVMRVLPVTAITVETAAFDTQLLKNPDIAGEAYQQGEQLGFWNVREYVLFRDGHVCQHCRGKSKDPILNVHHIESRRTGGDAPNNLITLCETCHKAFHRGEIKLKVKRGKSFKAETFMGIMRWTLFERLKKAHPELRVRNTYGYLTKHKRISHGIAKSHCADAYCIADNLGAKRLEGFFFQKQTRKHNRQIHKLSILKGGLRKKNQAPYEVKGFRLFDKVICKGEEAFIFGRRTSGSFDVRRLDGTRISAGISCKKLRLLEPRTTYLTEFRKEAALPHLHECRGFRAEFL

SEQ ID NO: 17121 - protein, 462 aa, unidentified
PMVKSSERQERCCRLETPSNIGEGSQPVERPRRENLRVFLLNKRGKPLMPCSPAKARLLLKEKKAIVVRRTPFTIQLTIATGESKQPVSLGVDAGYKHVGLSASTEKAELYASEVELRPDVSDLLSARRTLRQSRRNRKTRYRAPRFDNRIRTKRKGWLAPSVENRINAHLSRIGAILRLLPVTKITVETASFDTQLLKNPDISGKEYQEGEQLGFWNVREYVLFRDGHACQHCHGRSKDPVLNVHHLESRRTGGDSPGNLLTLCETCHKALHRREIKLKTKRGQSFRAEAFMGIMRWEVLNRLKASHPELEVHNTYGYRTKHTRIVNGIDKSHCADAFCIAGNLGAKRLGEFFFQKQTRRNNRQIHKLSILKHGLRKRNQAPFEVKGFRLFDKVVCQGEEGFIFGRRSSGSFDVRKLDGTRISAGISYKKLRLLEKRRTYLKEIRKEEALPPLPEGRSLRA

SEQ ID NO: 17122 - protein, 442 aa, unidentified
MTQVFVLDRERHPLDPCHPARARELLRDGRAAVWRRFPFTIILNDRSRAESVVHEHRVKIDPGSHTTGLALVAGARVLWAAELTHRGQRITAALRSRHAIRRGRRQRQTRYRQPRFLNRRRPVGWLPPALGSRVANIMTWVERLARLCPITALSQELVRFDMQLMQNAEIAGVQYQQGELAGYEVREYLLEKWHRTCAYCGAKNVPLEVEHITPKVRGGSNRVSNLTLACVPCNKKKGAQTAAEFGFPQVQAQARMPLQDAAAVNATRWRLYQALHATGLSVETGTGGRTRYNRTRLGLAKSHWADAACVGASTPDTLEVTGIRPLGIRAMGHGTRQMCRTDAHGFPQTHRGRQKGYFGMQTGDLVKAMVPKGKYIGTLMSRVVVKASGWFDLVIHGKKASVHQQHCTRLWAADGYTYTLPAVAGTAVSSPRSSEGSPQRKF

SEQ ID NO: 17123 - protein, 421 aa, unidentified
MVYILDINGQPLMPTDRYGKVKHLLRQGKAVVVKRCPFTIRLLYDTTAYTQKLTLGVDTGSGTLGTAVSDEKGNIVYMSEVTVRNDITDKMKQRLRYRRNRRDRKTRYRKARYLNRRNSIKSDRFNPTMTSKFHSHIKEIDYIKSILPVKTLVLETGQFDTHLLKNPCLANPKVRHWGYQKGVNYGFENTKAMVLNRDNYICQYCRGKHKDSRLEVHHIIFRSNGGSDEQENLITLCHTCHKALHSGRINPNLSGRKKGTLRYATQMNSIRCQLLKHYPDAIETFGCVTKANRLNLNLEKHHYTDACVIAAETKPVCLITDILYLKKSVSDGDFQQTKGIRSEQVINTGKIYGFRKFDRVRYLGNEYFIKGRMSTGYAVLMDINGKKADFSKMPKGFKTPKLSICRRISARKSQLIQAMAI

SEQ ID NO: 17124 - protein, 458 aa, unidentified
  REGION 1..458: note = IscB polypeptide
MKQKLQKKLKNIPTDTSLVCSSISSGLNKGEFSHPSDQSKVLICNNSEENHRKHKSGSDLRVLNIVYVLNKRGNALMPTCQSRARRLLKSNKAKVVKIYPFTIQLIITTGETRQDIVLGVDMGSKYIGISAISNKQELFVAEVILRTDIVELLSEKRMYRRGRRNKHHWYRKPRFNNKKKSSGWLAPSIQHKVDSHIRVINKISKLLPISKVILETAKFDIQKINDINISGKEYQNGVQKDFWNIREYVLYRDNHTCQHCKKENLILNVHHIVTRKKGGDRPDNLITLCEKCHNKFHKGKIKLDIKIKNNFKSQTCMSIIRKFIIDKLKKNYVVEETYGYLTKAKRIENKIEKSHINDAFVIANGNKQIRINSYLISQKRKNNRCLQTNRKGFAPSIRRKRYNIQPLDVVKIKDVNYIVKGMFNKGEYVRVVNSNIKVFNFKIGLIEKYFNRGTLIWK

SEQ ID NO: 17125 - protein, 522 aa, unidentified; identical to SEQ ID NO: 16031

SEQ ID NO: 17126 - protein, 488 aa, unidentified
MNTVAVVTNTNKPLMPTSPYRARKLLSSGKAKIVKHRPFTILLVNRSDGDIQEIEYKSDTGYLHVGISVCSEKREFVREQRDLLPDEREKHNDRRKYRRTRRNRKRYRKARFDNRIGKIRKAEKNKHVWLPPSLDHKVDAQVQLFLRLYQVMPVKRAVFEMGQFDPALMKALEKGESAPQGIDYQMGERYQIATRRAAVFIRDRYTCVFCGRGIKDHAILHVHHIGFWKQDSSNRLDNLATCCEQCHTSENHRPGGILYGVKPKLKSLASATYMNVVRFELLRRLKEAAPDVEFHISYGAKTSVIRKQRSISKSHTNDAYCLGQYFPKLRAEEIGFQKIRRNDRILQKFYDAEYLDSRDGTTKKGKELTNGRISRNHMKDHKNLHQYRGKKLSKGRVTIRRGRSSLKPGSLVRFNGEVLTVHGTHRSRKKNKAGHIKVSVNVEFERPSKTGRKSAALSKCQIISQSYNTGWKKIQLRKEEQGKIAAVG

SEQ ID NO: 17127 - protein, 512 aa, unidentified
MSTVYVLNKDGKPLMPTTRCGHVRYLLKEKKARVVASKPFTIQLLYETDDVVQPLYLGIDPGRSNIGVAVVKTDGMAVFTAHLETRNKEIPKLMKKRKDSRRARRTNGRRCRRQRRAKANGTISKKCVKQTTAQNGSVSKRAKEIGVIKRHLPGCEKDVLCIGIKNKEAKFNNRTRPTGWLTPTANQLLQTHINLVKKIQKFLPISDVVLEVNKFAFMQLDNPNIQKWQYQKGPLYQKESLKSAVSEMQEHHCLFCKKKIDHYHHVVPQHKNGSNTIDNIVGLCTQHHDLVHKDATWQKRLAKKKTGLNKKYGALSVLNQIIPALTKELSSLFPKHFFVTNGKSTYDYRAAHGVSKDHWLDAYCIACSVLPNDTCDKTINSRMPYELKQFRRHDRRALNNENMSRVYTFNGKMVATNRHKATEQTTDSLEEFRQRQPNDVCNLKVKEHHPTYRNMSRNYPGSIFLVEKQVHIMQGIAGSKDGKATTYKDTNANSIAAGKCKFVAKNSGILFV

SEQ ID NO: 17128 - protein, 417 aa, unidentified
MPCSPAKARLLLKERKAIVKRRTPFTIQLTIATGEAKQPVTLGVDSGYKHIGLSATTEKVELYASEVELRQDITDLLSARLALRRSRRSRKTRYRAPRFNNRVASKHKGWLAPSVENRIAAHLSRVEAVMRVLPVTAITVETAAFDTQLLKDPDITGAAYQQGEQLRFWNVREYVLFRDGHVCQHCRGKSKDPILNVHHIESRRTGGDAPNNLITLCETCHKAFHRGEIKLKVRRGKSFKAETFMGIMRRTLFERLKKAHPELNVRNTYGYLTKHKRISYGIAKSHCADAYCIADNLGAKRLEGFFFQKQTRKHNRQIHKLLILKGGLKKKNQAPYEVKGFRLFDKVICKGEEAFIFGRRTSGSFDVRRLDGTRISAGINYKKLRLLEPRTTYLTEFRKEAALPPLHKCRGVCAEFL

SEQ ID NO: 17129 - protein, 430 aa, unidentified
MPKVYVLNRHGRPLMPCTPAKARHLLDAGKAKVRHRTPFTIQLLYGSTGYTQEVILGVDAGSKTIGLSAATETEELFSAEVKPRNDVVELMSARRQFRRARRNRTTRYRKPRFDNRVRSKHKGWLAPSVEVKIQEHMTAIRRACAILPVSKVVVETAEFDLQLLKAVAEGKPVPQGEDYQKGEMYGHYNVRQYVLWRDSYTCRICGVHGSVRKGVPLHVHHLESRRVGGDAPDNLVTLCTACHDKLHKGIIMAADIKKRKRRSTRDATFMGIMRMTLLRRLREQLPVPVVETRGYITKATRENLLVLPKSHTNDALAIAHGPQGFRAEYLPNIRQADRLYTIRPVRHHNRQLHKATILKGGVRKANQAEKYICGFRLYDKVLYNGIECFVWGRRTNGSFLLRQLNGEKVKDGVSYKHLKLLERSQSYLVA

SEQ ID NO: 17130 - protein, 428 aa, Mastigocladus sp.; identical to SEQ ID NO: 9878

SEQ ID NO: 17131 - protein, 436 aa, unidentified; identical to SEQ ID NO: 11244

SEQ ID NO: 17132 - protein, 512 aa, unidentified; identical to SEQ ID NO: 7153

SEQ ID NO: 17133 - protein, 351 aa, unidentified
MSTVYVLNKDGKPLMPTTRCGHVRRLLKEQKAQVVTSKPFTIQLLYETDDVVQPLYLGIDPGRTNIGVAVVKIDGTAVFTAHLETRNKEIPKLMQGRKKARRARRTNGRRCRRQRRAKANGTISKKCVKQTTAQNGSVSKRAKKIGVIKRHLPGCEKEVLCIGIKNKEAKFSNRTRPEGWLTPTANQLLQTHINLVKKIQKFLPISDVVLEINKFAFMRLDNPNVQKWQYQQGPLYQKASLEEAVSEMQEHHCLFCKNTIDHYHHVVPQHKNGSNTIGNIVGLCTKHHDLVHKDTSWQEKLAKKKTGLNKRYGALSVLNQIIPALTKELSSLFPKHFFATNILRKPRHVCG

SEQ ID NO: 17134 - protein, 420 aa, unidentified
MQYVYVLNKHGEPLMPCSPGKARLLLKQQKACVVKRTPFTIKLLFGSAGYKQPITLGVDAGSKHVGLSASTEKRELYSEEFTPRSDVVELLSTRRQNRRSRRNRKTRYRVPRFDNRVHSKHKGWLAPSVEVKIQEHITVIKHICKILPISLVRVETAEFDTQRLKAMLAGKPLPVGTDYQLGEMYDEYNVRQYVLKRDHYTCQCCGAHNTAEKVVKLHVHHLESRKTGGNAPSNLVTLCTTCHKNLHKGRVTLDGKERGKPLRDAAFMGIMRKTLMARLKEELPIPVEGTYGYITKMRREQNDIKKSHTNDARCISKHPLAEPCSVCYRTKAIRHHNRQTHKANFSKKGIRKRSQMPYLVEGFRLWDKVLYKGQECFVSGRRSSGSFALKKLDGTSISKGVTFKKLRLLEPATNYLIERM

SEQ ID NO: 17135 - protein, 325 aa, unidentified
RKTRYRAPRFDNRIRTKRKGWLAPSVENRINAHLSRIEAVLRLLPVTKITVETASFDLQLLKNPDISGKEYQEGEQLGFWNIREYVLCRDGHVCQHCYGRSKDPVLNVHHLESRRTGGDSPGNLITLCETCHKALHRGEITLKAKRGQSFRAEAFMGIMRWEVHNRLRALHPGIEVSNTYGYRTKHARIANGIAKSHCADAFCIAGNLGAERLCEFFFQKQTRRNNRQIHKLSILKGGIRKRNQAPFEVKGFRLFDKVACQGEEGFIFGRRSSGFFDVRKLDGTRISAGISYKKLHLLEKRQTYLMEIRKEEAFPPLPEGRGLRA

SEQ ID NO: 17136 - protein, 418 aa, unidentified; identical to SEQ ID NO: 2710

SEQ ID NO: 17137 - protein, 453 aa, Lactobacillus sp.; identical to SEQ ID NO: 4050

SEQ ID NO: 17138 - protein, 424 aa, unidentified; identical to SEQ ID NO: 3351

SEQ ID NO: 17139 - protein, 411 aa, unidentified; identical to SEQ ID NO: 8372

SEQ ID NO: 17140 - protein, 456 aa, unidentified; identical to SEQ ID NO: 11534

SEQ ID NO: 17141 - protein, 432 aa, unidentified
MLTGLLAEQVDPAGIRKGDTLKVFVLNMRGKPLMPCSPAKARHMLKAGKAVVARRTPFTIKLTIATGETKQDVTLGVDAGAKHVGISATTEKEEVFASEVELRQDITGLLADRLAFRRSRRNRKTRYRAPRFNNRVRSKHKGWLAPSVENRIQAHISRIEAICRVLPITKIVIETASFDIQKIKNPEVEGTDYQQGDQLGFWNVREYVLFRDGHVCQHCRGRSKDPILNVHHLESRKTGGDAPNNLITLCETSHKAYHAGKIKLKTRRGTSFRAEAFMGIMRRTLLDRVRKAHPELSVENTYGYLTKHKRIALGLPKTHCADAFCIAGNLNALRRGDFLYQRQTRKHNRQIHKCSILKGGVRKLHQAPFLVKGFRLFDKVKCTGRIGIIFGRRSTGSFDVRTLDGTRLSAGISSKKLTLLEKRTTFLTQLRK

SEQ ID NO: 17142 - protein, 426 aa, unidentified; identical to SEQ ID NO: 7286

SEQ ID NO: 17143 - protein, 429 aa, unidentified
KHMSSTRYWHEEKFSERKVSEMTNYAFVLDANNKQLTPTKEQKAWFLIRKKRATLVSKYPMVIQLKKKIPDKEICKDEVRCGIDDGGLHVGVALVQKCQTRNKVVFKGVIEQRNDVKHLIDVRCGYRRYHRYHKRYRSARFNNRNSSKREERIAPSILQKRQATIRVINQLNKWINITNYWLEDVAIDIRALTDGYKPYRWQYQKSNRLDENIRKAVILRDGCKCMECGKSNCRLEVHHIKPRRLKGSSTLDKLITLCTKCHQKTESVEELYMDRYFALLNSSDNKNLNYAQHVMIGKKWLREQLSNLGMLYLTNGGDTANKRIDWDIAKSHSNDAICITDLRPDTCEIKEWAIKPMRRQSKAKTDNVLGIKHRDLVEYTFRNGETHRGYVTALYPEQNAINFQSPTKHCKKVNAKNVKYFGNILKFTG

SEQ ID NO: 17144 - protein, 424 aa, unidentified; identical to SEQ ID NO: 3434

SEQ ID NO: 17145 - protein, 456 aa, Halomonas sp.; identical to SEQ ID NO: 8852

SEQ ID NO: 17146 - protein, 556 aa, unidentified
MAWEAIQTRRIKPHDIGEGTLRRHAAGTVSFPVLCKNRKETLMSVLVIGRNGRALMPTNPRKARLLLKKKTASVVCRHPFTIQLLYKTGCATQEGCIGIDTGSQHIGVGITCGDRVILKDEHALRSSMEKRSLLATRTVMRRGRRYRKVRYRKPKWRHHTKRMYFEKANRRGQHWRKVKTTTQSPRLKGWLPPSLQSKCDHHFRIIDRYLKYLPDPITRNLVIEAGRFDMARMNDPTIHGEMYQRGPMYDAENLRAYIFARDNYQCACCKAKAGTTRKADGTTVKLVAHHILFRSRGATDNPKYIISVCDHCHTTKAHQPGGILYSWMENTKKVARGLRDATFMNILRKRLFARYPQSAFTYGNITAADRKLLRLPKNHANDAVAISLFGKEASTVKNICQTMHYKQIRKSKRSLHEAIPRKGRKNPNTKAVRNKKNTTQVNGFKLWDSVLADGKKLFICSFTGTSAYLIDKNGCYISQPGKTYKQCPLSKLKRLHPNVDILPRINPWDSLDYNNITTPYRSGYSMIFQDLATIGVPHLGWYFLAAGQMPVPISLS

SEQ ID NO: 17147 - protein, 344 aa, unidentified
VVDLLSTRREFRRERRNRKTRYRKPRFDNRVRSKHKGWLAPSVEVKIQEHITAIKRVCRILPVSKVVVETAEFDLQLLKAIEEGKPVPQGEDYQKGEMYGHYNVRQYVLWRDNYTCQCCGAHATKKKEVRLHVHHLESRKVGGDAPDNQVTLCESCHKKLHKGLIEAKDFKKRKRRPTRDATFMGIMRATLLQRLRSELPIPVIETRGYITKATREKLLVLPKSHTNDALAITQGKHGFNVGYLPGIVQSDKTYTIRLVRHHNRQLHKATILTGGIRKSNQAEKYVFGYRLFDKVQFNGQDCFIWGRRTTGIFTIKMINGKMIKDGISFKKLKLVEKSTNYLIV

SEQ ID NO: 17148 - protein, 419 aa, unidentified; identical to SEQ ID NO: 3670

SEQ ID NO: 17149 - protein, 451 aa, unidentified
MSVAVISKTGERLMPSSEYRARKLLKSGKAVKYSYHPFTIQLTKRKTGYAQPIELCMDTGYIHIGISVKSEKHEYLAEQIDTLTDEKTKHGACRMYRTLRRGRKRYRQPRFNNRKRDKDWIAPSLEHKKDIHVQAISRINKVMPLTDITMEMGNFDTQVLKAKEEGKPLPQGADYQHGERYGIATLREAVFSRDGYKCQCCGRTISDGAILHVHHIKYRSQGGTNSMTNLATVCDKCHTPKNHKPGGKLYNWKPKLPDFKGATFMTTIRWQLYNEVKSLFPDINVHITYGAATKEQRRELNIDKSHVNDAFAMGKFHPKHRTNAALYKKKRRNNRCLEKFYDAKYIDSRDGSKRTGQELFNGRINRNHKKDSENLHRYRLQKITAGKRTVRKRHYNIQPHDIVMYENRKRETSGCQSNGTRVILLSDKKSVAVKKVKIYKYAGGYFKSTFN

SEQ ID NO: 17150 - protein, 428 aa, unidentified; identical to SEQ ID NO: 5055

SEQ ID NO: 17151 - protein, 420 aa, unidentified
MQYVYVLNKHGEPLMPCSPRKARLLLKQKKACVIKRTPFTVKLLYGSTGYKQPVTLGVDAGSKHIGISATTEKHELYREEATPRNDVVDLLSARRAFRRSRRNRKTRYRAPRFDNRVHSKHKGWLAPSVEVKIQEHITLVEHVCRILPVTLVRVETAEFDTQRLKAMLEGKPLPVGTDYQLGEMYDEYNVRQYVLKRDNYTCQCCGAHSTKTKGVKLHVHHIETRRTGGNAPNNLITLCTACHKALHAGKVTLDGKKRGKPLKDAAFMGIMRKTLMERLRKELKIPVQGTYGYITKCLREKNGIPKSHTNDARCISKNPLAIPCDTCYYTKAVRHHNRQLHKATILKGGIRKANQAPYIVKGYRLWDKVSCNGTECFITGRRTSGYFALKKLDGTVISNSISYKKLRLLEVATNYITERK

SEQ ID NO: 17152 - protein, 419 aa, unidentified
MYVYVLNKHGEPLMPCSSRKARTLLDNKKACVAKRTPFTIKLLHGSAGYKQPITLGVDAGSKHVGLSASTETHELYREEFTPRNDVVDLLSTRREFRRARRNRKTRYRAPRFNNRVHSKHKGWLAPSVEVKIQEHITVIKHVCQIMPVSLVRVETAEFDTQRLKAMLEGKPLPVGTDYQLGEMYDEYNVRQYVLKRDNYTCQCCGAHATKTKQVKLHVHHLESRKTGGNAPSNLITLCPTCHKAIHEGKKTLDTKKRGKPLRDAAFMGIVRKTLLMRLRKKLSIPVQQTYGYITKMLREKNNLPKSHMNDALCIAKHPKAAPCENCYRSKAVRHHNRQIHKATILKGGIRKNNQAPYTVKGFRLWDKVLCNGQECFISGRRATGYFALKKLDGTVVTNSVSYQKLRLLETAKNYLRERM

SEQ ID NO: 17153 - protein, 465 aa, unidentified; identical to SEQ ID NO: 3856

SEQ ID NO: 17154 - protein, 451 aa, unidentified
MWTYHYFVVSYYSLRRVNVVFVISKEGKPLMPTKNHAKVRILLKHKKAKVIRRKPFTIQLLYETTTYTQPITLGIDSGYSYIGFSAITEKEELICGEVKLLQGISERLKERAMYRRQRRSRLRYRKPRFDNRKKCSDWLPPSIQHKFDSHIRFINFLKKILPVTDVVIEVANFDTHKLKNPDVEGIGYQQGEQEGFYNLREYILYRDNYKCQLCGREDLPLEVHHIGFWKQDRTDRPSNLITLCIKCHTPKNHQENGKLWGLEPILKPLKEATFMSTVRWKLVNILNCKYTYGYITKFKRVALGLEKTHYNDAFCIAGGINQARTKPIIFEQIRRNNRSLEKFYDAKYIDIRTGKVATGQELFCGRRTRNKNYNTENLRKYRGQKISKGQRRIRTQRYFYQPKDIVIYNGKKYVVKGVQNKGNYIKLEKLNKPVKVSLVKPYEFRKGFCVV

SEQ ID NO: 17155 - protein, 417 aa, unidentified; identical to SEQ ID NO: 2758

SEQ ID NO: 17156 - protein, 490 aa, unidentified; identical to SEQ ID NO: 7071

SEQ ID NO: 17157 - protein, 461 aa, unidentified
MVYVINKQGQALMPTERFGKVRRLLKNGLAHVVCRIPFTIQLDYDTTDYTQPISLGVDAGSKHIGISATTSEKELYAADVELRNDIVDKLSTRREQRRTRRSRLRYRKARFNNRISSKRKGWLAPSVENKIQTHLTVVEKIHKFLPITNIVVETASFDIQKIKNPSISNEEYQQGEQLDFFNVREYILFRDGHTCQHCKGKSKDKVLNVHHIESRKTGGDSPNNLITLCETCHKAYHRGEFELNVKRGKSFRDAAFMGIMRWNLYDRLKNIYPNVSMTFGYITKNTRITNNLPKEHYVDARCISGNPVAKPLGYYFYQKKVRCQNRQIHKVNFLKGGRKKLNQAPFLVKGFRLFDLVEYQKDLYYIFGRRDSGFFDIRKLDGTKVNKGSISCKQMRLIDIRKTIIIEKRIASKFMKKGDKVREIGDTLTGTIVYIANGYADVKYPNMKGVCSLPVQFLEKV

SEQ ID NO: 17158 - protein, 408 aa, unidentified
MPCENVVARLLLKQKKAKVKRKTPFTIKLLYDTTEYIQDCTLGVDTGSSHVGTSVINSKNEVLYMSDVEIRNDIADKMTQRAKYRRNRRNRKTRYRKARWLNRKNSIKKDRFSPTMRSKLDSHTKEIEFIKSILPISRLVIETATFDPHLLKNPSLHNSIYKKWGYQQGGNYGFENTKAKVLNRDNYICQYCKGKKKDSKLEVHHIIYRSNGGSDEEDNLITLCHTCHKCVHIGIVKLKLTGKRKGQLKHATQMNSIRIQLLKLCSDAIETFGYITKANRLMLGIDKNHHLDACVIASGGNKFTIRQNILYRKKCVSDGDFQQTKGIRSQQAIPTGKIQGFRKFDKVRYLGKEYFIKGRMSSGYAILMDIEGNKVDFSSMPKGWKTPKLSNCKRISARKTWMVDSLVV

SEQ ID NO: 17159 - protein, 439 aa, Moorena sp.
MRVFVLDKDFKPLDPCRPARARLLLKQGRAKVFRRYPFTIILKDLEVGNCTTHNHQLKIDPGAKTTGLAILQDNTVIWGAEIRHRGFQIRDALTSRRQLRRSRRNRKTRYRKPRFLNRKRPLEWLAPSLMSRVHNILTWVKKLIRFCPMTGISQELVRFDTQKMENPEISGTEYQQGTLYGYEIREYLLEKWNRKCAYCGATDTRLEVEHIKPRSNGGSDRVSNLAIACHDCNQAKGNQDIKQFLSRKPDVLKRVLSQSKRLAVGHATRTLADTAAVNSTRWKLYKKLKSTGLPVETGSGGQTKYNRRRFNLVKTHWLDAACVGNVEAIYVENCQFLLIMAKGHGTRQICRTDKFGFPKRYCSRTKIHKGFQTGDIVKAIVTKGKKIGTYVGRVATRKTGSFNISTANGLIQGISYKYCTPIHKKDGYSYQINTLSSLS

SEQ ID NO: 17160 - protein, 427 aa, Moorena sp.
MQNYVFVIDTKNQPLNPISPKKARRLLDKGKAAVFRMYPFTIILKTAIDNPTISPCQIKIDPGSKVTGFALVQNNQVIWGMELEHRGGLIKKKLESRKAVRHRRRNRNTRYRKPRFLNRRRKEGWLAPSLEHRVLTIETWVKRLIKFCPINQVWVERVKFDTQKMQNPEINGVEYQQGELAGYEVKEYLLEKWGRECTYCGKQSVPLQIEHIHPKSLGGSNRVSNLCLACEKCNQRKGNKPIEEFLKKKPNLLQKIKTKTKQPLPDAAAVNTTRNKLVKVLRSIKFVVTGTGAQTKYNRTRLGLPKQHWIDAACVGNIETLVLKTSQPLLVTCKGQGGRQKAALNKYGYPIRHNPLKPIKGWLTGDIAKHQKLGIGKVTPRSKGSFGFTPLGMKGYKSCFPQDISAIHRKDGYTYSFCQHMPEFTGK

SEQ ID NO: 17161 - protein, 440 aa, unidentified; identical to SEQ ID NO: 5150

SEQ ID NO: 17162 - protein, 465 aa, unidentified; identical to SEQ ID NO: 10943

SEQ ID NO: 17163 - protein, 442 aa, unidentified; identical to SEQ ID NO: 4533

SEQ ID NO: 17164 - protein, 448 aa, unidentified; identical to SEQ ID NO: 8365

SEQ ID NO: 17165 - protein, 394 aa, unidentified
ANGTISKKCVKQDTAQNGSVSKRAKKIGVIKRHLPGCEKEVLCIGIKNKEAKFSNRVRPEGWLTPTANQLLQTHINLVKKIQKFLPISDVVLEVNKFAFMQLDNPNIQKWQYQQGPLYQKANLEEAVSEMQEHHCLFCKKPIDHYHHVVPQHKNGSNTIGNIVGLCTKHHDLVHKEAAWQEKLAKKKTGLNKKYGALSVLNQIIPALTKELSSLFPKHFFATNGKSTYDYRAAHGVSKDHWLDAYCIACSVLADDVCDNNINSHVPYELKQFRRHDRRALHKENMSRVFTLNGKSVATNRHKATEQTTDSLEEFRQCQPDDVCKLKVKEHYPEYRNPKRNFPGCVFLVGKHTHVMQGTSGSHNGKADGYYDTNGNSYSSGECKFVAKNEGIVFA

SEQ ID NO: 17166 - protein, 428 aa, Moorena sp.
MQNYVFVIDTNKQPLNPILPKKARRLLDKGKAAVFRMYPFTIILKTAVDNPTISPCQIKIDPGSKFTGFALVQNDQVIWGMELEHRGGLIKKKLESRSAVRRGRRNRHTRYRKPRFLNRRRSEGWLPPSLEHRVSTIETWVKRLIKFCPVSEIWVERVKFDTQKMQNPEINGIEYQQGELAGYEVREYLLEKWGRECAYCGKQNIPLQIEHIHPKSKGGSDSAKPTLRERVSNLCLACEKCNQRKGNRPIEEFLKKKPGLLEKIKNKALSPLRDAAAVNTTRNKVVKVLKEIKPVVTGTGAQTKYNRTKLGLPKQHWIDAACVGDVEALVLRTSQPLLVTCKGQGGRQKAALNKYGYPIRHNPLKPIKGWCSGDIAKNLLTGEFGRVNPRSKSNSFNYTVSGKKAISLHVKNLCRVHRKDGYSYGFCR

SEQ ID NO: 17167 - protein, 423 aa, Moorena sp.
MRVFVLNSNRQPLDPCKPARARILLSTGKAKVYRRYPFTIILTEEIQEPITHGSQFKIDPGAKTSGLAIVQGNRIVWGGELTHRGFQIRDALTSRRQLRCARRNRKTRYRKPRFLNRSRPEGWLAPSLMSRVQNILTWVKKLTRLCPIAGISQELVRFDTQKLQNPEISGIEYQQGTLYGYELREYLLEKWNRKCAYCGTTGTQLEIEHIKPLSKGGSNRVSNLAIACHSCNQSKSAQEIEQFLSGKPDVLKRVLSQAKRPLTDAAAVNTTRWKLYHELKSIGLPVEVGSGGLTKFNRCRQNLPKTHWLDAANVGKVDTLIIEGYQPLLIAAKGHGTRKICRTNKYGFPIRYCSRTKIHKGFQTGDIVRAVVTKGKKIGTYVGRVATRKSGSFNISTKSGLVQGISHKYCQFIHRKDGYAYRH

SEQ ID NO: 17168 - protein, 420 aa, unidentified; identical to SEQ ID NO: 3504

SEQ ID NO: 17169 - protein, 418 aa, unidentified; identical to SEQ ID NO: 14280

SEQ ID NO: 17170 - protein, 515 aa, unidentified
VTDVSTIYVLNKDGKPLMPTTRCGHVRYLLKEKKARVAASKPFTIQLLYETDDVVQPLYLGIDPGRTNIGVAVVKTDGTAVFTAHLETRNKEIPKLMQGRKKARRARRTNGRRCRRQRRAKANGTISKKCVKQTTAQNGSVSKRAKGIGVIKRHLPGCEKDVLCIGIKNKEAKFSNRTKSEGWLTPTANQLLQTHINLVKKIRKFLPISDVVLEINKFAFMQLDNPNVQKWQYQQGPLYQKANLEEAVSEMQEHHCLFCKKPIAHYHHVVPQSENGSNTIGNIVGLCTKHHDLVHKDTAWQKKLAKKKTGLNKKYGALSVLNQIIPALTKELGSLFPKHFFATNGKSTYDYRAAHGVRKDHWLDAYCIACSVLPNDVCDKNINSRVLYELKQFRRHDRRALHKENINRVYTLNGKKVATNRHKAIEQTTDSLEEFRQNHPNDVCKLKVKEHHPEYRNPKRNFPGCVFLVGKHTHVMQGTSGSHNGKADGYYDTNGNSYPFGKCKFVAKNEGIVFA

SEQ ID NO: 17171 - protein, 515 aa, unidentified; identical to SEQ ID NO: 15867

SEQ ID NO: 17172 - protein, 431 aa, unidentified
MVYVLDINGQPLMPTTRHGKVRRLLNSHLAKVVKRCPFTIQLLYQSTKEIQPVSLGVDAGSKHIGMAATTEKKVVYQEELSPRNDVVKLLSARRTLRRTRRNRKTRYRKPRFNNRVHSKHKGWLAPSVEVKIQEHITAIKRICQILPISEIHVEISEFDLQRLKAMEEGRTLPVGTDYQLGEQYDFYNTRQYVLHRDGYTCQCCGTHDNNIKLHVHHIESRQTGGNAPSNLITLCEHCHKALHKGKFELPKGKKRGKTYRDATFMGIMRKTLLERLKKEIDVPVAGTYGYITKYWRERAGLEKSHINDAICISKYPYAKPLDTYYLTKVVRNHNRQIHKSNFSKGGIRKRNQAPYLIKGFRLFDKVLYQGKEYFIFGRRATGYFDIRTLDGTKVNKDSISYKKLRIQDTAKAYLKEARAIPHMNKFTCVLA

SEQ ID NO: 17173 - protein, 426 aa, Anoxybacillus sp.
MVFVLDTNKCPLAPCHEAVARKLLKQGKAAIYKRYPFTIILKKSVDNFRPKTPYRLKIDHGSKHTGLAILRGQEVVWLGQLDHRTDIKERMDKRRAFRRARRNRKTRYRKPRFLNRRRKDGWLPPSLESRVQNIQTWVNRLKKLCPIGYISYENTKFDTQLMRNPEISGIEYQQGTLQGYEVREYLLEKFGRKCCYCGKENVPLEVEHIIPKSRGGTDRVDNLCLACHDCNQRKGSKTAEEFGYPHIQKQVKESLKDASAVNSTRWKVYEVLKQSGCEVECGTGARTKMNRIRLDLPKTHYFDACCVGESTPNHLYFKTKEVLFIRAKGRGSRSRTNLDRYGFPRGYLARQKFFFGFQTGDMVKAVIPRGKYQGVWFGEVACRKTGSFDIKGKDGKRIAQGINYRYVQVIQRFDGYTYRREGMNIA

SEQ ID NO: 17174 - protein, 450 aa, unidentified; identical to SEQ ID NO: 4205

SEQ ID NO: 17175 - protein, 426 aa, unidentified; identical to SEQ ID NO: 3614

SEQ ID NO: 17176 - protein, 555 aa, unidentified
YIKMTSCTCTVFPACNHAKASSSQGKHNLLFRQERLIVKEVAYMPTVYVLNKDGKPLMPTTRGGHVRHLLKEQKARVVRAKPFTIQLLYETDDAVQLLYLGIDPGRTNIGVAVVKANGTAVFTAHLETRNKEIPKLMQDRKKARRARRTNGRRCRRQRRAKANGTISKKCVKQTTAQNGSVSKRAKDIGVIKRRLPGCEKDVLCIGIKNKETKFTNRTRPEGWLTPTANQLLQTHINLVKKIQKFLPISDVVLEVNKFAFMRLDNPDIQKWQYQQGPLYQKGSLENAVSEMQEHHCLLCDKPIDHYHHVVLQSENGSNTIANIVGLCSEHHNLVHKDAAWQKKLAEEKVGLNKKYGALSVLNQIIPALTNKLSVLFPKHFFVTTGKSTHDYRESHSVSKDHWLDAYCIACSVLPSNVCDSNINNHVPYELKQFRRHDRRALHKENMSRVYTLNGKAVATNRHKAIKQTTDSLEEFRQSHPGDVCKLKVKEHHPAYRNLNRNHPGSVFFVGEQAHVMQSIVASKDGKATRYKDTNVNKIAAGQCRFVAKNEGIVFT

SEQ ID NO: 17177 - protein, 447 aa, unidentified; identical to SEQ ID NO: 5316

SEQ ID NO: 17178 - protein, 418 aa, unidentified
MVCVLSKTGQPLMPTENHAKVRVLLKQQKAKIVHRCPFTIQLLYDSTDYTQPVSLGIDAGSRHIGVSATTETKVLYEADVTLRNDIVDLLSTRREARRTRRSRKTRYRKPRFNNRTRKDGWLAPSIQQKVDTHLTTVRKVTEILPVNSITVETASFDIQKIKNPDIAGTGYQQGEQLDFWNVREYVLFRDGHKCQCCKGKSKDPVLNVHHIESRKTGGNAPNNLITLCETCHKGYHNGTVSLPKNIRRGMKFNDAAFMGIMRWAFFNRVKETYEPLGIMVNMTYGYITKNTRIEHNLPKDHFIDARCISGHPDATSGGTVFYQKKVRCHNRQIHKQKILKGGIRKRNQAPYLVKGFRLFEKVKYHGKQYFIFGRRSSGFFDIRTLDGTKVNKGSVSCKKIRSLDMPRSYLTEERKVIV

SEQ ID NO: 17179 - protein, 494 aa, unidentified; identical to SEQ ID NO: 10441

SEQ ID NO: 17180 - protein, 399 aa, unidentified
  REGION 1..399: note = IscB polypeptide
MSNFKVFVVDSEGTPLLPTSQARARLLLKKEKATVYSVIPFTIQLKYKIDKPIGEFKCGIDDGAKYVGISIGYNKKVIFAGNIELRQDVKRKMKERHDCRVVRRSRKLRNRPKRFLNRGKKGFITPTIRTKKESILRVINFLKKRINITSCVIEHGQFDISSMNKGYKLIGEEYQKSEYKGNNWRQKVLFRDNYTCRKCKTKSQLQAHHIKYVSNGGTNLVSNGYTLCKDCHSKLHKGEWKLKQSKASNLKFAAHTQQGKWWLFDKLKSIFKKVNICYGWMTAKNRRRLNLEKDHHYDASAMINCNDYETNIYKIKPRRTKVWENNPTKKCTEKNGFKHYDIVKSIHRTKGIIIGSIRSLKAKVITLRTSFDNNFPVSYNKSKILWRPKGLILINNFNG

SEQ ID NO: 17181 - protein, 431 aa, unidentified
MPNKVYVINKHGRPLMPCSPAKARHLLDAGKAKVKKRTPFTIQLVYGSSGYTQEVILGVDAGSKTIGMSASTTKEELLSAEVKPRNDVVDLLSTRREFRRARRNRKIRYRKPRFDNRVRSKHKGWLAPSVEVKIQEHITSIKRVCRILPVSKVVVETAEFDLQLLKAIADGKPVPQGEDYQKGEMYGHYNVRQYVLWRDGYTCKCCGAHTTKKKEVRLHVHHLESRKVGGDAPDNQVTLCESCHEKLHKGLIAEKDFKKRKRKSTRDATFMGIMRKTLMQRLCSELPIPVIETRGYITKATREKLLVLPKSHTNDALAIAQGKQGFNVGYLPGIVQIDKICTIRPVRHHNRQLHKATILKGGIRKSNQTEKYVFGYCLFDKVQFNGQDCFIWGRRTTGIFTIKTINGKMIKDGISFKKLKPVEKSTGYLIA

SEQ ID NO: 17182 - protein, 427 aa, Nostoc sp.
MSKVFVLDTEKRPLDPIHAAQARQLLRNKKAAVFRRFPFTIILKESRADASVSDLRIKLDPGAKITGIALVNDSTGEVVFAADLKHRGFAIRDALISRRQLRRTRRNRKTRYRKPRFLNRTRPEGWLAPSLMSRVHNVETWVNRLRKFAPITAISTELVKFDMQLMRNPEIEGKEYQQGTLAGYETREFLLEKWNRQCAYCGIKDIPLQIEHIHSRSKGGSNSITNLTLSCEKCNVKKGTKDIKDFLKKDPTKLQKILAQAKKPLADAAAVNATRYKLLEVLKSTDLPVECGSGGLTKFNRTRQQLIKTHWLDAACVGQSTPILIIKGIKPLLITANGHGTRQMCRTDKFGFPNRYVPKLKFIKGFQTGDIVKAVVTNGKKIGEYIGRVAVRSTGSFNISAQRGLIQGINYKFCKSIHKKDGYSYSS

SEQ ID NO: 17183 - protein, 427 aa, unidentified
  source 1..427: note = Candidatus Kapabacteria bacterium
MQKVFVLDTDKRPLAPCRPKRARMLLGEGKAAVYRRFPFTIILKRSYPDATPRALRAKLDPGSKTTGIALVEETTGEVVFAAELTHRGQRVHEALEQRRGVRRGRRNRHTRYRKPRFLNRTRPRHGNRGAWLPPSLESRLANITTWVQRLTRLSPVKSMSQELVRFDTQKMQDAEISGVEYQQGALQGYEVREYLLEKWQRRCAYCTAKDVPLEVEHIIPKARGGSNRVSNLTLACRKCNERKGTQTAEEFGHEHLHKQARMPLKDTAAVNAPRWELYNRLQLFGLPVELGSGGRTKYNRNRQGYAKAHWIDAACVGASGEAVRIDAGMRPLTITAQGWGNRQMCRVDKYGFPRTSAKGAKSVKGFQTGDMVKAVVPSGAKRGTHEGKVAVRSSGSFNITDKNGTVQGVSYKYCKIVQRCDGYRYAV

SEQ ID NO: 17184 - protein, 417 aa, unidentified
MPCSPAKARLLLKEKKAIVKRRTPFTIQLTIATGEAKQPVTLGVDSGYKHIGLSATTEKAELYASEVELRQDITDLLSARLALRRSRRSRKTRYRAPRFNNRVASKHKGWLAPSVENRIAAHLSRVEAVMRVLPVTAITVETAAFDTQLLKNPDITGAAYQQGEQLGFWNVREYVLFRDEHVCQHCRGKSKDSILNVHHIESRRTGGDAPNNLITLCETCHKAFHRGKIKLKVRRGKSFKAETFMGIMRWTLFERLKKAHPELNVRNTYGYLTKHKRISHGIAKSHCADAYCIADNLGAKRLEGFFFQKQTRKHNRQIHKLLILKGGLKKKNQAPYEVKGFRLFDKVICKSEEAFIFGRRTSGSFDVRRLDGTRISAGISYKKLRLLEPRTTYLTEFRKEAALPPLHECRGFRAEFL

SEQ ID NO: 17185 - protein, 462 aa, unidentified
MSVLVIGRNGRALMPTTSRKARLLLKKKIASVVCRHPFTIQLLYKTGCATQEGCIGIDTGSQHIGVGVTCGDRVILKEEHELRSSMEKRSLLVTRAAMRRGRRYRKVRYRKPKWRQHTKRMYFEKANRKGQHWRKVKTTTQSPRPKGWLSPSLQSKCDHHFRIIDRYLKYLPDSITRNLVIEAGRFDMARMNDPMIHGEMYQRGPMYDAENLRAYIFARDGYQCACCKAKAGTTRKTDGTTVKLVAHHILFRSRGATDNPKYMVSVCDHCHTTKAHQPGGVLYSWMERNKKVTRGLRDAAFMNILRQRLFARYPQAAFTYGNITAADRKQLRLPKSHANDAVAISLFGKEVSAVRDTCQTVHYKQVRKSKRSLHEAIPRKGRKRPNTKAVRNKKNTTQVNGFKLWDSVLANGKKLFICSFTGTSAYLIDKNGCYVSQPGKTYKQWPLSKLKRLHPNGNWLMT

SEQ ID NO: 17186 - protein, 406 aa, unidentified; identical to SEQ ID NO: 7406

SEQ ID NO: 17187 - protein, 418 aa, unidentified; identical to SEQ ID NO: 6835

SEQ ID NO: 17188 - protein, 512 aa, unidentified; identical to SEQ ID NO: 9077

SEQ ID NO: 17189 - protein, 431 aa, unidentified; identical to SEQ ID NO: 4830

SEQ ID NO: 17190 - protein, 466 aa, unidentified; identical to SEQ ID NO: 3943

SEQ ID NO: 17191 - protein, 447 aa, unidentified; identical to SEQ ID NO: 5309

SEQ ID NO: 17192 - protein, 483 aa, unidentified
MKVYVIGLNGIGLAPTTPRKARLLLKNGRAKIAFRQPFTIQLTYKTGCTHPKEMVIGIDTGSQHIGAGIISKETEQVVSKEEYELRSSMEKRSLLETRKAYRRGRRYRKVRYRHPKFKPATRRVYIEKPVTQNKHQTHWKKQANTFDSARSDGWLPPSIQSKLDHHIRIISRYQNALPKDTQLRIEVGRFDVQHMENPQIRGEMYQKGAMYEYENKKAFVFSRDGYTCKCCKCKAGSKRKDGTTVKLVVHHVDFRSQGASDNPNRLVTVCDRCHTTAAHKPGGILYDWMLKEKKFTRGYRDTSIMNILRRRLWQAFPDAAFTYGNITAVDRKILHIDKTHGNDAVAIAAHGMDRITDIPNTTYYRQMRKQKRSLHEATPRKGRKEPNRTAKRNAKNTCVVKGIYLNDKVKAFGQTGWVTGFSGTSSVYIKNREGEYITVPGKNHKMVPLAELSVRTHCNNWAVSDIKTISNRRQENCDAEMCM

SEQ ID NO: 17193 - protein, 408 aa, unidentified; identical to SEQ ID NO: 4614

SEQ ID NO: 17194 - protein, 427 aa, Enterococcus sp.; identical to SEQ ID NO: 5630

SEQ ID NO: 17195 - protein, 336 aa, Clostridium sp.; identical to SEQ ID NO: 16390

SEQ ID NO: 17196 - protein, 442 aa, unidentified
GERLMPTSEYRARKLLKSGKAIKYSYHPFTIQLTERKTGNIQPIELCMDTGYIHIGISVKSEKHEYLTEQIDTLTDERSRHNARRMYRSQRRNRKRYRQPRFNNRKKDKGWITPSLEHKKNIHVQTISRINNVMPLTDITMEMGNFDTQVLKAKEEGRPLPQGVDYQHGERYSIATLREAVFARDGYKCQCCGRTIKDGAILHVHHIKYRSQGGTNSISNLATVCDKCHTPKNHKPGGKLYGWKPKLPSFKGATFMTTIRWQLYNEAKALFPDIDIHITYGAATKERRRELNIDKSHINDAFVMGQFHPRHRIKAVLYKKKRRNNRCLEKFYDAKYIDSRDGKKRSGQELFNGRINRNHKKDSENLHQYRLQKVTAVKRTVRKQHYSVQPHDIIIYESRKRETTGCHCNGARVMLLPDKKSVSIKKIKIYRYAGGYFKSTFN

SEQ ID NO: 17197 - protein, 515 aa, unidentified; identical to SEQ ID NO: 5111

SEQ ID NO: 17198 - protein, 431 aa, unidentified; identical to SEQ ID NO: 8285

SEQ ID NO: 17199 - protein, 512 aa, unidentified; identical to SEQ ID NO: 8121

SEQ ID NO: 17200 - protein, 480 aa, unidentified
LYTKPLDNIGEGSLPPSGEINLKGMTFMVYVKSIDGKALMPTSNAKARKLLKQKKAKVVSLRPFVVKLTYKTKTEYIQKLNLGVDSGYSNIGFSVIDAKQEYIAGEVKLLEGMKKRLLEKASYRRIRRSRLRYRKARWNNRVKSKKKGWLAPSLKHKLDTHIKFIDYLKNILPIGKITIEVANFDIQKMKDDLISGIDYQNGDMFGFWNVREFVLHRDGHKCQNPNCKHKDKKEQILKVHHIRYRSEGGSDRPENLITLCSKCHTPANHKKGKFLYDWCVNGKKVRGFKDATFMSMIRWHLVNELKSKHNNVSITYGYITKNHRIQNGIEKSHLNDAFAIAKGTNQARTKDRFLVIQDRLKNRSLEKFYDSKIIDIRTEKKVSGGDLNCGRSTRNKNLNTENLRKYRGVKISKGQRRIRKQKYFYQPNDLVKYDGKVYTVKGTQNEGKYIALKEIKKVPKVELLIPYVFKKGLNWSYGLC

SEQ ID NO: 17201 - protein, 406 aa, unidentified; identical to SEQ ID NO: 2874

SEQ ID NO: 17202 - protein, 430 aa, unidentified; identical to SEQ ID NO: 3252

SEQ ID NO: 17203 - protein, 512 aa, unidentified; identical to SEQ ID NO: 16617

SEQ ID NO: 17204 - protein, 422 aa, unidentified
LNKRGKPLMPCSPAKARLLLKEKKAIVVRRTPFTIQLTIATGESKQPVSLGVDAGYKHVGLSASIEKAELYASEVELRKDITDLLSARRALRQSRRNRKTRYRAPRFDNRIRTKRKGWLAPSVENRINAHLSRIEAVLRLLPVTKITVETASFDMLLLKNPDIAGKEYQEGEQLGFWNVREYVLFRDGHVCQHCYGRSKDPVLNVHHLESRRTGGDSPGNLITLCETCHKALHRGEITLKAKRGQSFRAQAFMGIMRREGLNRLKASHSELEVNNTYGYRTKHARIVNGIDKSHCADAFCIAGNLGAERLCEFFFQKQTRRNNRQIHKLSILKGGIRKRNQAPFEIKGFRLFDKVACKGEESFIFGRRSSGYFDVRKLDGTRISAGISYKKLRLLEKRRTYLTEIRKEEALPPLPEGRGLRA

SEQ ID NO: 17205 - protein, 442 aa, unidentified; identical to SEQ ID NO: 4418

SEQ ID NO: 17206 - protein, 416 aa, unidentified; identical to SEQ ID NO: 11239
  source 1..416: note = Fusobacteriaceae bacterium

SEQ ID NO: 17207 - protein, 408 aa, unidentified; identical to SEQ ID NO: 8581

SEQ ID NO: 17208 - protein, 430 aa, unidentified
MVYMLSHTGQPLMPTEDHRKVRLLLKNKKAKVVKRTPFTVQLLSCTHEYKQPVTLGVDAGSRHIGLSACTENRELYAEDLQPRNDVVKNLSDRRQYRRSRRNRKTRYRAPRFENRVHSKHKGWLAPSVEVKIQEHITAIKRVCSRIPISKIIVETAEFDMQLLKAMELGLPLPAGTDYQEGEMLGQYNVRQYVLFRDSYTCQCCGAHPTAKKEVKLHVHHIESRKTGGNAPGNLITLRERCHKLLHEGKITLPGKRLHRPMRDAAFMGIMRKTLLARLRNELSVPVYETHGYITKYLREKHGIEKSHTNDARCIAGYPLASPCADIFYAKAVRHHNRQIHKATILKGGIRKRNQLPYLVHGFRLWDKVLCNGKEGFITGRRTSGFFVVKQLNGTTLSVGISHKKLRLLEKRTNYITERRTAIPLRLTLGV

SEQ ID NO: 17209 - protein, 475 aa, unidentified; identical to SEQ ID NO: 4985

SEQ ID NO: 17210 - protein, 443 aa, Fervidobacterium sp.; identical to SEQ ID NO: 9897
  VARIANT 75..77: note = X can be any naturally occurring amino acid

SEQ ID NO: 17211 - protein, 470 aa, Blautia sp.; identical to SEQ ID NO: 2925

SEQ ID NO: 17212 - protein, 442 aa, unidentified; identical to SEQ ID NO: 2903

SEQ ID NO: 17213 - protein, 470 aa, unidentified
VFVPLSLTVIQLYQGEGSAVSLTSPKNLGEENITRLTEISMSNLVFVFDTNQRPLDPVHPGKARRLLSTGNAAVFRRYPFTIILKPACPEVPMQELELQLDPAAKVTGMAVVQGTKVIFGAELEHRPQQIKDALLSRGQLRRSRRNRKTRYRQARFLNWTRPKGWLSPSLQHRVDTTMTWANRFRRLAPIARITQELVRFDLQLMHNPERSGVEYQQGELQDDEVREYSLEKWNRKCAYCGAKNVALEVEHIQPQSKGRTDRVSNLTMACHSCNQSKSNGDIRDFLSGNPDVWNRILEQAKSPLKDAAAVNSTRWALFNALKQTGLLVATGTGGQTKFHRTRLDLPKTYWLDAASVGKIDSLQVLTTKPLLIAAKGHGTRQMCGTDKYGFPTRDCSRVQIHQGFRTGDIVTAIVTKGKKIGSYVGRVLARASGSFDITTQLGRVWWNEPQVLPTNLPKGWLCLCVRSYYR

SEQ ID NO: 17214 - protein, 423 aa, unidentified; identical to SEQ ID NO: 3951

SEQ ID NO: 17215 - protein, 248 aa, unidentified
LLMVAVVDLFGKPLMPTNEYRARRLLKQKKAKIFGYRPFTIQLTERKSTEIQPIELCMDTGYIHIGISAKSERHEYLGMQIDTLTDEKLKRDDKRQYRRQRRNRKRYRAPRFDNRRRKEGWIAPSLEHKKEIHIDAIQRICKVMPITDITLEMGNFDTHVLKAVEEGKPLPQGSDYQHGERYGIATLREAVFLRDGYKCQCCEKSVKDGAILHVHHIKYRSQGGTNRMSNLITVCDKCHTPKNHKPGG

SEQ ID NO: 17216 - protein, 415 aa, Bacillus sp.
MFVYVVNKHGHPLMPCTPRKARVLLKKKQAKVIKREPFTIQLLYGSSGYKQPISLGIDAGTKHIGFSATSENTVFIEGEVQLRTDIQNLLSTRREFRRARRNRKTRYRQARFQNRKKSEGWLAPSVQHKVDSHIRLIEKLHKILPITSITVEVAQFDTQKLKNPDIRGEEYQQGDQLGFWNTREYVLFRDKHSCQQCKGKSKDKILNVHHIESRKTGGDSPDNLIALCETCHDYIHQHHLEHLFTRKRKTLRDASHMTVMRWFIYNGIQERFENVHLTYGYLTKHTRISHGLEKSHEVDARCISGNPLAHPTQHVFILKQVRRNNRQLHKATILKGGIRKANKAEKYVKEFQLFDQVKYEEQACFIFGRRSTGYFDLRLLDGTVIHRSASYKKLIPLARASTWLVERRERQGDPH

SEQ ID NO: 17217 - protein, 448 aa, unidentified
MSTGLRAVQAEPAGIRKGDALKVFVLNMRGRPLMPCSPARARHLLKAGKAVVRRRTPFTIQLRIATGETKQSVTLGVDAGAKHVGLSAATEKEEVFASEVELRQDITGLLAARLSLRRERRQRKTRYRAPRFLNRVRSKHKGWLAPSVENRIQAHMSRIDAICGLLPVTKIVIETASFDIQKIKHPDVEGTDYQQGDQLGFWNVREYVLFRDGHVCQHCHGHAKDKILNVHHLESRQTGGDAPNNLITLCETCHKACHAGKIKLKVKRAQSFRAEAFMGIMRWTLLDRMRKAHSGLPVENTYGYLTKNTRITPGLPKTHCVDAYCIAGNLKAVRRGVCLHQRQVRKHNRQIHKCTVLSKTLKDGTKIGYRKLNQTPHLVKSFRLFDKVRCLGQTGFIFGRRSSGYFDVRRLDGVKLSSGISYRKLTLLEKRSTYLTELRKEDGASSPV

SEQ ID NO: 17218 - protein, 304 aa, unidentified
LAGAICGGQDPGAYHQYQAGFELLPIGKVVVETAEFDLQLLKSIADGMPVPQGEDYQKGEMYGFYNVRQYVFFRDGYTCQCCGAHGKGIKFHTHHLESRKTGGNAPDDLVTVCDKCHKAFHAGLITDAKLKKRRRKSTRDAAFMGIMRKTLLQRLRAELPIPVVETRGYITKATRERLLKLPKSHTNDALAIAMGRHGFGIEEVTYMPQSDRIYQIKPVRHHNRQLHKAIPKKGGRRQRSQGPKYVQGFRRFDKVLYRGQECFIWGLRTRGYFQLKLLNGTKVHESAKASELILLEHRSGYLIA

SEQ ID NO: 17219 - protein, 442 aa, unidentified; identical to SEQ ID NO: 2834

SEQ ID NO: 17220 - protein, 442 aa, unidentified; identical to SEQ ID NO: 9431

SEQ ID NO: 17221 - protein, 419 aa, unidentified; identical to SEQ ID NO: 4877

SEQ ID NO: 17222 - protein, 453 aa, Clostridium sp.; identical to SEQ ID NO: 14499

SEQ ID NO: 17223 - protein, 512 aa, unidentified; identical to SEQ ID NO: 7636

SEQ ID NO: 17224 - protein, 457 aa, unidentified; identical to SEQ ID NO: 5177

SEQ ID NO: 17225 - protein, 414 aa, unidentified; identical to SEQ ID NO: 4492

SEQ ID NO: 17226 - protein, 557 aa, unidentified; identical to SEQ ID NO: 3108

SEQ ID NO: 17227 - protein, 406 aa, unidentified; identical to SEQ ID NO: 2752

SEQ ID NO: 17228 - protein, 354 aa, unidentified
CGVDDGGLHVGIALVQKCKSKNKVVFKGTIEQRNDVKHLMEVRRNYRRYHRYHKRYRQARFDNRKSSKRKGRIAPSILQKRQATIRVINRLNKWINITNYWLEDVSIDIRVLTDGYKSYSWQYQKSNRLDENIRKATILRDGGKCMECGKSNCRLEVHHIKPRRRNGSNTLDNLITLCESCHQKTEGQEELYMDRYFSLLKSSDNKNLNYAQHVMIGKMWLRKQLSGLGVLYLTSGGDTANKRIDWNIEKSHTNDAVCITDLQPDTCDIKEWAIKPMRRQSKAKTDHVLGIHHRDLVEYTFKNGETHRGYVTALYPDQKAINFQSQTKHCKKVNARKCKLLWNYSKIYWFENAS

SEQ ID NO: 17229 - protein, 436 aa, unidentified
MTKTLTTQTTQACVLDQNGKPLMPTTRLGKVYRLLKTKKAHIVSYEPFTIQLDYEPNTHIIQPMTLGVDSGAIHSGYSVTNEHREYYNAEVIARNDISRNLSNRHMYRRTRRTRKTRYRKPRFNNRKNKKKGWLAPSLQQKIAVQLNEIDHLHRYFPIETIIVEVAEFDIQKIKNPDISGIEYQQGTLQGYNIRNYLLEKHGHKCFYCGKTVSDFEVEHMLPKSRGGSNRIDNLTLSCHDCNEKKGTLTAEEFIQQTLSAKKAVSKLKQLPNEKRLFKYMTYMNATRWALYDAINGTYRNVKMTYGYITKYNRIHAGLPKAHHIDAKCITGFLTIPSMSQTVVKVKMRRHNRQLHRASFSKGHIRKIACLPTTVFGFQLYDLVCFNNHRYYIKSRRSSGAFTLASVEGLKNEKRTYKKLTLLAHTNAYLTNRYINA

SEQ ID NO: 17230 - protein, 426 aa, unidentified; identical to SEQ ID NO: 16898

SEQ ID NO: 17231 - protein, 442 aa, unidentified; identical to SEQ ID NO: 2903

SEQ ID NO: 17232 - protein, 535 aa, unidentified
MYRLITEAGIPLIPERLHDTKKKKGASRMSEYIYVLGMDGNPQMPTKRKRHVEQLLQTGRAHVFRQVPFTIQLTYKNQPVLQPVTIAEDPGRSNIGMAVVSLSGELLSAAVVQTRNKKIVKLMEKRKQHRRASRNGERKARQRLAKKCHTMVKAGSLMRKLPMYGKDKRARCNMIKNTEARFCNRKREDGWLTPSAEHLVRTHINLIHKMQKFLPITDVAIEINRFAFLSLEDPSISGVDFQNGPLKGYDDLNAAVEDLQDGHCLMCNSPIEHRHHIVPRSMQGSNTIGNIAGLCCKCHEMVHKDSAFEDSLKKKKAGLNKRYAAVSALNQAIPFICKRLEQEFGKEHVHYCSGRDTSMVRRSLGYHKTKEEQLHEVDAWGIAVLSLQQIPEKAPSFDHVHEILQFRRQDRSRIKAQTSRAYYHERKKIAKNRKKAEGQREDSLQEWRKRQVERYGEEQTRKMISQLKVKKSIRRYNRLDRLMPGAVFYYQGVRYVMRGQHCEGTYLQAVGMGSKDFPTKKCKIVVHNQGLVFVS

SEQ ID NO: 17233 - protein, 426 aa, Anoxybacillus sp.
MVFVLDTNKRPLAPCHEAVARKLLKQGKAAIYRRFPFTIILKKSVDESEIKATYRLKIDYGSRHTGLAILRGQEVVWLGQLDHRTDIKERIDKRRAFRRARRNRKTRYRKPRFLNRKRKEGWLPSSLESRVQNIQTWVNRLKKLCPIGYISYENAKFDTQLMRNPEINGVEYQQGTLQGYEVREYLLEKFGRKCCYCGKENVPLEVEHIIPKSRGGTDRVDNLCLACHDCNQRKGSKTAEEFGYPHIQKQVKETLKDTSAINSTRWKVYEVLKQTGLDVECGTGARTKMNRIRLDLPKTHYFDACCVGESTTNHLYFKTKEVLFIKAKGRGSRSRTNLDRYGFPRGYLARQKFFFGFQTGDMVKAVVPRGKYQGVWFGEVACRKTGSFDIKGKDGKRIAQGINYRYVQVIQRFDGYAYGKGVAELA

SEQ ID NO: 17234 - protein, 438 aa, unidentified; identical to SEQ ID NO: 12384

SEQ ID NO: 17235 - protein, 444 aa, unidentified
  source 1..444: note = Chlamydiae bacterium
MLVFVLNKQKKPLMPCSPAKARGLLKKGLAKVISKKSFTIKLLFGSSGYKQKIIAGMDTGSKIIGIAAIANGKVLYQSQTKLRGEEIKKKMDQRRMYRRSRRGRKLRYRKPRFLNRRASRAINRLAPSVKHKVLSHLREKKFIESILPVSMWIVETASFDIHKITNPKGVSKALGKGQSYQKGRMLDFYNVKQYVLNRDKYQCQMCKKKKGLKLHVHHIQFRSNSGSNSPDNLVTLCETCHDKLHKLKKEEAEKSSKKLQKRAQKPTKHATEVSILRSQLCKHFGNPGSSQAFEETFGYITKFNRESKNLPKAHHIDAICIATCGESFEMHNQNNTSDLFFRRYVSKGDYQQSRGIRSEVKIPTGKLFGLKKIDLVKTSKGVGFVKGKRSSGFFAISDINGTIISDSVNIKKTIDRIQARKAVLTWRSQFLPDLKDRVSLREKR

SEQ ID NO: 17236 - protein, 456 aa, unidentified; identical to SEQ ID NO: 4609

SEQ ID NO: 17237 - protein, 460 aa, unidentified
MVAVVDLFGKPLMPTNEYRARRLLKQKKAKIFGYRPFTIQLTERKSAEIQPIELCMDTGYIHIGISAKSERHEYLGMQIDTLTDEKLKRDDKRQYRRQRRNRKRYRAPRFDNRRRKEGWIAPSLEHKKEIHIDAIQRICKVMPITDITLEIGNFDTHVLKAVEEGKPLPQGSDYQHGERYGIATLREAVFLRDGYKCQCCEKSVKDGAILHVHHIKYRSQGGTNRMSNLITVCDKCHTQKNHKPGGKLWNWKPKLAEFKGASYMTSIRWTLYNEVTALLPNSSVHITYGAKTKESRRKLDIKKSHVNDAYVMGLFCPKHRTKPVYFKKKRRNNRVLEKFYDAKYIDSRDGKKQSGQELFNGRINRNHRKDSENLHLYRKQKVTKGKRSIRNKHYPIQPHDILLYQKKKYENAGCHNNGSRVILLPEKKSVALKQLTIYQYAGGYYRVPYESNKKEERTGS

SEQ ID NO: 17238 - protein, 419 aa, unidentified
MVYVISQDGKPLMPCSNPIARLLLKQGKAKAKCREPFTIKLIYETTDYTQDLTLGIDTGSGTIGTAVSKNNGDIVYMSEVVVRNDITDKMAQRAKYRRNRRNRKTRYRKARWLNRSNSIKKDRFSPTMQSKLHSHVREIEYIQSILPITEMVFETGQFDMHLMKNPSLANSKVRHWGYQKGTNYGFENTKAMVLNRDNYTCQCCKGKHKDSKLEVHHVIFRSQGGSNEESNLITLCHTCHKNLHSGKVNLKLKGKMKGNLKYATQMNSICKQLFRLYPNAIETFGYVTKANRLHLGVDKEHYYDACIIATQGNAFNIKSNLYKKKCVSDGDFQKTKGIRSEQSIVTDKIWGFRKFDKVCYFGNDYFIKGRMSTGYAILMDIDGNKIDFSTMPRGYKTPKLSNCKRITARSTVMMQVEVV

SEQ ID NO: 17239 - protein, 431 aa, unidentified
MPNKVYVINKHGRPLMPCSPAKARHLLDAGKAKVKKRTPFTIQLVYGSSGYTQEVILGVDAGSKTIGMSASTTKEELLSAEVKPRNDVVDLLSTRREFRRARRNRKTRYRKPRFDNRVRSKHKGWLAPSVEVKIQEHITSIKRVCRILPVSKVVVETAEFDLQLLKAIADGKPVPQGEDYQKGEMYGHYNVRQYVLWRDNYTCQCCGTHPSKKKEVRLHVHHLESRKVGGDAPDNQVTLCESCHEKLHKGLIAEKDFKKRKRKSTRDATFMGIMRKTLMQRLCSELPIPVVKTRGYITKATREKLLVLPKSHTNDALAIAQGKRGFNVGYLPEIAQIDKIYTIRPVRHHNRQLHKATILKGGIRKSNQAEKYVFGYRLFDKVQFNGQDCFIWGRRTSGYFVVKTIDGKVIHNSASFKKLNLVERASNYLIA

SEQ ID NO: 17240 - protein, 442 aa, unidentified; identical to SEQ ID NO: 2834

SEQ ID NO: 17241 - protein, 362 aa, unidentified
MRVFVLNSNRQPLDPCKPARARILLSTGKAKVYRRYPFTIILTEEIQEPITHGSQLKIDPGAKTSGLAIVQGNRIVWGGELTHRGFQIRDALTSRRQLRCARRNRKTRYRKPRFLNRSRPEGWLAPSLMSRVHNILTWVKKLTRLCPIAGISQELVRFDTQKLQNPEISGIEYQQGTLYGYELREYLLEKWNRTCAYCGTTGTQLEIEHIKPLSKGGSNRVSNLAIACHSCNQSKSAQEIEQFLSGKPDVLKRVLSQAKRPLTDAAAVNTTRWKLYHELKSIGLPVEVGSGGLTKFNRCRQNLPKTHWLDAANVGKVDTLIIEGYQPLLIAAKGHGTRQICRTNKYGFPIRYCSRTKIHKGF

SEQ ID NO: 17242 - protein, 527 aa, Actinomadura sp.
LATFRTGEPTHRPVLLQRAALESGLADTPRIGNETGPRHPSRKGGGAGAGHVRGETTGTSPGASGVTPNPSVGEQRREAHRVFVLDGQGVPLQPCHPARARRLLASGRAVVARHTPFVIRLKDRLAAESQVDGVQVGIDPGSRHTGISVFTSQEGERRGRYSIQLDHRGAQIHKRVGQRAAYRRRRRSAKLRYRAPRFLNRQRPDGWLAPSLGHRVDTTVSWADRLTRWAPVRVLHVERVAFDTHLLSAGRPLEGTEYQQGTLCGYQAREYLLEKWGRVCVYCGAVDVPLNVDHIHPRSEGGSDRISNLTLACVPCNRAKGDQPVQRFLARRPAVLARILAQAKTPLRDAAAINATRWRLWRALDSRFPGQVRIGSGARTKWNRTQSGLPKSHTFDALCVGGSDAVTVTAYPADVLVIACTGRGTHCRTSPDKYGFPRLRLPRSKNVHGFQTGDLVKAIVPAGKKAGSHLGRVAVRTTGWFDITGGRGTVQGISHRHVRLLQRGDGYGYTIRPENTVPMYGPKEGIR

SEQ ID NO: 17243 - protein, 420 aa, unidentified; identical to SEQ ID NO: 7011

SEQ ID NO: 17244 - protein, 408 aa, unidentified; identical to SEQ ID NO: 4826

SEQ ID NO: 17245 - protein, 461 aa, unidentified
  source 1..461: note = Bacterium sp.
MRVYVINKNGNPLMPCKPAKARHLLRNGKAKVIKRKPFAIQLLWDCEENIQEVRCGIDKGCKVTGIACAKSNGRLRLTVGNGRILFSANIKHRNPVALQQKDGSTKTFMNVRAERRKGRRNRHCWHRKPRFNNRASSKRSGKLPPTIKMNVMEVVRVVRKIDLLISHIIVEDVQIDVRRLSDPDVKGSEYQQSNRLDENLRIACLIRDNFTCQKCSKKNTQLEAHHIVWVSKSGKDSIYNLITLCESCHDKVHKTGESGKVKKKGGEVFTGMDGFSDQTAQRTMQGKNLMYQELEKIALLSTVYGYQTASFRKACSYEKEHWIDAVCITNLETDEFIPPDKENHYQIWFRAKQTRRIFDTQPTKGGVIKQWQKYKGLASNRKNCVLVDKRDKNFVLPLGYTFYTKGDVISISGLETEIASISGKGKGFYYWIYQPDGNRKYASVSHQKVKLIEYAKTINYI

SEQ ID NO: 17246 - protein, 396 aa, unidentified; identical to SEQ ID NO: 4508

SEQ ID NO: 17247 - protein, 512 aa, unidentified; identical to SEQ ID NO: 6207

SEQ ID NO: 17248 - protein, 408 aa, unidentified
MVYVQDINGKPMMPTTRHGKVRRLLKDKKAVVVNLCPFTIKLMYVTSDYKQEIVLGVDAGTKHVGLSATTKSKELYSSEVILRNDIVDLLSTRRELRRSRRNRLRYRKPRFDNRIKSKRPGWVAPSVKYKVDAHIRVIDNVCSILPISRIVIEVAQFDTQKINNPNISGKEYQEGDQLGFWNVREYVLARDGHKCQHCKGKSKDPVLNVHHIESRKTGGDSPSNLITLCETCHKEYHKGNIDLKIKRGSSLRDAAVMGIMKWRLYEELKSKYDNIFMTFGYVTKYNRIKHGIEKSHVFDAFVISKNFDAIRLGYYYKVRLVRRHNRQIHKQKIPKGGIKRPNQSPFEVFGFRLFDRVMFENSYYFIFARRKTGSFNIRDIDGKNQRDITYKKLKLSRCKRFMVQKEMD

SEQ ID NO: 17249 - protein, 239 aa, unidentified
MTNDYKPYKWQYQKSNRLDENLRKAAIIRDNCKCQECGKTNCRLEVHHIRARKYSGADTIGNLITLCSKCHDKTKGKEKNFEDKYFKIINSKSKRFDYAMHVMQGKNYLRSKISELGLLHLTNGGETANKRIEWDIEKSHSNDAICIADSIPDSCNIKEWTIKPMRRKSKAKTDNVLGVKHRDLVSYTYKNGETHTGYVTALYPEQLALNFQSKTKHCKKVNARKCKLLWQFNKIYWLE

SEQ ID NO: 17250 - protein, 408 aa, unidentified; identical to SEQ ID NO: 5302

SEQ ID NO: 17251 - protein, 409 aa, unidentified
MPTTPQKAKKLLKQGKANVYKLTPFTVQLQYPTGENKQDISLGVDAGTKNIGLSATTEDNVLFEGEVKLRTDIQELLATRRSARSVRRSRKTRYRQPRFLNRKKDQGWLAPSVQNKVNIHLKVVNLVHTLLPVKNIIIEVAQFDTQKIKNPSISGDLYQKGDQLGFWNIREYVLFRDQHICQYCKGKKKDNILNVHHIESRRTGGDSPDNLLCLCETCHKEIHRQGKEHLFKRKSATLRDASQMTAMRWFIYNKGKEIYPHLRWTYGFQTKSTRIMSGLEKDHAVDARCISGNPLAKVSRNSYLFKQVRENNRQLHKFTINKGGTRKSNKAETYVKGFQIFDRVLFGGKECFVFGRRKSGYFDLRTLEGESIHKSASFKKLHVVEKANTLLVQLRIRRKEVKAADSSHD

SEQ ID NO: 17252 - protein, 490 aa, unidentified; identical to SEQ ID NO: 3566

SEQ ID NO: 17253 - protein, 420 aa, unidentified; identical to SEQ ID NO: 16129

SEQ ID NO: 17254 - protein, 394 aa, Desulfobacterium sp.; identical to SEQ ID NO: 12029

SEQ ID NO: 17255 - protein, 512 aa, unidentified; identical to SEQ ID NO: 10560

SEQ ID NO: 17256 - protein, 428 aa, unidentified
LKVFVLNMRGQPLMPCSPAKARHLLKAGKAVVKRRTPFTIQLRIATGETKQNVTLGVDAGAKHVGLSAATEKEEVFASEVELRQDITGLLAARLSLRRERRQRKTRYRAPRFLNRVRSKHNGWLPPSVENRIQAHLSRIDAICGLLPVTKIVIETASFDIQKIKHPDVEGTDYQQGDQLGFWNVREYVLFRDGHVCQHCHGHAKDKILNVHHLESRQTGGDAPNNLITLCERCHKACHAGKIKLKVKRGQSFREEAFMGIMRWTLLDRVRKAHPGLPVENTYGYLTKNTRITQGLPKAHCVDAYCIAGNLKAVRRGVHLYQRQVRKHNRQIHKCTVLSKTLKDGTKIGYRKLNQTPHLVKNFRLFDKVRCLGQTGFIFGRRSSGYFDVRRLDGVKISSCINYRKLTLLEKRGTCLTELRKEDGASSPV

SEQ ID NO: 17257 - protein, 286 aa, unidentified; identical to SEQ ID NO: 16765

SEQ ID NO: 17258 - protein, 385 aa, unidentified
LRALDPGSRETGAAVVRDDEKKRHHALAFFVIKHRGGAIRDELKARSAFRRRRRSQNFRCRSPRFLNRVKPKGWLPPSLRHRVETTLSFVRRMCRYLPVSGIAAELVKFDSQKLQTPEVSGIEYQQGTLFEYEVREYLLEKFGRKCVYCGAEGVPLNIDHVVPRAKGGSNRVSNLVLACVSCNQKKGARSLEDFLKGKPEVLARVRRELKTPLRDAAAVNATRWVLFNELKATGLPVETGSGALTKFNRHAFGVEKEHWLDALCVGRLNGAVTRKGLNVLEIRCMGRGSRQRTRLTKYGFPRGYLMRQKCVHGFATGDMVEANVPKGKKAGLWRGRVAVRVSGSFNIQTPKGVIQGVGWKHCRLISHNDGYGYAWLGHAPHSSPA

SEQ ID NO: 17259 - protein, 489 aa, Streptomyces sp.; identical to SEQ ID NO: 14134

SEQ ID NO: 17260 - protein, 459 aa, unidentified; identical to SEQ ID NO: 10972
  source 1..459: note = Peptococcaceae bacterium

SEQ ID NO: 17261 - protein, 442 aa, unidentified; identical to SEQ ID NO: 7529

SEQ ID NO: 17262 - protein, 506 aa, unidentified
VLRPRYQYPTRWYPSREQGSGNGCLSGEENTDLEQEVSGTLSKGDHSHPGEQDFCVPAITIQGGPAMSVFVVGLNGCRLMPTSERKARLLLKHGKASVYRKVPFTIKLNYKTGSTTQSGYLGIDTGSQHIGVSVVREDGTVLHKKEIGLRDSMSKRKLMQSRASSRRGRRHRKTRYRHPKWRPKAKRVYCEIPDRKGRHWKKKEITFASKRAKGWLPPSLQSKTDHHIWWIKKLQDLLPEGYRLSIELGRFDPARLKDPEIHGELYQKGPQYDYENVRAYVLNRDRYTCQVCGKKGGKLHVHHILYRSHGATDDPQYMATVCSDCHNTENHQQGGILYQWMQKQKKFTRGLRDATFMNILRKRLIEAFPGATFTYGNITKADRERLRLPKSHGNDATAIAIVKTGIMTVKDKEPVIYIQQVRRKKRSLHEETPRKGRKESNRKASRYDKNTKAVTVTKRKNKKKITITGCLFDRVELNGKKGWISGFTDKSCYKIYGRKPSGLPLG

SEQ ID NO: 17263 - protein, 442 aa, Deinococcus sp.; identical to SEQ ID NO: 5259

SEQ ID NO: 17264 - protein, 363 aa, unidentified
MVYVQDIDGKPMMPTTRHGKVRRLLKDNKAVVVNTCPFTIKLTYKTSDYKQEIVLGVDAGTKHVGLSATTKSKELYSGEVILRNDVVELLSTRRESRRARRNRLRYRKPRFENRVKSKRLGWVAPSVRHKVDAHIRVIDNICSTLPISRIIVEIAQFDTQKIKNPDISGNEYQEGDQLGFWNVREYVLARDGHKCQHCKGKSKDPILNVHHIESRKTGGDSPSNLITLCETCHKEYHKGNIDLKVKRGKSLRDAAVMGIMKWKLYEELKSRYPNVSMTFGYITKYNRIKYGIEKSHTSDAFVISRNFNAKRIERQYLKRLIRRHNRQIHKMKILKGGKKKNNQAPFEVFGFRLFDKVLYNNEI

SEQ ID NO: 17265 - protein, 430 aa, Vibrio sp.; identical to SEQ ID NO: 8414

SEQ ID NO: 17266 - protein, 400 aa, unidentified
AKVKKRTPFTIQLVYGSSGYTQEVILGVDAGSKTIGVSASTKKEELFAANVIPRNDVVDLLSTRREFRRARRNRKTRYRKPRFDNRVRSKHKGWLAPSVEVKIQDHIAAIRRVCGILPVSKVVVETAEFDLQLLKAVAEGKPVPQGEDYQHGEMYGHYNVRQYVLWRDGYTCQCCGAHATQKKEVRLHVHHLESRKVGGDAPDNQVTLCESCHKKLHKGLIEAKDFKKRKRRPTRDATFMGIMRATLLQRLRSELPIPVIETRGYITKATREKLLVLPKSHTNDALAITQGKHGFNVGYLPGIVQSDKTYTIRPVRHHNRQLHKATILTGGIRKANQAEKYVCGFRLYDKVLYNGIECFVWGRRTSGSFLLRALDGTKVKDGAGHRILTLLERSSNYLIA

SEQ ID NO: 17267 - protein, 515 aa, unidentified
MTALEEKLSKTEYIYVLGFDGKPQMPTRRKRHVLKLLKTGRARIAEDIPFTIRLTYRNAPVLQPVTLAEDPGRTNIGAAVLSPLGDLLFAAVIETRNKEIKKLMADRKKSRQASRRGERKARQRLAKRYGSMVKSGMVMRKLPMYAADRFVTCKFIRNTQARFCNRKRCPDWITPTVQHLVQTHLNIIRKISRYLPVTDIAFEVNRFAFIHMENPKAMGVDFQNGPLKGYDDVKEAICTQQHGKCLMCKKPIAHFHHIVPRSRGGSDTIQNLAGLCPECHTKVHTDTTFRKDFDRKKSGQLKKYGALSALNQAVPFICKKLLEEYGEEHVHFCGGLDTSLIRTALGFEKTKKNQMHEVDAYCIGLAALEVNEVETPAFDHTFQIRQFRRQDRSIIHHQTGRSYYQGKEKVAQNRKPGFEQKTTALSQWYKEQIRIHGEKEAEKLRSQLRVEKSSRHYNDMDRFLPGAVFLYEGKRYVLSGRITNGKYLRACGQGMKNFPAAECTFIRHNAGLVFI

SEQ ID NO: 17268 - protein, 475 aa, unidentified
MVITLDKNKRPLGFMSERRCRILLEKKRAVLYRYFPTIVILKDVDARKLSGLSSYRIKIDPGAKYTGIAIVMDDTNEFMYAMQIEHRGEQIKKNLDTRRGARRNRRSRETGYRRPKWGNRCTAKEQRQSYDSRRDENWLPPSVKSTADNIISWIRRLCRWINITNCSIESVRFDTQLMENPEIEGVEYQQGTLYGYEVKEYLLEKYGHTCQYCGGKSNDPILEWEHMLPRSRGGSDRLKNAALACHNCNQDKGNHTLEEWQTILQDRIPKESGKQKELDQIRQKFVQQVMEGKTPVKGLRYAAWVNSSRRYSQRHLYLRFPELECSSGGRTKYKRNVLKYPKEHHYDALCGGEIPEDGFVDRTHGYYLYAKATGRGTRLREQINQCGVIIRKWMDRSKTAFGFQTGDLVVADVPKDTNYKYKGHFSGRVMIRKSGSFDIRTLSGELVTVNAKFCRLLQNNSGYQMMIKRAIPLGN

SEQ ID NO: 17269 - protein, 410 aa, unidentified
MPCSPAKARLLLKEKKAIVKRRTPFTIQLTIATGETKQPVGLGVDAGYKHVGLSASTDKAELYASQVELRQDITDLLSARRALRRARRNRKTRYRAPRFNNRIRTKRKGWLAPSVENRINAHLSRIEAVLRLLPVTKITVETASFDMLLLKNPDIAGKEYQEGEQLGFWNVREYVLFRDGHVCQHCYGRSKDPVLNVHHLESRRTGGDSPGNLITLCETCHEALHRGEIALKTKRGHSFRAEAFMGMMRWEVLNRLKASHSELEVNNTYGYRTKHARIVNGIDKSHCADAFCIAGNLGAERLCEFFFQKQTRRNNRQIHKLSILKGRNQAPFEIKGFRLFDKVACKGEESFIFGRRSSGYFDVRKLDGTRISAGISYKKLRLLEKRRTYLTEIRKEEALPPLPEGRGLRA

SEQ ID NO: 17270 - protein, 425 aa, unidentified
MVFVLDRSKKPLDMISHAKARILLKNRLAVVHKIYPFTIRLKDNSCVGKDKAYTVKLDPGSRTTGIAIVDDANKVVILAELEHRGHVIKKKLDQRKAARRSRRNRKTRYRESRFLNRTRPEGWLAPSIKSRADNVINFICKYKKLINISKVMIEYVSFDVAQMSSNTKLWGNGYQQGPLYQNKLRSFIFSRSNGKCVYCGAKATDIDHVIPRANGGTNSTYNLVASCRACNQMKSNLSLKEFGKLMGKNYSHLEPKKLPKDAAIVQSARNYMVKEITKLVTDTTTHDAWLTKYNRNELGLPKEHYYDALSVGEIPSKFNFSTDKVLQISAKGRGSRQMCRVNKYGFPRASAKASKSVEGFQTGDIVKAVVPSGSKEGVYLGRVAVRSNRCFDIQTKTKTIEGIWHKHFHIIQRGDGYLYNYKKIL

SEQ ID NO: 17271 - protein, 512 aa, unidentified
MSTVYVLNKDGKPLMPTTRGGHVRHLLKEQKARVVRTNPFTIQLLYETDNLVQPLYLGIDPGRTNIGVAVVKTDGTAVFTAHLETRNKEIPKLMKKRKDSRRARRTNGRRCRRQRRAKANGTISKKCVKQTTAQNGSVSKRAKEIGVIKRHLPGCEKEVLCIGIKNKEAKFSNRVRPEGWLTPTANQLLQTHINLVKKIQKFLPISDVVLEINKFAFMRLDNPNVQKWQYQQGPLYQKASLEEAVSEMQEHHCLFCKKPIDHYHHVVPQHKNGSNTIGNIVGLCAKHHDLVHKDTTWQKKLAKKKTGLNKKYGALSVLNQIIPALTKELSSLFSKHFFATNGKSTYDYRAAHGVSKDHWLDAYCIACSVLPNDVCDSDINNRVPYELKQFRRHDRRALHKENMSRVYTLNGKSVATNRHKATEQTTDSLEEFRQCQPDDVCKLKVKEHHPEYRNPKRNFPGCVFLVGKHTHVIQGTSGSHNGKADGYYDTNGNSYSSGKCKFVAKNEGIVFT

SEQ ID NO: 17272 - protein, 421 aa, Butyrivibrio sp.; identical to SEQ ID NO: 3710

SEQ ID NO: 17273 - protein, 431 aa, unidentified
MDAWDIIVVLNKRGKPLMPCSPAKARLLLKEKKAIVKRRTPFTIQLTIATGESKQPVSLGVDAGYKHVGLSASTEKAELYASEVELRQDVSDLLSARRALRQSRRNRKTRYRAPRFDNRIRTKRKGWLAPSVENRINAHLSRIEAVLRLLPVTKITVETASFDLQLLKNPDISGKEYQEGEQLGFWNIREYVLCRDGHVCQHCYGRSKDPVLNVHHLESRRTGGDSPGNLITLCETCHKALHRSEITLKTKRGQSFRAEAFMGIMRWEVLNRLKLSHPELEVNNTYGYRTKHARIANGIAKSHCADAFCIAGNLGAERLGEFFFQKQTRRNNRQIHKLSILKGGIRKRNQAPFEVKGFRLFDKVACQGEEGFIFGRRSSGFFDVRKLDGTCISAGISYKKLHLLEKRRTYLTEIRKEEALPPLPEGRGLRA

SEQ ID NO: 17274 - protein, 393 aa, unidentified
LQFYRKEHGIMQYVYVLNKHGEPLMPCFPGKARLLLKQQKACVVKRTPFTIKLLYGSAGYKQPITLGVDAGSKHVGLSASTEKRELYREEFTPRSDVAELLSTRKQNRRSRRNRKTRYRAPRFDNRVHSKHKGWLAPSVEVKIQEHITVIKHICRILPISLVRVETAEFDTQRLKAMLAGKPLPVGTDYQLGEMYDEYNVRQYVLKRDHYTCQCCGAHNTAKKVVKLHVHHLESRKTGGNAPGNLITLCATCHENLHKGKVTLDGKERGKPLRDAAFMGIMRKTLTARLKEELPIPVQGTYGYITKMSREQNDIKKSHTNDARCISKHPLAEPCSVCYRTKAIRHHNRQTHKANFSKGGYRKRSQTPYIVEGYRLWDKVLYKGQECFVSGRRS

SEQ ID NO: 17275 - protein, 429 aa, Planktothrix sp.; identical to SEQ ID NO: 6772
  source 1..429: note = isolate UBA8402

SEQ ID NO: 17276 - protein, 512 aa, unidentified
MSTVYVLNKDGKPLMPTTRCGHVRRLLKEQKAQVVTSKPFTIQLLYETDDVVQPLYLGIDPGRTNIGVAVVKTDGTAVFTAHLETRNKEIPKLMQGRKKARHARRTNGRRCHRQRRAKANGTISKKCVKQATAQNGSVSKRANEIGVIKRHLPGCEKEVLCIGIKNKEAKFSNRTRPEGWLTPTANQLLQTHINLVKKIQKFLPISDVVLEINKFAFMRLDNPNVQKWQYQQGPLYQKASLEEAVSEMQEHHCLFCKNTIDHYHHVVPQHKNGSNTIGNIVGLCAQHHDLVHKDTSWQEKLAKKKTGLNKRYGALSVLNQIIPALTKELSSLFPKHFFATNGKSTYDYRAAHGVSKDHWLDAYCIAGSVLPNDACDNNINNHVPYELKQFRRHDRRALHKENMGRVYTLNGKSVATNRHKAIKQTTDSLEEFRQRQPNDVCKLKVKEHHPEYRNPKRNFPGCVFLVGKHTHVMQGTSGSHNGKADGYYDTNGNSYSSGKCKFVAKNKGIVFA

SEQ ID NO: 17277 - protein, 309 aa, unidentified; identical to SEQ ID NO: 11513
  source 1..309: note = Clostridiaceae bacterium UBA2240

SEQ ID NO: 17278 - protein, 431 aa, unidentified
MPNKVYVINKHGRPLMPCSPAKARHLLDAGKAKVKKRTPFTIQLVYGSSGYTQEVILGVDAGSKTIGMSASTTKEELLSAEVKPRNDVVDLLSTRREFRRVRRNRKTRYRKPRFDNRVRSKHKEWLAPSVEVKIQEHITAIRRVCGILPVSKVVVETAEFDLHLLKAIADGKSVPQGEDYQKGEMYGHYNVRQYVLWRDNYTCQCCGAHATKKKEVRLHVHHLESRKVGGDAPDNQVTLCESCHEKLHKGLIAEKDFKKRKRKSTRDATFMGIMRKTLMQRLCSELPIPVVKTRGYITKATREKLLVLPKSHTNDALAIAQGKRGFNVGYLPEIAQIDKIYTIRPVRHHNRQLHKVTILKGGIRKSNQAEKYVFGYRLFDKVQFNGQDCFIWGRRTTGIFTIKTINGKMIKDGISFKKLKLVEKSTSYLIA

SEQ ID NO: 17279 - protein, 413 aa, unidentified; identical to SEQ ID NO: 11958

SEQ ID NO: 17280 - protein, 424 aa, unidentified; identical to SEQ ID NO: 3351

SEQ ID NO: 17281 - protein, 419 aa, unidentified; identical to SEQ ID NO: 5271

SEQ ID NO: 17282 - protein, 413 aa, unidentified
MMIKVYVINKNGNPLMPCKPAKARKLLRDGKAKPVKRVPFTIQLTWDCEENLQPVIIGIDKGSKITGFSAIANDEILVSGYINHRRDVTQKMEARAANRRQRRNRLWHRPPRFNNRSSSKRSGRLPPSGKANADEVIRVINTLPLPITSVIIEDVLIDIAKLNDPTLAGKDYQKSNRLHENLTKATLLRDDFRCQQCHVKNTRLEVHHIKPSSEGGKNTIKNLITLCSKCHSHIHSGKIRLKTKGVSGFEDKIAQRTMQGKHYLEMNIRKKYDFERVYGYQTAEFRKELGLPKDHDSDALAIATLGTGKRIRFHRDNFYTINFRPVQTRRRYHDLPVNGAGRVKYQLNEDSEGFRKGDIVLVKNRYVKQVNSIYSTGALAFKRVKGEPGSSIPKNCQLLERQSSIVFYSIKCH

SEQ ID NO: 17283 - protein, 413 aa, unidentified; identical to SEQ ID NO: 2636

SEQ ID NO: 17284 - protein, 377 aa, unidentified
MVYVLDQNGQPLMPTSRHGKVRRMLQSGQAKVVNRCPFTIQLNYEAGHQIQEISLGIDAGSKHIGVSATTKAKVLYEADVELRNDMVELLSSRRELRRGRRNRKTRYRKPRFQNRGRKDGWLAPSIKQKIETHMTVISKVCKILPIRKIIAETASFDIQKIRNSEIQGAEYQQGDQLGFWNVREYVLFRDNHTCQCCHGKSKDKILNVHHIESRKAGGNAPNNLITLCETCHTGYHQETVKLPAEIKRGMSFKDATFMGIMRWTFYEDLKRKYEPFGISVSNTYGYITKHTRIEHDLPKEHYIDARCISGNPDALSNGEVYYQKKIRCHNRQIHKLTILKGGIRKKNQANYLVKGFRLFDVVKARGTHWYIHGRRTN

SEQ ID NO: 17285 - protein, 462 aa, unidentified
MSVLVIGRNGRALMPTNPRKARLLLKKKTASVVCRHPFTIQLLYKTGCATQEGCIGIDTGSQHIGVGITCGDKVILKDEHALRSSMEKRSLLATRAVMRRGRRYRKVRYRKPKWRHHTKRMYFEKANRRGQHWRKVKTTTQSPRSKGWLPPSLQSKCDHHFRIIDRYLKYLPDPITRNLVIEAGRFDMARMNDPTIHGEMYQRGPMYDAENLRAYIFARDNYQCACCKAKAGTTRKADGTTVKLVAHHILFRSRGATDNPKYIISVCDHCHTTKAHQPGGILYSWMENNKKVARGLRDATFMNILRKRLFARYPQAAFTYGNITAADRKKLRLPKSHANDAVAISLFGKEASTVKNICQTMHYKQIRKSKRSLHEAIPRKGRKNPNTKAVRNKKNTTQVNGFKLWDSVLADGKKLFICSFTGTSAYLIDKNGCYISQPGKTYKQWPLSKLKRLHPNGNWLMA

SEQ ID NO: 17286 - protein, 424 aa, unidentified
MASMQYVYVLNKHGEPLMPCSPGKARLLLKQQKACVVKRTPFTIKLLYGSAGYKQLVALGIDAGSKHVGLSASTEKRELYREEFTPRNDVVELLSTRRQNRRSRRNRKTRYRAPRFDNRVHSKHKGWLAPSVEVKIQEHITVIKRICRILPITLVRVETAEFDTQRLKAMLKGKPLPVGTDYQLGEMYDEYNVRQYVLKRDNYTCQCCGAHPTEKKPIRLHVHHIESRHVGGNAPNNLITLCVACHKALHEGKITLDKGKKRGKPLRDAAFMGIMRNTLLARLKDELNIPVKQTYGYITKLLREKNKIPKSHVNDARCIAKAPNAKPCDTMLYTRALRHHNRQIHKAKILKGGIRKKNQAPYLVKGFRLWDKVRYNGEECFITGRRSSGYFALKKYDGTVISNSASYKKLMLLEAATNYITERS

SEQ ID NO: 17287 - protein, 442 aa, unidentified; identical to SEQ ID NO: 7213

SEQ ID NO: 17288 - protein, 415 aa, Bacillus sp.; identical to SEQ ID NO: 2431

SEQ ID NO: 17289 - protein, 432 aa, unidentified
  source 1..432: note = Cyanobacteria bacterium UBA8543
MFVFVLDTNKKPLNATHPARARRLLKSGRASVLKRYPFTIILHDRQVETSTINEHRLKIDPGAKTTGLAIVQNSTVMWAAQLTHRGLAIRDAITARRMVRRSRRNRKTRYRVARFNNRRRASGWLPPSLDSRIANILTWVRRLSKLCPITAISQELVRFDLQKIQNPEITGLQYQQGELAGYEIREYLLEKFNRRCVYCSATDTQLEIEHVNPKSKGGSNRVSNLTIACVPCNQAKGNQDIRDFLAGKPDILARVLAQIKKPLADAAVVNTTRWALHEQLKAIDLPVETGTGGQTKYNRCRQNLPKTHWLDAACVGDSTPARLKILVTNPVLIKAEGWGSRQMVNTDFIGFPLINKEGKQATKSRSPIQFGYRTGDIVKAIVPTGKHKGVHIGKVTIRKSGAFDLVSKGIKRQSIRWKHCTPLHRKDGYSYA

SEQ ID NO: 17290 - protein, 411 aa, unidentified; identical to SEQ ID NO: 6901

SEQ ID NO: 17291 - protein, 485 aa, unidentified; identical to SEQ ID NO: 6696
  REGION 1..485: note = IscB polypeptide

SEQ ID NO: 17292 - protein, 420 aa, unidentified; identical to SEQ ID NO: 3546

SEQ ID NO: 17293 - protein, 448 aa, unidentified; identical to SEQ ID NO: 5196

SEQ ID NO: 17294 - protein, 442 aa, unidentified; identical to SEQ ID NO: 2903

SEQ ID NO: 17295 - protein, 405 aa, Desulfotomaculum sp.; identical to SEQ ID NO: 4568

SEQ ID NO: 17296 - protein, 424 aa, unidentified
MSNFVFLLDANKRPLDPIHPGAARHLLNQGKAAVFRRYPFTIILKECCQDVPVCGLELKLDPGSKVTGIAIKQGNKIIFGAELQHRGHQIKDALLSRRQLRRVRRNRLTRYRKARFLNRTRPKGRLAPSLSHRVLTIITWVRKFQRLAPITSIVQELVRFDLQLMQNPEISGVEYQQGELQGYEVRQYLLEKWGRKCAYCGVENVPFEVEHIQPRSKGGSDRISNLALACHPCNEAKGNQDIRDFLASKSDVLSRILKQAKSPLKDAAVVNSTRWALFNALKTTGLPVTTGTGGQTKFNRTRFNLPKAHWLDAACVGNIKILKLLTKKPLLIAAKGHGTRQMCGTDKYGFPTRHKSRVQIHKGFQTGDIVRARVTAGKKIGSYVGRVLCRASGSFDITTTTGRVAGISHKYCKAIHRKDGYSYA

SEQ ID NO: 17297 - protein, 424 aa, unidentified; identical to SEQ ID NO: 10419

SEQ ID NO: 17298 - protein, 456 aa, unidentified; identical to SEQ ID NO: 6454

SEQ ID NO: 17299 - protein, 431 aa, unidentified
MPNKVYVINKHGRPLMPCSPAKARHLLDEGKAKVKKRTPFTIQLVYGSSGYIQEVILGVDAGSKTIGISASTKKEEVFAADVTPRNDVVDLLSTRREFRRARRNRKTRYRKPRFNNRVRSKHKGWLAPSVEVKIQEHITSIKMVCRILPVSKVVVETAEFDLQLLKAIEEGKPVPQGEDYQQGEMYGHYNVRQYVLWRDNYPCQCCGAHLTKKKEVRLHVHHLESRKVGGNAPGNLVTLCDRCHEKLHKGLITEKDLKKRKHRSTRDATFMGIMRKTLMQRLCSELPIPVAETRGYITKATREKLLVLPKSHTNDALAIAQGKQGFNVGYLPGIVQIDKICTIRPVRHHNRQLHKATILKGGIRKSNQAEKYVFGYRLFDKVQFNGQDCFIWGRRTSGYFVVKTIDGKVIHNSASFKKLRLVERASNYLIA

SEQ ID NO: 17300 - protein, 415 aa, Bacillus sp.; identical to SEQ ID NO: 5390

SEQ ID NO: 17301 - protein, 442 aa, unidentified; identical to SEQ ID NO: 2807

SEQ ID NO: 17302 - protein, 418 aa, unidentified; identical to SEQ ID NO: 10916

SEQ ID NO: 17303 - protein, 529 aa, unidentified; identical to SEQ ID NO: 6786

SEQ ID NO: 17304 - protein, 473 aa, unidentified; identical to SEQ ID NO: 3562
  source 1..473: note = uncultured beta proteobacterium

SEQ ID NO: 17305 - protein, 430 aa, Oribacterium sp.; identical to SEQ ID NO: 14849

SEQ ID NO: 17306 - protein, 453 aa, unidentified; identical to SEQ ID NO: 4050

SEQ ID NO: 17307 - protein, 451 aa, unidentified; identical to SEQ ID NO: 3061

SEQ ID NO: 17308 - protein, 333 aa, unidentified
MSTSVFVLDKKHRPLMPCRPARARRLLRAGRARVVKRFPFVIRLVDRTVEQSEVQPVLIKLDPGSRETGAAVVRDDEKKRHHALAFFVIKHRGGAIRDALKARSAFRRRRRSQNFRCRSPRFLNRVKPKGWLPPSLRHRVETTLSFVRRMCRYLPVSGIATELVKFDSQKLQNPEVSGVKYQQGTLFEYEVREYLLEKFGRKCVYCGAEGVPLNIDHVVPRAKGGSNRVSNLVLACVSCNQKKGARSLEDFLKGKPEVLARVRRELKTPLRDAAAVNATRWVLFNELKATGLPVETGSGALTKLNRHAFGVEKEHWLDAPGGVLRRPEDLPYL

SEQ ID NO: 17309 - protein, 512 aa, unidentified
MSTVYVLNKNGKPLMPTTRCGHVRRLLKEQKARAVASKPFTIQLLYETDDVVQPLYLGIDPGRTNIGVAVVKADGTAVFTAHLETRNKEIPKLMKKRKDSRRARRTNGRRCRRQRRAKANGTLSKKCVKQTTAQNGSVSKRAKKIGVIKRHLPGCEKEALCIGIKNKEAKFNNRTRPEGWLTPTANQLLQTHINLVKKIQKFLPISDVVLEVNKFAFMRLDNPNIQKWQYQQGPLYQKASLEEAVSEMQEHHCLFCKNTIDHYHHVVPQHKNGRNTIDNIVGLCTKHHDLVHKETAWQEKLAKKKTGLNKKYGALSVLNQIIPALTKELSSIFPKHFFVTTGKSTYDYRAAHGVSKDNWLDAYCIACSVLPNDVCNSSINNRVPYELKQFRRHDRRALHKENMSRVYTLNGKKVATNRHKATEQTADSLEEFRQNHPDDVCKLKVKENHSEYRNPKRNFPGCVFLVGKRTHVMQGTSGSHNGKADGYYDTNGNSYSSGKCKFVAKNEGIVFA

SEQ ID NO: 17310 - protein, 413 aa, unidentified
  source 1..413: note = Prevotellaceae bacterium UBA1710
MVYILDINNKPLMPSERHGHVRKLLREGRACVVCRTPFTIRLNYVTTSYVQEVSLGINAGTKHIGVSATTSQKELFASEVVLRSDITDLLSTRREQRRTRRNRLRYRKPRFNNRKRPEDWHAPSVQNRVDAHLKVISKVHKLLPVSKTTIEVAQFDTQKIKDPSVSGEEYQQGEQMGFWNVREYILARDGHKCQHCHGKSKDPILNVHHLESRKTGGNAPNNLITLCETCHKDYHKGKFELKIKRGTSLRDAAVMNIMRWAVYNQAREEFPDVHFTYGYITKNTRIRKGLEKSHAVDARCISGNPMSEPLGNYFLQKQIRRHNRQIHKANLLKGGRKKLNQAPYLVKGFRLFDKVLYNGIECFVFGRRASGSFDIRKLDGTKIHPGINYKKLKLLETRKTILTSKESRISSHA

SEQ ID NO: 17311 - protein, 432 aa, unidentified
MVFVLNRSKKPLDMISNAEARILLRKKLAVIHKMYPFTIRLRNNSCGSKDRAYTVKLDPGSKHTGVAIVDNKDSVVMLAELEHRGSVVKKKLDSRRVVRHHRRQRKTRYREARFDNRVKPKGWLAPSVKSRADNVINFIKKCKKFLNITKVEIERVSFNVSQMSSETKLYGVDYQQGPLYQKKLRDFIFSRSNGKCSYCGAKAEEIDHIIPRSNGGTNSTYNLVAACKSCNQMKSNLSLKEFGKLVGKDFSKIKPKALPKDAAIVQSARNYMVKEISKFVADTTTHDAWLTKYNRNELGLSKEHYYDALSVGNLQDYKFLTDKVLQISAKGRGSRQMCRVDKFGFPRTSAKASKSVKGFQTGDIVKAIVPKGLKREGEYLGRVIVRSNGGFNIETNKETIQGIGYKYCSIVQRGDGYSYNHKERNRVSVAKI

SEQ ID NO: 17312 - protein, 415 aa, unidentified; identical to SEQ ID NO: 3582

SEQ ID NO: 17313 - protein, 404 aa, unidentified
  source 1..404: note = Archaeon SCG-AAA382B04
MSNQKVFVQDRSGEPLMPTKPAKARHLLEKGKAEVVERMPFTIQLNYKIKGKKNREKTTLGIDAGYSKVGFSVVTENKELIAGEMELRDDISRKLEQRMKYRKNRRSRNTRYRKPRFDNRSEEDWLAPSIKHKKNTHIKLVEKLKEILPIDEVVMEVAKFDQQKMQNPEICGKEYQQGTLKEYNIKNYLLEKFDYECAYCGKGGVPLEVEHIVPKSRGGTDRVSNLAISCHKCNQEKSDQTAEEFGHPKVQEKAENTLKETAFMNQVRWKIVNELGCNHTFGHITKKKRIELGLEKSHINDAFIIAGGKNQERAEPYIVEQNRRNNRLIQTNRKGYGRSIRRERYDLQPGDLVEVEKKGLVHSVKGVFNYGKWVRLVNRWGEKVNSSIKEVSLLKYGAGLQFSL

SEQ ID NO: 17314 - protein, 442 aa, unidentified; identical to SEQ ID NO: 15850

SEQ ID NO: 17315 - protein, 442 aa, unidentified
MATVKQSTHHLPFGRVFIRRNLFMVYVISQDSKPLMPCSNPIARLLLKQGKAKVKKCEPFTIKLTYETTDYTQDLILGVDTGSGTIGTAVSKDNGDIVYMSEVVVRNDITDKMTQRTKYRRNRRNRKTRYRKARWLNRSNSIKKDRFSPTMQSKLHSHVREIEYIQSILPITEMVFETGQFDMHLMKNPSLANLKVRPWGYQKGANYGFENTKAMVLNRDNYTCQCCKGKHKDSKLEVHHIVFRSQGGSDEESNLITLCHTCHKDLHSEKINPELSGKVKGNLKYATQMNSIRKQLFRLYPNAIETFGYVTKANRLHLGVDKEHYYDACTIATQGNAFNVKSNLYKKKCVSDGDFQKTKGIRSEQPIVTDKICGFRKFDKVRYFGNDYFIKGRMSTGYAILMDIDGNKIDFSTMPRGYKTPKLSNCKRITARSTVMTQVKVV

SEQ ID NO: 17316 - protein, 428 aa, unidentified; identical to SEQ ID NO: 4606

SEQ ID NO: 17317 - protein, 406 aa, unidentified; identical to SEQ ID NO: 7798

SEQ ID NO: 17318 - protein, 431 aa, unidentified
MPDKVYVISRLVHPLMPCSPAKARHLLDDKKAKVVKRMPFTIRLLYGSTKYIQPIILGVDAGSKTIGLSASTAKGEVFAAEVMPRNDVVENLSTRREFRRARRNRTTRYRKPRSDNRVRSNHERWLAPSVKVKIQEHITSIKRVCTILPISKVVIETAEFDLQLLKAIQEGKPIPEGEDYQKGEMYGSYNVCQYVLWRDNYTCICCGVRGTPKNPVRLHVHHFESRKYGGNAPDNHGTLCDDCHKKFHLGIIADVKLKTRRRQSTRDAAFMGIMRKTLMWRLRTELFIPVAETKGYITKATREKLLVLPKSHTRDALAIAQGRHGFSIKEYAYVEPANHIYTVRPVRHHNRQLHKASILKGGIRKRNQASKYVFGFRLYDKVLYQGKACFVWGRRTSGTFLLRTIDGIKVKDGVSYRNLTLLERSSNYLIA

SEQ ID NO: 17319 - protein, 415 aa, unidentified; identical to SEQ ID NO: 3582

SEQ ID NO: 17320 - protein, 512 aa, unidentified; identical to SEQ ID NO: 9909

SEQ ID NO: 17321 - protein, 431 aa, unidentified
MPNKVYVINKHGRPLMPCSPAKARHLLDAGKAKVKKRTPFTIQLVYGSSGYTQEVILGVDAGSKTIGVFASTKKEELFAANVIPRNDVVDLLSTRREFRRARRNRKTRYRKPRIDNRVRSEHKGWLAPSVEVKIQEHITSIKRACRILPVSKVVVETAEFDLQMLKAIADGKPVPQGEDYQKGEMYGHYNVRQYVLWRDNYTCQCCGAHATKKKEVRLHVHHLESRKVGGDAPDNQVTLCESCHEKLHKGLIAEKDFKKRKRRSTRDATFMGIMRKTLMQRLCSELPIPVIETRGYITKATREKLLVLPKSHTNDALAIAQGKRGFNVGYLPEIAQIDKIYTIRPVRHHNRQLHKAAILKGGIRKSNQAGKYVFGYRLFDKVQFNEQDCFIWGRRTTGIFTIKTINGKMIKDGISFKKLKPVEKSTGYLIA

SEQ ID NO: 17322 - protein, 515 aa, unidentified; identical to SEQ ID NO: 3339

SEQ ID NO: 17323 - protein, 419 aa, Moorena sp.
MPNYVFVIDTNKQPLNPIPPKKARRLLDKGKAAVFRMYPFTIILKTAIDNPIVSPCQIKIDPGSKTTGFALVQNNQIIWGMELEHRGGLIKKKLESRKAVRHRRRNRHTRYRKPRFFNRKRSEGWLPPSLEHRVSTIETWVKRLTKFCPVNEIWVERVKFDTQKMQNPEINGIQYQQGELAGYEVREYLLEKWGRECTYCGKQSVPLQIEHIHPKSFGGSNRVSNLCLACEKCNQRKGNKPIEEFLKKKPSLLQKIKTKAKQPLKDAAAVNATRNKLVKVLQNIKFVVTGTGAQTKYNRTRLGLPKEHWIDAACVGDIGTLVLKTSQPLLVTCKGQGGRQKAALNKYGYPVRHNPLKPIKGWVTGDIAKHQRLGIGKVTPRSKGSFGFTPLGMKGYKSCNPQDISAIHRKDGYTYSFCK

SEQ ID NO: 17324 - protein, 414 aa, unidentified
MPCSPAKARLLLKEKKAIVKRRTPFTIQLTIATGETKQPVGLGVDAGYKHVGLSASTDKAELYASQVELRQDITDLLSARRALRRARRNRKTRYRAPRFNNRIRTKRKGWLAPSVENRINAHLSRIEAVLRLLPVTKITVETASFDMLLLKNPDIAGKEYQEGEQLGFWKVREYVLFRDGHVCQHCYGRSKDPVLNVHHLESRRTGGDSPGNLITLCETCHEALHRGEIALKTKRGHSFRAEAFMGMMRWEVLNRLKASHSELEVNNTYGYRTKHARIVNGIDKSHCADAFCIAGNLGAERLCEFFFQKQTRRNNRQIHKLSILKGGIRKRNQAPFEIKGFRLFDKVACKGEESFIFGRRSSGYFDVRKLDGTRISAGISYKKLRLLEKRRTYLTEIRKEEALPPLPEGRGLRA

SEQ ID NO: 17325 - protein, 442 aa, unidentified; identical to SEQ ID NO: 2903

SEQ ID NO: 17326 - protein, 442 aa, Sutterella sp.
MSTTVFVLDKKHRPLMPCRPARARRLLRAGRARVVKRFPFVIRLVDRTVEQSEVQPVLIKLDPGSRETGAAVVRDDGKKRHHALAFFVIEHRGGAIRDALKARSAFRRRRRSQNLRCRSPRFLNRVKPKGWLPPSLRHRVETTLSFVRRMCRYLPVSGIATELVKFDSQKLQNPEVSGVEYQQGTLFEYEVREYLLEKFGRKCVYCGAEGVPLNIDHVVPRAKGGSNRVSNLVLACMSCNQKKGARSLEDFLKGKPKVLARVRRELKTPLRDAAAVNATRWVLFNELKATGLPVETGSGALTKLNRHAFGVEKEHWLDALCVGRLNGVVTRKGLNVLEIRCMGRGSRQRTRLTKYGFPRGYLMRQKCVHGFATGDMVETNVPKGKKAGLWRGRVAVRVSGSFNIQTPKGVIQGVGWKHCRLISHNDGYGYAWLGHAPHSSPA

SEQ ID NO: 17327 - protein, 433 aa, unidentified
MFVYVLDRNGQPLMPTKRFGKVRRMLRDKKAKVVKSCPFTIRLLYEPETKIVQEVVLGVDTGSKHVGVACVGNNKVLYQSQVELRDDIKKKMDSRRMYRRSRRNRKTRYRKPRFLNRGNSTKKNRYCPTIVSKCYGHEREIEFCKKILPIKNTILETAKFDTQLMEKPWLQEYKWAYQRGVNYGYANAREHALVRDKYTCQCCGKKNCRVEAHHIVFRSKNGSNDLENYITLCEDCHKAVHLGEVDLKLKGKRKSTLRYATQMSVIRSMLLKKYPNAIETSGFVTKANRENLGIGKEHYLDACVIASGGLGFKPLDVLYQKKCVPSQSRILTKGIRGVQKIPTGKVHGFKRYDKVKYRGAICFIKARRIRGDFVLMDICNNTLDFRSVGGVKNPSHKSLRRIHARSGTICDMKYLRERMCNCGFKKTRITEVN

SEQ ID NO: 17328 - protein, 406 aa, unidentified
MPTERFGKVRRLLKEKRAKVIRSCPFTIKLLYEPETNAVQEVTLGQDTGSKYVGTACIANDKVLYQSEVILRDDIKKKMDSRRIFRRNRRRRKTRYRKVRFLNRANSTKKERLPPSVKSKVQSHIDEIEFCKKILPISKIVLEVSQFDTALMKNPSLINDKVKRWGYQKGFNYRYSSRREAVIHRDNYTCQCCSKKHVRFEVHHIIFRSQGGSDDESNLITLCKECHDAIHSGILVLTKKPKKLNLKYATLMSIIRSQLLKIYPDAIETIGFVTKTNRENLNLSKEHYIDACVIAGGGKKFKLNDIIYQKRRVAKGDYKLTRGSRSQQKLPVGKIQGFRKFDKVKYLKQEYFIKSRMSTGYAKLMDIFSITIDFSYMPKGKKTPKLLNLERISARSTCLCASQRII

SEQ ID NO: 17329 - protein, 444 aa, unidentified; identical to SEQ ID NO: 9029

SEQ ID NO: 17330 - protein, 442 aa, unidentified; identical to SEQ ID NO: 4522

SEQ ID NO: 17331 - protein, 470 aa, unidentified; identical to SEQ ID NO: 2825

SEQ ID NO: 17332 - protein, 436 aa, Acrocarpospora sp.; identical to SEQ ID NO: 15397

SEQ ID NO: 17333 - protein, 481 aa, unidentified
MWTTVLRGEKPYGRSSALPVRECVSIAKKRRHHMVAVLSKTGIRLMPTSSYRARKLLAKKKAVICMYRPFTIRLTERETGDVQPVELAVDTGYFHVGNSLKTAKHELAAVEIRTLMDEKQRYDDRRRYRRMRRSRLRYRAMRFDNRRRPEGWLALSIQGRMEQNLAFLRRVLSVVPVTRIVMEMGQFDTQVLKAVEEGRPLPEGTDYQQGERYGIATLREAVFTRDNYTCQCCKKTIHDGVILHVHHIVYRSQGGTNRMGNLITVCEKCHTPKNHKPGGKLYKWKPTVKSFKGATFMTAVRWIMYRFVKECFPDVDVRITYGAKTKLQRRALDITKSHVNDAYAMGDFHPKHRARPVILQKKRRNNWILEKFYDAKYIDTRDGSQKTGQQLFNGRTNRNHNTDTENLRLYRGMKLSKGKRAIRTTRYKIQPHDILVYQGQEMEASGCHNKGTRVMTIAKKSLPIGKVRVRRYSGGYYAVAE

SEQ ID NO: 17334 - protein, 413 aa, unidentified
MDYVISKDGKPLMPTKRYGKVRRLLKQKLAKVVKREPFTIQLLYDTTDYTQDVVVGIDIGSKTVGVSAVSEKEELFSAEVILRTNIKDLLLERKGYRHHRRYRKRRYRKARFLNRRRPEGWLPPSINWKANAHVRIVKFLSKILPISKVAVEIAPFDTQKIVNPDIKGKEYQEGPQKGFWDVREYCLWRAGYKSEISGKKGVLEVHHIIPRSKGGTDNPSNLIVLTAEEHEAIHEGKLKIPKSKLEKIKILKDASHVSTIGWFIVNRLKENQYNVNVTYGSITKAKRVEIGLEKTHRNDAFVIAGGNRSIKRVNRWYIGKFFRRQNRSLHKANPIKGGKRPNKSIGRAYGFKTYDKVEYQGKAYLITALRNRGDFSLGSLTVGRILDHVRHKKLRLLEHAKTLIFMEHKETTI

SEQ ID NO: 17335 - protein, 416 aa, unidentified; identical to SEQ ID NO: 6623

SEQ ID NO: 17336 - protein, 406 aa, unidentified; identical to SEQ ID NO: 6079

SEQ ID NO: 17337 - protein, 427 aa, unidentified; identical to SEQ ID NO: 11922

SEQ ID NO: 17338 - protein, 415 aa, unidentified
MVYVLANDGQPLMPTERHGKVCRMLKSGMAKVVKKCPFTIQLQYESERNVQPVSLGVDAGSKHIGISATTKTKVLYESDVELRDDIVKLLATRRQLRRSRRSRKTRYRPVRFDNRKRKEGWLAPSIRQKIGSHLTVVANACKILPINQIIVETASFDIQKIKDPEIQGIEYQQGEQMDFWNIREYVLFRDGHTCQCCKGKSKDKVLNVHHIESRKTGGNAPNNLITLCETCHKGYHNGTVTLPKNIKRGMKFKDAAFMGIMRWTFYNTLKEQYEPDIPVSMTYGYLTKNTRIEHGLPKEHYIDARCISGNPDAVSDGTYYYQKKVRCHNRQIHKQTILKGGIRKSNQAEYLVKGYRLFDKVRYQGREYFIFGRRKSGFFDIRTLSGEKVNKGSISVKKLTFADTRKNYLIERRTV

SEQ ID NO: 17339 - protein, 456 aa, Halomonas sp.; identical to SEQ ID NO: 6315

SEQ ID NO: 17340 - protein, 544 aa, unidentified
MKQKKQKVMVYILNKKGKPLMPTTRCGHVRKLLDSKKAVVVNSNPFTIRLKYDTPNGVQDVFAGIDSGRENIGSGVSNEDGDCLYLGELRTSNKSIKMKMTERVGFRRERRKHDRQNKQRKARKDHTEIQNGKDDICRATISCKSVQISYPTAEESVTHKIIRGKEGKFANRHRDGDWITPSARQLVQMHMNDLKSICKILPISHVTLERVAFDFQKLENENIKAWEYGKGKLYGYDSPEEYIHDVQDGKCLVCGKPHIDYLHHIIPRSKGGSDKVSNIAGLCYDCHYGPIGVHNCQDTQDRLPELKNEVNKQYKVSLLNSVMPVLIEEIDKFCKANSIMFSICEGHDTAKVRDMYDLQKDHCLDGFAISLVGRNVKSVDVMPDRIHQKQRYKKKSKNIIQKRNYREYYDDKKLVAINRHKGTDQKADSLEEYMNTYAETHTADECKNQFESLTVKPARRTYTFHKEGRICPFHIGDKVRYEKKNKIKGNTKVDTFICECIYFSKDENKAKVEHNKTKSKKMKFCRAIESGCIPYIDYIKLALI

SEQ ID NO: 17341 - protein, 408 aa, unidentified; identical to SEQ ID NO: 5302

SEQ ID NO: 17342 - protein, 421 aa, unidentified; identical to SEQ ID NO: 4801

SEQ ID NO: 17343 - protein, 465 aa, unidentified; identical to SEQ ID NO: 8665

SEQ ID NO: 17344 - protein, 413 aa, unidentified; identical to SEQ ID NO: 3220

SEQ ID NO: 17345 - protein, 450 aa, unidentified
MCWLTALKHIHLILNFNKEVPCMVYVLDIDGQPLMPTARHGKVRRLLNSHLAKVVKRCPFTIQLLYQSTKETQPISLGVDAGSRHIGLVATTEQKVVYQEELIPRNDVVKLLSAKRALRRSRRNRKTRYRKPRFNNRVHSKHKGWLAPSVEVKIQEHITAIKRICQILPISEIHVETAEFDLQRLKAAAAGNPLPVGTDYQLGEQYDFYNTRQYVLHRDRYTCQCCGTHDKDIKLHVHHIESRQIGGNAPNNLITLCEHCHKSLHAGKIILPKGKKRGKSYRDAAFMGIMRKTLLERLKKEVNVPVTETCGYITKYWREKVGLEKSHINDAICISKHPYAKPLDTYYLTKAVRHHNRQIHKVKFIKGGIRKRNQAPYLVKGFRLFDKVLYRSKEYFIFARRATGFFNIRTLGGTSVNNGSISYKKLRIQDTANAYLTEMKKEIKVIPYMN

SEQ ID NO: 17346 - protein, 487 aa, unidentified
MYRHRSDVHPNPPLCDNASLEAEVKPKDAADSNRQRPWGRMHYSPSGERTACFGIAVIPKKGETAMQYVYVVGSNGKPLMPCSPAKARKLLKTKSAAVLQRTPFTIKLLHHAGGYKQPITLGVDAGSKHIGLSACTETKELYKEELTPRNDVVKLLSKRRECRRGRRHRKTRYRTPRFNNRVRSKHKGWLAPSVEVKIQEHITAIHHICRRLPVTKIVVETAEFDTQRLKAMLEGKPLPVGTDYQRGEMYDEYNVRQYILKRDNYTCQHCGKRGSAEKGVKLHVHHLETRQTGGNAPNNLITLCKDCHTALHDGEITLKQGKKKRGKPLRDTAFMGIMRKTLLSSLRKEVDIPVVETQGYITKLLREENHIPKSHTNDARCIAGYPNAQPCDTTYHTKAIRHHNRKIHKTNILKGGVRKLNQAPYKVFGFRIWDKVKYKGQECFITGRRSSGYFALKKLDGTTISNSAKYKEIQFLEPANHYIIERS

SEQ ID NO: 17347 - protein, 439 aa, Lactobacillus sp.
MITTKEESCSKCAHIYKSFEFFKLNRNSSQKCRKLLQAGRAKVIKKEPFTIQLLFSSTGYKQHVSIGVDSGQHHIGLAVTSQDKVLFSLRQDVKKLLDTRRSYRRGRRNRNTRYRSPCFLNRTKPSGWLPPSIASKIHHNINWIQRIQAVMPKAELHIEVGKFDMAKMKQPDITGLGYQQGDKYGYETTKQYVLDRDNYTCQICHGKTKDPELKIHHIIYRSNGGTNQVSNLLTVCATCHTQANHQPGGKLYALLAKKFQSYRSLKGATFMNILRRRLFKAFPEAKFQYGAQTTLDRAKLDLPKAHYNDAVTISGIQKIAQRPTAVVMFHQFRKKKCSLHEATARKGRKIPNIMSKRNAKNKKFSKGFYLNDYVQLPDGQKGNVSGFSGKIKCFVKAGDGYYLAISSKYKHINLSILKVIRHQNNWNVTEIEVKTHQMA

SEQ ID NO: 17348 - protein, 420 aa, Methanobrevibacter sp.; identical to SEQ ID NO: 2392

SEQ ID NO: 17349 - protein, 420 aa, unidentified
MQYVYVLNKHGEPLMPCSPGKARLLLKQQKACVVKRTPFTIKLLYGSTGYKQPITLGVDAGNKHVDLSASTEKREFYCEEFTPRNDVVDLLSTRKQSRRSRRNRKTRYRAPRFDNRVHSKHKGWLAPSVEVKIQEHITIIKRICRILPITLVRVETAEFDTQRLKAMLEGKPLPVGTDYQLGEMYDEYNVRQYVLKRDHYTCQCCGAHTTTKKTVKLHVHHLESRKVGGNAPSNLITLCTTCHDALHKGKVSLDGKERGKPLRDAAFMGIMRKALMARLREELPIPVQGTYGYITKMRREQNDIKKSHVNDARCISKHPLAEPCSVCYRTKAIRHHNRQTHKANFSKGGIRKRSQMPYVVEGYRLWDKVLYKEQECFVSGRRASGSFTLKKLDGTRISKGVTFKKLRLLEPATNYLIERM

SEQ ID NO: 17350 - protein, 352 aa, unidentified; identical to SEQ ID NO: 16775

SEQ ID NO: 17351 - protein, 279 aa, unidentified
VVVETAEFDLHLLKAIADGKPVPQGEDYQKGEMYGHYNVRQYVLWRDNYTCQCCGTHPSKKKEVRLHVHHLESRKVGGDAPDNQVTLCESCHEKLHKGLIAEKDFKKRKRKSTRDATFMGIMRKTLMQRLCSELPIHVVETRGYITKATREKLLVLPKSHINDALAIAQGKHGFNVGYLPGILQIDMIYTIRPVRHHNRQLHKATILKGGIRKSNQTEKYVFGYRLFDKVQFNGQDCFIWGRRTTGIFTIKTINGKMIKDGISFKKLKPVEKSTGYLIA

SEQ ID NO: 17352 - protein, 414 aa, unidentified; identical to SEQ ID NO: 2588

SEQ ID NO: 17353 - protein, 424 aa, Moorena sp.
MFVFVLNSSRKPLNPTHPARARKLLKTGKAAVFKRYPFTIILKEEVPEPNNQQLRIKIDPGAKTTGIAILRNESVLWGAELTHRGGQIRSALTCRRQLRRSRRNRKTRYRQPRFNNRCRQEGWLPPSLISRVENILTWVKRLCRLSPIAHISTELVRFDPQIIQNPEISGIEYQQGTLAGYELREYMLEKWHRRCVYCGATDTKLEIEHIVAKSKGGSNRVSNLTLSCRKCNQKKGNKPIEQFLENNPLLLKSILSQAKRSLADTAAVNATRWKLFNGLKELGIPVETGTGGRTKYNRCRQNLPKTHWLDAANVGHSTPDTLKILVSRPMRIKATGHGNRQMCGTNAFGFPIRHRSNTKKHFGFQTGDIVKAVVTKGKKVGSYIGRVLCRATGSFDITTATGRVAGISHKYCSFVHRSDGYSYQ

SEQ ID NO: 17354 - protein, 493 aa, unidentified; identical to SEQ ID NO: 3154

SEQ ID NO: 17355 - protein, 400 aa, unidentified
MIPMKRSLTAKETVTITSMLFGMFFGAGNLIFPAKMGVDAGSKHIGISATTEKHELYREEATPRNDVVDLLSARRAFRRSRRNRKTRYRAPRFDNRVHSKHKGWFAPSVEVKIQEHITLIEHVCRILPVTLVRVETAEFDTQRLKAMLEGKPLPVGTDYQLGEMYDEYNVRQYVLKRDNYTCQCCGAHSTKTKGVKLHVHHIETRRTGGNAPNNLITLCTACHKALHAGKVTLDGKKRGKPLKDAAFMGIMRKTLMERLRKELKIPVQGTYGYITKCLREKNGIPKSHTNDARCISKNPLAIPCDTCYYTKAVRHHNRQLHKATILKGGIRKANQAPYIVKGYRLWDKVSCNGTECFITGRRTSGYFALKKLDGTVVSNSISYKKLRLLEAATNYITERK

SEQ ID NO: 17356 - protein, 431 aa, unidentified
MPNKVYVINKHGRPLMPCSPAKARHLLDEGKAKVKKRTPFTIQLVYGSSGYTQEVILGVDAGSKTIGMSASTTKEELLSAEVKPRNDVVDLLSTRREFRRARRNRKTRYRKPRFDNRVRSKHKGWLAPSVEVKIQEHITAIRRVCGILPVSKVVVETAEFDLQLLKAIADGKPVPQGEDYQQGEMYGHYNVRQYVLWRDGYTCQCCGAHATKKKEVRLHVHHLESRKVGGDAPDNQVTLCESCHEKLHKGLIAEKDFKKRKRKSTRDATFMGIMRKTLMQRLCSELPIPVIETRGYITKATREKLLVLPKSHTNDALAIAQGKQGFNVGYLPGIVQINKIYTIRPVRHHNRQLHKATILKGGIRKSNQTEKYVFGYRLFDKVQFNGQDCFIWGRRTTGIFTIKTINGKMIKDGISFKKLKLVEKSTSYLIA

SEQ ID NO: 17357 - protein, 430 aa, unidentified
MPKVYVLNRHGRPLMPCTPAKARHLLDAGKAKVRHRTPFTIQLLYGSTGYTQEVILGVDAGSKTIGLSAATETEELFSAEVKPRNDVVELMSARRQFRRARRNRTTRYRKPRFDNRVRSKHKGWLAPSVEVKIQEHMTAIRRACAILPVSKVVVETAEFDLQLLKAVAEGKPVPQGEDYQKGEMYGHYNVRQYVLWRDSYTCCICGVHGSVRKGVPLHVHHLESRRVGGDAPDNLVTLCTACHDKLHKGIIMVADIKKSKRRSTRDATFMGIMRMTLLRRLREQLPVPVVETRGYITKATREKLLVLPKSHTNDALAIAHGPQGFRAEYLPNIRQADRLYTIRPVRHHNRQLHKATILKGGVRKANQAEKYICGFRLYDKVLYNGIECFVWGRRTSGSFLLRQLNGEKVKDGVSYKHLKLLERSQSYLVA

SEQ ID NO: 17358 - protein, 477 aa, unidentified
MWLNSSEGKEQCCIHGNLGITLGKDSHSLRRGQFCQSLTVTTTRKETTSMYVYVLNQHGEPLMPCSPRKARTMLRDHKATVVRRTPFTIRLLHRSSEYRQDITLGVDAGSKFIGLSACTENKELFAAEVKPRNDVVDLLSTRRELRRSRRNRKTRYRAARFNNRVHSKHKGWLAPSVEVKIQEHITAIKRTCAILPISMVIVETAEFDTQRLKAMLEGKPLPVGTDYQLGEMYDEYNVRQYALKRDNYTCQCCGIQSTDKAPVKFAVHHKESRHVGGNAPNNLITLCEKCHRRLHAGVITLEEGKRKRGKSFRDAAFMGIMRKTLMRRLRSELSIPVKETYGYITKLLRETHSIQKSHVNDARCIARVPNAQPSDTLYRIRTVRNHNRQLHKANPIRGGIRKRNQAPYEVFGFRLWDKVLFSGRECFITGRRASGYFALKDFDGKKVHASASHKVLTVVESATSYLIERRTAVSSRG

SEQ ID NO: 17359 - protein, 416 aa, unidentified
MVYVLDKNGQPLMPTDRHRKVRLMLQSGQAKVIKRCPFTIQLNYDSGHQTQEISLGIDAGSKHIGVSATTKIKVLYEADVELRNDIVDLLSSRRELRRGRRNRKTRYRQAKFNNRRRGNGWLAPSIRQKIGTHLTVVENICKILPISRIMVETASFDIQKIKNTDIQGAEYQQGDQLGFWNIREYVLFRDNHTCQCCKGKSKDKILNVHHIESRKTGGNAPNNLITLCEICHTGYHKGAVQLPKTVKRGMRFKDAAFMGIMRWAFYEALKQQYEPVGTPVHNTYGYITKHTRIAYNLPKEHYVDARCISGNPEASSNGEYYYQKKVRCHNRQIHKLTVLKGGIRKQNQATYLVKGYRLFDKVSYQGKGYFVFGRRQSGFFDIRTLSGEKVNKGSLSCKKLKFIATRTYYLTERRAV

SEQ ID NO: 17360 - protein, 422 aa, unidentified
MFVYIINKDGEPLMPCRPQKARKLVKTGKAVIVRYEPFTLKLKFGSSGYKQPVTLGIDAGSVHIGASASTKKQELYASETILRSADGKASIVNLLAKRRELRRSRRNRKTRYRKARFQNRTHRKQKGWLAPSIEQKIESHLALVERLHRILPIQKIVVEVAQFDIQKIKNPDISGKGYQQGEQSGWKNVREYVLFRDQHTCQCCKGKSGDPVLNVHHIESRKTGGNAPNNLITLCKTCHQKYHQGKITLPKSIHRGMRFKDAAFMGIMRWAFYRRLREQYKDAHLTYGYQTKDTRIAHHLEKTHTTDAYCIAGNIQAKRIDTEYLRKQVRRHNRKIHREVPAKGNIRKRAQAGHLVKGFALNDTVRAKGALWFIRGLRTKGSFVLKHLDGKKLEIVPSKIQFVAHNHSYLVERREVAFPSAL

SEQ ID NO: 17361 - protein, 431 aa, unidentified
MPNKVYVINKHGRPLMPCSPAKARHLLDAGKAKVKKRTPFTIQLVYGSSGYTQEVILGVDAGSKTIGMSASTTKEELLSAEVKPRNDVVDLQSTRREFRRARRNRKTRYRKPRFDNRVRSKHKGWLAPSVEVKIQEHITAIKMVCRILPVSKVVIETAEFDLQLLKAIEEGKPVPQGEDYQKGEMCGHYNVRQYVLWRDDYTCQCCGTHATKKKEVRLHVHHLESRKVGGDAPDNQVTLCESCHEKLHKGLITAKDFKKRKRRSTRDATFMGIMRKTLMQRLCSELPIPVIETRGYITKATREKLLVLPKSHINDALAIAQGKQGFNVGYLPEILQIDKIYTIRPVRHHNRQLYKATILKGGIRKSNQTGKYVFGYRLFDKVQFNGQDCFIWGRRTTGIFTIKTINGKMIKDGISFKKLKLLEKSTSYLIA

SEQ ID NO: 17362 - protein, 333 aa, unidentified
TLRQSRRNRKTRYRAPRFDNRIRTKRKGWLAPSVENRINAHLSRIGAILRLLPVTKITVETASFDTQLLKNPDISGKEYQEGEQLGFWNVREYVLFRDGHACQHCHGRSKDPVLNVHHLESRRTGGDSPGNLLTLCETCHKALHRREIKLKTKRGQSFRAEAFMGIMRWEVLNRLKASHPELEVHNTYGYRTKHTRIVNGIDKSHCADAFCIAGNLGAKRLGEFFFQKQTRRNNRQIHKLSILKHGLRKRNQAPFEVKGFRLFDKVVCQGEEGFIFGRRSSGSFDVRKLDGTRISAGISYKKLRLLEKRRTYLKEIRKEEALPPLPEGRSLRA

SEQ ID NO: 17363 - protein, 420 aa, Geobacillus sp.; identical to SEQ ID NO: 4984

SEQ ID NO: 17364 - protein, 424 aa, unidentified
MRVFVLNMRGEPLMPCTQRKARLLLKKRKAVIYKYNPFTIQLTYATGETKQDCHIGIDTGSKYIGVAITSEDKVLFKGEIELRQDVKSNLDKRRMYRRDRRNRKTRHRQSRFLNRKRTDKWLPPSLQNRINHTFHWIDTFSRLVPSPKLHIEVGKFDAAKMINPEINGVDYQHGQTYGFFDERYFVFARDKYTCQCCGKSKDKILQTHHIIYRSNGGTNRVDNLITVCTDCHTSENHKKGGVFYKWQEQRKKVKQYKEPPFMNTLRKRIFVKYPNAVITYGSKTTPKRKEMGLDKTHYNDAIVISGVCKINENSEEWLLIKQFRKKKRSLHEATARKGRKIPNRNQVRNSKNTPCYQGFFLNDKVSVLGKSGYITGFTSNGAYIKDNANNYITLPNKTYKQVGISKLRLEHHNNNWQYMVKTAV

SEQ ID NO: 17365 - protein, 429 aa, unidentified
MLVYVLDMNGQPLMPTHNGAKVRVLLKQKRAKVVSKCPFTIKLLYESTSFTQPLTLGVDTGSKYVGSAVINDNTSEILYESQLELRDDIKSKMDRRRQFRRARRNKLRYRPVRFNNRKSSKRKNRYSPTLISKFQGHVGEIKFINSILPISSIVLEVGEFDPQLLQDSTLAYRKWGYQKGELYQQDNFKQAAKARDGYKCQCCGKKNCRLEVHHLIPRSRGGSDKLANLITLCTDCHHLAHSSEEQLLAFQKKFGKKAKGTLRYATQMNVLRHMLQREYCEAELTYGFITKDVCRVFGLEKSHMIDACCIASRGVLFKNKNSNKYKKKCVPKGDYARTGVHGRKFVILPKGKIAGFRRYDKVLYNNKEYFVAGRRVKGYIYLIDIDNNRVQTERTRRSTGEKYMSKVEIKVTTVKKIVGARGCVCTRIF

SEQ ID NO: 17366 - protein, 512 aa, unidentified; identical to SEQ ID NO: 4446

SEQ ID NO: 17367 - protein, 413 aa, Clostridium sp.; identical to SEQ ID NO: 4134

SEQ ID NO: 17368 - protein, 197 aa, unidentified
MQYVYVLNKHGEPLMPCSPRKARLLLKQKKACVVKRTPFTIKLLYGSTGYKQPITLGVDAGSKHIGISAATEKYELYCEEATPRNDVVDLLSARRAFRRSRRNRKTRYRAPRFNNRVHSKHKGWLAPSVEVKIQEHITLIKRVCRILPVTFVRVETAEFDTQALEGNACWKASSCRNRLSAWRDVRRIQCPSVCLKA

SEQ ID NO: 17369 - protein, 502 aa, unidentified; identical to SEQ ID NO: 2616

SEQ ID NO: 17370 - protein, 414 aa, unidentified
MPCSPAKARLLLKEKKAIVVRRTPFTIQLTIATGESKQPVSLGVDAGYKHVGLSASTEKAELYASEVELRPDVSDLLSARRTLRQSRRNRKTRYRAPRFDNRIRTKRKGWLAPSVENRINAHLSRIGAILRLLPVTKITVETASFDTQLLKNPDISGKEYQEGEQLGFWNVREYVLFRDGHACQHCHGRSKDPVLNVHHLESRRTGGDSPGNLLTLCETCHKALHRREIKLKTKRGQSFRAEAFMGIMRWEVLNRLKASHPELEVHNTYGYRTKHTRIVNGIDKSHCADAFCIAGNLGATRLGEFFFQKQTRRNNRQIHKLSILKHGLRKRNQAPFEVKGFRLFDKVVCQGEEGFIFGRRSSGSFDVRKLDGTRISAGISYKKLRLLEKRRTYLKEIRKEEALPPLPEGRSLRA

SEQ ID NO: 17371 - protein, 431 aa, Escherichia sp.; identical to SEQ ID NO: 3801

SEQ ID NO: 17372 - protein, 415 aa, unidentified; identical to SEQ ID NO: 5047

SEQ ID NO: 17373 - protein, 423 aa, unidentified
MVFVLDKHKKPLMPCTPKKARLLLSRQRAVVHRRYPFVIRLKDRRLEESVVQPLVLKIDPGSKTSGMAVARVEAAPQGEIHHAVHLAEVGHRGQQVHAAMGARARARRRRRSAHLCYRPPRFENRTRSKGWLPPSLCSRIGNVLTWARRYGHWTPITRLEVERVTFDLHLMQNPEIAGIEYQRGELAGWELRAYLLEKFQHRCVYCHRSEVPFEIDHQIPRSRGGSNRASNLVLSCHDCNAAKGHQTAAEFGHPEVGAQAKIPLKDAAAVNATRYALVLALEALSLPIGTWSGGRTRWNRDRFGLPKTHALDALCVGELAGVHARTLRTLRISASGRGQYCRTLFTRHGFPRGYLMRQKQVNGVQTGDLVLAVVPPPYQAQGTHKGRVAVRKSRFFRINGVDSIPARCCTVLQRSDGYEYAFV

SEQ ID NO: 17374 - protein, 431 aa, unidentified; identical to SEQ ID NO: 4306

SEQ ID NO: 17375 - protein, 420 aa, unidentified; identical to SEQ ID NO: 5953

SEQ ID NO: 17376 - protein, 424 aa, unidentified; identical to SEQ ID NO: 3232

SEQ ID NO: 17377 - protein, 457 aa, Scytonema sp.; identical to SEQ ID NO: 6260

SEQ ID NO: 17378 - protein, 422 aa, unidentified; identical to SEQ ID NO: 7962

SEQ ID NO: 17379 - protein, 428 aa, Moorena sp.; identical to SEQ ID NO: 4771

SEQ ID NO: 17380 - protein, 369 aa, unidentified
VDTGSGTIGTAVSNDNSDIVYMSEVIVRNDIMDKMTQRRKYRKNRRGRKTRYRKARWLNRANSTKTDRFSPTMQSKLHSHVKEIEYIKSILPITTMVFETGQFDTHLMKNPNLANPKVKHWGYQKGVNYGFENTKAMVLNRDNYTCQCCKGKHKDSKLEVHHIIFRSQCGSDEESNLITLCHTCHKDLHSGKINPKLKGGVKGTLKYATQMNSIRKQLFRIYPYAIETFGYVTKANRLVLGIDKEHYYDACTIATQGNIFTVKSNLYKKKCVSDGDFQKTKGIRSEQPIVTDKICGFRKFDKVRYFGNDYFIKGRMSTGYAILMDIDGNKADFSAMPKGYKTPKMVKLKRIEARTTWMITTVEVTPNIA

SEQ ID NO: 17381 - protein, 431 aa, unidentified
MPNKVYVINKHGRPLMPCSPAKARHLLDEGKAKIKKRTPFTIQLVYGSSGYTQEVILGVDAGSKTIGMSASTTKEELLSAEVKPRNDVVDLQSTRREFRRARRNRKTRYRKPRFDNRVRSKHKGWLAPSVEVKIQEHITSIKMVCRILPVSKVVIETAEFDLQLLKAIADGKPVPQGEDYQKGEMYGHYNVRQYVLWRDGYTCQCCGAHATKKKEVWLHVHHLESRKVGGDAPDNQVTLCESCHEKLHKGLIAEKDFKKRKRKSTRDATFMGIMRKTLMQRLCSELPIPVIETRGYITKATREKLLVLPKSHTNDALAIAQGKQGFNVGYLPEIAQIDKIYTIRPVRHHNRQLHKAAILKGGIRKSNQVGKYVFGYRLFDKVQFNEQDCFIWGRRTTGIFTIKTINGKMIKDGISFKKLKLAEKSTSYLIA

SEQ ID NO: 17382 - protein, 447 aa, unidentified; identical to SEQ ID NO: 5937

SEQ ID NO: 17383 - protein, 427 aa, unidentified
LLLQRGRAVVVRLAPFTIRLKDRVGGETQPLRLKLDPGSKTTGIALVRETETVDPETGEVERTAHVLWLGELEHRGQAIHKALETRRNFRRSRRYRKTRFRAPRFLNRTRSEGWLPPSLQHRIDTPTSWVTRLQRLAPITAISQERVRFDTQIMQNPEISAVEYQQGTLAGYEVREYLLEKFHRTCAYCGAKDVPLEIEHIVPRSRGGSNRPSNLTLACRPCNRKKADKPIEVFLALKPEVLKRIQAQAKAPLRDAAAVNATRWALFAALKATGLPIETGSGGRTKYNRSRLDIPKTHALDAVCVGQVDQVQNWNRPVLAIQATGRGAYCRTRAFKNGFPRGYLIRHKRVRGFQTGDWVRAEVPKGKKAGIHVGRVAVRATGSFNVQMPGKTIEGISYRYCRLLQRADGYGYAFQPKPQTEIAKWAA

SEQ ID NO: 17384 - protein, 451 aa, unidentified; identical to SEQ ID NO: 12558

SEQ ID NO: 17385 - protein, 417 aa, unidentified
MPCSPAKARLLLKEKKASVKRRTPFTIQLTIATGEARQPVTLGVDSGYKHIGLSATTEKAELYASQVELRQDITDLLSARLALRRSRRSRKTRYRAPRFDNRVASKRKGWLAPSVENRIAAHMSRVEAVMRVLPVTAITVETAAFDTQLLKNPDIAGEAYQQGEQLGFWNVREYVLFRDGHVCQHCRGKYKDPILNVHHIESRRTGGDAPNNLITLCETCHKAFHRGEIKLKVKRGKSFKAETFMGIMRWTLFERLKKAHPELRVRNTYGYLTKHKRISHGIAKSHCADAYCIADNLGAKRLEGFFFQKQTRKHNRQIHKLSILKGGLRKKNQAPYEVKGFRLFDKVICKGEEAFIFGRRTSGSFDVRRLDGTRISAGINYKKLRLLEPRTTYLTEFRKEAALPHLHECRGFRAEFL

SEQ ID NO: 17386 - protein, 415 aa, Bacillus sp.; identical to SEQ ID NO: 2431

SEQ ID NO: 17387 - protein, 446 aa, unidentified
VPAYRIKHITKKEAPYMVYVLDIDGQPLMPTSRHRKVRKLLNSHLAKVVKRCPFTIQLLYQSTKETQPVSLGVDAGSRHIGLAATTEQKVVYQEELVPRNDVVKLLSARRALRSSRRSRKTRYRKPRFNNRVHSKHKGWLTPSVEVKIQEHITAIKRICQILPISDIHVETAEFDLQRLKAMEEGRPLPVGTDYQLGEQYDFYNTRQYVLHRDEYTCQCCGTHDNNVKLHVHHIESRQTGGDAPNNLITLCEHCHKLLHAGKTILPKGKKRGKSYRDATFMGIMRKTLLERLKKEIDVPVEGTYGYITKYWRERAGLEKSHINDAICISKHPYARPLETYYLTKAVRHHNRQIHKTKFSKGGIRKRNQAPYLVKGFRLFDKVLYQESYFIFGRRITGYFDIRTLDGTKVNKGSTSYKKLRIQDTAEAYLTEVRAIPHMNEFTCVLA

SEQ ID NO: 17388 - protein, 415 aa, unidentified
MVYVISKDGNPLMLLKQGKAQVKKREPFTIKLNYETTNYLQNLTLGVDTGSRTIGTAVSNDNGDILYMSEVVVRNDITEKMTQRAKYRRNRRNRKTRYRKARWLNRANSIKNDRFSPTMRSKLYSHVKEIECIKSILPITQMVFETGQFDTHLMKNPSLANPRIRRWGYQKGPNYGYENTKAMVLNRDNYTCQCCKGKHKDSKLEIHHIVFRSKGGSDEASNLITLCHTCHKDLHSGKINTKLKGRIKGNLKFATQMNTIRKQLFRLYPNAIETFGYITKANRLQLGVNKEHYYDACTIATQGNRFTIKSNLYKKKCISDGDFQQTKGICSKQPIVTNKIHGFRKFDKVRYLGKNYFIKGRMSTGYAVLMDINGKKADFSNMPKGFKTPKMANFKRIEARTTWMTTTVVLTSNIA

SEQ ID NO: 17389 - protein, 384 aa, Lactobacillus sp.; identical to SEQ ID NO: 15843
  VARIANT 334..337: note = X can be any naturally occurring amino acid

SEQ ID NO: 17390 - protein, 289 aa, Parasutterella sp.; identical to SEQ ID NO: 15206

SEQ ID NO: 17391 - protein, 475 aa, Blautia sp.; identical to SEQ ID NO: 4128

SEQ ID NO: 17392 - protein, 433 aa, unidentified
MVYVLSQDGKPLMPTERHGKVRHMLRDGQAKAVKAKPFTIQLTYETTTYTQPITLGVDAGYQNVGLSAVSKKKELFSAECELLKGQAERNKERVMYRRQRRSRLRHRKPRFNNRRKPDGWLAPSMQHKLDSHIRLINKAKSILPITETIIEVANFDIQKIKNPDIQGVEYQQGEQFGHYNIREYIFFRDDYTCQFCGRKNLPLEMHHIGYWKKDKTDRPSNLATACVKCHKPENHKKGEILWGWQPKLKPFKAETFMTTVRWKIVDALNCKHTYGYITKNNRIALKLPKSHTNDAFCIAGGITQKRAETLIITQTRRNNRSLEKFYDAKYIDTRTGKNVSGQELNNGRRTRNKNLNTENLHKHRGQKTAKGRRNIRRQRYFYQPNDLVIYKGKKYQVAGVQNRGTYIRLKCLKKVPRIDLVQPYRFIKGLSIA

SEQ ID NO: 17393 - protein, 431 aa, unidentified
MPDKVYVISRLGHPLMPCSPAKARHLLDDKKAKVVKRMPFTIRLLYGSTKYIQPIILGVDAGSKTIGLSASTAKEEVFAAEVMPRNDVVENLSTRREFRRARRNRTTRYRKPRSDNRVRSNHERWLAPSVKVKIQEHITSIKRVCTILPISKVVIETAEFDLQLLKAIQEGKPIPEGEDYQKGELYGSYNVCQYVLWRDNYTCICCGVRGTPKNPVRLHVHHFESRKYGGNAPDNHGTLCDDCHKKFHLGIITDVKLKTRRRQSTRDAAFMGIMRKTLMWRLRTELFIPVAETKGYITKATREKLLVLPKSHTRDALAIAQGRHGFGIKEYAYVEPANHIYTVRPVRHHNRQLHKASILKGGIRKRNQASKYVFGFRLYDKVLYQGKACFVWGRRTSGTFLLRTIDGIKVKDGVSYRNLTLLERSSNYLIA

SEQ ID NO: 17394 - protein, 396 aa, unidentified; identical to SEQ ID NO: 4508

SEQ ID NO: 17395 - protein, 511 aa, unidentified
MATVYVLNKDSKPLMPTTRCGHVRYLLKEKKARVVRANPFTIKLLYETDDVVQPLYLGIDPGRTNIGVAVAKGDGTAVFTAHLETRNKEIPKLMAKRKEYRQGRRHYRRCKRQRRAAAHGTLSKRCKKQDTAQGSNISERAQKIGVFERNLPGCEKPVLCIGIKNKEARFNNRVRPAGWLTPTANQLLLTHINFVKKICKFLPISDVVLEINKFAFMQLDNPNIQKWQYQQGPLYQKASLEEAVSEMQEHHCLFCKQSIVHYHHVVPQSENGSDTIGNIVGLCTKHHDLVHKDTAWQKKLAKKKTGLNKKYGALSILNQIIPALTKELSSLFPKHFFATNGKSTHDYRAAHDVSKDHWLDAYCIACSILPNDTCDKNINGRVPYKLKQFRRHDRRALHKENMSRVYTLDGKKVATNRHKAIKQTTDSLEEFRQRQPNDVCKLKVKEHHPEYRNPERNFPGCVFLVGKHTHVMQGTSGSHNGKADGYYDTNGNSYPSGKCKFVAKNKGIVFA

SEQ ID NO: 17396 - protein, 425 aa, unidentified; identical to SEQ ID NO: 3148

SEQ ID NO: 17397 - protein, 429 aa, unidentified
  REGION 1..429: note = IscB polypeptide
LNAVFVVDQNRKPQNPVHPAKARMLLDGQRAAVLRMFPFTIILKEVIADQPRTLRVSVDPGSRKTGIVLVEESSNRVVWAGEIEHRGLTIKKRMDARRTIRRSRRSRKTRHREPRFLNRTRPGSWLPPSLSSRVVNVETWIRRLSRWSPVGSISMELVKFDTQLMDNAEISGVEYQQGELQGYEVREYLLEKWSRNCVYCGVMGVPLQVEHITPRSRGGTNRVSNLAISCRDCNIEKGTMTAEEFGHPKIQEQAKRPLKDAAAVNATRWALFHRLKQTGLPLEVGTGGRTKFNRTRQGYPKAHWIDAACVGESGSKVRLDPSQTILAIGAKGWGSRQSCRMDRFGFPRTGPKGSRIIHGFRTGDLVKAMVLKGKFIGTHLGRVAIRATGSFTIDGVTTTSWKNCQIVQRVDGYSCSHSHSKENGNSSHD

SEQ ID NO: 17398 - protein, 406 aa, unidentified; identical to SEQ ID NO: 11666
  VARIANT 406: note = X can be any naturally occurring amino acid

SEQ ID NO: 17399 - protein, 442 aa, unidentified
MSTSVFVLDKKHRPLMPCRPARARRLLRAGRARVVKRFPFVIRLVDRTVEQSEVQPVLIKLDPGSRETGAAVVRDDEKKRHHALAFFVIKHRGDAIRDALKARSAFRRRRRSQNFRCRSPRFLNRVKPKGWLPPSLRHRVETTLSFVRRMCRYLPVSGIATELVKFDSQKLQNPEVSGVKYQQGTLFEYEVREYLLEKFGRKCVYCGAEGVPLNIDHVVPRAKGGSNRVSNLVLACVSCNQKKGARSLEDFLKGKPEVLARVRRELKTPLRDAAAVNATRWVLFNELKATGLPVETGSGALTKLNRHAFGVEKEHWLDALCVGRLNGVVTRKGLNALEIRCMGRGSRQRTRLTKYGFPRGYLMRQKCVHGFATGDMVEANVPKGKKAGLWRGRVAVRVSGSFNIQTPKGVIQGVGWKHCRLISHNDGYGYAWLGHAPHSSPA

SEQ ID NO: 17400 - protein, 417 aa, unidentified
  REGION 1..417: note = IscB polypeptide
MQKVYVQNKDGEPLMPTERYGAVRGWLRDNKAIVVQLTPFTIRLNLDCDNHKQEVIVGLDTGAINVGCSAVSGNRCLYASETKLRTDISKKMQRRAMYRRTRRTRKLRYRPARFDNRKSKRQLPPSLQSKMESTVKVVKQLAEILPISKVMVEIAKFDTQKLQNPEIKGKEYQNGVTEGYDNVRAYVFERDKYTCQICMKREGILQTHHIKQRKDCGSDRPENMVTVHKDCHSAFHKGLIQHKFRKPKEYCMATQVTILKDFIVKELRKEFDVEITFGHITKRNRKRLNLPKSHCFDAISICNPKKIERITHIFKRRCITQRRYQITKGIRSEKRLPNGDLFGFSVWDKVRLPNKQVGFIKGRRSSGFFDVCDIDGNNISHSIKYTNLQRLCGNNVMEASVSPPTTKVMGIRNAKVL

SEQ ID NO: 17401 - protein, 408 aa, unidentified; identical to SEQ ID NO: 6729

SEQ ID NO: 17402 - protein, 413 aa, unidentified; identical to SEQ ID NO: 11796

SEQ ID NO: 17403 - protein, 465 aa, unidentified; identical to SEQ ID NO: 3856

SEQ ID NO: 17404 - protein, 431 aa, unidentified; identical to SEQ ID NO: 6230

SEQ ID NO: 17405 - protein, 477 aa, unidentified
MKTHKSVLVIGMNGIGLMPTTPRKARVLLEEGKAEVYRKTPFTIKLLYKTGSATQDIVLGIDTGSQHIGVAVVTDNTVQLKDEHVLRTTMEKRQLNEKRAAARRNRRYRKTRYRKPKFKPHTKHVYKEMTTTRHGHETHWHKVKNEFGTNRDPGWLPPSIQQKVDHHIQIISRYQEALPVRTKTRIEIGRFDMQKIRNPEIEGVQYQLGRMYYFENVKAYVLAKYNYQCPICGRKFGSKRKDGTTVKIRMHHRDYVSNGATNNPDSFIPVCECCHSAEEHAEGGKLDKLMNDSKKSLRGMRDMTFMNILRRRIWNAFPDAEYTYGNITNADRKWLGLPKTHANDAVSVAMHEWIQQTGLREVTDVPYTTVYKEVRKKKRSLHEMNPRKGRSRPNTDAVRNSKNTKSVTNRSGTFCLYDKIKYMGQIGWITGFSGKNTAYIKNKYDQYITGKADKYKNIPLGDVRILERNNQWISYTI

SEQ ID NO: 17406 - protein, 413 aa, unidentified
LKVFVLNMRGQPLMPCSPAKARHLLKAGKAVVKRRTPFTIQLRIATGETKQNVTLGVDAGAKHVGLSATTEKEEVFASEVELRQDITGLLAARLSLRRDRRHRKTRYRAPRFLNRVRSKHKGWLAPSVENRIQAHMSRIDAVCRLLPVTKIVIETASFDVQKIKNPTIEGTDYQQGDQLGFWNVREYVLFRDGHVCQHCHGRSRDKILNVHHLESRKTGGDAPNNLITLCETCHKAYHAGKIKLKVKRGQSFRAEAFMGIMRWTLLDRVRKTHPKLPVENTYGYLTKHKRIALGLPKTHCADAFCIAGNLKALRRGDFLFQQQTRKHNRQIHRCSILKGGVRKLNQAPFLVKGFRLFDKVRIGGQIGFVFGRRVRGIFNIRRLDKTVIGTDINCKKLSLLETRKTFLTELRKE

SEQ ID NO: 17407 - protein, 460 aa, unidentified
MGGRKPIYLQEEKRMVAVLNKNGKPLMPTSEYRARRMLKSGKAVICNYRPFAIRLLNNKTEDIQEIEYCMDTGYLHIGNSVKSEKHEYLALQVDTLENERVKHDTCRAYRRARRNRKRYRKPRFDNHKRPEGWLTPSLQHKVMIHLYWLQKICQFIPVQRIVLEMGQFNTQVLKAVAEGKPLPEGVDYQHGERYGTDTLREAVFTRDQHTCQCCGRSIKDRAILHAHHIRYRSEGGSNAMGNLVTVCEKCHTPANHKPGGKLYGWKPKLPSFKGATYMTTVRWILYGQVKALFPDKDVRITYGAETKRSRLNRNLEKTHVNDAYSMGDYHPKHRGKPVYLKKKRRNNRCLEKFYDAKYIDSRDGKIKSGQQLSNGRNDRNHKKDSENLHPYRREKHKKGRRSIRRQHYRIQPGDKVLFRGEVYIAKGCHDKGARVMLYPGKSVAMGKVRVRTYAGGYISV

SEQ ID NO: 17408 - protein, 504 aa, unidentified; identical to SEQ ID NO: 3854

SEQ ID NO: 17409 - protein, 470 aa, unidentified; identical to SEQ ID NO: 2825

SEQ ID NO: 17410 - protein, 450 aa, unidentified; identical to SEQ ID NO: 14896
  source 1..450: note = Cyanobacteria bacterium UBA8543

SEQ ID NO: 17411 - protein, 451 aa, Paraburkholderia hospita; identical to SEQ ID NO: 2390

SEQ ID NO: 17412 - protein, 450 aa, unidentified; identical to SEQ ID NO: 2935

SEQ ID NO: 17413 - protein, 456 aa, unidentified; identical to SEQ ID NO: 4609

SEQ ID NO: 17414 - protein, 465 aa, unidentified
  REGION 1..465: note = IscB polypeptide
MQKLGERKTYTPRNTSLVPCSVTRSLNREETLSEMSLKTSSNNPEVNLRQHTCGLKDKVYVKSVDGQVLMPCSNAKARHLLESGKAKVVRKYPFQIQLLFVCENKVQDVVLGVDTGYENIGFSAVSGKEELLGGTMKLENKMSSRLLEKKMYRRGRRNKLWYREARFNNRVKKGWLAPSVERRINTHVELVKRICKLLPISKVNVEGANFDIQRIENPNVEGKGYQQGSLYDYENVKAFVVAREEGKCQLCGREYDDNGWHLHHIIPRGQGGTDRPKNQALLHNKCHDKLHNQKLYKKLKKEKQYKAETFMSTTRLKILERISKIHPNVNISYGYETKVKRIEQGLEKIHSNDAFIIADGTEQVRSKEYILEQKKRNNRVLQLNRNRYKPSIRKQRSVIQPKDIFWVNGIKYIAKGMFNYGKYILYGDVKKKEYFKIEKVEKYFNINSWQFIPRLKAGVFLPQRG

SEQ ID NO: 17415 - protein, 441 aa, unidentified
MTKTATQKVIQVCVLDQNGQPLMPTQRLGKVYRLLKSKKAHIVAYEPFTVQLDYEPKTHIIQPLTLGVDSGAIHSGYSLANEHREYYNAEVIARDDISKNISDKRMYRRNRRARKTRYRKPRFNNRKNKGEGWIPPSLEQKVEVQVKEIKHLHKYFPIKDIIIEVAEFDIQKIVNSDISGKEYQQGTLQGYNIRNYLIEKYNHKCFYCDKEVSAFEVEHMIPKARNGSNRIDNLTLSCPDCNQKKGTLTAEEFIRQTLSPQKAAQKLRQLPKTKKLLKYMAHMNATRWVLYNTIKEIYNSVSLTYGYITKHNRINAGLPKAHHIDAKCITGFSTVPSFEVTVVKTKKRRHNRQLHRATFSKGHVRKVATLPRFVHGFQLYDIILFNNHRYYIKSRRSSGYFTIVSLEGLNNSKRSYKKLTFLAHTNAYLINHYVNDKIKKC

SEQ ID NO: 17416 - protein, 465 aa, unidentified; identical to SEQ ID NO: 3603

SEQ ID NO: 17417 - protein, 262 aa, unidentified
MSVAVMSKTGMRLMPTSEYRARKLLKSKKATVYRYNPFTIQLTERETGDVQTVELCMDTGYLHIGTSVKSEKHEYLGVQIDTLTDEKQKHDACRMYRRQRRSRKRYRQSRFNNRKRSDGWIAPSLEHKKDIHIQTISRICNAMPITNITLEMGNFDTQVLKALEENRPLPQGTDYQHGERYGIATLREAVFARDKYTCQCCRKTIADGAILHVHHIIYRSRGGTNRMSNLATIDVILLQIISQVVGCTTGNQRLRRSKVQHS

SEQ ID NO: 17418 - protein, 420 aa, unidentified
MQYAYVLNKRDEPLMPCSPGKARILLKQQKACVVKRTPFTIKLLHGSAGYKQPITLGVDAGSKHVGLSASTEKRELYSEEFTPRNDVVELLSTRRQNRRSRRNRKTRYRAPRFNNRVHSKHKGWLAPSVEVKIQEHITVIKRICRILPITLVRVETAEFDTQRLKAMLAGKPLPVGTDYQLGEMYDEYNVRQYVLKRDNYTCQCCGAHTTAKKTVKLHVHHLESRKVGGNAPSNLITLCTTCHNNLHKGKITLDGKKRGKTLRDAAFMGIMRNTLLTRLRNELNIPVQNTYGYITKLLREQNDIKKSHVNDARCISKHPLAKPCSICYRTKAIRHHNRQIHKAKILKGGIRKANQAPYIVKGFRLWDKVLYNEQECFISGRRSSGYFALRKFDGTTITNSISFKKLRLLEPATNYLIERK

SEQ ID NO: 17419 - protein, 371 aa, unidentified; identical to SEQ ID NO: 16860

SEQ ID NO: 17420 - protein, 452 aa, Lactobacillus sp.; identical to SEQ ID NO: 5473

SEQ ID NO: 17421 - protein, 323 aa, unidentified; identical to SEQ ID NO: 7431
  source 1..323: note = Cyanobacteria bacterium UBA11369

SEQ ID NO: 17422 - protein, 415 aa, unidentified; identical to SEQ ID NO: 6843

SEQ ID NO: 17423 - protein, 400 aa, unidentified
LQDYYLSKAKQKLRSEPFTIKLTYETTNYTQGLTLGVDTGSGTIGTAVSKDNGDIVYMSEVVVRNDITDKMTQRAKYRRNRRNRKTRYRKARWLNRASSIKKDRFSPTMQSKLHSHVREIEYIQSILPVTEMVFETGQFDMQLMKNPSLANPKVRPWGYQKGANYGFENTKAMVLNRDNYTCQCCKGKHKDSKLEVHHIVFRSQGGSDEESNLLTLCHTCHKDLHSGKINPKLSGKVKGNLKYATQMNSIRKQLFRFYPNAIETFGYVTKANRLHLGVDKEHYYDACTIATQGNAFNVKSNLYKKKCVSDGDFQKTKGIRSEQPIVTDKICGFRKFDKVRYFGNDYFIKGRMSTGYAILMDIDGNKIDFSTMPRGYKTPKLSNCKRITARSTVMTQVKVV

SEQ ID NO: 17424 - protein, 327 aa, unidentified
RKQNRRSRRYRKTRYRAPRFDNRVHSKHKGWLAPSVEVKIQEHITVIKRICKILPISLVRVETAEFDTQRLKAMLAGKPLPVGTDYQLGEMYDEYNVRQYVLKRDHYTCQCCGAHNTAEKVVKLHVHHLESRKTGGNAPSNLVTLCTTCHKNLHKGKVTLDGKERGKPLRDAAFMGIMRKTLMARLKEELPIPVEGTYGYITKMRREQNDIKKSHTNDARCISKHPLAEPCSVCYRTKAIRHHNRQTHKANFSKKGIRKRSQMPYLVEGYRLWDKVLYKEQECFVSGRRSSGSFTLKKLDGTSVSKGVTFKKLRLLEPATNYLIERM

SEQ ID NO: 17425 - protein, 430 aa, unidentified; identical to SEQ ID NO: 4504

SEQ ID NO: 17426 - protein, 416 aa, unidentified; identical to SEQ ID NO: 4039

SEQ ID NO: 17427 - protein, 454 aa, unidentified
LDTVAVISASGKKLMPTNSYRARRLLKSKRAVIYRYRPVFTIKLVDRTNGYTQPIEYKCDTGYQNIGISICSDTKEFVNEQRDLLKDEVKRHSDSRKYRRTRRNRLRYRKKRFDNRRGMISKDGFAPSIRNKRDVHVRLYEEYYKVFPITKAVFEMGQFDTQVLKAVEAGLPVPEGTDYQHGEQYGYATLREAVFARDSYTCICCGKSAIKDGVKLRIHHIGYLSGDRSNRMANLGSVCENCHTSKNHKPGGKLYNLKPKLKTFKGATFMTMVRYSMVKQLKAATPDVDIKVTYGAATKLARRVLSVKKTHSNDAYCMGEFHPKHRSNFKHYRKCRRNSRVLSRFYDAKYRDLRDSSVKTGSQLSCGRTNRKISRHTELDEHIYRAHKISKGRVSTRRQHYSLRPGDKVLYDGKVYFVTGMQNNGTCVKLTNGKVCSLKKVCVLQHCNAWTAVI

SEQ ID NO: 17428 - protein, 458 aa, Halomonas sp.; identical to SEQ ID NO: 3786

SEQ ID NO: 17429 - protein, 421 aa, unidentified
MLVFVKNKHGENLMPCKPSKARKLLKQKKAKIISYKPFTIQLLYGSSGYKQPVTLGVDLGSKHIGIAVTSEDKVLIKGEIELRDDIKENLDIRRQYRRSRRYRKTRYRKPRFNNRKRPEDWLPPSIQSRIDNTFRWIDNFINLLPSPKLCIEVGKFDVQKMMNPDIEGVEYQQGETYGYYDVRYYVFARDNYTCQVCKKKGKILQTHHIVYKSKGGTDRPSNLITVCTDCHTHKNHQEGGIFYKWMMEKKKMPSYKETPLMNIMRRRVFEKYPEANIVYGSYTTIRRKELGLEKTHYNDAIAITGIESIKHNPDNYFKIKQFRKKKRSLHEAIPRKGRKEPNRTQKRNSKNTKYRNGFYLNDKVKVFGKVGFITGFTNGGAYIQDIEGNYITIPNKSYKQVSFKYIEFINHNNNWQFISHL

SEQ ID NO: 17430 - protein, 408 aa, unidentified
MSTCVCVLSNSGERLMPTFRLGKVRRLLKDGKAKIVKHHPFTIQLLYDSKTNTQPIEICEDVGYNYIGISVKSESHEYVSAQYDTLQDEKEHHDDCRKMRRARRNRLRYRKPRFDNRKRSEGWLAPSLEHKKQLNISLIERYVSVIPITRATVEVGSFDTILLQAIQKGKSKPEGVDYQKGPRYNLATLREAVFYRDNYTCQVCGRKIADGAILHMHHMFYWKGRHGYQLDELVTACEKCHTPANHQKGGKLFGFGEDKEFANLSGAAFMNAVRWQIVDALHATYGKEFVTITYGAMTKEKRIILGIEKTHNNDAYAMGDYHPVHRCVFRHYQKRRRNNRVLEKFYDATYIDARTGNKAKGKELFNGRINRNHKKDSENFHKYRSKKVSKGRRSIRRQRYAIQPYDTV

SEQ ID NO: 17431 - protein, 467 aa, unidentified
MAVFVLDRHGKALMPCTEKRAKLLLARNRARVHRILPFSIRLIDRKASSCDFQALRIKLDPGSKTTGMALVRELDGGIAVLNLFELIHRGRQISDALTARKNMRCHRRTANLRYRQPRFLNRGNQQSGWLAPSLQHRIDTTMAWVSRLSKLAPISAISQELVKFDLQQMESPEISGVEYQQGTLLGYEVREYLLEKFNRTCVYCDAKDTPLQIDHLHPKANGGTNRISNLALACGPCNQRKAAQDINLFLVKDPTRLKRILTQVKKPLKDAAAVNSTRWALFNALKTTNLPVEIASGGKTKYNRSRLNIPKTHALDAVCVGNVDSIESWDKPTLNIKSMGRGCYQRTRLTASGFPRGYLTRIKNIQGFQTGDMVKATVTKGKKIGTYSGRVAVRASGNFNIQTTTEVIQGISHRYCQIVQRGDGYGYSQTGAINGNRRGQVGSRARIARQSALTFSALMPVFHAQIL

SEQ ID NO: 17432 - protein, 414 aa, unidentified
MPCSPAKARLLLKEKKAIVKRRTPFTIQLTIATGETKQPVGLGVDAGYKHVGLSASTDKAELYASQVELRQDITDLLSARRALRRARRNRKTRYRAPRFNNRIRTKRKGWLAPSVENRINAHLSRIEAVLRLLPVTKITVETASFDMLLLKNPDIAGKEYQEGEQLGFWNVREYVLFRDGHVCQHCYGRSKDPVLNVHHLESRRTGGDSPGNLITLCETCHEALHRGEIALKTKRGHSFRAEAFMGMMRWEVLNRLKASHSELEVNNTYGYRTKHARIVNGIDKSHCADAFCIAGNLGAERLCEFFFQKQTRRNNRQIHKLSILKGGIRKRNQAPFEIKGFRLFDKVACKGEESFIFGRRSSGYFDVRKLDGTRISAGISCKKLRLLEKRRTYLTEIRKEEALPPLPEGRGLRA

SEQ ID NO: 17433 - protein, 432 aa, Sharpea sp.; identical to SEQ ID NO: 6688

SEQ ID NO: 17434 - protein, 430 aa, unidentified; identical to SEQ ID NO: 4504

SEQ ID NO: 17435 - protein, 457 aa, unidentified; identical to SEQ ID NO: 5177

SEQ ID NO: 17436 - protein, 446 aa, Pseudomonas sp.; identical to SEQ ID NO: 9324

SEQ ID NO: 17437 - protein, 480 aa, unidentified
LYTKPLDNIGEGSLPPSGEINLKGMTFMVYVKSIDGKALMPTSNAKARKLLKQKKAKVVSLRPFVVKLTYKTKTEYIQKLNLGVDSGYSNIGFSVIDAKQEYIVGEVKLLEGMKKRLLEKASYRRIRRSRLRYRKARWNNRVKSKKKGWLAPSLKHKLDTHIKFIDYLKNILPIEKITIEVANFDIQKMKDDLISGIDYQNGDMFGFWNVREFVLHRDGHKCQNPNCKHKDKKEQILKVHHIRYRSEGGSDRPENLITLCSKCHIPANHKKGKFLYDWCVNGKKVRGFKDATFMSMIRWYLVNELKSKHNNVSITYGYITKNHRIQNGIEKSHLNDAFAITKGTNQARTKDRFLVIQDRLKNRSLEKFYDSKIIDIRTGKKVSGGDLSCGRSTRNKNLNTENLRKYRGAKISKGQRRIRKQKYFYQPNDLVKYDGKVYTVKGTQNEGKYIALKEIKKVPKVELLIPYVFKKGLNWSYGLC

SEQ ID NO: 17438 - protein, 518 aa, Actinomadura sp.; identical to SEQ ID NO: 5776

SEQ ID NO: 17439 - protein, 442 aa, Methanococcoides sp.
VLALLNLSISGREEDGFRCWLLQYLIRITLKTGGYNILNVYVLNKDKKPLMPTSPVIARLLLKNKKAKVVRKTPFTIKLLYETTEHKQPVIAGMDTGSRTIGCAAIANDEVIYQSEVQLRTDISKKMTQRASYRRTRRNRITRYRPARFDNRGKKGKIAPSIKSKVDSHLREKRFVEAIVPVTKWKVELASFDIHKIVNPEIKGKQYQEGNQKGFYNVKAYVLDRDNYTCQHCKGKSKDKHLECHHIIFQSNGGSDALENMIVLCNTCHKELHDGKFSINEQVSRTKYATEIGIIKSQLGRFDWQFESTFGYETKYKREKVMELPKTHYNDAIAICCKEDQNINLADTVYFKKHVSKGDYQQTKGKRSEKKIPTGKLFGLRKFDLIKTMKGIGFVKGKRSSGYFAICDIFNKTIHNSVGVKTKCTRIQARTTTLVQPQMLTI

SEQ ID NO: 17440 - protein, 305 aa, Lactobacillus sp.
  VARIANT 211: note = X can be any naturally occurring amino acid
MPCRPRKARLLLKSGKAFVVKKYPFTIQLKYGSYGYKQKVSLGVDTGQRHIGFAVVSQDKVLHQSEVELRQDVHTNLYTRKIYRRGRRNRKTRYRQARFLNRVHGKRDGLWLPPSVKSKVSHNIAWIKRYLAVLPNPDLHIEVGKFDMAKMVNPDISGKQYQEGSLKDWKNYEYYVLARDEYTCQLCHKHGEGVKLVVHHIVYRSQGGTDXRKRIMTAFPEASFQYGSQTYVDRKNLLLPKGHFMDAIAISGIKSVGQLSDTVTMISQFRKKKRSLHEATARKGRKQPNMSSKRNEKNTKYACGL

SEQ ID NO: 17441 - protein, 430 aa, unidentified; identical to SEQ ID NO: 11913

SEQ ID NO: 17442 - protein, 425 aa, unidentified; identical to SEQ ID NO: 8945

SEQ ID NO: 17443 - protein, 474 aa, Thermincola sp.; identical to SEQ ID NO: 2975

SEQ ID NO: 17444 - protein, 426 aa, unidentified; identical to SEQ ID NO: 5603

SEQ ID NO: 17445 - protein, 447 aa, unidentified
VPAYRIKHITKKEVPYMVYVLDIDGQPLMPTSRHRKVRKLLNNHLAKVAKRCPFTIQLLYQSTKETQPVSLGVDAGSRHIGLAATTEQKVVYQEELVPRNDVVKLLSARRALRSSRRSRKTRYRKPRFNNRVHSKHKGWLAPSVEVKIQEHITAIKRICQILPISDIHVETAEFDLQRLKAMEEGRPLPVGTDYQLGEQYDFYNTRQYVLHRDEYTCQCCGTHDNNVKLHVHHIESRQTGGDVPNNLITLCEHCHKLLHAGKTIIPKGKKRGKSYRDATFMGIMRKTLLERLKKEIDVPVEGTYGYITKYWRERAGLEKSHIHDAVCISKYPYAKPLDIYYLTKTVRHHNRQIHKSNFSKGGIRKRNQAPYLVKGFRLFDKVLYQGKSYFIFGRRATGFFDIRTLNGAKVNKGSISYKKLRIQDTANAYLKEIKAIPHMNKFTCVLA

SEQ ID NO: 17446 - protein, 419 aa, unidentified; identical to SEQ ID NO: 6987

SEQ ID NO: 17447 - protein, 451 aa, unidentified
VTTILKTCFAAFNLAKVVVLMDAWDIIVVLNKRGKPLMPCSPAKARLLLKEKKAIVKRRTPFTIQLTIATGESKQPVTLGVDAGYKHVGLSASTEKAELYASEVELRQDVSDLLSARRALRQSRRNRKTRYRAPRFNNRLRTKRKGWLAPSVENRINAHLSRIEAVLRLLPVTKISVETASFDMQLLKNPDIAGKEYPEGEQLGFWNVREYVLCRDRHVCQHCYGRSKDPVLNVHHLESRRTGGDSPGNLITLCETCHKALHRGDITLKAKRGQSFRAEAFMGIMRWEVHNRLRALHPGIEVSNTYGYRTKHARIANGIAKSHCADAFCIAGNLGAERLCEFFFQKQTRRTNRQIHKLSILKGGIRKRNQAPFEVKGFRLFDKVACQGEEGFIFGRRSSGFFDVRKLDGTRISAGISCKKLHLLEKRRTYLTEIRKEEALPPLPEGRGLRA

SEQ ID NO: 17448 - protein, 445 aa, unidentified; identical to SEQ ID NO: 10136
  source 1..445: note = Microcoleaceae bacterium UBA9251

SEQ ID NO: 17449 - protein, 512 aa, unidentified; identical to SEQ ID NO: 5549

SEQ ID NO: 17450 - protein, 447 aa, Scytonema sp.; identical to SEQ ID NO: 2680

SEQ ID NO: 17451 - protein, 512 aa, unidentified; identical to SEQ ID NO: 9077

SEQ ID NO: 17452 - protein, 417 aa, unidentified
MPCSPAKARLLLKEKKAIVKRRTPFTIQLTIATGESKQPVTLGVDSGYKHIGLSATTEKAELYASQVELRQDITDLLSARLALRRSRRNRKTRYRAPRFNNRVASKHKGWLAPSVENRIAAHLSRVEAVMRVLPVTAITVETAAFDTQLLKDPDIAGGAYQQGEQLGFWNVREYVLFRDGHVCQHCRGKSKDPVLNVHHIESRRTGDDAPNNLITLCETCHKAFHRGEIELKVKRGKSFKAETFMGIMRWTLFERLKKAHPELSVRNTYGYLTKHKRISHGIAKSHCADAYCIADNLGAKRLEGFFFQKQTRKHNRQIHKLSILKGGLRKKSQAPYEVKGFRLFDKVICKGKEAFIFGRRTSGSFDVRRLDGTRISAGISYKKLRLLEPRTTYLTEFRKEAALPPLHKCRGFRAEFL

SEQ ID NO: 17453 - protein, 426 aa, Actinomadura sp.; identical to SEQ ID NO: 6782

SEQ ID NO: 17454 - protein, 432 aa, unidentified; identical to SEQ ID NO: 16355

SEQ ID NO: 17455 - protein, 431 aa, unidentified
MPNKVYVINKHGRPLMPCSPAKARHLLDEGKAKIKKRTPFTIQLVYGSSGYTQEVILGVDAGSKTIGMSTSTKKEEVFAVDVTPRNDVVDLMSTRREFRRARRNRKTRYRKPRFDNRVRSKHKGWLAPSVEVKIQEHITSIKRACRILPVSKVVIETAEFDLQLLKAIADGKPVPQGEDYQKGEMYGHYNVRQYVLWRDGYTCQCCGAHTTKKKEVRLHVHHLESRKTGGDAPGNLVTLCDSCHEKLHKGLITEDDFKKRKRRSTRDATFMGIMRKTLMQRLCSELPIPVVKTRGYITKATREKLLVLPKSHTNDALAIAQGKRGFNVGYLPEIAQIDKIYTIRPVRHHNRQLHKATILKGGIRKSNQTEKYVFGYRLFDKVQFNGQDCFIWGRRTTGIFTIKTINRKMIKDGISFKKLKPVEKSTSYLIA

SEQ ID NO: 17456 - protein, 427 aa, unidentified; identical to SEQ ID NO: 5140

SEQ ID NO: 17457 - protein, 235 aa, unidentified
LKVFVLNMRGQPLMPCSPAKARHLLKAGKAVVKRRTPFTIQLRIATGETKQNVTLGVDAGAKHVGLSATTEKEEVFASEVELRQDITGLLAARLSLRRDRRHRKTRYRAPRFLNRVRSKHKGWLAPSVENRIQAHMSRIDAVCRLLPVTRIVIETASFDVQKIRNPEVEGTGYQQGDQLGFWNVREYVLFRDSHVCQHCHGHSKDKILNVHHLESRQTGGDAPNNLITLCETCHK

SEQ ID NO: 17458 - protein, 415 aa, unidentified; identical to SEQ ID NO: 6534

SEQ ID NO: 17459 - protein, 419 aa, Moorena sp.
MQNYIFIIDTNKQPLNPISPKKARRLLEKGKAAVFRMYPFTIILKTAIDNPTISPCQIKIDPGSKKTGFALVQDDQVIWGMELEHRGGLIKKKLDYRGAARRGRRNRNTRYRKPRFLNRKRPKGWLTPSLEHRILTIQTWVKRLIKFCPVNEIWVERVKFDTQKMQNPEINGVEYQQGELAGYEVREYLLEKWGRECAYCGKQNIPLQIEHIHPKSKGGSDRVSNLCLACEKCNQRKGNKPIEEFLKKKPSLLQKIKTKAKQSLKDPAAVNATRNKLVKVLRRMKPVVTGTGAQTKYNRTKLGFPKEHWIDAACVGDIKPLSLRTTQPLLVNCKGQGGRQKAALNKYGYPIRHNPLKPIKGWMTGDIARHQKLGIGKVTPRSKGSFGFTPLGMKGYKSCKSQDISAIHRKDGYIYSFCK

SEQ ID NO: 17460 - protein, 451 aa, unidentified; identical to SEQ ID NO: 5203

SEQ ID NO: 17461 - protein, 402 aa, unidentified
CRRQRRAKANGTISKKCVKQDTAQSKNPSKRAKEIGVIKRHLPGCKKDVLCVGIKNKEAKYTNRARLEGWLTPTANQLLQTHINLVKKIQKFLPISDAVLEVNKFAFMRLDNPNIQKWQYQQGPLYQKGSLENAVSEMQEHHCLFCEKPIEHYHHVVPKSENGSNTIANIVGLCAEHHNLVHKDVAWQEKLVEEKTGLNKKYGALSVLNQIIPALTKELSFLFPKHSFMTNGKSTHDYRAAHGISKDHWLDAYCIACSVLPIDVCDSTINNCVPYELKQFRRHDRRALNNENMNRVYTLNDKVVATNRHKATEQEAASLEEFRKEHPNDVCKLKVKEHHPTYRNMNRNYPGSVFLVGKQIHVMQGIASSKDGKATKYNDTRATTIAAGKCKFVAKNSGILFV

SEQ ID NO: 17462 - protein, 493 aa, unidentified; identical to SEQ ID NO: 2644

SEQ ID NO: 17463 - protein, 411 aa, unidentified; identical to SEQ ID NO: 2606

SEQ ID NO: 17464 - protein, 431 aa, unidentified; identical to SEQ ID NO: 4463

SEQ ID NO: 17465 - protein, 442 aa, unidentified
MSTSVFVLDKKHRPLMPCRPARARRLLRAGRARVVKRFPFVIRLVDRTVEQSEVQPVLIKLDPGSRETGAAVVRDDEKKRHHALAFFVIKHRGGAIRDALKARSAFRRRRRSQNFRCRSPRFLNRVKPKGWLPPSLRHRVETTLSFVRRMCRYLPVSGIAAELVKFDSQKLQNPEVSGVKYQQGTLFEYEVREYLLEKFGRKCVYCGAEGVPLNIDHVVPRAKGGSNRVSNLVLACVSCNQKKGARSLEDFLKGKPEVLARVRRELKTPLRDAAAVNATRWVLFNELKATGLPVETGSGALTKFNRHAFGVEKEHWLDALCVGRLNGAVTRKGLNVLEIRCMGRGSRQRTRLTKYGFPRGYLMRQKCVHGFATGDMVEANVPKGKKAGLWRGRVAVRVSGSFNIQTPKGVIQGVGWKHCRLISHNDGYGYAWLGHAPHSSPA

SEQ ID NO: 17466 - protein, 428 aa, unidentified
LKVFVLNMRGQPLMPCSPAKARHLLKAGKAVVKRRTPFTIQLRIATGETKQNVTLGVDAGAKHVGLSATTEKEEVFASEVELRQDITGLLAARLSLRRDRRHRKTRYRAPRFLNRVRSKHKGWLAPSVENRIQAHMSRIDAVCRLLPVTKIVIETASFDIQKIKDPSVEGTDYQQGDQLGFWNVREYVLFRDGHVCQHCHGRSKDKILNVHHLESRQTGGDAPNNLITLCETCHKAYHAGKIKLKVKRGQSFRAEAFMGIMRWTLLDRVRKAHPGLPVENTYGYLTKHTRIPHGLPKTHCVDAYCIAGNLKAVRRGVYLHQRQMRKHNRQIHKFTVLSKRLEDGTKIGYRKLNQSPYLVHSFRLFDKVRCLGQIGFIFGRRSSGYFDVRRLDGVKLSPSISWRKLTLLEKRSTYLTELRKQDGASSPV

SEQ ID NO: 17467 - protein, 465 aa, unidentified; identical to SEQ ID NO: 3070

SEQ ID NO: 17468 - protein, 418 aa, unidentified; identical to SEQ ID NO: 4327

SEQ ID NO: 17469 - protein, 458 aa, Scytonema sp.
MMMTNSIFVLSKNGKILKPTTPVRARILQAQGKARKLRLFPFTLILESMVDENVEPYLELRLDPGSKLTGITLVDLKKNEVVWAMELEHRGLAINMEMIKRAGVRGSRRTRRLRYRKKRFDRKKPLGWLAPSLRHRLLTTQTWIKRLLKIAPIKSIAIESVKFDLQKLETPDIEGIEYQQGTLFGYTLREALLEHWGRECVYCGKTDVPLQIEHIHSRSQGGSDRFSNLTLSCEKCNQKKGNQPVEQFLQDKPEILKKIKSHQKQSLSDASAVNSTRKAIFEMAQQFGLPVISGDGASTKMIRIQSQLPKLHWIDSACVGTSEIVKLRICQPLRVTCKGHGTRQVQRVNAKGFPAIASIKKNHITGKKEVKLVSRNQKYTHATAGDYVICNLLKDRKHVRAGIYRARVKTPTPKGVEVLINGHRIAVDRQYVKLIHRSDGYEYSFTTIDQDLLRFSAI

SEQ ID NO: 17470 - protein, 472 aa, unidentified; identical to SEQ ID NO: 4432

SEQ ID NO: 17471 - protein, 420 aa, unidentified
MQYVYVLSKHGEPMMPCSPGKARLLLKQQKACAVRRTPFTIKLLYGSAGYKQPITLGVDAGSKHVGLSASTEKRELYREEFTPRNDVVELLSTRRQNRRSRRNRKTRYRAPKFDNRVHSKHKGWLAPSVEVKIQEHITIIKRICKILPISLVRVETAEFDTQRLKAMLAGKPLPVGTDYQLGEMYDEYNVRQYVLKRDNYTCQCCGAHTTAKKLVKLHVHHLESRKTGGNAPSNLVTLCTTCHKNLHKGKVTLDGKERGKPLRDAAFMGIMRKTLMARLKKELPIPVQGTYGYITKMRREQNDIKKSHTNDARCISKHPLAEPCSVCYRTKAIRHHNRQTHKANFSKKGIRKRSQMPYLVEGYRLWDKVLYKEQECFVSGRRSSGSFTLKKLDGTSVSKGVTFKKLRLLEPATNYLIERM

SEQ ID NO: 17472 - protein, 512 aa, unidentified
MSTVYVLNKDGKPLMPTTRCGHVRRLLKEQKAQVVTSKPFTIQLLYETDDVVQPLYLGIDPGRTNIGVAVVKIDGTAVFTAHLETRNKEIPKLMQGRKKARRARRTNGRRCRRQRRAKANGTISKKCVKQATAQNGSVSKRAKKIGVIKRHLPGCEKEVLCIGIKNKEAKFSNRARPEGWLTPTANQLLQTHINLVKKIQKFLPISDVVLEINKFAFMRLDNPNVQKWQYQQGPLYQKASLEEAVSEMQEHHCLFCKKPIAHYHHVVPQSENGSNTIGNIVGLCTKHHDLVHKDTTWQKKLTKKKTGLNKKYGALSVLNQIIPALMKELSSLFPKRFFATNGKSTYDYRAAHGVSKDHWLDAYCIACSVLANDVCDSNINSHVPYELKQFRRHDRRALHKENMSRVYTLNGKSVATNRHKAIKQTTDSLEEFRQRQPNDVCKLKVKEHHPEYRNPKRNFPGCVFLVGKHTHVMQGTSGSHNGKADGYYDTNGNSYSSGKCKFVVKNEGIVFT

SEQ ID NO: 17473 - protein, 507 aa, unidentified
MSEYIYVIGMDGDPQMPTKRKRHVEKLLQTGRARVFRQVPYTIQLTYKNQPVLQPVTIAEDPGRSNIGMAVVSLSGELLSAAVVQTRNKEIVKLMEKRKLHRRASRNGERKARQRLAKRCHTMLKAGFLMRKLPMYRKDKRVKCLVIRNTEARFCNRKREDGWLTPSAEHLVRTHINLIHKMQKFLPITDVAIEINRFAFLSLEDPSISGVDFQKGPLKGYDDLNAAVEDLQDGHCLMCDSPIEHRHHIVPRSMQGSNTIGNIAGLCYKCHERVHKDARFEDRLKKKKAGLDKRYAAVSALNQAIPFICKRLEQEFGKEHVHYCSGRDTAMVRRSFGYYKTKEEQLHEVDAWCIAVLSLQQVPEKAPEFDHVHEILQFRRQDRSIINAQTSRRYYHEGKKIAKNRKKAEGQREDSLQEWRKRQVERYGEEQTRKMISQLKVKKSIRRYNRLNRLMPGAVFYYQGVRYVMRGQHCEGTYLQAVGMGSKDFPAKKCKIVANNEGLVFVS

SEQ ID NO: 17474 - protein, 512 aa, unidentified
MPTVYVLNKDGKPLMPTTRCMHVRHLLKNGKARVVKSKPFTIQLLYETDDVVQPLYLGIDPGRTNIGVAVVKADGAVVFTAHLETRNKEVPKLMKKRKESRCARRTNGRRCRRQRRAKTNGTISKKCVKQTTAQNGSVSKRAKEIGVIKRHLPGCEKDVLCIGIKNKEAKFTNRARPEGWLTPTANQLLQTHINLVKKIQKFLPISDVVLEVNKFAFMQLDNPNIQKWQYQQGPLYQKGSLENAVSEMQEHHCLFCEKPIEHYHHVVPKSENGSNTIANIVGLCTEHHNLVHKDATWQKKLAKEKVGLVKKYSALSVLNQIIPALTKEMNSLFPKHFFVTNGKSTYDYRTAHGVSKDHWLDAYCIACSVLPNDVCDSNINSHVPYELKQFRRHDRRVLHKANMSRVYTLNGKTVATNRHKAIKQTTDSLEEFRQSHPGDVCKLKVKEHHPAYRNLNRNYPGSVFLVDGQVHVMQGVSGSHNGKADGYYNTNGNAYPYYKCKFVVKNEGIVFA

SEQ ID NO: 17475 - protein, 442 aa, unidentified
MSTSVFVLDKKHRPLMPCRPARARRLLRAGRARVVKRFPFVIRLVDRTVEQSEVQPVLIKLDPGSRETGAAVVRDDGKKRHHALAFFVIKHRGGAIRDALKARSAFRRRRRSQNLRCRSPRFLNRVKPKGWLPPSLRHRVETTLSFVRRMCRYLPVSGIAAELVKFDSQKLQTPEVSGIEYQQGTLFEYEVREYLLEKFGRKCVYCGAEGVPLNIDHVVPRAKGGSNRVSNLVLACVSCNQKKGARSLEDFLKGKPEVLARVRRELKTPLRDAAAVNATRWVLFNELKATGLPVETGSGALTKFNRHAFGVEKEHWLDALCVGRLNGAVTRKGLNVLEIRCMGRGSRQRTRLTKYGFPRGYLMRQKCVHGFATGDMVEANVPKGKKAGLWRGRVAVRVSGSFNIQTPKGVIQGVGWKHCRLISHNDGYGYAWLGHAPHSSPA

SEQ ID NO: 17476 - protein, 499 aa, Acidithiobacillus sp.; identical to SEQ ID NO: 11760

SEQ ID NO: 17477 - protein, 452 aa, unidentified; identical to SEQ ID NO: 3322

SEQ ID NO: 17478 - protein, 428 aa, unidentified; identical to SEQ ID NO: 5055

SEQ ID NO: 17479 - protein, 453 aa, Lactobacillus sp.; identical to SEQ ID NO: 4050

SEQ ID NO: 17480 - protein, 512 aa, unidentified
MSTVYVLNKDGKPLMPTTRGGHVRHLLKEQKARVVRTNPFTIQLLYEADNLVQPLYLGIDPGRTNIGVAVVKTDGTAVFTAHLETRNKEIPKLMQGRKKARRARRTNGRRCRRQRRAKANGTISKKCVKQATAQNGSVSKRANEIGVIKRHLPGCEKEVLCIGIKNKEAKFSNRTRPEGWLTPTANQLLQTHINLVKKIQKFLPISDVVLEINKFAFMRLDNPNVQKWQYQQGPLYQKASLEEAVSEMQEHHCLFCKNTIDHYHHVVPQSENGSNTIGNIVGLCTKHHDLVHKDTSWQEKLAKKKTGLNKRYGALSVLNQIIPALTKELSSLFPKHFFATNGKSTYDYRAAHGVSKDHWLDAYCIAGSVLPNDACDNNINNHVPYELKQFRRHDRRALHKENMGRVYTLNGKSVATNRHKAIKQTTDSLEEFRQRQPNDVCKLKVKEHHPEYRNPKRNFPGCVFLVGKHTHVMQGTSGSHNGKADGYYDTNGNSYSSGKCKFVVKNEGIVFT

SEQ ID NO: 17481 - protein, 424 aa, unidentified
MRVFVLNMRGEPLMPCSQRKARLLLKSIKAVIYKYNPFTIQLTYATGEAKQDCHIGIDTGSKHIGVAITSEDKVLWKCEIELRQDVKSNIDAKRIYRRSRRSRKIRYRKPRFLNRKRNDEWLPPSLQNRINHTFHWIDTLSSLIPKPILHIEVGKFDTAKMINPEIHGVDYQHGQTYGFFDERYYVFARDNYTCQCCGKSKNKILNTHHIIYRSNGGTDRVDNLITVCTDCHTSQNHKKGGIFYKWQEQHKKVKQYKEPPFMNTLRKRIFAAYPSAEITYGAETTPKRKAMKLDKTHYNDAIIISGINEINENPEEWLLIKQFRKKKRSLHEATARKGRKTPNRNQVRNCKNVPYYKGFYLNDKVSIFGKSGHVTGFTTSGAYVKDDNGNYITLPNKSYKQVSINKMRLKCHNNNWQYMTKRAV

SEQ ID NO: 17482 - protein, 477 aa, unidentified
MWLNSSEGKEQCCIHGNLEITLGKDSHSLRRGQFCQSLTVTTTRKETTSMYVYVLNQHGEPLMPCSPRKARTMLRDHKATVVRRTPFTIRLLHRSSEYKRDITLGVDAGSKFIGLSACTESKELFAAEVKPRNDVVDLLSTRRELRSSRRSRKTRYRAARFNNRVHSKHKGWLAPSAEVKIQEHITAIKRTCAILPISMVIVETAEFDTQRLKAMLEGKPLPVGTDYQLGEMYDEYNVRQYVLKRDNYTCQCCGIQSTDKAPVKFAVHHKESRRIGGNAPNNLITLCEKCHRLLHAGVITLEEGKRKRGKSFRDAAFMGIMRKTLIQRLRNELSVPVKETYGYITKLLRETHAIQKSHVNDARCIARVPDAQPSDTLYRIRAVRHHNRQLHKVNPIKGGIRKRNQAPYKVFGFRLWDKVLFNGQECFITGRRVSGYFALKNFDGKKVHTGAPYTALTIVESSTSYLIERRTAVSSRG

SEQ ID NO: 17483 - protein, 447 aa, unidentified
MKVFVIGMTGKRLCPTSPSKAKKLLKTGKAHVYRRVPFTIRLDYKTGGSAPPLKLGIDTGEQHIGTAVCNDATVFCKSEIELIKSMEKKKRLEKRKIYRRSRRYRKTRYRHPKFRFRTKRIYVEGGYRKRKGGKMVLRHWKKVPNTVMTNRHEGWLPPSIESKVKHHIDWINRYMDVLPDGTMLGIEVARFDIARMKDPSIRGELYQFGRMYGRENTKAYVLAKFDYTCPICKKKFDRDRKPRMHHVTMRKNAATDNPDEYAPVCVLCHSGEEHLPGGVLDKLAKECRRREYREPTFMNILRRRLFETYPEAEFTYGNITNADRKMLGLEKTHANDAVSIAMHGAKKVIDCEDTVYYRQVHRKKRSLHEATPRKGKKEPNHTAKRNVKNVPYVGKFHINDKVKGPDGNIEYLLHMRKTETMENGHTMTDQIKEVVDASHADLAKNKE

SEQ ID NO: 17484 - protein, 219 aa, unidentified
LQFYRKEHGIMQYVYVLNKHGEPLMPCPPGKARILLKQQKAYVVKRTPFTIKLLYGSAGHKQPVTLGVDAGSKHVGLSASTETHELYCEEFTPRNDVVELLSTRRQNRRSRRYRKTRYRAPRFNNRVHSKHKGWLAPSVEVKIQEHITVIKRICRILPITLVRVETAEFDTQRLKAMLAGKPLPVGTDYQLGEMYDEYNVRQYVLKRDNYTCQCCGAHT

SEQ ID NO: 17485 - protein, 469 aa, unidentified
LDVFVVDRHGKPLMPCHPARARQLLRQRRAVIHRHVPLVIRLKDRRWEECSVQPVRVKLDPGSKTTGVAIVRESNAVDPDTGEVQRQTTVLALIELVHRGRQISEALTARRQMRRRRRRSLRYRAPRFLNRSKPKGWLAPSLQHRVDTTMAWVTRLSRWAPVTALSSELVRFDMQQMQNPEIEGVEYQQGTLAGYEVREYLLEKWGRKCVYCDAAQTPLQIEHLQPRARSGSNRISNLALACGPCNLKKAAQPLDAFLAKDPLRLARIQAQAQRPLRDAAAVNATRWALAGTLKGTGLPLELASGGRTKYNRSRFEIPKTHALDAACVGDVDEVTKWQQPTLQVNCTGRGSYQRTRLDKYGFPRGYLMRQKSIKGFQTGDRVRAVVPASSKKAGMYTGRVAVRASGSFNIQTGSEVVQGISYKYCRLIQRGDGYSYTRIASLKGVAGTGHVNHAALSLPALKGEVSRAK

SEQ ID NO: 17486 - protein, 417 aa, unidentified
MPCSPAKARLLLKEKKAIVKRRTPFTIQLTIATGEAKQPVTLGVDSGYKHIGLSATTEKAELYASQVELRQDITDLLSARLALRRSRRSRKTRYRAPRFNNRVASKRKGWLAPSVENRITAHMSRVEAVMRVLPVTAITVETAAFDTQLLKNPDIAGAAYQQGEQLGFWNVREYVLFRDGHVCQHCRGKSKDPILNVHHIESRRTGGDAPNNLITLCETCHKAFHRGEIKLKVKRGKSFKAETFMGIMRWTLFERLKKAHPELSVRNTYGYLTKHKRISHGIAKSHCADAYCIADNLGAKRLEGFFFQKQTRKHNRQIHKLSILKGGLRKKNQAPYEVKGFRLFDKVICKGEEAFIFGRRTSGSFDVRRLDGTRISAGINYKKLRLLEPRTTYLTEFRKEAALPPLHKCRGFRAEFL

SEQ ID NO: 17487 - protein, 457 aa, unidentified; identical to SEQ ID NO: 5177

SEQ ID NO: 17488 - protein, 406 aa, unidentified
LRVFVLNKRGKPLMPCSPAKARLLLKEKKAIVVRRTPFTIQLTIATGESKQPVSLGVDAGYKHVGLSASTEKAELYASEVELRKDITDLLSARRALRQSRRNRKTRYRAPRFDNRIRTKRKGWLAPSVENRINAHLSRIEAVLRLLPITKITVETASFDMQRLKNPDISGKEYQEGEQLGFWNVREYVLFRDGHVCRHCHGRSKDPVLNVHHLESRRTGSDSPDNLITLCETCHKALHRGEITLKAKRGQSFRAQAFMGIMRREVLNRLKASYPELKVHETYGYLTKHARIANGIVKSHGADAFCIAGNLGAESSANSSSRSRLAETTGRFTNFPSSKGAFESAIRHPLRPKASVFLIRLPAREKKASFSAVDHPGLLMYESSTAPAFQPASAARSCVCWKRDEPI

SEQ ID NO: 17489 - protein, 425 aa, Clostridium sp.; identical to SEQ ID NO: 2429

SEQ ID NO: 17490 - protein, 424 aa, unidentified; identical to SEQ ID NO: 11329

SEQ ID NO: 17491 - protein, 238 aa, unidentified
MYDEYNVRQYVLKRDNYTCQCCGAHPTEKKPVRLHVHHLESRHVGGNAPSNLITLCVACHKALHEGKITLDKGKKRGKPLRDAAFMGIMRNTLLARLKDELNIPVKQTYGYITKLLREKNKISKSHVNDARCIAKAPNAKPCDTMLYTRALRHHNRQIHKAKILNGGIRKKNQAPYLVKGFRLWDKVRYNGEECFITGRRSSGYFALKKYDGTVISNSASYKKLMLLEAATNYITERS

SEQ ID NO: 17492 - protein, 413 aa, unidentified; identical to SEQ ID NO: 2636

SEQ ID NO: 17493 - protein, 465 aa, unidentified
  REGION 1..465: note = IscB polypeptide
MQKLGERKTYTPRNTSLVPCSVTRSLNREETLSEMSLKTSSNNPEVNLRQHTCGLKDKVYVKSVDGQVLMPCSNAKARHLLESGKAKVVRKYPFQIQLLFVCENKVQDVVLGVDTGYENIGFSAVSGKEELLGGTMKLENKMSSRLLEKKMYRRGRRNKLWYREARFNNRVKKGWLAPSVERRINTHVELVKRICKLLPISKVNVEGANFDIQRIENPNVEGKGYQQGSLYDYENVKAFVVAREEGKCQLCGREYDDNGWHLHHIIPRGQGGTDRPKNQALLHNKCHDKLHKQKLYKKLKKEKQYKAETFMSTTRLKILERISKIHPNVNISYGYETKVKRIEQGLEKIHSNDAFIIADGTEQVRSKEYILEQKKRNNRVLQLNRNRYKPSIRKQRSVIQPKDIFWVNGIKYIAKGMFNYGKYILYGDVKKKEYFKIEKVEKYFNINSWQFIPRLKAGVFLPQRG

SEQ ID NO: 17494 - protein, 506 aa, unidentified
MSTVYVLNKDGKPLMPTTRGGHVRHLLKEQKARVVRTNPFTIQLLYETDNLVQPLYLGIDPGRTNIGVAVVKTDGTAVFTAHLETRNKEIPKLMQGRKKARRARRTNGRRCRRQRRAKANGTISKKCVKQATAQNGSVSKRANEIGVIKRHLPGCEKEVLCIGIKNKEAKFSNRTRPEGWLTPTANQLLQTHINLVKKIQKFLPISDVVLEINKFAFMRLDNPNVQKWQYQQGPLYQKASLEEAVSEMQEHHCLFCKNTIDHYHHVVPQSDNGSNTIGNIVGLCTKHHDLVHKDTSWQEKLAKKKTGLNKRYGALSVLNQIIPALTKELSSLFPKHFFATNGKSTYDYRAAHGVSKDHWLDAYCIAGSVLPNDACDNNINNHVPYELKQFRRHDRRALHKENMGRVYTLNGKSVATNRHKAIKQTTDSLEEFRQRQPNDVCKLKVKEHHPEYRNPKRNFPGCVFLVGKHTHVMQGTSGSHNGKADGYYQTKAGKAHDFNRGRCQMN

SEQ ID NO: 17495 - protein, 470 aa, Thermoanaerobacterium sp.; identical to SEQ ID NO: 6736

SEQ ID NO: 17496 - protein, 502 aa, unidentified; identical to SEQ ID NO: 2616

SEQ ID NO: 17497 - protein, 818 aa, unidentified
LVWNVQAPWDVHPSPTLCGLCLKVLRGRNGDADKKPIPTLTKDENRPSGRTTGLRAEQAEPAGIRKGDTLKVFVLNMRGKPLMPCSPAKARHMLKAGKAVVVRRTPFTIKLTIATGETKQDVTLGVDAGARHVGISATTEKEEVFASEAALRQDITGLLADRLAFRRARRNRKTRYRSPRFNNRVRSKHKGWLASSVENRIQAHMSRIDAVCRLLPVTKIVIETASFDIQKIKDPSVEGTDYQQGDQLGFWNVREYVLFRDGHVCQHCHGRSKDKILNVHHLESRQTGGDAPNNLITLCETCHKAYHAGKIKLKVKRGQSFRAEAFMGIMRWTLLDRVRKAHPGLPVENTCGYLTKNTRITPGLPKAHCVDACCIAGNLKAVRRGVCLHQRQMRKHNRQIHKCTILLQTLEDGTKIGYRKLNQTPHMVKNFRLFDKVRCLGQTGFIFGRRSSGCFDVRRLDGVKLSSGISYRKLTLLEKRGTHLTELIKEDGASSSVRRQRFLRRVSMNKPCTYLLSALMASAVLAPVAALAADKSELEVRMEAAQKVLADRSYYERWSPEAALKTVEDAKAANEAGSARQKEIDGALDVMKDWCHTRFLANACIKDARDLHHEREKEIRSVRLKADEMIRLDRVEQRRARQESQKQNVKQPMKLGGSTESPESRSESRAEEVKTKQSRAEERRALEEANVRAYEEKQARAARKAEERHDPIRVKSRVKAPSSPIEGHLGRTAADVEAGRAEAAERMAQEDANIAAFNAKQAEAKKRLEEAEATAAERKASREARQANFNKTLEERRAAQKRYEESRENKDSGLKKYF

SEQ ID NO: 17498 - protein, 423 aa, Arthrospira sp.; identical to SEQ ID NO: 5991

SEQ ID NO: 17499 - protein, 450 aa, Clostridium sp.; identical to SEQ ID NO: 10517

SEQ ID NO: 17500 - protein, 507 aa, unidentified; identical to SEQ ID NO: 17473

SEQ ID NO: 17501 - protein, 442 aa, unidentified; identical to SEQ ID NO: 3791

SEQ ID NO: 17502 - protein, 451 aa, unidentified; identical to SEQ ID NO: 15900

SEQ ID NO: 17503 - protein, 413 aa, unidentified; identical to SEQ ID NO: 5705

SEQ ID NO: 17504 - protein, 333 aa, unidentified
MWTYRYIADLFPKGDLRMVYVLSKDETPLMPTKRHGKVKHLLREGKAKVVRNKPFTIQLTYDTTHYTQPITLGIDSGHKYIGFSAVTGKEELLSGEVELRDDISELIKEKVMYRRIRRSRLRYREPKFDNRVSSRKETPRKGFKEGWLAPSIKHKLDTHIRFIEFIKKILPITDIIIEVAKFDTQKIKNPEIKGKEYQQGEQRDFYNLREYILYRDNYTCQLCGKSNVPLEVHHIGFWKGDRTNRPSNLITLCTKCHDPKNHLKGGKLYGMEPVQKPLKEATFMTTVRWKLVDMLGCGYTYGYITKVRRIALNLDKTHYNDAFVLQVELIKEE

SEQ ID NO: 17505 - protein, 447 aa, unidentified; identical to SEQ ID NO: 5937

SEQ ID NO: 17506 - protein, 408 aa, unidentified; identical to SEQ ID NO: 6548

SEQ ID NO: 17507 - protein, 452 aa, unidentified; identical to SEQ ID NO: 12783

SEQ ID NO: 17508 - protein, 409 aa, unidentified
  source 1..409: note = Bacterium sp.
MRVYVKNLNGNPLMPCKPAKARKLLRDGKAKVVNRCPFTIKLQWDCEENVQDVTLGIDKGSYLTGISCVGNGKILMSGEVHHRTDIKDKMDARRANRRKRRSRKWYREKRFLNRASSKRSGRLPPSIKAQSEEVIRVVRKIPLPISHIVVEDVQVDIARLNNPLTIGKAYQKSNRLDENLRIATLLRDGYQCTQCEKKNIQLDAHHIIWKEDGGKDTIQNLITLCKSCHDKVHRGKLKLDVEGVSGFFDQIAQRTMQGKTYLYEKLSQIAKFKKVFGYQTSAYRKSLSLPKTHDIDALCVAILETGEVITVSRENFYKINFRPRQTRRQYHDLPRKGVGRVRYQVNCELEGFRKGDIVRVKGKWVKQINSIYSNGYLAFARVDGEPTAAKPKDCKLLKRGQTVIWEKAV

SEQ ID NO: 17509 - protein, 440 aa, Microcoleus sp.
MKPSRSELYPEREDIMSNFVFIIDANKRPLTPIHPGFARRLFKQKKAAIYRKFPFTLILKESRSDLTVPDLQLKIDPGSRVTGFAILNGAKVIWAAELTHRGQAIKNALLSRSQLRRVRRNRHTRYRQPRFLNRTCPQGWLAPSLQHRVETTLTWVNKLIKFAPTNSITQELVRFDLQQLAHPEISGIEYQQGTLLGYEVREYLLEVWERKCAYCGIKNVPLQVEHIHPKAKGGSNRISNLCLACDTCNNNKGTQDIKQFLAKKPDVLKRIQAQRKRPLKDATAVNSTRWTLLNRLKETGLPVATGSGGRTKFNRTRLQLPKSHWLDAACVGKVEELNVLTSQPLLIKAMGHGTRQMCGTDKFGFPIRHKSRKQIHFCFQTGDIVSATVTAGKKIGCYTGRVLCRASGSFDIATTTGRVAGISHKYCRAIHKKDGYSYGF

SEQ ID NO: 17510 - protein, 419 aa, unidentified
MLVYVLKQNGQPFMPTSRFGKVRRLLKEKKAKVVRREPLTIKLLYEPETNMVQECYCGVDTGSKHVGVAVVGNDKVLYQSQTELRDDITRKMERRRDFRQNRRFRKTRYRKCRFLNRRNSIKKDRLPPSVKHKVQAHIDEIEFCKKILPMSDLILEVSQFDTALMKNPSLINEKVRHWGYRQGFNYGYSSRRSAILHRDNYTCQCCGKKNCRLEVHHINFRSNGGTDDEENLITLCKECHKGVHAGTVVLNKKPKKNKSLKHATHMSIIRSQLLKKYPDAIETFGFVTSENRSHLHLEKDHYIDACVIASGGLEFEPSATVYYKRRMSKGEYQLIRKCCGKEYVCKGKILGFKSFDKVEYFGVKCFIWKRRNNGYATLGDIFNNILDFSYLPRGYKTPKMALLKRISSRKTVNIICCTR

SEQ ID NO: 17511 - protein, 414 aa, unidentified
MPCSPAKARLLLKEKKAIVKRRTPFTIQLTIATGETKQPVSLGVDAGYKHVGLSASTEKAELYASEIELRQDITDLLSARHELRRARRNRKTRYRGPRFDNRIRTKRKGWLAPSVENRINAHLSRIEAVLRLLPVTKITVETASFDLQLLKNPDISGKEYQEGEQLGFWNIREYVLCRDGHVCQHCYGRSKDPVLNVHHLESRRTGGDSPGNLITLCETCHKALHRGEITLKAKRGQSFRAEAFMGIMRWEVHNRLRALHPGIEVSNTYGYRTKHARIANGIAKSHCADAFCIAGNLGAERLCEFFFQKQTRRNNRQIHKLSILKGGIRKRNQAPFEVKGFRLFDKVACQGEEGFIFGRRSSGFFDVRKLDGTRISAGISYKKLHLLEKRRTYLTEIRKEEALPPLPEGRGLRA

SEQ ID NO: 17512 - protein, 415 aa, unidentified; identical to SEQ ID NO: 6883

SEQ ID NO: 17513 - protein, 393 aa, Geobacillus sp.
LFVYIINKHGKPLMPCSPRKARLLLKQKKAKVVRRTPFTIQLLYGSSGYKQPVSLGVDMGTRHVGISATTKKDVLFEAEAQLRTDIVELLAIRRQFRRSRRNRKTRYREARFLNRRKPEGWLPPSIQHKINSHIKLIDLVHNILPVTSVTIEVAAFDTQKLKNLNIRGVEYQQGEQMGFWNVREYVLYRDNHTCQYCKGKKKDPVLQVHHIESRKTGGDSPDNLITLCKTCHHEIHEKGLEHIFQRKRPPMRDASQMTAMRWAMFSRIREKYSHANITYGYITKCIRIANGLSKSHMVDARCISGDPLAKPSGTVYLLKFVRKNNRQLHKATILKGGKRKSNKAPRFVKGFQLFDKVVYERKECFIFGRRSSGYFDLRLLDGTKVHASASWKS

SEQ ID NO: 17514 - protein, 428 aa, unidentified
LKVFVLNMRGRPLMPCSPAKARHLLKAGKAVVRRRTPFTIQLRIATGETKQSVTLGVDAGAKHVGLSAATEKEEVFAPEVELRQDITGLLAARLSLRRERRQRKTRYRAPRFLNRVRSKHKGWLAPSVENRIQAHLSRIDAICGLLPVTKIVIETASFDIQKIKHPDVEGTDYQQGDQLGFWNVREYVLFRDGHVCQHCHGHAKDKILNVHHLESRQTGGDAPNNLITLCERCHKACHAGKIKLKVKRGQSFREEAFIGIMRWTLLDRVRKAHPGLPVENTYGYLTKNTRITLGLPKAHCVDAYCIAGNLKAVRRGVHLYQRQVRKHNRQIHKCTVLSKTLKDGTKIGYRKLNQTPHLVKNFRLFDKVRCLGQTGFIFGRRSSGYFDVRRLDGVKLSSGISYRKLTLLEKRSTYLTELRKEDGASSPV

SEQ ID NO: 17515 - protein, 442 aa, unidentified; identical to SEQ ID NO: 2903

SEQ ID NO: 17516 - protein, 429 aa, Parasutterella sp.; identical to SEQ ID NO: 4241

SEQ ID NO: 17517 - protein, 484 aa, Deinococcus sp.
VTRRPAKRVNDLKLHTDECLASLSLCGSKRTKPPGNSPHFETNRHFNSRRNLHGACAQGTHMSSRAFVLNPDHSPLMPCTAKRARMLLTAGRAAVWRRYPFTIILKETSGTQSQPLALKIDPGSKTTGMALVLDGKNGKRCIWGAELTHRGRAIKLKLLARRALRSSRRSRKLRYRPARFLNRTRPAGWLPPSLMHRVLTTLSWARKIDRSTMMDSIAMELVSFDMQKMESPDIRGVEYQRGTLLGTEIRAYLLNKWDGLRAYCGKEGREVEHLTPRSRGGSDRVSNLVLSCRACNEKKGNQELGEFLAKKPAILRKIQTQQKAGLHDTAAVNATKTRLLGELRQFGCPFPLGIGAQTSFNRQAQEYDKAHWIDAACVGESGAAVAVQRRKPLLIKSMGRGNRQVCGTDRYGFPVRHRTHQKVFFGFQTGDIVRAVVTVGKKAGTYTGRVSVRATGSFRLPQVDSIHHRFFSTLHKGDGYGYSF

SEQ ID NO: 17518 - protein, 518 aa, unidentified; identical to SEQ ID NO: 6562

SEQ ID NO: 17519 - protein, 457 aa, unidentified
MDAVAVISASGKPLMPTNPMRARKLIKKGKAVIYKYRPLFTIRLTERTDGDIQTIEYCCDTGYQHIGLSIKSRKHEYVNEQRDLLPNETERHNDSRKYRKARRRRKLRHRACRRDNRHDNQICKDGYAPSIRNKRDQHISLYRSYTEILPVERAVFEMGQFDTQVLKAIEKGEPLPQGKDYQHGERYGYATLREAVFARDDYTCICCGKNAFKDKRILCIHHLGFRIGDRTNRLANLATVCTKCHTPKNHQPKGKLYNLKPELKDFKGATFMTMVRWDMLDKLKVVSKDIQVDVTYGAATKEARRDLKIKKSHANDAYCMGSFHPSHRTDLKRYEKCRRNNRVLSKFYDATYIDIRDGKKKKANALGCNRTKRRESRRSEKNERIYRGKKVSKGRIVLRTKRAVIRPGDIVYVGKKKYIVASSKNLGAQLKLADGSLLTTSKVTKIIHCGGWKTVTL

SEQ ID NO: 17520 - protein, 417 aa, unidentified; identical to SEQ ID NO: 16366

SEQ ID NO: 17521 - protein, 475 aa, unidentified; identical to SEQ ID NO: 4985

SEQ ID NO: 17522 - protein, 438 aa, Clostridium sp.; identical to SEQ ID NO: 4933

SEQ ID NO: 17523 - protein, 557 aa, unidentified
MIYNLGSTRERGFMKQKKQKVMVYILNKKGKPLMPTTRCGHVRKLLDSKKAVVVNSNPFTIRLKYDTPNGVQDVFAGIDSGRENIGSGVSNEDGDCLYLGELRTSNKSIKMKMTERVGFRRERRKHDRQNKQRKARKDHTEIQNGKDDICRATISCKSVQISYPTAEESVTHKIIRGKEGKFANRHRDGDWITPSARQLVQMHMNDLKSICKILPISHVTLERVAFDFQKLENENIKAWEYGKGKLYGYDSPEEYIHDVQNGKCLVCGKPHIDYLHHIIPRSKGGSDKVSNIAGLCYDCHYGPIGVHNCQDTQDRLPELKNEVNKQYKVSLLNSVMPVLIEEMDKFCKANSIMFSICEGHDTAKVRDMYDLQKDHCIDGFAISLVDRNVKSVDVMPDRIHQKQRYKKKSKNIIQKRNYREYYDDKKLVAINRHKGTDQKADSLEEYMNTYAETHTADECKMHFESLTVKPARRTYTFHKEGRICPLHIGDKVRYEKKNKIKGNTKVDTFICEGIYFSKDENKAKVEHNKTKSKKMKFCRAIESGCIPYIDYIKLALI

SEQ ID NO: 17524 - protein, 420 aa, unidentified
MQYVYVLNKHGEPLMPCSPRKARLLLKQKKACVIKRTPFTVKLLHGSAGYKQPVTLGVDAGSKHIGISATTEKHELYREEATPRNDVVDLLSARHAFRRSRRNRKTRYRAPRFDNRVHSKHKGWLAPSVEVKIQEHITLVEHVCRILPVTLVRVETAEFDTQRLKAMLEGKPLPVGTDYQLGEMYDEYNVRQYVLKRDNYTCQCCGAHSTKTKGVKLHVHHIETRRTGGNAPNNLITLCTACHKALHAGKVTLDGKKRGKPLKDAAFMGIMRKTLMERLRKELKIPVQGTYGYITKCLREKNGIPKSHTNDARCISKNPLAIPCDTCYYTKAVRHHNRQLHKATILKGGIRKANQAPYIVKGYRLWDKVSCNGTECFITGRRTSGYFALKKLDGTVVSNSISYKKLRLLEAATNYITERK

SEQ ID NO: 17525 - protein, 480 aa, unidentified; identical to SEQ ID NO: 2726

SEQ ID NO: 17526 - protein, 435 aa, unidentified
MRYVYVLDQEGKPLMPTCRFGKVRRMLKSGQAKAVSTLPFTIRLTYKPKTQSRQAVVVGFDPGRTNIGLAAVREDGTCLYRAHCTTRNKEIAKLMKDRLASRRASRRGERLARKRLAKKFHTTAKKLLKRILPGCKEPLAVKDIINTEARFNNRLRPQGWLTPSATQLLRTHLNLLKKIQKILLVTDVVVELNRFAFMQLDTPGVCKKNIDFTHGALYGTDGLHAAIREQQQGRCLLCGYREIEHFHHIIPRSKLGSNTIANLAGLCEKCHELVHKNAAAAEKLQEFKSGLEKKYGGTSVLNQIIPALMRTLSERFSGHAYATTGWQTKQFREDHELEKDHDIDAYCIAASILQQITTNISVESYEILQFRKHSRANIHHQTERTYKLGKELVAKNRHKRMDQKTDSLQEWYEDMFAKYGEKQANKLRSKLTVQK

SEQ ID NO: 17527 - protein, 502 aa, unidentified; identical to SEQ ID NO: 2616

SEQ ID NO: 17528 - protein, 507 aa, unidentified
MSEYIYVLGMDGNPQMPTKRKKHVEKLLQTGRARIFRHIPYTIQLTYENDPVLQPITLAEDPGRSNIGMAVVSLSGELLSAAVVQTRNKEIVKLMEKRKQHRRASRNGERKARQRLAKKCHTMLKVGSLMRKLPMYGKDKRVKCLVIRNTEARFCNRKRKDGWLTPSAEHLVRTHINLIHKMQKFLPITDVAIEINRFAFLSLEDPSVSGVDFQKGPLKGYDNLNAAVEDLQDGHCLMCDRPIEHRHHIVPRSMQGSNTIENIAGLCCKCHEKVHKNAAFEKRLKKKKAGLDKRYAAISVLNQAIPFICKQLEQEFGKEHVHYCSGKDTAMVRRSFGYHKTKEEQLHEVDAWCIAVLSLQQIPEKAPEFDHVYKIMQFRRQDRSRIKAQTSRTYYYDGKKVAKNRKKAEGQKEDSLQEWRECHVTLYGEEQARKMISQLKVRKSIRRYNRLDRLMPGAVFYYKGTRYVMRGQHNKGQYLQAVGMGSKDFPVKDCKIVAQNEGLVFVS

SEQ ID NO: 17529 - protein, 432 aa, unidentified
LSVFVLDRRGLPLMPCSEKRARLLLARGRARVHRVVPFVIRLTDRLARNSRFQPLRLKLDPGSKTTGMALVLEKADAGVGVLNLFELVHRGRQISEALMQRSRFRRRRRGANLRYRAPRFNNRTRRTGWLAPSLQHRIETTMSWFRRIQRWVPFSALSMELVRFDMQAMQNPEIAGVEYQQGVLFGYEVREYLLEKWGRRCAYCDAQGVPLQIEHVLAKARGGSNRVSNLTLGCEPCNLDKGAQDVREFVKEKARLARILAKAKAPLRDAAAVNTTRWVLLNALKTTDLTVEAGSGGRTKWNRTRLGLPKTHALDAACVGTVQAIFGWQRPTLELKCSGRGSYQRTRLTAHGFPRGFLVRQKRIHGFQTGDRVRATVPTGKKAGTHVGRVAVRATGNFNIQTPQGVVQGIAHRHCTMVQPADGYGYATRAIK

SEQ ID NO: 17530 - protein, 377 aa, unidentified
LFGSAGYKQPITLGVDAGSKHVGLSASTEKRELYSEEFTPRSDVVELLSTRRQNRRSRRNRKTRYRVPRFDNRVHSKHKGWLAPSVEVKIQEHITVIKHICKILPISLVRVETAEFDTQRLKAMLAGKPLPVGTDYQLGEMYDEYNVRQYVLKRDHYTCQCCGTHNTAKKVVKLHVHHLESRKVGGNAPSNLITLCTTCHDALHKGKVSLDGKERGKPLRDAAFMGIMRKALMARLREELPIPVQGTYGYITKMRREQNDIKKSHVNDARCISKHPLAEPCSVCYRTKAIRHHNRQTHKVNFSKKGIRKRSQMPYLVEGFRLWDKVLYKGQECFVSGRRASGSFTLKKLDGTRISKGVTFKKLRLLEPATNYLIERM

SEQ ID NO: 17531 - protein, 421 aa, unidentified; identical to SEQ ID NO: 16601

SEQ ID NO: 17532 - protein, 453 aa, unidentified; identical to SEQ ID NO: 6494

SEQ ID NO: 17533 - protein, 428 aa, unidentified
  source 1..428: note = Ruminococcaceae bacterium UBA3753
MVYIIGKNGQPLMPTTRHGKVKHLLKEGKAKVVKKCPFVIKLLYDTDYFVQNCVHGQDTGASVHGNAVYDENGNILYLSKVFVRNDITDKMLQRSKYRKNRRSRKTRYRKPRFLNRKNSIKKNRFSPTMVSKFHSHIKEIEFIKSILPIKTTVLETANFDTHLLKNPSLANPKIKPWGYQKGTNYGFENTKKFVLHRDRYTCQCCKGKHKDSKLEVHHIVFRSMGGSDDESNLITLCHTCHKNLHDGKINTKFKGKKKGNLKYATQMNSIRKQLLKSYPEAIETYGFVTKANRLSLNIEKDHHIDACVIASGGKEFTIKTDTVFIKKDIAKGDYQKTKGIRSEQKLNTGKIQGFKKFDKVSYFGSEYFIKGRMSTGFAVLMDIEGKKIDFSYFPKGFKTPKLKNCKRISARTSQLIFKERKNVIHPIT

SEQ ID NO: 17534 - protein, 512 aa, unidentified
MSTVYVLNKDGKPLMPTTRCGHVRHLLKEQKARVVTSKPFTIQLLYEADDVVQSLYLGIDPGRTNIGVAVVKADGTAVFTAHLETRNKEIPKLMKKRKESRRARRTNGRRCRRQRRAKANGTISKKCVKHDTAQNGSVSKRAKEIGVIKRHLPGCEKDVLCIGIKNKEAKFSNRTRPEGWLTPTANQLLQTHINLVKKIQKFLPISDVVLEINKFAFMRLDNPNVQKWQYQQGPLYQKANLEETVSEMQEHHCLFCKKKIDHYHHVVPQHKNGSNTIDNIVGLCTQHHDLVHKDATWQKRLAKKKTGLNKKYGALSVLNQIIPALTKELSSLFPKHFFVTNGKSTYDYRAAHGVSKDHWLDAYCIACSVLPNDVCDKNINSRVLYELKQFRRHDRRALNNENMSRVYTFNGKMVATNRHKATEQTTDSLEEFRQRQPNDVCNLKVKEHHPTYRNMNRNYPGSVFLVGNQVHVMQGIASSKDGEATTYKDTNANSIAAGKCKFVAKNSGILFV

SEQ ID NO: 17535 - protein, 502 aa, unidentified; identical to SEQ ID NO: 8882

SEQ ID NO: 17536 - protein, 456 aa, unidentified
VWLTQTACDIGEGFLPSSEERAAFYWLLIYGKEHGIMQYVYVLNKHGEPLMPCSPGKARLLLKQQKACVVKRTPFTIKLLYGSTGYKQSITLGVDAGSKHVGLSASTEKRELYCEEFTPRNDVVDLLSTRKQNRRSRRNRKTRYRAPRFDNRVHGKHKGWLAPSVEVKIQEHITVIKRICRILPITLVRVETAEFDTQRLKAMLAGKPLPVGTDYQLGEMYDEYNIRQYVLKRDNYTCQCCGAHTTAKKVVKLHVHHLESRKVGGNAPSNLITLCTTCHNNLHKGKITLDGKKRGKTLRDAAFMGIMRNTLLTRLHNELNIPVQNTYGYITKLLREQNDIKKSHVNDARCISKHPLAEPCSVCYHTKAIRHHNRQIHKAKILKGGIRKANQAPYIVKGFRLWDKVLYNGQECFISGRRSSGYFALRKLDGTAITNSISFKKLQLLEPATNYLIERM

SEQ ID NO: 17537 - protein, 414 aa, unidentified
MPCSPAKARLLLKEKKAIVVRRTPFTIQLTIATGEAKQPVSLGVDAGYKHVGLSASTEKAELYASEVELRQDVSDLLSARRALRQSRRSRNTRYRAPRFDNRIRTKRKGWLAPTVENRINVHLSRIETVLRLLPVTKITVETASFDTQLLKNPDIAGKEYQKGEQLGFWNVREYVLFRDGHVCQHCHGRSKDPVLNVHHLESRRTGGDSPGNLITLCETCHKALHRGEIKLRAKRGQSFRAETFMGIMRWGVLNRLKASHPKLEVHNTYGYRTKHARIANGIAKSHCADAFCIAGNFGAKRLGEFFFQKQTRRNNRQIHKLSILKHGLRKRNQAPFEVKGFRLFDKVVCQGEEGFIFGRRSSGSFDVRKLDGTRISAGISYKKLRLLEKRRTYLKEIRKEEALPPLPEGRSLRA

SEQ ID NO: 17538 - protein, 413 aa, unidentified
LKVFVLNMRGKPLMPCSPAKARHMLKAGKAFVVRRTPFTIKLTIATGETKQDVTLGVDAGARHVGISATTEKEEVFASEVALRQDITGLLADRLAFRRARRNRKTRYRAPRFNNRVRSKHKGWLAPSVENRIQAHMSRIDAVCRLLPVTKIVIEAASFDVQKIKNPTIEGTDYQQGDQLGFWNVREYVLFRDGHICQHCRGRSKDPILNVHHLESRKTGGDAPNNLITLCETCHKAYHAGKIKLKVKRGQSFRAEAFMGIMRWTLLDRVRKTHPKLPVENTYGYLTKHKRIALGLPKTHCADAFCIAGNLKALRRGDFLFQQQTRKHNRQIHRCSILKGGVRKLNQAPFLVKGFRLFDKVRIGGQIGFVFGRRVRGTFNIRRLDKTVIGTDINCKKLSLLETRKTFLTELRKE

SEQ ID NO: 17539 - protein, 424 aa, unidentified
MVYVLSKEGTLLMPTNRHGKVRHLLDAGEAKAVKRCPFTIQLLYQSTTYTQDITLGVDAGSKIIGLSASTEKKELYASETKLRTDITDLLSVRRQFRRTRRNRKTRYRKARFNNRVHAKHKGWLAPGIEAKIGTHFRAVRDVCRILPVTEIIVETASFDIQKIKALENGEPVPEGTDYQEGDQLGFWNVREYVLWRDGYKCRCCNGKSKDQVLNVHHIESRKTGGDAPNNLATLCGYCHKQYHKGTILLPKSVRRGNSFRDAAFMGIMRWTFYNRLKEQYPRVAMTYGYITKNTRIRNNLPKTHYVDARCIAGHPQAEPLDVYYFQKKVRCHNRQIHKANILKGGKKKRNQAEYLVKGYRLYDRVRYQNREYYVFGRRASGFFDIRALGGNKVNKGSVSCKKLRFLEPRKTMLIERRMQEQEAV

SEQ ID NO: 17540 - protein, 328 aa, unidentified
RRNRKTRYRAPRFDNRIRTKRKGWLAPSVENRINAHLSRIETVIRLLPVTKISVETTSFDMQLLKNSDIAGKEYQEGEQLGFWNVREYVLFRDGHVCQHCHGRSKDPVLNVHHLESRRTGGDSPGNLITLCETCHKELHRGEITLKAKRGQSFRAETFMGIMRWEVLNRLKASHPKLEVQNTYGYRTKHARIVNGIAKSHCADAFCIAGNLGAERLGEFLFQKQTRRNNRQIHKLSILKGGIRKRNQVPFEVKGFRLFDKVACKGEEGFVFGRRSSGYFDVRKLDGTRISAGISYKKLRLLEKRQTYLTEIRKEEALPPLPEGRGLRA

SEQ ID NO: 17541 - protein, 427 aa, Moorena sp.; identical to SEQ ID NO: 15964

SEQ ID NO: 17542 - protein, 431 aa, unidentified; identical to SEQ ID NO: 4463

SEQ ID NO: 17543 - protein, 413 aa, unidentified
MTNYAFVLDANNKQLTPTKEQKAWFLIRKKRATLVSKYPMVIQLKKKIPDKEICKDEVRCGIDDGGLHVGVALVQKCHTRNKVIFKGVIEQRNDVKHLMDVRRGYRRYHRYHKRYRPARFNNRNSSKREGRIAPSILQKRQATTRVINQLNKWINITNYWLEDVAIDIRALTDGYKPYRWQYQKTNRLDENIRKAVILRDGCKCMECGKSNCRLEVHHIKPKRLKGSNTLGNLITLCAKCHQKTESVEELYMDRYFALLNSSDNKNLNYAQHVMIGKKWLREQLSNLGMLYLTNGGDTANKRIDWDITKSHSNDAICITDLKPDTCEIKEWAIKPMRRQSKAKTDNVLGIKHRDLVEYTFRNGKTHRGYVTALYPEQNAINFQSPTKHCKKVNARKCKVLWKYSKIYWLDNVS

SEQ ID NO: 17544 - protein, 380 aa, unidentified
MSTGLRAEQAEPAGIRKGDTLKVFVLNMRGKPLMPCSPAKARHMLKAGKAVVLRRTPFTISLTVATGETKQGVTLGVDAGAEHVGISATTEKEEVFASEVELRQDIKGLMADRLAFRRARRNRKTRYRAPRFDNRVRSKHKGWLAPSVENRIQAHISRIEAVCRVLPITKIVIETASFDIQKIKNPEVEGTDYQQGDQLGFWNVREYVLFRDGHVCQHCRGRSKDPILNVHHLESRKTGGDAPNNLITLCETCHKAYHAGKIKLKTRRGTPFRAEAFMGIMRWTLLERVRKAHLELPVENTYGYLTKHKRIVLGLPKTHLRRRLLHCGKSECAATRRIPLPAADAQAQPSDPQVFDSQGWSAKTPPGAVPCQGLPPFRQG

SEQ ID NO: 17545 - protein, 432 aa, Lactobacillus sp.; identical to SEQ ID NO: 6011

SEQ ID NO: 17546 - protein, 470 aa, unidentified; identical to SEQ ID NO: 2825

SEQ ID NO: 17547 - protein, 448 aa, Clostridium sp.
MVYVISINNKPLMPTSNAKARILLKQKKAKVKELKPFTIQLTYKTETEYTQEITLGIDSGYNNIGFSAIINNKELIVGELKLLQGMKERLLEKARYRKIRRSRLRYRKPRWNNRIKSKQKGWLAPSLQHKLDSHIKFINYLYSIVPITKCIVEIANFDIQKIKNPDIQGDEYQQGEQLGFWNLREYILHRDNHKCQNPNCKNKSKEKILEIHHIKYRSLGGTNSPSNMITLCNKCHTSPNHKKGKFLWDWCQEGKKVRGFKDATFMSMIRWYLVNELKEKYSNIGFTYGYITKNHRIKDSIEKSHYNDAFCIAKGVNQTRNNKIYEVKQSRRNNRSLEMFYDSKYIDIRTGEKVSGGDLNNGRRTRNKNYNTKNLHQYRGEKISKGQRRIRTQKHFYQPNDLVKYNGKVYSVRGTQNKGKYIRLNEIKKVPRIDLIKPYKFNKGIVWC

SEQ ID NO: 17548 - protein, 410 aa, Bacillus sp.; identical to SEQ ID NO: 12232

SEQ ID NO: 17549 - protein, 414 aa, unidentified; identical to SEQ ID NO: 2588

SEQ ID NO: 17550 - protein, 362 aa, unidentified; identical to SEQ ID NO: 8489

SEQ ID NO: 17551 - protein, 420 aa, unidentified; identical to SEQ ID NO: 9880

SEQ ID NO: 17552 - protein, 415 aa, unidentified; identical to SEQ ID NO: 3582

SEQ ID NO: 17553 - protein, 442 aa, Gemella sp.
MFCIDNRETHIPSTTLARRKILRKEGYPEMENIKKEYCFVVDKNNKPLAPTKMNKGWYLIRKGKAILKSMYPMVIQLEKKIKTNKNDKSYIVCGIDDGSIHVGLAIVQKCPTKNKVVFKETIEQRQDVKHLMDVRRGYRHYHRYHKRYKPMRFNNRSSSKRIGRLAPSIKQKKDSILRVLYQLNKLINIKEYYLEDVCIDIRAMTDDYKPYKWQYQKSNRLDENLRKAAIIRDNYKCQECGKSNCKLEVHHIQARKYSGADTIGNLITLCSKCHQKTEGKEQDFEDKYFKIIGSKPKRFDYAMHVMQGKNYLRSKISELGLLHLTNGGETANKRIEWNIEKSHSNDAICITNSIPDSCNIKEWTIKPMRRKSKAKADNVLGIKYRDLVSYTYKNGETHTGYVTALYPKQLALNFQSRIKHCKKVNARKCRLLWQFNKIYWLE

SEQ ID NO: 17554 - protein, 432 aa, unidentified; identical to SEQ ID NO: 6070

SEQ ID NO: 17555 - protein, 400 aa, unidentified; identical to SEQ ID NO: 3267

SEQ ID NO: 17556 - protein, 270 aa, unidentified
LQLLKAIADGKPVPQGEDYQQGEMYGHYNVRQYVLWRDNYTCQCCGTHPSKKKEVRLHVHHLESRKVGGDAPDNQVTLCESCHEKLHKGLIAEKDFKKRKRKSTRDATFMGIMRKTLMQRLCSELPIPVIETRGYITKATREKLLVLPKSHTNDALAIAQGKQGFNVGYLPGIVQINKIYTIRPVRHHNRQLHKATILKGGIRKSNQTEKYVFGYRLFDKVQFNEQDCFIWGRRTTGIFTIKTINGKMIKDGISFKKLKPVEKSTGYLIA

SEQ ID NO: 17557 - protein, 443 aa, Anoxybacillus sp.; identical to SEQ ID NO: 13210

SEQ ID NO: 17558 - protein, 413 aa, unidentified; identical to SEQ ID NO: 3220

SEQ ID NO: 17559 - protein, 431 aa, unidentified
MPNKVYVINKHGRPLMPCSPAKARHLLDAGKAKVKKRTPFTIQLVYGSSGYTQEVILGVDAGSKTIGMSASTTKEELLSAEVKPRNDVVDLLSTRREFRRARRNRKTRYRKPRFDNRVRSKHKGWLAPSVEVKIQEHITSIKRVCRILPVSKVVIETAEFDLQLLKAIEEGKPVPQGEDYQQGEMYGHYNVRQYVLWRDGYTCQCCGAHATKKKEVRLHVHHLESRKVGGDAPDNQVTLCESCHEKLHKGLIAEKDFKKRKRRSTRDATFMGIMRKTLMQRLCSELPIPVIETRGYITKATREKLLVLPKSHTNDALAIAQGKQGFNVGYLPGIVQINKIYTIRPVRHHNRQLHKATILKGGIRKSNQTEKYVFGYCLFDKVQFNGQDCFIWGRRTTGIFTIKTINGKMIKDGISFKKLKPVEKSTGYLIA

SEQ ID NO: 17560 - protein, 428 aa, Enterococcus sp.; identical to SEQ ID NO: 4335

SEQ ID NO: 17561 - protein, 398 aa, unidentified
GRPLMPTTRHGKVRRLLKSKKATVVNLCPFTIRLLYDTTGYKQEITLGVDTGTKHVGLSATTKSKELYASEVILRSDVVDLLSTRRELRKIRRYRLRYRKPRFMNRIKSKKRGWIAPSIRQKIDSHIRIIGFVYSILPVSKLIIEVAQFDTQKIKNPEISGKEYQEGEQLGFWNVREYVLARDEHKCQHCKGKSKDPVLNVHHIESRKTGGDSPSNLITLCKTCHKEFHKGNIKLKVNRGESLRDAAVMGIMKWELYDELKSLYPNVKMTFGYITKYNRINHGIEKSHVSDAFVISRNFDSERLGYYYKRKLVRRHNRQIHKMKAPKGGNKRMNQSPFKVFGFRLFDKVMFQGKERFIYARRLRGIFNIRDINGENKKDISYKKLEYVSHGLISIVAG

SEQ ID NO: 17562 - protein, 456 aa, unidentified
MSTCVCVLSNSGERLMPTFRLGKVRRLLKDGKAKIVKHHPFTIQLLYDSKTNTQPIEICEDVGYNYIGISVKSQSHEYVSAQYDTLQDEKACHDSCRKLRRSRRNRLRYRKPRFDNRKRSEGWLAPSLEHKKQLNIRLIERYVSVIPITHATVEVGSFDTMLLQAIQKGESKPEGVDYQKGPRYNLATLREAVFYRDNYTCQVCGRKIADGAILHMHHMFYWKGRHGYQLDELVTACEKCHTPANHQKGGKLFGFGEDKEFANLSGAAFMNAVRWQIVDALHATYGKEFVTITYGAMTKEKRIILGIEKTHNNDAYAMGDYHPVHRCVFRHYQKRRRNNRVLEKFYDATYIDTRTGNKAKGKELFNGRISRNHKKNSEDLHKYRSKKVSKGRRSIRRQRYAIQPYDTVRLESKTYITSGCHNKGTRLLIPANGKSKSVAISKVQIVCHAGAWIQII

SEQ ID NO: 17563 - protein, 458 aa, unidentified
MSVFVVGLNGCRLMPTSERKARLLLKQGKAFVEQKVPFTIRLNYKTGSTTQLGYLGIDTGSQHIGVSVVREDGTVLHKEEIGLRDSMSKRKLLEAKASLRRGRRYRKTRYRHPKWRPKTKRVYCEVPDRKGRHWQKKKITFTSKRPKGWLPPSLQSKTDHHIRWIKKLQDLLPEGYRLSIELGRFDPARMKNPEIHGDLYQKGPQYDYENVRAYVLDRDRYTCQICKKKGGKLHVHHILYRSHGATDDPQYMVTVCSDCHSAQNHLPGGILYQWMQEQKRFSRGLRDATFMNILRKRLIRAFPEAVFTYGNVTKVDREKLKLPKSHGNDATAIALVKTGITAVKDKESVICIQQVRRKKRSLHEETPRKGRKEPNRTAARNNKNTKAVTVTKRQNKKKVSMTGCLFDRVELNGKKGWIFGFTGKSCYVKDADDQYLSTSPKYKQVSLSNSYFCIYLAK

SEQ ID NO: 17564 - protein, 465 aa, unidentified
MVIALDRHKKPLGFVTERRCRKLLEVRRAVFYRHYPAVIILKDVDARNIYKLPSYRIKIDPGAVHTGIAIVCNETNEVMYFLQIEHRGSEVKKALITRKQTRRNRRSRETRYRRCKFKNGGDFDSSRKNGWLPPSVKSTADNVIHWVEKLCRYINITECSFEAVRFDSQLMDNPEIGSEEYQQGTLSGYELREYLMEHFRHTCQYCGGESGDPVLEWEHKIPRSRGGSDSVKNASLACSCCNRDKGNRTLEEYLEDSKHISPKGKSEKALNEARISHISGILEKGTIYGSNRYSAWVNSTRRYIEKYLFLMFDDVECCSGGRTKYNRIKLKLPKDHHYDALCVGSVPKEGYTDRTNSYVLYVKATGRGTRFRGQCNSCGVITVKYKNNSKRKFGFQTGDIVQLNKPKGKDTGQYTGKVAVRSSGSFDLIRKGCKRITANYKYFRMMQYSDGYEYLGPLRPIPHSA

SEQ ID NO: 17565 - protein, 476 aa, unidentified
LEAADTEGVSHPGLPGKYKNKGGQLMSVAVISKTGERLMPTSEYRARKLLKSGKAIKYSYHPFTIQLTERESGDVQPIELCVDTGYIHIGISVKSEKHEYLAEQIDTLTDERSRHDACRMYRRQRRSRKRYRQPRFNNRKRNDGWIAPSLEHKKNIHIQAISHICKVMPVTDITLEMGNFDTQVLKAREEGKPLPQGADYQHGERYGIATLREAVFARDGYTCQCCGRTIKNDAILHVHHIVYRSQGGTNRMSNLITVCDKCHTPANHKKGGKLYNWKPKIASFKGAAYMTAIRWKLYNEVKTLFPDIDIHITYGAETKERRRAFDINKSHVNDAFVMGQFHPKHRSKPICYKKKRRNNRCLEKFYDAKYIDSRDGKKRSGQELFNGRISRNHKKDSENLHQYRLQKVTPGRRAIRKQHYPIQPHDIIVYNGNKIEVSGCQHKGTRVVFSKTKKSVQISKIKLFKYAGGYSKSVFN

SEQ ID NO: 17566 - protein, 420 aa, unidentified; identical to SEQ ID NO: 6507

SEQ ID NO: 17567 - protein, 526 aa, unidentified
LLRQERFIVKEVANMSTVYVLNKDGKPLMPTTRGGHVRHLLKEQKARVVRAKPFTIQLLYETNDVVQPLYLGIDPGRTNIGVAVVKANGTAVFTAHLETRNKEIPKLMQDRKKARRARRTNGRRCRRQRRAKANGTISKKCVKQTTAQNGSVSKRAKDIGVIKRRLPGCEKDVLCIGIKNKETKFTNRTRPEGWLTPTANHLLQTHINLVKKIQKFLPISDVVLEVNKFAFMRLDNPNIQKWQYQQGPLYKKESLESAVSEIQEHHCLFCKKPIDHYHHVVPQHKNGSNTIGNIVGLCAKHHDLVHKDSAWEKKLAKKSTGLYKKYGALGVLNQIIPTLTNELSSLFPKHSFVTNGKSTYDYRAAHGVSKDHWLDAYCIACSVLPSNVCDSNINNHMPYELKQFRRHDRRVLNNENMNRVYTLNNKAVAINRHKAKDQKTVSLEEFRKEHPDDVCKLKVKEHHPTYRNMNRNFPGSVFLVGKQIHVMQGIASSKDGKATKYNDTSATAIAAGKCKFVAKNTGILFV

SEQ ID NO: 17568 - protein, 456 aa, unidentified; identical to SEQ ID NO: 11534

SEQ ID NO: 17569 - protein, 431 aa, unidentified
MPNKVYVINKHGRPLMPCSPAKARHLLDAGKAKVKKRTPFTIQLVYGSSGYTQEVILGVDAGSKTIGVSALTKKEELFAANVIPRNDVVDLLSTRRESRRARRNRKTRYRKPRFDNRVRSKHKGWLAPSVEVKIQEHITSIKRACRILPVSKVVVETAEFDLQLLKAIADGKPVPQGEDYQKGEMYGHYNVRQYVLWRDNYTCQCCGAHATKKKEVRLHVHHLESRKTGGDAPGNLVTLCDSCHEKLHKGLIAEKDFKKRKRRSTRDATFMGIMRKTLMQRLCSELPIPVIETRGYITKATREKLLVLPKSHTNDALAIAQGKQGFNVGYLPGILQIDKIYTIRPVRHHNRQLHKAAILKGGIRKSNQAGKYVFGYRLFDKVQFNEQDCFIWGRRTTGIFTIKTINGKMIKDGISFKKLKLVEKSTSYLIA

SEQ ID NO: 17570 - protein, 353 aa, unidentified
LKGLSRTCGSLRFKEKTLKVFVINKRGKPLMPCKPAKARHLLRDGKARVVRRTPFTIQLTIATGENVQPIHLGVDAGSKHIGLSATTEKEELFSSEVELRKDITDLLSSRREMRRARRNRKTRYRAPRFDNRVHAKNKGWLAPTLENKISAHLSRIKAIRAILPVSRITIEVASFDIQKIKNPEIEGEQYQQGEQLGFWNVREYVLFRDGRKCCHCHGKSKDPILNVHHIESRKTGGDAPNNLITLCETCHKAYHAGKIQLTAKRGEKFTDATHMGIMRWELFKRAKEANLGIPVKTTFGYITKVRRIQFGIAKTHCADAFCIAGNLNAKRLGEYGEFQKFEKRGVGRHDHSP

SEQ ID NO: 17571 - protein, 346 aa, Arthrospira sp.; identical to SEQ ID NO: 6643

SEQ ID NO: 17572 - protein, 585 aa, unidentified; identical to SEQ ID NO: 14765

SEQ ID NO: 17573 - protein, 426 aa, Calothrix sp.
MHTNYVFLLNADKSPLGMIHPARARELQDKKKAAVFRRYPYVLILRNQVNSVIKACILKIDPGSKWTGFAIQMGSSIILRMELEHRGEIIKLDLEKRAGFRRGRRSRNLRYRMERSGRRKKEGWLPPSLRHRLLTVETWIKRFMRYCPIITIEIEQVRFDTQKMNNPEIKGVEYQQGELMGYEVRQYLLEKWGNECTYCGVKNVPLEVEHVKPKSKGGSDRVSNLTLACHCCNQKKGDKDVSEFVSDKAKLDIILSQAKTPLKDAAAVNSTRFAIVETAKKLCDNVKCWTGGRTKFNRFKQGFEKSHSIDAACVGESGSNIKIKTQQPLIVVCKGHGSRQARRVNKYGFPAVQKAKAVFTHATAGDLVRVVLDSDRKNVTKGKYIARVKTPTKKAVEVVINGKRVEISSMKNVSFIQRSDGYAYSF

SEQ ID NO: 17574 - protein, 448 aa, Chromatium sp.; identical to SEQ ID NO: 5440

SEQ ID NO: 17575 - protein, 512 aa, unidentified; identical to SEQ ID NO: 7153

SEQ ID NO: 17576 - protein, 393 aa, unidentified
  source 1..393: note = Candidatus Poribacteria bacterium
MSKVPVLDTHKNVLEPCHPAVARRLLRKGEASVYKRYPFTLILKREVSSSQTTDYTLSIDPGSKCTGMAITDSENHIVALFELHHRSAAIKKGLSDRAGYRRSRRTRKLRYRQARFDNRSRKAPVLTPDGWKYQSFGQSSKGWVAPSLMSRVFNIHTWVSRLSKIYPITQLAVEHVKFDTQLMENPEISGVAYQRGTLYEAEVWEYLLEKFGRKCYYCGAKDVPLKKEHIFPKAKGGTNRVSNLTVSCKSCNQEKGNKHPDELEGNLGKRVQSALKAAKKPLKDATSVNTIRWKIVETLKATGLPVIYGTGGKTKWHRKQACLPKTHYYDAACVASVPKSPVAPLSVLAIHAVGYGHRRDLGNYQTVQSAPGFKRPYKRLEQGEASRNSIPLR

SEQ ID NO: 17577 - protein, 438 aa, unidentified; identical to SEQ ID NO: 6587

SEQ ID NO: 17578 - protein, 442 aa, Sutterella sp.; identical to SEQ ID NO: 11369

SEQ ID NO: 17579 - protein, 451 aa, unidentified; identical to SEQ ID NO: 5203

SEQ ID NO: 17580 - protein, 512 aa, unidentified
VSTIYVLNKDGKPLMPTTRCGHVRYLLKEKKARVVASKPFTIQLLYETDNVVQFLYLGIDPGRTNIGVAVVKADGTAVFTAHLETRNKEIPKLMQDRKKARRARRTNGRRCRRQRRAKANGTISKKCVKQTTAQNGSVSKCAKEIGVIKRHLPGCEKEVLCIGIKNKEAKFNNRARPAGWLTPTANQLLQTHINLVKKIQKFLPISDVVLEVNKFAFMQLDNPNIQKWQYQQGPLYQKGSLENAVSEMQEHHCLFCEKPIEHYHHVVPQSENGSNTIANIVGLCTEHHNLVHKDATWQKKLAKEKVGLVKKYGALSVLNQIIPALTKEMNSLFPKHFFVTNGKSTYDYRTAHGVSKDHWLDAYCIACSVLPNDVCDSNINSHVPYELKQFRRHDRRVLHKANMSRVYTLNGKTVATNRHKAIKQTTDSLEEFHQSHPGDVCKLKVKEHHPAYRNLNRNYPGSVFLVDGQVHVMQGVSGSHNGKADGYYNTNGNAYPYYKCKFVVKNEGIVFA

SEQ ID NO: 17581 - protein, 406 aa, unidentified; identical to SEQ ID NO: 6445

SEQ ID NO: 17582 - protein, 451 aa, unidentified
MPVAVISKTGERLMPTSEHRARKLLKSGKAIKYSYHPFTIQLAERESGDVQPIELCMDTGYIHIGISVKSEKHEYLAEQIDTLTDEKARHDACRMYRRQRRSRKRYRQPRFNNRKRNDRWIAPSLEHKKSIHIQAILRICKVMPVTDITLEMGNFDTQVLKAREEGKPLPHGADYQHGERYGIATLREAVFTRDDYKCQCCGRTIKDGAILHVHHIKYRSQGGTNRMSNLITVCDKCHTPANHKQGGKLYNWKPKIASFKGATYMTTIRWKLYNEVKALFPDIDIHITYGAETKERRRALDIDKSHVNDAFVIGQFHSKHRSEPICYKKKRRNNRCLEKFYDAKYIDSSDGKKRSGQELFNGRISRNHKKDSENLHQYRLQKVTPGRRAIRRQHYPIQPHDIIVYNGNKIEVLGCQHKGTRVVFSKTKKSVQISKIKLFKYAGGYSKSVFN

SEQ ID NO: 17583 - protein, 515 aa, Actinoplanes sp.; identical to SEQ ID NO: 2821

SEQ ID NO: 17584 - protein, 383 aa, unidentified
MRVFVFNMRGRPLMPCSQRKARLLLRENKAKIYKYHPFTIQLTYTTGETKQDCHIGIDTGSKYIGAAVRSEDKVFWKGEIELRQDIRSNLDTKRIYRRSRRNRKTRYRKPRFLNRKRRDEWLPPSLQSRINHTFHWIDTLSSLVPNPILHIEVGKFDVAKMINPEIHGVDYQHGQTYGFFDGRYFVFARDNYTCQCCGKSKNKILNTHHIIYRSNGGTNRVDNLITVCTDCLTSQNHRKGGIFYQWQEQHKKVKQYKEPPFMNTLRKRIFVAYPDAEITYGSETTPKRKAMKLDKTHYNDAIVISGINEIKENPEEWLLIKQFRKKKRSLHELPPVREEKSQTEIRRVTVRIRLIIKDFILTIRFQFLERVDILQDLRAMRHI

SEQ ID NO: 17585 - protein, 423 aa, unidentified; identical to SEQ ID NO: 8242

SEQ ID NO: 17586 - protein, 474 aa, unidentified; identical to SEQ ID NO: 9173

SEQ ID NO: 17587 - protein, 432 aa, unidentified; identical to SEQ ID NO: 6070

SEQ ID NO: 17588 - protein, 451 aa, unidentified; identical to SEQ ID NO: 3199

SEQ ID NO: 17589 - protein, 504 aa, unidentified; identical to SEQ ID NO: 3854

SEQ ID NO: 17590 - protein, 240 aa, unidentified
  source 1..240: note = uncultured cyanobacterium
MSKVFVLDTQKRQLDPIHPAQARQLLRNKKAAIFKRFPFTIVLCEKCNTKKGTKDIKNFLKKDPAKLAKILSQAKRPLADAASVNSTRWALFRVLQETGLPVETGSGGLTKFNRVQQGLEKTHWIDSACVGKSTPKLVVKGIKPLLITTNGHGSRQSCRTDKFGFPNRHVPREKIHFGFQTGDIVKAVVTTGKKVGNYVGKVAIRSSGSFNISTKNGLIQGISHKFCKRIHAKDGYSYAQ

SEQ ID NO: 17591 - protein, 424 aa, Moorena sp.; identical to SEQ ID NO: 6694

SEQ ID NO: 17592 - protein, 419 aa, Lyngbya sp.; identical to SEQ ID NO: 2658

SEQ ID NO: 17593 - protein, 512 aa, unidentified
MSTVYVLNKDGKPLMPTTRCGHVRHLLKEQKARVVTSKPFTIQLLYETDDVVQPLYLGIDPGRTNIGVAVVKTDGTAVFTAHLETRNKEIPKLMQGRKKARRTRRTNGRRCRRQRRAKANGTISKKCVKQTTAQNGSVSKRAKEIGVIKRHLPGCEKDVLCVGIKNKEAKFSNRTRQEGWLTPTANQLLQTHINLIKKIRKFLPISNVVLEINKFAFMRLDNPNIQKWQYRQGPLYQKASLEEAVSEMQEHHCLFCKKSIVHYHHVVPQSENGSDTIGNIVGLCTKHHDLVHKDTAWQKKLAKKKTGLNKKYGALSVLNQIIPALTKELSSLFPKHFFATNGKSTYDYRAAHSVSKDHWLDAYCIACSVLANDVCDSNINSRVPYELKQFRRHDRRALNNENMSRVYTLNGKVVATNRHKATKQTTDSLEEFRQNHSDDVCKLKVKEHHPTYRNMNRNYPGSVFLIGKQVHVMQGIAGSKNGEATTYKDTNANSIAAGKCKFVAKNSGILFV

SEQ ID NO: 17594 - protein, 408 aa, unidentified
LKVFVLNMRGKPLMPCSPAKARHMLKAGKAFVVRRTPFTIKLTIATGETKQDVTLGVDAGARHVGISATTEKEEVFASEVALRQDITGLLADRLAFRRARRNRKTRYRAPRFNNRVRSKHKGWLASSVENRIQAHMSRIEAVCRLLPVTKIVIETASFDIQKIRNPEVEGTGYQQGDQLGFWNVREYVLFRDGHICQHCRGRSKDPILNVHHLESRKTGGDAPNNLITLCETCHKAYHAGKIKLKVKRGQSFRAEAFMGIMRWTLLDRVRKTHPKLPVENTYGYLTKHKRIALGLPKTHCADAFCIAGNLKALRRGDFLFLQQTRKHNRQIHKCSILKGGVRKLNQAPFLVKGFRLFDKVRIGGQIGFVFGRRVRGTFNIRRLDKTVIGTDINCKKTESSRNTQNFFD

SEQ ID NO: 17595 - protein, 430 aa, unidentified; identical to SEQ ID NO: 3252

SEQ ID NO: 17596 - protein, 410 aa, unidentified
  VARIANT 76..93: note = X can be any naturally occurring amino acid
  source 1..410: note = Clostridiaceae bacterium UBA5742
LVYVLSKNGNPLMPTSRHGKVKHLLKDGKAKVVRRTPFTIQLLYDSPEYTQPITLGVDSGSKVVGLSATTEKKELXXXXXXXXXXXXXXXXXXRRNRLRYRMERFLNRTASKKEGWLAPSVKHKVDSHLKVIENVHRILPISRIVIETASFDIQKIRNPEISGTEYQQGEQLGFWNIREYVLWRDNHECQHCHGKSKDRILNVHHKESQKTGGDSPGNLVTLCETCHKSYHAGRIQLKLTPNKSYRDASFMGIMRWYVYNSLKELYPEVSMTYGYITKTNRIMNNIEKTHSADAYCISGNMNAIRSNETYNQAFKRKYNRQIHKANFLKGGKKKLNQSEYEVKGFRLFDHVRYKDEDCFIFGRRTSGYFDLRKLDGSVVHRSASFKELKLLKRQNTILIERKGCNGVLLS

SEQ ID NO: 17597 - protein, 378 aa, unidentified
LLYGSSGYKQDVILGVDAGSKTIGLSATTENREVFSAEVELRTDIVDLLSTRRMLRRSRRNRKTRYRQSRFLNRKKPEGWVAPSVQNKIDTHIKVVKMVHDILSITKVIVEVAQFDIQKIKNPDILGEDYQQGEQLGFYNVREYVLFRDKHTCQYCNGKSKDPVLNVHHIESRKSGGNSPDNLITLCETCHRKYHKGEIELKVKRNSSFRDAASMNIMRWAFYNKLKELYSNVSLTFGYITKNVRIKHNLEKSHRIDARCISGNPSTKESDCWYFFKQVRKQNRQLHKTNPKKGIRRENKAPGYVHGYQLFDKVEYLDRECFVFGRRSSGYFDLRTLDGEVVSRSASVGKLKLVERASSLLCERREASFLTGLKHGVS

SEQ ID NO: 17598 - protein, 417 aa, unidentified
MPCSPAKARLLLKEKKAIVKRRTPFTIQLTIATGEAKQPVALGVDSGYKHIGLSATTEKAELYASEVELRQDITDLLSARLALRRSRRSRKTRYRAPRFNNRVASKRKGWLAPSVENRIAAHMSRVEAVMRVLPVTAITVETAAFDTQLLKNPDIAGEAYQQGEQLGFWNVREYVLFRDGHVCQHCRGKSKDPILNVHHIESRRTGGDAPNNLITLCETCHKAFHRGEIKLKVKRGKSFKAETFMGIMRWTLFERLKKAHPELRVRNTYGYLTKHKRISHGIAKSHCADAYCIADNLGAKRLEGFFFQKQTRKHNRQIHKLSILKGGLRKKNQAPYEVKGFRLFDKVICKGEEAFIFGRRTSGSFDVRRLDGTRISAGISCKKLRLLEPRTTYLTEFRKEAALPPLHECGGFRAEFL

SEQ ID NO: 17599 - protein, 406 aa, unidentified; identical to SEQ ID NO: 2703

SEQ ID NO: 17600 - protein, 423 aa, Arthrospira sp.; identical to SEQ ID NO: 16080

SEQ ID NO: 17601 - protein, 502 aa, unidentified; identical to SEQ ID NO: 2616

SEQ ID NO: 17602 - protein, 471 aa, unidentified
MKSDSLRGNSEEIRTTRRLPEFFPKGFSYMNVVYVLSPERAPLMPCRPVIARLLLKEGKAKVVHRTPFTIKLSAQPGDVYTQPLTLGIDTGSAVIGSAVADEFGKVVYLSQVQARNDIVKTMKQPATSRRNRRSRKTRYRPARWLNRKNSRKKGRFSPTMRSKIEAHLREIRFVKSLLPIQSMVLETGTFDPHALKNPAVLQNKWLYQKGINYGYANTRAYVLTRDSYTCQHCKGKSKDKRLEVHHLVFRSQNGSDEEANLVTLCKPCHDGLHAGSIRLKRTGKKKGTLLHATQMNSIRIQLLKHTQAEETWGFVTKEHRRLSGLPKEHVFDAAIIATRGKNPTFGTTTVIEKRCLPDGDYQQTKGKHSEQRITTGKIAGFRKFDKIRYRGCEYFIKGRMATGYAVLMDLSGSSVDLKPTPKFDKMKRVRARSSWIIHQKHISSFLSSFSDFCRQVPEKLLIRSSIFESQG

SEQ ID NO: 17603 - protein, 465 aa, unidentified; identical to SEQ ID NO: 4641

SEQ ID NO: 17604 - protein, 424 aa, unidentified; identical to SEQ ID NO: 3351

SEQ ID NO: 17605 - protein, 404 aa, unidentified
LLKEKKAIVKRRTPFTIQLTIATGESKQPVTLGVDAGYKHVGLSASTEKAELYASEVELRQDVSDLLSARRALRQSRRNRKTRYRAPRFNNRLHTKRKGWLAPSVENRINAHLSRIEAVLRLLPVTKITVETASFDMQLLKNPDIAGKEYQEGEQLGFWNVREYVLFRDGHVCQHCYGRSKDPVLNVHHLESRRTGGDSPGNLITLCETCHKALHRGDITLKAKRGKSFRAEAFMGIMRWEVHNRLRALHPGIEVSNTYGYRTKHARIANGIAKSHCADAFCIAGNLGAERLGEFFFQKQTRRNNRQIHKLSILKGGIRKRNQAPFEVNGFRLFDKVACKGEEGFIFGRRSSGSFDVRRLDGTRISAGISYKKLRLLEKRQTYLTEIRKEEALPPLPEGRGLRA

SEQ ID NO: 17606 - protein, 413 aa, unidentified; identical to SEQ ID NO: 11796

SEQ ID NO: 17607 - protein, 398 aa, Desulfobacter sp.
LSVFVLDTNKKPQNPVHPAKARLLLTEGKAAVFRQFPFTIILKETVLNVASNPLRIKIDPGSRETGIAVINDDTGEIVFAMELRHRGQQIKNNLESRRAIRRSRRNRKTRYRKPRFDNRTRAEGWLPPSLKSRVHNIETWVKRLCRFCNIQAISMELVRFDMQKIQNPEISGVAYQQGELMGYEVREYLLEKWDRTCAYCGKTDIPLEIEHIVPKSKGGSNRVSNLTLACTACNRKKGNKSLEQFLLKKPRLLKRIQKQSGVPLKDAGAVNTTRWDLFRTLKKNGLPVETGSGGLTKFNRTTRGLHKTHWLDAACVGESTPEKMFQIDKTVLIVKADGHGSRQMCRVNKFGFPRTTAKSTEKKSQRLSDGRHCQGGCHFRQKGRNVHRTCRCQKKRIV

SEQ ID NO: 17608 - protein, 436 aa, unidentified
MPCHPARARKLLKKGRARVHKVFPFTIRLTDRELENSSVQPMLVKIDPGSKETGIALVREEKNKGHHALYFINLQHRGQQIRNAVYKRRCLRRSRRSRNLRYRSPRFLNRRRAEGWLAPSLQHRADSILSWVSRLRKIAPVERISQELVKFDTQLIQNSKIEGIEYQQGELVGYELREYLLEKFGRKCIYCGADNVPLNIDHVIPKSKGGSNRVSNLVLACVQCNQKKGSRSIEEFLKDKPEVLRQIKNQLKQPLKDAASVNATRWKLFNKLKSTGFPFEVGSGALTKFNRKKFGIPKAHWLDALCVGNVPSVTNWRNLNVLNIQCCGRGAYQRTRTDKYGFPRGICMRQKKVYGFSTGDMVKAIIPKGKKKGVYVGKVAVRKTGSFNLQTSGQTIQGISYRYCRLITHSDGYSCSWKSCPIPPRVETRGILGEVR

SEQ ID NO: 17609 - protein, 432 aa, Thiorhodovibrio sp.
MNTVFVLSNTKKPLMPTRPARARRLLRDKKAAVYRMYPFTIILKDRADGETQPIEAKFDPGSKTTGIALVAEFPQQGRVVLWAANLHHRGDSIRKRLADRRAIRRGRRNRKTRYRQARFLNRKKPQGWLAPSLKSRVANVENWLQKIVNRAPIVTVAVETARFDMQKMQNPEISGVEYQQGELAGYELREYLLEKWNRTCAYCDAQHVPLEIEHIVSRSKGGSDRVSNLTLACHDCNQKKGNQPLEVFLAHDPKRLARIKAHAKAPLKDAAAINAIRYAIGNALKKFGLPVSFWSGGRTKKNRISQGYTKDHWIDAACVGETGAAVHIPDGMRPLIITATGRGQRQVTRVNKFGFPCAKAKTGKTVNGIRTGDIVKLIQPKGKYAGEYCARVTAIKNSDQRISITINRKQTWFASKLAHIMQRGDGYAYAYA

SEQ ID NO: 17610 - protein, 421 aa, Lactobacillus sp.; identical to SEQ ID NO: 12317
  VARIANT 302..327: note = X can be any naturally occurring amino acid

SEQ ID NO: 17611 - protein, 465 aa, unidentified; identical to SEQ ID NO: 3856

SEQ ID NO: 17612 - protein, 408 aa, unidentified; identical to SEQ ID NO: 4810

SEQ ID NO: 17613 - protein, 582 aa, unidentified
MYLDGVFGHLKDAGTCRYSSSLQHRRVYAKSRKTIPGQCLGLQPMRKNCFFVGRYCPTLIRRQHLANLKLIDTLLEKTEYIYVLGADGKPQMPTNRKVRVRSLFKSGLAKIVDTVPFTIRLLYENNAVLQPITLAEDPGRTNIGVAVLTQFGDLVFSAVVETRNKDIKKLMSDRKAHRQASRCGERKARQRLAKKHGSMIKSGMIMRKLPRYAADKFVTCKFIKNTEARFCNRKRIPDWLTPTVNHLVETHINIIRKISKYIPVTDIAVEVNRFAFMQMENPETTGIDFQNGPLKGFNDVKAALRVQQHGKCLMCKNDISDFHHIVPRSKGGSDNIQNQVGLCPKCHKKAHTNENFKQKLADKKVGLLKKYGALSALNQAVPFICKSLLEIYGKDHVHFCTGKDTSLIRTGLGYEKTKDNQMHEVDAYCIGLAAVGADIVNLPKFENIYKIKQFRRQDRSIINYQRERTYYLDGKKIATNRKPRFEQKKDAFSDWYSKRVKSDGKEQADKLTGRVTVKKSIRGYNSKNRLMPGTIFYYNGKRLVLTGQLTGGKYYRAYGDSKTNYPAAKCQVYKQNEGLVFV

SEQ ID NO: 17614 - protein, 446 aa, unidentified; identical to SEQ ID NO: 2319

SEQ ID NO: 17615 - protein, 424 aa, Moorena sp.
MRVFVLDKNKKPLDPCKPARARILLKQGRAKVFRRYPFTIIMGDLEELECVTHNHQIKLDPGSQTTGLAIVQEKVVVWGAELTHRGLQIRDGLTSRRKLRRSRRNRKTRYRQPRFLNRKRPDGWLAPSLMSRVYNIITWVKKLTRFCPITGISQELVRFDTQKMENPEISGTEYQQGTLYGYEVREYLLSKWNRQCAYCGVTDTQLEVEHIKPKSKGGSDRVSNLAIACRKCNQIKGNQEIEQFLSGKPDVLNRILSQAKRPLVDGAAVNSTRWKLYNELKALGLPIETGSGGLTKYNRCRQNLPKTHWLDAANVGEVDTLYIESYQPLLISAKGHGTRQMCRTNKFGFPTRYVPRFKFVKGFQTGDIAKAVVTKGKKIGTYTGRIATRKTGSFNISTKHELVQGISHKYCSIVHRKDGYSYSF

SEQ ID NO: 17616 - protein, 453 aa, unidentified
MLMAVAVVSRTGVPLMPTSPYRARKLLASGKAEKYGYDPFTIRLTERETGDTQPVELCMDTGYIHIGVSVKSEKHEYLALQIDTLTDEKKKHEKCREKRRNRRSRKRYRKPRFDNRKRDKGWLAPSLEHKKEIHVRAAERICRVVPVTDITMEMGNFDTQVLKAREEGRPLPQGTDYQQGERYGTATLREAVFSRDNYTCLCCGRTMKDGAYFHVHHIRYRSQGGTDRMANLATVCEKCHTPANHQPGGKLYNWKPEIKSFKGATFMTAVRWQMYREIKEKIPDVSIHLTYGAATKERRRALDIEKSHVNDAFVMGRFHPGHRARPELYIKKRRNNRVLESFYDARYIDSRDGKRKSGKELFNGRISRNHKKDSENLHKYRLRKVSKGKRSIRKKHYPIQPHDILVYCGRKYETAGCHNLGTGAILLPERKSIAVSKLKIYRYSGGYYKAEFN

SEQ ID NO: 17617 - protein, 419 aa, unidentified; identical to SEQ ID NO: 3670

SEQ ID NO: 17618 - protein, 439 aa, Lactobacillus sp.
MEGVQTMQNRVFVINKHGKALMPCKPRKARILLRDGKAKVLKKEPFTIQLLYGSTGYKQDVSIGIDSGQRHIGLAVTSQDKVLFQGEVELRQDVKKLIDTRRIYRRSRRNRKTRYRKARFLNRIASKKDNWLPPSVASKVNHNINWIKRLLSVLPKADLHIEVGKFDMQKMKNPAINGEGYQQGDLYGYQTVKQFVLARDNYTCQVCKKKGGKLKIHHIIYRSLGGTNTIDNLITVCSKCHTTKNHQSGILAKWCKDKKKVNKSYKGATFMNILRRRLFTSFPQAKFQYGAWTTLQRVDLELTKSHYNDAVAISGIKKIKAKPTSIMMFKQFRKKKRSLHEATARKGRKTPNITSKRNARNTKYAKGFWLNDYVRIKDSNKKGYISGFSQSSCYIKDIFGNYLTTSDRYRKVALSKLDRLSHHNNWQKQAITEKQYAMG

SEQ ID NO: 17619 - protein, 408 aa, unidentified; identical to SEQ ID NO: 5302

SEQ ID NO: 17620 - protein, 512 aa, unidentified; identical to SEQ ID NO: 5549

SEQ ID NO: 17621 - protein, 424 aa, unidentified
MLVYVLNKYGHPLMPTERCGKVRRMLKVGLAKVIKRCPFTIQLNYDTTNIVQEVTLGIDAGSKTIGLSATTENKELFASNVVLRNDIVDLLSTRRELRRSRRNRKTRYRKARFNNRKRDDRWLAPSIRQKIQTHLSVIGKVYRILPIRKIIVEVASFDIQKIKNPDISGVEYQQGEQLYFWNVREYVLFRDGHQCQCCSGKSKDKILNVHHIEGRKTGGDAPNNLITLCETCHNGYHNGTVKLPKTIKRGMAFRDAAFMGIMRWAFYEKLKETYPNVHLTYGYLTKNIRITNKLPKEHYIDAKCISRNPLAEPLGYMFYQKKVRCHNRQIHKTKILSRNRRKLNQAPYLVNGFHLFDKVRFNNQECFVFGRRTSGYFDLRLLDGTKIHASASSKKLILIQKSSSFLIERRAALPPMTEVTGIRA

SEQ ID NO: 17622 - protein, 431 aa, unidentified; identical to SEQ ID NO: 3235

SEQ ID NO: 17623 - protein, 258 aa, unidentified
LKVFVLNMRGQPLMPCSPAKARHLLKAGKAVVKRRTPFTIQLRIATGETKQNVTLGVDAGAKHVGLSAATEKEEVFASEVELRQDITGLLAARLSLRRDRRHRKTRYRAPRFLNRVRSKHKGWLAPSVENRIQAHMSRIDAVCRLLPVTKIVIETASFDIQKIKDPSVEGTDYQQGDQLGFWNVREYVLFRDGHVCQHCHGRSKDKILNVHHLESRQTGGDAPNNLITLCETCHKAYHAGKIKLKVKRGQSFRAEAFM

SEQ ID NO: 17624 - protein, 423 aa, Moorena sp.
MRVFVLNKNRQPLDPCKPARARILLSVGKAKVYRRYPFTIILTEEVKQPITHDHQLKIDPGAKISGLAIVQGKRVIWGSELTHRGFQIQEALTSRRQLRRSRRNRKTRYRKPRFLNRTRSKGWLAPSLTSRVQNILTWVKKLSRFCPVTGISQELVRFDTQKLQNPEISGIEYQQGTLYGYELREYLLEKWNRKCAYCGATGTQLEIEHIKPLSKGGSNRVSNLTIACHPCNQAKSNQDIELFLSNKPSILKRILSQSLRPLADAASVNSTRCTLYYELKSIGLPVEVGSGGLTKFNRCRQNLPKTHWLDAANVGKVETLIIEVTLPLAISAKGHGTRQLCRTNKYGFPTRHCSRIKFHKGFQTGDIVRAVVTKGKKIGTYVGRVATRKSGSFNISTKSGLVQGISHKYCKFIHRKDGYAYAN

SEQ ID NO: 17625 - protein, 210 aa, unidentified; identical to SEQ ID NO: 11041

SEQ ID NO: 17626 - protein, 413 aa, unidentified
MTSYAFVLDANGKQLAPAKEQKAWFLIRKKRAALVSKYPMVIQLKKEIPENEICKDEIRCGIDDGGLHVGIALVQKCKSKNKVVFKGTIEQRNDVKHLMEVRRNYRRYHRYHKRYRQARFDNRKSSKRKGRIAPSILQKRQATIRVINRLNKWINITNYWLEDVSIDIRVLTDGYKSYSWQYQKSNRLDENIRKATILRDGGKCMECGKSNCRLEVHHIKPRRRNGSNTLDNLITLCESCHQKTEGQEELYMDRYFSLLKSSDNKNLNYAQHVMIGKMWLRKQLSGLGVLYLTSGGDTANKRIDWNIEKSHTNDAVCITDLQPDTCDIKEWAIKPMRRQSKAKTDHVLGIHHRDLVEYTFKNGETHRGYVTALYPDQKAINFQSPTKHCKKVNARKCKLLWKYSKIYWFENAS

SEQ ID NO: 17627 - protein, 462 aa, unidentified; identical to SEQ ID NO: 15460

SEQ ID NO: 17628 - protein, 465 aa, unidentified
MSTCVCVLSNSGERLMPTFRLGKVRRLLKDGKAKIIKHHPFTIQLLYDSKANTQPIEICEDVGYNYIGISVKSQSHEYVSAQYDTLQDEKACHDSCRKLRRTRRNRLRYRKPRFDNRKRGEGWLAPSLKHKKELNVNVVKMYCAVMPITHATVEVGSFDTMLVKAIQEGKAIPEGADYQKGPRYNLATLREAVFYRDNYTCQVCGRKVADGAILHMHHMFYWKGRHGNSLSELITVCEKCHTPANHQKSGKLYGFGENVKFADLSGAAFMNTVRWQIVNELYAAFGKDFVTVTYGAMTKEKRIALHLEKSHNNDAYAMGSFHPVNRCAFEHYEKVKRNNRILEKFYDSQYIDTRTGELTNGKSLFNGRISRSHKKDSENLHKYRGKRICKGHRALRRKKLALNPGDLVSLNGEILVVHGTHTKKNGSVNVEFKTPSRSGKKSASLKKLKIVKTSNLMHSAWTKVA

SEQ ID NO: 17629 - protein, 470 aa, unidentified; identical to SEQ ID NO: 2825

SEQ ID NO: 17630 - protein, 454 aa, Microcoleus sp.
MQNYVFVIDQNKQALNPIPPARARELLTKQKAAVFRMYPFTIILKHVVGNPSPKPLIIKLDPGSKFTGIAILDGENVIWAAQWEHRAWQIKNALESRRLLRRSRPNRKTRYRQSRFDNRKRPTGWLPPSLIHRVLTIETWVKRLCRYAPIAQIAMELVKFDTQKLQNPEVNGVEYQQGELAGYEVREYLVEKWGRKCSYGDSEGLPLQVEHIHPRSKGASNRVSNLTLSCERCNIKKGTKPVKEFLTKNPARLEKILQQAKQQLKDAGAVNSTGWALFRTLKNILPITTGTGGQTKYNRTRVKLPQQHWIDATCVGEIETIKLVTQQPLRIKPTGWGTRQMCATDRYGFPSRHRERNQIHFGFRTDDIASSVVTKGKKVGEDVGVYCVAKQAVLILPRDSAGYPALATDFVRQFIKRMVTPMRFRRYGRWLKPLAPEFLPPLKREGFQTSGRFW

SEQ ID NO: 17631 - protein, 408 aa, unidentified
MVYVQDIDGKPMMPTTRHGKVRRLLKANKATVVNLCPFTIRLTYATSGYKQEIVLGVDAGTKHVGLSATTKSKELYSSEVILRSDIVELLSTRRELRRTRRNRLRYRKPRFGNRVKSKHHGWVAPSVRHKIDAHIRVIDNICSTLPISRIIVEIAQFDTQKIKNPDISGNEYQEGDQLGFWNVREYVLARDGHKCQHCKGKSKDPILNVHHIESRKTGGDSPSNLITLCETCHKEYHKGNIDLKVKRGKSLRDAAVMGIMKWKLYEELKSRYPNVSMTFGYITKYNRIKYGIEKYHISDAFVISKNFNALRLEYHYKVRLVRRHNRQIHKQKVLKGGAKKPNQSPFEVFGFRLFDRVMFEGNYYFIFGRRKSGSFNIRDINGGNQRNVTYKKLKLSIGKRFMIQKEMN

SEQ ID NO: 17632 - protein, 480 aa, unidentified
LYTKPLDNIGEGSLPPSGEINLKGMTFMVYVKSIDGKALMPTSNAKARKLLKQKKAKVVSLRPFVVKLTYKTKTEYIQKLNLGVDSGYSNIGFSVIDAKQEYIAGEVKLLEGMKKRLLEKASYRRIRRSRLRYRKARWNNRVKSKKKGWLAPSLKHKLDTHIKFIDYLKNILPIGKITVEVANFDIQKMKDDLISGIDYQNGDMFGFWNMREFVLHRDGHKCQNPNCKHKDKKEQILKVHHIRYRSEGGSDRPENLITLCSKCHTPVNHKKGKFLYDWCVNGKKVRGFKDATFMSMIRWYLVNELKSKHNNVSITYGYITKNHRIQNGIEKSHLNDAFAITKGTNQARTKDRFLVIQDRLKNRSLEKFYDSKIIDIRTEKKVSGGDLNCGRSTRNKNLNTENLRKYRGAKISKGQRRIRKQKYFYQPNDLVKYDGKVYTVKGTQNEGKYIALKEIKKVPKVELLIPYVFKKGLNWSYGLC

SEQ ID NO: 17633 - protein, 446 aa, unidentified
LVSGQLIMVWEAIQTRRIKPHDIGEGILRRHAAGTVSFPVLCKNRKETLMSVLVIGRNGRALMPTNPRKARLLLKKKTASVVCRHPFTIQLLYKTGCATQKGSIGIDTGSQHIGVGITCGDKVILKDEHALRSSMEKRSLLATRAVMRRGRRYRKVRYRKPKWRHHTKRMYFEKANRRGQHWRKVKTTTQSPRSKGWLPPSLQSKCDHHFRIIDRYLKYLPDPITRNLVIETGRFDMARMNDPTIHGEMYQRGPMYDAENRRAYIFARDNYQCACCKAKAGTTRKADGTTVKLVAHHILFRSRGATDNPKYIISVCDHCHTTKAHQPGGILYSWMENNKKVARGLRDATFMNILRKRLFARYPQAAFTYGNITAADRKKLRLPKSHANDAVAISLFGKEASTVKNICQTMHYKQIRKSKRSLHEAIPRKGRKNPNTKAVRNKKNTT

SEQ ID NO: 17634 - protein, 425 aa, unidentified
MVYVVANDGQPLMPTERHGKVCRMLRSGMAKVIKKCPFTIQLQYESERNVQPVSLGVDAGSKHIGISATTKAKVLYESDVELRDDIVKLLATRRQLRRSRRSRKTRYRPARFDNRKRKEGWLAPSIRQKIGSHLTVVANVCKILPINQIIVETASFDIQKIKNPEIQGIEYQQGEQMDFWNVREYVFFRDGHTCQCCKGRSKDKILNVHHIESRKIGGNAPNNLITLCETCHKGYHNGTVILPKNIKRGMQFKDAAFMGIMRWAFYNALKEQYEPAIPVSMTYGYLTKNTRIEHGLLKEHYIDARCISGNPDAVSDGTYYYQKKVRCHNRQIHKQTILKGGIRKSNQAEYLVKGYRLFDKVRYHGREYFIFGRRKTGFFDIRTLSGEKVNKGSISVKKLTFADTRKNYLIERRTVLKMVANSSPA

SEQ ID NO: 17635 - protein, 414 aa, Parasutterella sp.; identical to SEQ ID NO: 5012

SEQ ID NO: 17636 - protein, 557 aa, Blautia sp.; identical to SEQ ID NO: 7395

SEQ ID NO: 17637 - protein, 303 aa, Anoxybacillus sp.
  VARIANT 303: note = X can be any naturally occurring amino acid
MVFVLDTNKRPLAPCHEAVARKLLKQGKAAIYRRFPFTIILKKSVDESEIKATYRLKIDYGSRHTGLAILRGQEVVWLGQLDHRTDIKERIDKRRAFRRVRRNRKTRYRKPRFLNRKRKEGWLPSSLESRVQNIQTWVNRLKKLCPIGYISYENAKFDTQLMRNPEINGVEYQQGTLQGYEVREYLLEKFGRKCCYCGKENVPLEVEHIIPKSRGGTDRVDNLCLACHDCNQRKGSKTAEEFGYPHIQKQVKESLKDASAINSTRWKAYEVLKQTGLDVECGTGARTKMNRIRLDLPKTHYFX

SEQ ID NO: 17638 - protein, 457 aa, unidentified; identical to SEQ ID NO: 9139

SEQ ID NO: 17639 - protein, 536 aa, unidentified; identical to SEQ ID NO: 8176

SEQ ID NO: 17640 - protein, 417 aa, unidentified
MPCSPAKARLLLKEKKAIVKRRTPFTIQLTIATGEAKQPVTLGVDSGYKHIGLSATTEKAELYASQVELRQDITDLLSARLALRRSRRSRKTRYRAPRFDNRVASKRKGRLAPSVENRIAAHMSRVEAVMRVLPVTAITVETAVFDTQLLKTPDIAGAAYQQGEQLGFWNVREYVLFRDGHVCQHCRGKSKDPILNVHHIESRRTGGDAPNNLITLCETCHKAFHRGEIELKIKRGKSFKAETFMGIMRWTLFERLKKAHPELNVHNTYGYLTKHKRISHGIAKSHCADAYCIADNLSAKRLKGFFFQKQTRKHNRQIHKLSILKGGLRKKNQAPYEVKGFRLFDKVICEGEEAFIFGRRTSGSFDVRRLDGTRISAGISYKKLRRLESRTTYLTEFRKEAALPPLHKCRGFRAEFL

SEQ ID NO: 17641 - protein, 431 aa, unidentified
MPNKVYVINKHGRPLMPCSPAKARHLLDAGKAKVKKRTPFTIQLVYGSSGYTQEVILGVDAGSKTIGVSASTKKEELFAANVIPRNDVVDLLSTRREFRRARRNRKTRYRKPRFDNRVRSKHKGWLAPSVEVKIQEHITSIKRVCRILPVSKVVIETAEFDLQLLKAIADGKPVPQGEDYQQGEMYGHYNVRQYVLWRDGYTCQCCGAHATKKKEVRLHVHHLESRKVGGDAPDNQVTLCESCHEKLHKGLIAEKDFKKRKRKSTRDATFMGIMRKTLMQRLCSELPIPVIETRGYITKATREKLLVLPKSHTNDALAIAQGKQGFNVGYLPGILQIDKIYTIRPVRHHNRQLHKATILKGGIRKSNQTEKYVFGYRLFDKVQFNGQDCFIWGRRTTGIFTIKTINGKMIKDGISFKKLKLVEKSTSYLIA

SEQ ID NO: 17642 - protein, 464 aa, Actinomadura sp.; identical to SEQ ID NO: 6755

SEQ ID NO: 17643 - protein, 369 aa, unidentified
VDTGSGTIGTAVSNDNSDIVYMSEVIVRNDITDKMTQRRKYRKNRRGRKTRYRKARWLNRANSTKTDRFSPTMQSKLHSHVKEIEYIKSILPITTMVFETGQFDTHLMKNPNLANPKVKHWGYQKGVNYGFENTKAMVLNRDNYTCQCCKGKHKDSKLEVHHIIFRSQGGSDEESNLITLCHTCHKDLHSGTINFKLKGKLKGNLKYATQMNSIRKQLFMIYPDAIETFGYVTKANRLVLGIDKEHYYDACTIATQGNIFTVKSNLYKKKCVSDGDFQKTKGIRSEQPIVTDKICGFRKFDKVRYFGNNYFIKGRMSTGYAVLMDIDGNKADFSAMPKGYKTPKMVKLKRIEARTTWMITTVEVTPNIA

SEQ ID NO: 17644 - protein, 423 aa, Moorena sp.; identical to SEQ ID NO: 17624

SEQ ID NO: 17645 - protein, 465 aa, Thiorhodovibrio sp.
MNTNFVFVLDTDRRPLSPCRPARARELLRKGKAAVFRRYPFTIILKRAIPDATPTPCQVKLDPGSKTTGLALVQGEKVIWGGELHHRGHQIKERLASRAALRRGRRNRLRYRKPSYRTKAQINNAKATYARKRAAGWLPPSLQHRIETTMTWVNRLMRFAPVGELTQELVRFDMQRMENPEVSGVEYQQGELAGYELKEYLLQKWGRKCAYCGKENVPLEVEHIHCRSKGGTDRVSNLTLSCVPCNQKKGNRPIEEFLKNKPDVLKRVLAQARRPLKDAAAVNATRWALFHRLNATGLPVTVGTGGQTKFNRKRFGIDKAHWKDAACVGDMAAITFATDTALDITCKGQGGRQKAVVDRYGYPKQHRPLKPIHGWRSGDIARCNGQVGRISPRARGSFELRPFSGGKPFSRPMRQFERLHVTSIRLDEVYAEKRRYFAAVTNRFSQQQFNNRRGCVCQKNIPLWQ

SEQ ID NO: 17646 - protein, 473 aa, unidentified
VSGLDLPNSKEEGKERAIDNIGEGNHTSFKEDWLYISQLFTKRRFKMKKLVYVVNKNEKPLMPCKASKAKKLLKNEKAEVFEYEPFTIKLKFGASGYKNKVVLGIDTGSSNIGIAAVCGNRVLFQAEAKTKTSLIVDRMTKRASYRRTRRNRKTRYRKPRFDNRKRKDGWLPPSIQENVEMHIKMIKMVNKILPVTKIIIETAQFDTHALKEGKYKLNNFEYQKGPLYKEENLKMYIRKRDKYLCQMPKCKEEKGVLECHHIIPRRKGGTNKPENLILLCEKCHKKITGKEEQFIDIFYSITKGKRINTKDFARTQAGKTKIVELAKTIAPVEQTIGAITKVDRKKIGLPKTHYNDAVAIASQGRKIKTLNYYYKFVNKGRGQYQLRKGIRSQMIAQSPEREIEGFKRWDKVKVIDTGEIGFINRKRTSGQFGISDIEGKTIYGSKTFRKLKKISSGKSILCEMKKIPKGGLK

SEQ ID NO: 17647 - protein, 428 aa, unidentified; identical to SEQ ID NO: 7211

SEQ ID NO: 17648 - protein, 470 aa, unidentified; identical to SEQ ID NO: 8190

SEQ ID NO: 17649 - protein, 413 aa, unidentified
  REGION 1..413: note = IscB polypeptide
VDLRLPAGGPKAITPVFVLSRDGSPLMPCKPAKARHLVRDGRAKIVRRSPFTIQLLWDCERNIQPITLGIDPGYENIGFSAVTDQKELISGEVKLRSNMSKKLADRKMYRQTRRSRLWHREPRFNNRISSKKPGWLAPSIRHKLDSHIRLVEQIKKLLPISKVTVEVSNFNIQKIKNPNIQGIDYQKGEQLSFWNVREYVLHRDNHTCQKCKGKSKDKVLQVHHIRGKKEGATDRPEELLTVCKTCHRRHHKGIDLIPIKEIKDFKPETFMSTIRWKLIDLLTCNYTYGYITKHNRINLGLEKTHANDAFCIANGNGQFRTDPFNVIQKRKNIRRLQQNRRGHGISVRRRRHTYQSYDLVKVKSKVISIGGESGASVYFWDETGKEKSIIIKKLDDWHVNARTLVWRKKLKIA

SEQ ID NO: 17650 - protein, 458 aa, unidentified
MSTCVCVLSNNGERLMPTFRLGKVRRLLKDGKAKIVKHHPFTIQLLYDSKTNTQPIEICEDVGCNYIGISAKSKSHEYVSAQYDTLQDEKEHHDDCRKMRRTRRNRLRYRKPRFDNRKRGEGWLAPSLRHKKELNVNVVKMYCAVMPITYATVEVGSFDTMLVKAIQEGKVIPEGADYQKGPRYNLATLREAVFYRDNYVCKVCGRKATEGAILHMHHMFYWKGRHGNSLDELLTVCEKCHTPANHQKGGKLYGFGEDVKFADLSGAAFMNAVRWQIVNALYATYGKEFVTITYGAMTKEKRIALQLEKTHNNDAYAMGEFHPSCRCKFRHYQKRRRNNRVLEKFYDATYIDTRTGNKAKGKELFNGRISRNHKKDSENLHKYRAHKITKGRRSIRSKHYDIQSGDTVLYAGRKCITTGCFNKGKWLRIPVGSTAKSVAISKVKLINHVGAWKKGSSI

SEQ ID NO: 17651 - protein, 528 aa, unidentified
LKVFVLNMRGQPLMPCSPAKARHLLKAGKAAVRRRTPFTIQLRIATGETKQSVTLGVDAGAKHVGLSAATEKEEVFASEVELRQDITGLLAARFSLRRERRQRKTRYRAPRFLNRVRSKHKGWLAPSVENRIQAHMSRIDAICGLLPVTKIVIETASFDIQKIKHPDVEGTDYQQGDQLGFWNVREYVLFRDGHVCQHCHGHAKDKILNVHHLESRQTGGDAPNNLITLCETCHKACHAGKIKLKVKRGQSFRAEAFMGIMRWTLLDRVRKAHPGLPVENTYGYLTKNTRITLGLPKAHCVDAYCIAGNLKAVRRGVYLHQRQVRKHNRQIHKCTVLSKTLKDGTKIGYRKLNQTPHLVKNFRLFDKVRCLGQTGFIFGRRSSGYFDVRRLDGVKISSCISYRKLTLLEKRSTCLTELRKEDGASSPCLKTEVSAPNFYETLPSARRHAHECDPRSWHGRCRRRQVRRRPPRRHGSDVRSLPRPRQGQSRHARHQDVHAVPQHEGPRREDEGRQADESARLPALSGPA

SEQ ID NO: 17652 - protein, 423 aa, Arthrospira sp.; identical to SEQ ID NO: 3193

SEQ ID NO: 17653 - protein, 414 aa, unidentified
MPCSPAKARLLLKEKKAIVKRRTPFTIQLTIATGESKQPVTLGVDAGYKHVGLSASTEKAELYASEVELRQDITDLLSARRALRQSRRNRKTRYRAPRFNNRLHTKRKGWLAPSVENRINAHLSRIEAVLRLLPVTKITVETASFDLQLLKNPDISGKEYQEGEQLGFWNVREYVLFRDRHVCQHCYGRSKDPVLNVHHLESRRTGGDSPGNLITLCETCHKALHRGEITLKAKRGQSFRAEAFMGIMRWEVHNRLRALHPGIEVSNTYGYRTKHARIANGIAKSHCADAFCIAGNLGAERLGEFFFQKQTRRNNRQIHKLSILKGGIRKRNQAPFEVKGFRLFDKVACQGEEGFIFGRRSSGFFDVRKLDGTRISAGISCKKLHLLEKRRTYLTEIRKEEALPPLPEGRGLRA

SEQ ID NO: 17654 - protein, 393 aa, Anoxybacillus sp.; identical to SEQ ID NO: 13407
  VARIANT 393: note = X can be any naturally occurring amino acid

SEQ ID NO: 17655 - protein, 512 aa, unidentified
MSTVYVLNKDGKPLMPTTRCGHVRHLLKEQKARVVTSKPFTIQLLYEADDVVQSLCLGIDPGRTNIGVAAVKADGTAVFTAHLETRNKEIPKLMKKRKESRRARRTNGRRCRRQRRAKANGTISKKCVKNDTAQNGSVSKRAKDIGVIKRRLPGCEKDVLCIGIKNKETKFTNRTRPEGWLTPTANQLLQTHINLVKKIQKFLPISDVVLEINKFAFMRLDNPNVQKWQYQQGPLYQKANLEETVSEMQEHHCLFCKKKIDHYHHVVPQHKNGSNTIDNIIGLCTQHHDLVHKDATWQKRLAKKKTGLNKKYGALSVLNQIIPALTKELSSLFPKHFFVTNGKSTYDYRAAHGVSKDHWLDAYCIACSVLPNDTCDKTINSRVPYELKQFRRHDRRALNNENMSRVYTFNGKMVATNRHKATEQTTDSLEEFRQRQPNDVCNLKVKEHHPTYRNMNRNYPGSVFLVGNQVHVMQGIAGSKDGEATTYKDTNANSIAAGKCKFVAKNSGILFV

SEQ ID NO: 17656 - protein, 419 aa, unidentified; identical to SEQ ID NO: 5032

SEQ ID NO: 17657 - protein, 431 aa, Escherichia coli; identical to SEQ ID NO: 10059

SEQ ID NO: 17658 - protein, 412 aa, unidentified
MIYVQNSNGQPLMPTENHAKVRILLKQNKAVVVKRCPFTIKLTYKSTNYTQSVTLGIDAGSKHIGVSATTEDKEIYASDVELRNDIVKLLSNRRECRHSRRNRKTRYRKARFNNRKRGGGWLAPSIKEKIGTHLKVVNDVCKLVPVTKIIVETASFDIQKIKNPDIEGADYQQGEQLGFWNVREYVLCRDGHVCQCCKGKSKDPVLNVHHIESRKTGGNAPNNLITLCETCHKGYHKGTVKLPDEIKRGMKFNDAAFMGIMRWAFYGELKKRYPDVSLTYGYLTKNTRIRNGLPKEHYVDARCISGHPLAKPLSEVFYMKKVRCHNRQIHKCGILKGGVRKCNQSAYIVKGFRLFDRVKAKGREWYIHGKRTNGAFVLKCLNGSRLEIAPSKIRFISQQHNFITERRTLGQC

SEQ ID NO: 17659 - protein, 457 aa, Planktothrix sp.; identical to SEQ ID NO: 15536

SEQ ID NO: 17660 - protein, 472 aa, unidentified; identical to SEQ ID NO: 4432

SEQ ID NO: 17661 - protein, 420 aa, unidentified; identical to SEQ ID NO: 6212

SEQ ID NO: 17662 - protein, 442 aa, unidentified; identical to SEQ ID NO: 7529

SEQ ID NO: 17663 - protein, 414 aa, unidentified
MPCSPAKARLLLKEKKAIVVRRTPFTIQLTIATGETKQPVSLGVDAGYNHVGLSASTEKAELYASEIELRQDITDLLSARRALRQSRRNRKTRYRAPRFDNRIRTKRKGWLAPSVENRINSHLSRIEAVLRLLPVTKITVETASFDLQLLKNPNISGKEYQEGEQLGFWNIREYVLFRDGHVCQHCHGRSKDPVLNVHHLENRRTGGDSPGNLITLCETCHKELHRGEITLKAKRGQSFRAETFMGIMRWEVLDRLKASHPKLEVQNTYGYRTKHARIVNGIAKSHCADAFCIAGNLGAERLGEFLFQKQTRRNNRQIHKLSILKGGIRKRNQVPFEVKGFRLFDKVACKGEEGFIFGRRSSGFFDVRKLDGTRISAGISYKKLHLLEKRQTYITEIRKEKALPPLPEGRGLRA

SEQ ID NO: 17664 - protein, 428 aa, unidentified
LKVFVLNMRGQPLMPCSPAKARHLLKAGKAVVKRRTPFTIQLRIATGETKQNVTLGVDAGAKHVGLSATTEKEEVFASEVELRQDITGLLAARLSLRRDRRHRKTRYRAPRFLNRVRSKHKGWLAPSVENRIQAHMSRIDAICGLLPVTKIVIETASFDIQKIKDPSVEGTDYQQSDQLGFWNVREYVLFRDGHVCQHCHGRSKDKILNVHHLESRQTGGDAPNNLITLCETCHKAYHAGKIKLKVKRGQSFRAEAFMGIMRWTLLDRVRKAHPGLPVENTYGYLTKHTRITHGLPKTHCVDAYCIAGNLKAVRRGVHLYQRQVRKHNRQIHKCTVLSKTLKDGTKIGYRKLNQTPHLVKNFRLFDKVRCLGKTGFIFGRRSSGYFDVRRLDGVKLSSGISYRKLTLLEKRSTYLTELRKEDGASSPV

SEQ ID NO: 17665 - protein, 420 aa, unidentified; identical to SEQ ID NO: 14483

SEQ ID NO: 17666 - protein, 431 aa, unidentified
  source 1..431: note = Methanobacteriaceae archaeon
MVYVLDIDGQPLMPTARHGKVRKLLNSHLAKVVKRCPFTIQLLYQSTKEIQPVSLGVDAGSKHIGLAATTEKKVVYQEELIPRNDVVKLLSARRVLRRSRRNRKTRYRKARFNNRVRSKHKGWLAPSVEVKIQEHITAIKNVCKILPVSEIHVETAEFDLQRLKAMEEGKPLPVGTDYQLGEQYDFYNTRQYVLHRDGYICQCCGTHDNDVKLHVHHIESRQTGGNAPNNLITLCEHCHKALHEGKIELPKGKKRGKSYRDAAFMGIMRNTLLERLKKEMDIPVIMTYGYITKCCREKAGLEKSHINDAICISKHPYAKPLDTYYLTKAVRHHNRQIHKANFSKGGIRKRNQTPYLVKGFRLFDRVLYQGKSYFIFGRRATGYFDIRTLDGIKVNKGSVSYKKLRIQDTAKAYLKEVRAIPHMNEFTCVLA

SEQ ID NO: 17667 - protein, 424 aa, unidentified; identical to SEQ ID NO: 8578

SEQ ID NO: 17668 - protein, 442 aa, unidentified; identical to SEQ ID NO: 11369

SEQ ID NO: 17669 - protein, 431 aa, Calothrix sp.
MEGLMSKIFVLDTNKKPLDPIHPAQARQLLRNKKAAIFRRFPFTIILKESRPNVEVSPLRLKVDPGAKYTGIALVNDSTGEVVFAAELKHRGFAIRDALTSRRQLRRGRRARKTRYRKPRFLNRTRPDGWLAPSLQSRIENIKTWVNKLCRFAPIVAISQELVRFDMQLMSNPDIQGKEYQQGTLAGYETREYLLEKLRRQCAYCGVKDVPLQVEHIHPRAKGGSNSITNLTLSCEKCNTKKGTKEIKEFLKKDPSRLEKILKQAKRPLADAAAVNTTRFALLRVLKATGLPVETASGGLTKFNRNQQTLEKTHWIDAACIGKSTPILNIKGVKPLLITANGHGSRQSCRTDKYGFPSRYVPRFKFVKGFQTGDIVKAVVTSGKKIGEYVGRVAVRTTGSFNISTSNELVQGISYKYCKAIHKKDGFAYSN

SEQ ID NO: 17670 - protein, 429 aa, Yangia sp.
MSNYVFVLDDGRRPLSPTSPARARQLLRDGKAAVFRRYPFTIILKRKVPDAKPAPVEVKIDPGSKTTGLALVQGGKVIWGGELTHRGHQIRERLQTRRERRRGRRNKLRYRKPRYMTKAQRNNADRKRGKGWLAPSLMHRVETIVTWTNKFRRYAPVGSISMELVRFDMQQMQNPEVSGVEYHQGELAGLEVKEYLLAKWDRKCAYCAAENRPLEVEHIQPRSRGGSNRVSNLTLACTKCNQKKGNRPVEEFLSGKTDLLARIMKQAKAPLRDAASVNSTRWYLFNALKKTGLPVTVGTGGRTKFNRKRLGWPKAHWLDAAAVGSVDTLTLRTDNPLLIEAKGHGGRQKGVFDKHGQPRRNKEGNVQIRPLKPIHGWRSGDIAKARGLMGRISPRTTGSFEIRAAGQKPRSFPAREFEAVHRNDGYGYQ

SEQ ID NO: 17671 - protein, 424 aa, unidentified
MRVFVFNMRGRPLMPCSQRKARLLLRENKAMIYKYHPFTIQLTYTTGETKQDCHIGIDTGSKYIGAAVRSEDKVFWKGEIELRQDIRSNLDTKRIYRRNRRNRKTRYRKPRFLNRKRRDEWLPPSLQSRINHTFHWIDTLSSLVPNPILHIEVGKFDVAKMINPEIHGVDYQHGQTYGFFDERYFVFARDNYTCQCCGKSKNKILNTHHIIYRSNGGTNRVDNLITVCTDCHTLQNHRKGGIFYQWQEQHKKVKQYKEPPFMNTLRKRIFVAYPDAEITYGSETTPKRKAMKLDKTHYNDAIVISGINEIKENPEEWLLIKQFRKKKRSLHEATARKGRKKPNRNQTRNSKNTPYYKGFYLNDKVSVFGKSGYITGFTSNAAYIKDENNDYITLPNKTYKQVSINKMELECHNNNWQYIIKNAV

SEQ ID NO: 17672 - protein, 436 aa, unidentified
VQHPRVAAKGETMRVFVKNMRGEPLMPCTQRKARLLLKAGKARICKYHPFTIQLDYATGETKQDCTIGIDTGSKNIGIAVRSEDKVLFKGEVELRQDVKSNLDTRRIYRRSRRNRKTRYRKPRFLNRKRPDTWLPPSLENRIRHTFRWIDVFCLLVPSPCLHIEVGKFDTAKMIDPKIQGVDYQHGQTYGYYDVRYFVFARDHYTCQVCGKSRDKILQTHHIRYRSNGGTDRADNLITVCTDCHTGRNHQKDGILYQWQEENKKVRSYKEPPFMNILRQRIFQRYPYAHITYGSETAQRRKKLCLGKTHYNDAIAISGIQTITEDPEEWLLIRQSRKKKRSLHEANPRKGRKKPNRTQERSSKNTPSYRNLYLNDKVSVLGRTGYISGFTNGGCYVKDTDGQYITLPGKTYKQVGIANVHRICHNNNWQYITKRAL

SEQ ID NO: 17673 - protein, 465 aa, unidentified; identical to SEQ ID NO: 3856

SEQ ID NO: 17674 - protein, 308 aa, unidentified
MRAKKWLPPSLQNRINHTFNWIDKFSALVPDPILHIEVGKFNTAKMINPDINGVDYQYGQTYGFFDERYFVFARDNYTCQVCGKSKGKILQTHHIIYRSNGGTDRVDNLITVCTDCHTSANHKKGGILYKWQAEHKKVKQYKEPPFMNVLRRRIFDKYPDAIITYGSETTPKRKEIGLEKTHYNDAIVISGIKAIKENPNEWLLIKQFRKKKRSLHEATARKGRKEPNRTQKRNSKNMPYYKGFWLNDKVFVLDQVGYITGFASYSAYIKNKNDEYITLPSKSYKQVGIASLKLLSHNNNWQYIRNAV

SEQ ID NO: 17675 - protein, 416 aa, unidentified; identical to SEQ ID NO: 4039

SEQ ID NO: 17676 - protein, 419 aa, Aneurinibacillus sp.; identical to SEQ ID NO: 4563

SEQ ID NO: 17677 - protein, 459 aa, Burkholderia sp.; identical to SEQ ID NO: 10761

SEQ ID NO: 17678 - protein, 408 aa, unidentified
MVFVLDRHHKPLMPCHPARARRLLGKGRARIHKLYPFTIRLVDRELKDSTVQPVVLKLDPGSKETGMALVREDETKTHHALYFVNLKHRGSEIKQSLLQRSSFRRSRRSRNLHYRAPRFLNRTRPQGWLAPSLQHRVDTTLSWVERLRKLAPVATLEMELVKFDTQKMQNPEIDGVAYQQGELAGFEVREYLLEKFGRKCIYCGAEGVPLNIDHIVPKSAGGSNRVSNLVLACVDCNQKKNNLPLEVFLKGDKAKINRIRSQLKTPLKDAASVNTTRWQLFEALKLTGQPLTTATGARTKYNRHQFGVPKEHWLDALCVGETAAVRGWQPLGVLVVKCTGRGAYKRTRLTKDGFPRGYLTRTKRFFGFGTGDMVVATVFASKKKGLLQRKSCSPQERQFCYSNCKQES

SEQ ID NO: 17679 - protein, 465 aa, Leptospirillum sp.
VQRKVRRRIRAGFCARQEKEAPDALPPGPGSGAFARGTGGGSQDRPVHHPAEGPDRGRNPAHSGQTRSRIEDHRARRGPGGRDGRGEDRPVLFQAEIHHRGSAIKKKLDQRRAFRRRRRSQLRYRTPRFDNRTRPDGWLPPSLRHRVDTTLAWVERLRRLVPVSELSQELVRFDMQKIENPEISGVEYQQGTLAGYEVREYLLEKWGGTCAYCGSENVPLEIDHIHPRSLGGSDRVSNLTLACRSCNLKKGNRPVGEFLAKTPERLSTILARAKAPLKDAAAVNATRLALFQALKATGLPVETASGGRTKWNRTRLVLPKTHALDAACVGKVDRIEGWNRPCLSVKATGRGSYRRTRLDAFGFPRGSLTRTKAHFGFQTGDRVMAIVTKGKKTGTYAGRVAVRSSGSFNIQTGSGVVQGISCKDCRLLQRADGYGYSIHPITEKGEAGEALSLPGMNAGVSRARG

SEQ ID NO: 17680 - protein, 450 aa, Clostridium sp.
MVYVINFEGKPLMPTTNAKARKLLKQKKATVKRVNPFIIQLLYKTDTEYIQTITLGIDSGYLNIGFSAITDSKELIVGEVKLLQGIKDRLLEKSQYRRIRRQRLRYRKPRWNNRKIRQGWLAPSLQHKLDTHVKFIDYLNTILPIRNIVLEVANFDIQKIKNPDISGVEYQQGEQMGFWNVREYVLHRDGHKCQNPNCKNKSKEQILEIHHIKYKSEGGSDAPSNLITLCNKCHTSPNHKKGKFLYDWCENGKKVRGFRDATFMSMIRWYLLEQLKEKYTNIKATYGYLTKNHRIEHGIEKSHFNDAFAIAKGVNQVRNLEIFKVEQSRLNNRSIEKFYDAKYIDNRTGEKVSASELNCGRRTRNKNLNSENLRVFRGQKISKGQRRIRKKKSLYQPNDLIKYESKVYTVKGSQNEGKYIALKEIKKVPNVKLIKPYIFKKGLNWSHGLC

SEQ ID NO: 17681 - protein, 420 aa, unidentified
MQYVYVLSKHGEPMMPCSPGKVRLLLKQQKACVVRRTPFTIKLLYGSAGYKQPITLGVDAGSKHVGLSASTEKRELYREEFAPRNDVVELLSTRRQNRRSRRNRKTRYRAPRFDNRVHSKHKGWLAPSVEVKIQEHITIIKRICKILPISLVRVETAEFDTQRLKAMLAGKPLPVGTDYQLGEMYDEYNVRQYVLKRDNYTCQCCGAHTTAKKLVKLHVHHLESRKTGGNAPSNLVTLCTTCHKNLHKGKVTLDGKERGKPLRDAAFMGIMRKTLMARLKKELPIPVQGTYGYITKMRREQNDIKKSHTNDARCISKHPLAEPCSVCYRTKAIRHHNRQTHKANFSKKGIRKRSQMPYLVEGYRLWDKVLYKEQECFVSGRRSSGSFTLKKLDGTSVSKGVTFKKLRLLEPATNYLIERM

SEQ ID NO: 17682 - protein, 323 aa, unidentified
TRYRAPRFDNRIRTKRKGWLAPSVENRINAHLSRIETVIRLLPVTKISVETTSFDMQLLKNSDIAGKEYQEGEQLGFWNVREYVLFRDGHVCQHCHGRSKDPVLNVHHLESRRTGGDSPGNLITLCETCHKALHRGEITLKAKRGQSFRAETFMGIMRWEVLDRLKASHPKLEVQNTYGYRTKHARISNGIAKSHCADAFCIAGNLGAERLGEFFFQKQTRRNNRQIHKLSILKGGIRKRNQAPFEVNGFRLFDKVACKGEEGFIFGRRSSGYFDVRKLDGTHISAGISYKKLRLLEKRQTYLTEIRKEEALPPLPEGRGLRA

SEQ ID NO: 17683 - protein, 470 aa, unidentified
MSVFVVGLNGCRLMPVSERKARLLLKGGKASIYRKVPFTIKLNYKTGSTVQPGYLGIDTGSQHIGVSVVQKDGTVLHKEEIGLRDSMSKRKLLESRASSRRGRRYRKTRYRHPKWKPKTKRTYNEKADRKGRHWKKQKNTFTSKRQAGWLPPSLQSKTDHHIQWIRKLLDLLPEGYRLSIELGRFDPARMKDPEIHGELYQKGPQYDYENVRAYVLDRDRYTCQICKKKGGKLHVHHILYRSHGATDDPQYMVTVCSDCHSAQNHLPGGILYQWMQEQKRFSRGLRDATFMNILRKRLIRAFPEAVFTYGNVTKVDREKLKLPKSHGNDATAIALVKTGITAVKDKESVICIQQVRRKKRSLHEETPRKGRKEPNRTAARNNKNTKAVTVTKRQNKKKVSMTGCLFDRVELNGKKGWISGFTGKSCYVKDADDQYLSTSPKYKQVSLSKLRILHHCGNWIIGAKKTLGKG

SEQ ID NO: 17684 - protein, 428 aa, unidentified; identical to SEQ ID NO: 14557

SEQ ID NO: 17685 - protein, 494 aa, unidentified
MTMVYVQNKDGKPLMPTTRYCYVRLLLKEKKARVVCTTPFTIRLNYDTPDITQDLILGIDPGRTNIGVAVVKEDGQCVFSAHLETRNKDVPLLMKKRAAFRRNHCTLDRRRKRQRRAKAAGTTIADGSAERLLPGYEKPIVCHYIRNKKARFNNRKCPQGWLTPTANHLLQTHINLIAKVAKFLPITKVVVELNRFAFMAMDNPNIRRWEYQQGSLYGLGSVEDAVYAQQDGHCLFCKKPIDHYHHVVPRRKNGSETLANRCGLCAKHHALVHTDKAWAGKLVTQKEGMNKKYHALSVLNQIIPSLMEYLGDEMLYDVYATDGRSTKGFRIAKNLPKEHYTDAYCIACSILDTNIKVSAPVEPFELKQFRRHDRQACHQQRVDRKYYLDGKQVATNRHKAIEQKSNSLEEFRETYGDAAVSQLTVKPHPPQYKDMTRIMPGAVMNFCGAVGILLGSDGFHNGKPDYYKSTKEEKVRMRRCALLAQNAGMVFIPA

SEQ ID NO: 17686 - protein, 414 aa, unidentified; identical to SEQ ID NO: 8369

SEQ ID NO: 17687 - protein, 423 aa, Oscillatoria sp.; identical to SEQ ID NO: 5009

SEQ ID NO: 17688 - protein, 420 aa, unidentified; identical to SEQ ID NO: 7764

SEQ ID NO: 17689 - protein, 424 aa, unidentified; identical to SEQ ID NO: 3232

SEQ ID NO: 17690 - protein, 442 aa, unidentified; identical to SEQ ID NO: 3234

SEQ ID NO: 17691 - protein, 456 aa, Idiomarina sp.; identical to SEQ ID NO: 2773

SEQ ID NO: 17692 - protein, 422 aa, Methanosarcina sp.
  VARIANT 422: note = X can be any naturally occurring amino acid
MLVFVINQNKKPLMPCKPSKARKLLQAGKAKVVRNTPFTIKLLFRSSGYTQPVTAGMDTGSKVVGCAAIANGKVLYQSEIYLRENVSKKMEQRKMYRRTRRSRKTRYRPARFDNRGNSKKEGRLAPSIRSKLEAHFREKRFVESLLPVTEWKVELASFDIHKITNPEVSGIGYQEGDLKGFYNIKAYVLDRDGYTCQHCRGKSKDSRLHCHHIVFRSQKGTDAPENLITLCETCHKALHNGEFKLSGKKSKTKHATEVGIIKSQIRKSGWNFAETFGYETKYRREQVLKLLKTHYFDAVAICCRDEQKVEVEESVFLKRNVSKGDYQQRTGKRSEKKIHTGKLFNLRKFDLVKTSKGIGFVKGKRSSGFFAISDMFGNKISDSVNVKKICERLRARTSTLIQQSRTGKFTHSSPELKTQGFX

SEQ ID NO: 17693 - protein, 407 aa, Succinivibrio sp.; identical to SEQ ID NO: 14790

SEQ ID NO: 17694 - protein, 432 aa, unidentified; identical to SEQ ID NO: 6070

SEQ ID NO: 17695 - protein, 431 aa, unidentified
MDAWDIIVVLNKRGKPLMPCSPAKARHLLKEKKAAVVRRTPFTIQLTIATGESKQPVSLGVDAGYKHVGLSASTEKAELYASEVELRQDITDLLSARRALRQSRRNRKTRYRAPRFDNRIRTKRKGWLAPSVENRINAHLSRIETVIRLLPVTKISVETTSFDMQLLKNSDIAGKEYQEGEQLGFWNVREYVLFRDGHVCQHCHGRSKDPVLNVHHLESRRTGGDSPGNLITLCETCHKALHRGEITLKAKRGQSFRAETFMGIMRWEVLDRLKASHPKLEVQNTYGYRTKHARISNGIAKSHCADAFCIAGNLGAERLGEFLFQKQTRRNNRQIHKLSIPKGGIRKRNQVPFEVKGFRLFDKVACKGEEGFIFGRRSSGYFDVRKLDGTHISAGISYKKLRLLEKRQTYLTEIRKEEALPPLPEGRGLRA

SEQ ID NO: 17696 - protein, 301 aa, unidentified
LYIKMTSCTCTVFPAYNYAKASSSQGKHNLLLRQERLIVKEVAYMSTVYVLNKDGKPLMPTTRCGHVRHLLKEQKARVVTSKPFTIQLLYEADDVVQSLCLGIDPGRTNIGVAAVKADGTAVFTAHLETRNKEIPKLMKKRKESRRARRTNGRRCRRQRRAKANGTISKKCVKNDTAQNGSVSKRAKEIGVIKRHLPGCEKDVLCIGIKNKEAKFSNRTRPEGWLTPTANQLLQTHINLVKKIQKFLPISDVVLEINKFAFMRLDNPNVQKWQYQQGPLYQKANLEETVSEMQEHHCLFCK

SEQ ID NO: 17697 - protein, 478 aa, unidentified
GTVSFPALCNNIKEALMSVLVIGQNGRALMPTTTRKARILLKENKASVVCRHPFTIHLRYKTGCATQEGSIGIDTGSQHIGVGVTCGNKVILKDEHELRSSMEKRSLMETRATMRRGRRYRKVRYRKPKWRHHTKRMYFEKANRKGQHWRKVKTTTQSPRPESWLPPSLQSKCDHHFRIIDRYLKCLPDSITKNLVIEVGRFDMARMNDPTIHGEMYQRGPMYDTENLRAYIFARDGYKCACCKAKAGSIRKKDGTSVKLIAHHIQFRSRGATDNPKYMISVCDHCHTTKAHQPGGILYSWMEKNKKVTRGLRDATFMNILRRRLFDRFPQAAFTYGNITAVDRKRLLLPKSHANDAVAISLFGKDVSVINATCQTLRYKQVRKSKRSLHEATPRKGRKEPNTKAIRNKKNTTHVNGFKLWDSVLANGQKLFICGFTGSSAYLVDQDGHYVSPPGKTYKQWTLSNLSRLHPNGNWLMA

SEQ ID NO: 17698 - protein, 451 aa, unidentified; identical to SEQ ID NO: 3061

SEQ ID NO: 17699 - protein, 423 aa, unidentified; identical to SEQ ID NO: 3951

SEQ ID NO: 17700 - protein, 465 aa, unidentified
MSTCVCVLSNNGERLMPTFRLGKVRRLLKDGKAKIVKPHPFTIQLLYDSKTNKQPIEICEDVGYNYIGISVKSESHEYVSAQYDTLQDEKEHHDDCRKMRRARRNRLRYRKPRFDNRKRDEGWLAPSLEHKKQLNISLIERYVSVIPITHATVEVGSFDTMLLQSIQKGEAKPEGADYQKGPRYNLATLREAVFYRDNYTCQVCGRKVADGAILHMHHMFYWKGRHGDSLNELLTVCEKCHTPANHQKGGKLYGFGENVKFADLSGAAFMNTVRWQIVNELYAAFGKDFVTVTYGAMTKEKRIALRLEKSHNNDAYAMGEFHPNCRCTFEHYEKVRRNNRILEKFYDSRYIDIRTGEIATGKELFNGRINRNHKKDSENLHRYRGKRTYAGHRALLRKKVNLNPGDLVSLNGEVLVVHSTHTNKKGAVNVEFKTPGKSGQKSASLKKLKIVKAADSMHSAWEKIS

SEQ ID NO: 17701 - protein, 499 aa, unidentified
MLNISEQTDLGVLPQPRALEPALEDNPGVGTKLGAGEQTGVQHGRGERLSSHSASHGNAESSAVPVARGNACVFVLDKNGRPLSPTSPARARILLKKGRARVVRNTPFVIRLVDRLAKDSTVTPVDVGVDPGSRFTGISMFTTTRNGRVGLFSIEIQHRGNQIHKRMQQRANYRRRRRSKNLRYRAPRFNNRSRPAGWLPPSLQHRVDTVSSWVRRLQRWAPVEQVWFESTRFDTHLLSDPNVFGDGYQNGTLAGTEIREYLLAKWDHQCAYCDATNVPLNLDHVVPKARGGSDRVSNLVVACIPCSQRKDKQQVEEFLAHDPARLRRIKAQLKAPLRDAAAVQSTRNALLRASNALNVTVRTSTGGRTKWNRTRNNLPKTHTLDAICVGVFDRVSRVPIMVLVVKASGRGRYARTTPNKYGFPRHLSPRVKTVHGFQTGDHVKAIIPTGKHAGTYVGRVAVRTRGWFKINGVEVHHKRVTLLQRADGYGYSTRTEEIS

SEQ ID NO: 17702 - protein, 451 aa, unidentified
MSVAVISKTGERLMPTSEYRARKLLKSGKAVKHSYHPFTIQLTERKTGDVQPIELCMDTGYIHIGISVKSEKHEYLAEQIDTLTDERIRHDACRMYRRQRRGRKRYRKPRFNNRKRDKGWIAPSLKHKKDIHVQAISRINKVMPLTDITMEMGNFDTQVLKAKEEGKPLPQGACYRHGERYGTATLREAVFSRDGYKCQCCGRTIRDGAMLHVHHVKYRSQGGTNSMANLATVCDKCHTPKNHKPGGKLYNWKPKLPDFKGATFMTTIRWQLYNEVKSLFPDINVHITYGAATKEQRRELNIDKSHVNDAFAMGKFHPKHRANAVLYKKKRRNNRCLEKFYDAKYIDSRDGSKKTGQELFNGRINRNHKKDSENLHQYRLQKIKAGKRTIRKQHYSIQPHDIIMYKNRKRETSGCHCNGTRVVLLPDKKTAAIQKVKIYKYAGGYFKSAFN

SEQ ID NO: 17703 - protein, 422 aa, unidentified; identical to SEQ ID NO: 13732

SEQ ID NO: 17704 - protein, 496 aa, Oribacterium sp.; identical to SEQ ID NO: 14972

SEQ ID NO: 17705 - protein, 421 aa, unidentified
MRGQPLMPCSPAKARHLLKAGKAMVRRRTPFTIQLRIATGETKQSVTLGVDAGAKHVGLSATMEKEEVFASEVELRQDITGLLAARLSLRRERRHRKTRYRAPRFLNRVRSKHKGWLAPSVENRIQAHMSRIDAVCKLLPVTKIVIETASFDIQKIRNPTVEGTDYQQGNQLGFWNVREYVLFRDGHVCQHCHGHSKDKILNVHHLESRQTGGDAPNNLITLCETCHKAYHAGKIKLKVKRAQSFRAETFMGIMRWTLLDRVRKAHPGLPVENTYGYLTKNTRITLELPKTHCVDAYCIAGNFKAVRRGVYLYQRQVRKHNRQIHKCTVLSKTLKDGTKIGYRKLNQTPHLVKNFRLFDKVRCLEQTGFIFGRRSSGYFDVRRLDGVKLSSGISYRKLTLLEKRSTYLTELRNEDGASSPV

SEQ ID NO: 17706 - protein, 516 aa, unidentified
MTVLEELLSKTEYVYVLGTDGKPQMPSKRKRHILKLLNTGKARIVEKMPFTVQLKYKSTPILQPITLAEDPGRTNIGTAALSQLGDLIFSAVVETRNKEIKKLMSDRKAHRQASRRGERKARQRLAKKYNTMIKAGMIMRKLPQYAADKFVTCKFIRNTEARFCNRKRCQDWLTPTVNHLVQTHLNVVKKINKYLPITDIAIEVNRFAFIQMKNPDASGVDFQNGPLKGFDDIKAAIREQQHGKCLMCKNDIEHFHHIIQRSKGGSDTIKNLAGLCKKCHAKVHTDAEFQAKLKDKKEGLIKKYGALSALNQAVPFICKELLKIYGAEHVYFCTGKDTSLIRSSLGYEKTKENQMHEIDAYCIGLAALGVNHVKELPESINTYKIKQFRRQDRSAIHHQTERSYYLGKQKIATNRKPRFEQSGDALSDWYEKQVQRYGKREADKMLSAVTVKKSTRFYNVSNRLMPGTVFDYNGQRYVMSGQLTGGKYLREYGDTKTNYPVLKCRVLRKNEGLVFI

SEQ ID NO: 17707 - protein, 414 aa, unidentified; identical to SEQ ID NO: 2588

SEQ ID NO: 17708 - protein, 437 aa, unidentified
MVFVLSSDQQPLDPCHPARARQLLRRGRARLVRRFPATIQLLDRTAAQSTTHGLRLKIDPGSRTTGLALVAEPTAPVVWAAELTHRSAAIRDALLARRGHRRQRRQRHTRYRPARFNNRRRPAGWLAPSLRSRVDHILTWLRRLRGVCPLTAISVELVRFDTQALVNPEITGVEYQQGELVGYEVREYLLEKWQRTCAYCGATGVPLQVEHLVPRSRRGSDRVSNLTLACEPCNQRKGSQTAAEYGFPQLMALAQRPLRDAAAVNSTRWALYASLQATGLPVEAGTGGRTKYNRTRLGWVKTHWQDAAAVGASTPERLRIVTPQVLQITATGRGLHSRTKLDKYGFPRLRLPRQKRFFGYQTGDMVEAIVTTGTKQGRYHPEGTRRVAVRASGSFNVTTAMGTVQGLHHRFFRLVQRADGYRYASQPTSRLLDPLTS

SEQ ID NO: 17709 - protein, 466 aa, unidentified; identical to SEQ ID NO: 14539

SEQ ID NO: 17710 - protein, 421 aa, unidentified
MNVVYVLSPDRVPLMPCSCAIARLLLKQGKAKVVRRTPFTIKMYTQPVDTHTQPLTLGIDTGSAVIGSAVSDECGNILYVSEGEVRNDIAQTMKNRATSRRNRRYRKTRYRPARWLNRRNSLKTGRFSPTMTSKTEAHLREIRFVQSLLPIQSIVLETGTFNPHALKHPAVLQNKWMYQKGINYGLANTKAYVLTRDGYVCQRCKGQSKDRRLEVHHIVFRSQQGSDEEANLLTLCKTCHEGLHAGTVTLKQKGKRKGNLLHATQMNSIRIQLLSRVEAIETWGFVTKEHRLLAGLPKEHIFDAAMIATRGNIPVFQTTEVLLKKCISDGDYQQTKGKHSQQRIPTGKIAGFRKFDKVRYLGVEYFIKGRMSTGYAILMDLSGNKLALKPTPKFDNMKRVSARSSWIINQKALPSFSSSPT

SEQ ID NO: 17711 - protein, 408 aa, unidentified; identical to SEQ ID NO: 8155

SEQ ID NO: 17712 - protein, 430 aa, unidentified
MPNKVYVINKHGRPLMPCSPAKARHLLDDGKAKVKKRTPFTIQLVYGSSGYTQEVILGVDAGSKTIGVSASTKKEELFAANVIPRNDVVDLLSTRREFRRARRNRKTRYRKPRFDNRVRSKHKGWLAPSVEVKIQEHITSIKRVCRILPVSKVVIETAEFDLQLLKAIEEGKPVPQGEDYQQGEMYGHYNVRQYVLWRDDYTCQCCGAHATKKKEVRLHVHHLESRKTGGDAPRNLITLCDSCHKKHHDGLITEDDFKKRKRRSTRDATFMGIMRKTLIQRLRAELTIPVAETRGYITKATREKLLVLPKSHTNDALAIAQGKRGFNVGYLPGIIQTDKIYTIRPVRHHNRQLHKATILKGGIRKSNQAEKYVFGYRLFDKVQFNGQDCFIWGRTTGIFTIKTINGKMIKDGISFKKLKLVEKSTSYLIA

SEQ ID NO: 17713 - protein, 457 aa, unidentified
VWLTQTTCDIGEGFQLSAKRERLLFSRQIFKKEHGIMQYVYVLNKHGKPLMPCSPGKARLLLKEGKARVVKRTPFVIKLLHGSAGYKQPVALGVDAGSRHVGLSACTEGRELYKEELSPRNDVVELLSVRRQYRRSRRNRKTRYRAPRFNNRVHSKHKGWLAPSVEVKIQEHITVIKRVCRILPIVLVRVETAEFDTQRLKAMLEGKPLPVGSDYQLGEMYDEYNVRQYVLKRDNYTCQCCGAHPAEKKPVRLHVHHIESRHVGGNAPNNLITLCAVCHKALHEGKITLGNGKKRGKPLRDAAFMGIMRNTLLARLKDELNIPVKQTYGYITKLLREENHVEKSHTNDARCIAKAPNAKPCDTMFRTRALRHHNRQIHKAKILKGGTRKKNQAPYLVKGFRLWDKVRYNGEECFITGRRTSGYFAIKKYDGTVISNSASYKKLTLLEAATNYITERS

SEQ ID NO: 17714 - protein, 415 aa, unidentified; identical to SEQ ID NO: 2744

SEQ ID NO: 17715 - protein, 283 aa, Parasutterella sp.; identical to SEQ ID NO: 14303

SEQ ID NO: 17716 - protein, 536 aa, unidentified; identical to SEQ ID NO: 4526

SEQ ID NO: 17717 - protein, 442 aa, unidentified; identical to SEQ ID NO: 4522

SEQ ID NO: 17718 - protein, 415 aa, unidentified
MVYVLDKNGQPLMPTDRHRKVRLMLQSGQAKVIKRCPFTIQLNYDSGHQTQEISLGIDAGSKHIGVSATTKIKVLYEADVELRNDIVDLLSSRRELRRGRRNRKTRYRQAKFNNRRRGNGWLAPSIRQKIGTHLTVVENICKILPISRIMVETASFDIQKIKNPDIQGAEYQQGDQLGFWNVREYVLFRDGHTCQCCKGKSKDKILNVHHIESRKTGGNAPNNLITLCEICHTGYHKGAVQLPKTVKRGMRFKDAAFMGIMRWAFYEALKQQYEPVALVHNTYGYITKHTRIEHNLPKEHYVDARCISGNPDAFPSGEYYYQKKVRCHNRQIHKLTILKGGIRKQNQATYLVKGYRLFDKVSYQGKGYFVFGRRQSGFFDIRTLSGEKVNKGSLSCKKLKFIATRTHYLTERRAV

SEQ ID NO: 17719 - protein, 424 aa, unidentified; identical to SEQ ID NO: 3434

SEQ ID NO: 17720 - protein, 521 aa, unidentified; identical to SEQ ID NO: 7054

SEQ ID NO: 17721 - protein, 416 aa, unidentified
MVYVLDKNGQPLMPTDRHRKVRLMLQSGQAKVIKRCPFTIQLNYDSGHQTQEISLGIDAGSKHIGVSATTKIKVLYEVDVELRNDIVDLLSSRRELRRGRRNRKTRYRQAKFNNRRRGNGWLAPSIRQKIGTHLTVVENICKILPISRIMVETASFDIQKIKNPDIQGAEYQQGDQLEFWNVREYVLFRDGHTCQCCKGKSKDKILNVHHIESRKTGGNAPNNLITLCETCHTGYHKGTVQLPKAIKRGMRFKDAAFMGIMRWAFYEALKQQYEPVGTPVHNTYGYITKHTRIAYNLPKEHYVDARCISGNPEASSNGEYYYQKKVRCHNRQIHKLTVLKGGIRKQNQATYLVKGYRLFDKVSYQGKGYFVFGRRQSGFFDIRTLSGEKVNKGSLSCKKLKFIATRTYYLTERRAV

SEQ ID NO: 17722 - protein, 437 aa, Moorena sp.
MRVFALDKNRKPLDPCHPARARILLKQGRAKVLRRYPFTIILGDLDIENCVTHFQQLKIDPGAKTTGLAIVQNHRVVWAAELTHRGFQIRDALTSRRQMRRSRRNRKTRYRQPRFLNRKKPEGWLPPSLMSRVHNILTWVKKLIRFCPIAGCSQELVRFDTQKMQNPKISGTDYQQGTLYGYELREYLLEKWHRTCAYCGATATPLEIEHIKPKSKGGSDRVSNLTIACHSCNQAKGNQEIEQFLSNKPSILKGILSQAKRPLADTAAVNATRWKLYNELKSTGLSVEVGSGGLTKYNRCRQNFPKTHWLDAANVGSVETLYVEDYQPLLITAKGHGTRQICRTDKFGFPKRHCSRIKIHKGFQTGDIAKAIVTKGKKIGTYVGRVATRATGYFNISTNNGLVQGISHRYCQAIHRKDGYSYQFHRASRCYPFSSPL

SEQ ID NO: 17723 - protein, 431 aa, unidentified; identical to SEQ ID NO: 15055

SEQ ID NO: 17724 - protein, 434 aa, Anoxybacillus sp.; identical to SEQ ID NO: 3421

SEQ ID NO: 17725 - protein, 419 aa, unidentified; identical to SEQ ID NO: 5032

SEQ ID NO: 17726 - protein, 512 aa, unidentified; identical to SEQ ID NO: 2990

SEQ ID NO: 17727 - protein, 515 aa, unidentified; identical to SEQ ID NO: 15926

SEQ ID NO: 17728 - protein, 426 aa, Anoxybacillus sp.
MVFVLDTNKRPLAPCHEAVARKLLKQGKAAIYRRFPFTIILKKSVDESEIKATYRLKIDYGSRHTGLAILRGQEVVWLGQLDHRTDIKERIDKRRAFRRARRNRKTRYRKPRFLNRKRKEGWLPSSLESRVQNIQTWVNRLKKLCPIGYISYENAKFDTQLMRNPEINGVEYQQGTLQGYEVREYLLEKFGRKCCYCGKENVPLEVEHIIPKSRGGTDRVDNLCLACHDCNQRKGSKTAEEFGYPHIQKQVKESLKDASAINSTRWKAYEVLKQTGLDVECGTGARTKMNRIRLDLPKTHYFDACCVGESTTNHLYFKTKEVLFIKAKGRGSHSRTNLDRYGFPRGYLARQKFFFGFQTGDMVKAVVPRGKYQGVWFGEVACRKTGSFDIKGKDGKRIAQGINYRYVQVIQRFDGYAYGKGVAELA

SEQ ID NO: 17729 - protein, 512 aa, unidentified; identical to SEQ ID NO: 14331

SEQ ID NO: 17730 - protein, 433 aa, unidentified
MVYVISKNGKPLMPTERHGKVRILLKKKKAKVISRKPFTIRLLYDTKEYTQSAKLGIDSGYKYIGYSAVTKDKELISGEVELLSGQTERLKERAMYRNNRRNRLRHRKPRFNNRKRPKDWLAPSIQHKFDSHIRFINKLKEIVPISEVIIEVANFDTHKLKNFSISGKGYQEGEQQGFYNLREYILHRDGYTCQICGAENVPLEVHHIGYWKKDRSNRPANLMAICTKCHLPKNHQEGGKLWGLKPINKGFKETTFMSMVRWRLVNELGCKHTYGYITKSKRIELGLEKSHANDAFAIAGGENQARANMINFNQVRKNNRSLEKFYDAKYIDTRTGKKVTGKELSSGRKCRNKNFNDKNLRQYRGCKLSKGRRSIRKKRYFYQPSDLVKYNSRIYTVKGTQNKGKYVALKEIKKVPKVDLVEPYEFRSGFVAI

SEQ ID NO: 17731 - protein, 419 aa, unidentified; identical to SEQ ID NO: 3670

SEQ ID NO: 17732 - protein, 403 aa, unidentified
RCRRQRRAKANGTISKKCVKQDTAQSKNPSKRAKEIGIIKRRLPGYKKDVLCIGIKNKEAKYTNRTRPEGWLTPTANQLLQTHINLVRKMQKFLPISDVVLEVNKFAFMRLDNPDIQKWQYQQGPLYQKGSLENAVSEMQEHHCLFCDKPIDHYHHVVPQSENGSNTIANIVGLCAEHHNLVHKDAAWQKKLAEEKVGLNKKYGALSVLNQIIPALTNKLSVLFPKHFFVTAGKSTHDYRAAHGVSKDHWLDAYCIACSVLPSNVCDSNINNHMPYELKQFRRHDRRVLNNENMNRVYTLDNKAVAINRHKATEQEAASLEEFRKEHPNDVCKLKVKEHHPTYRNMNRNYPGSIFLVGKHVHIMQGIAGSKDGKATTYKDFNANSITASKCKFVAKNSGILFV

SEQ ID NO: 17733 - protein, 413 aa, unidentified; identical to SEQ ID NO: 3695

SEQ ID NO: 17734 - protein, 408 aa, unidentified; identical to SEQ ID NO: 13717

SEQ ID NO: 17735 - protein, 446 aa, Pseudomonas sp.; identical to SEQ ID NO: 10242

SEQ ID NO: 17736 - protein, 347 aa, unidentified
LPIYRKEHDIMQYVYVLNKHGEPLMPCSPGKARLLLKQQKAHVIKRTPFTIKLLYGSTGYKQPITLGVDAGSKHVGLSASTEKRELYREEFTPRNDVVDLLSTRKQNRRSRRNRKTRYRPPRFDNRVHSKHKGWLAPSVEVKIQEHITVIKRICRILPITLVRVETAEFDTQRLKAMLEGKPLPVGTDYQLGEMYDEYNVRQYVLKRDNYTCQCCGAHTTAKKAVKLHVHHLESRKMGGNAPGNLITLCITCHDALHKGKVSLDNKKRGKPMRDAAFMGIMRRTLMSRLREELPITVQGTYGYITKMQREQNDIKKSHVNDARCISKHPLAEPCSVCYRTKAIRHHN

SEQ ID NO: 17737 - protein, 422 aa, unidentified; identical to SEQ ID NO: 6184

SEQ ID NO: 17738 - protein, 456 aa, unidentified
MSTCVCVLSNSGERLMPTFRLGKVRRLLKDGKAKIVKHHPFTIQLLYDSKTNTQPIEICEDVGYNYIGISVKSESHEYVSAQYDTLQDEKEHHDDCRKYRRTRRNRLRYRKPRFDNRKRSEGWLAPSLEHKKQLNIRLIERYVSVIPITRATVEVGSFDTMLLQAIQKGESKPEGVDYQKGPRYNLATLREAVFYRDNYTCQVCGRKIADGAILHMHHMFYWKGRHGYQLDELVTVCEKCHTPANHQKGGKLFGFGENKEFANLSGAAFMNAVRWQIVNALYATYGKEFVTITYGAMTKEKRIILGIEKTHNNDAYAMGDYHPAHRCVFRHYQKRRRNNRVLEKFYDATYIDARTGNKAKGKELFNGRINRNHKKDSENFHKYRSKKVSKGRRSIRRQRYAIQPYDTVRLEGKTYITSGCHNKGTRLLIPANGKSKSVAISKVQVVCHAGAWIQII

SEQ ID NO: 17739 - protein, 519 aa, unidentified
MPEFIYILGMDGKPQMPTTRRRHVQKLLNTGRARIAEHVPFTIQLLYKNDPILQPVMLAEDPGRTNIGLTVLSLKGDLLLSAVTETRNKEITKLIDKRRACRRTSRNGERKARQRRAKRFGTTLKAGMLMRKLPKYDTDKFVTCKLIRNTESKFCNRKRPDGWLTPSARQLADTHINLIHKMQKYLPITDVAFEVNRFAFMLLKDPSVSGVDFQNGPLKGFDDLHDAVCELQDGTCLLCNRKIEHYHHIIPKSKNGSDTIDNIAGLCMCCHDKVHKNEKEAQRLQKKKKGLNKKYGALSVLNQAIPFICKRLEEEFGAEHVFYCTGRETAAVRNSFGYQKTKDNQLHEVDAWCIGILALGKIPKTLPDFSYTCRIRQFRRQDRSRIKAQTERTYKLEGKIVAKNRKKRTEQKTDSLEDWYQKQTALYGQKEADRMRSRLTAAKSQRRYNAPSRILPGTVFLYDGKRHVLSGQLTGGKYFRAVGDAKTNYPASKCRIVRKNEGLVFISQVITERVAVSHG

SEQ ID NO: 17740 - protein, 453 aa, unidentified
MSFVFVVDTNRHPLDPVHPGRARLLLKEGKAAVLKRYPCTIVLTTSVEQPQLHPVRLKLDPGSKTTGIALVDDQRGTVLFAAELSHRGAAIKKALDGRRAIRRGRRARKTRYRKPRFDNRRRKAGWLAPSLESRVFNVLTWVGRLRALCPITAISMELVRFDLQQMEHPEIAGMHYQQGTLAGYEVREFLLEKWGRTCSYCGKKDTPLQVEHIAARARGGSDRVSNLCLACEPCNQRKGTQDIAVFLAKKPDLLKKIQAQAKAPLKDAAAVNSTRWTLFKRLEATGLPVECGSGGRTKFNRVSRGLEKAHWLDASCVGASTPEVLQVGQVKPLLIEATGHGRRQMCLSDRYGFPRTSAKKAKKVKNFQTGDLVRAVVTKGKKRGTYTGRVAVRATGSFNITTSQGTVQGIGSQYCQMLHQSDGYRYTVEERAEASAFLSSPCLKAGVSRKELR

SEQ ID NO: 17741 - protein, 411 aa, unidentified; identical to SEQ ID NO: 6244

SEQ ID NO: 17742 - protein, 420 aa, unidentified; identical to SEQ ID NO: 6507

SEQ ID NO: 17743 - protein, 428 aa, unidentified; identical to SEQ ID NO: 2743
  REGION 1..428: note = IscB polypeptide

SEQ ID NO: 17744 - protein, 417 aa, unidentified
MPCSPAKARLLLKERKAIVKRRTPFTIQLTIATGEAKQPVALGVDSGYKHIGLSATTEKAELYASEVELRQDITDLLSARLALRRSRRSRKTRYRAPRFDNRVASKREGWLAPSVENRIVAHMSRVEAVMRVLPVTAITVETAAFDTQLLKNPDITGAAYQQGEQLGFWNVREYVLFRDGHVCQHCSGKSKDPILNVHHIESRRTGGDAPNNLITLCETCHKAFHRGEIKLKVKRGKSFKAETFMGIMRWTLFERLKKAHPELSVRHTHGYLTKHKRISHGIAKSHCADAYCIAGNLGAMRLNSYLFQKQTRKHNRQIHKLSILKGGLRKKNQAPYEVKGFRLFDKVICKDEEAFIFGRRSSGSFDVRRLDGTRISAGISYKKLRLLEPRTTYLTEFRKEAALPPLHKCRGFRAEFL

SEQ ID NO: 17745 - protein, 223 aa, unidentified
MPNKVYIINKHGRPLMPCSPAKARHLLDAGKAKVKKRTPFTIQLIYGSSGYTQEVILGVDAGSKTIGMSVSTTKEELLSAEVKPRNDVVDLLSTRREFRRARRNRKTRYRKPRFDNRVRSKHRGWLAPSVEVKIQEHITSIKRVCRILPVSKVVVETAEFDLQLLKAIADGKPVPQGEDYQKGEMYGHYNVRQYVLWRDNYTCQCCGTHPSKKKEVRLHVHHL

SEQ ID NO: 17746 - protein, 417 aa, unidentified; identical to SEQ ID NO: 11472

SEQ ID NO: 17747 - protein, 535 aa, Streptomyces sp.; identical to SEQ ID NO: 4636

SEQ ID NO: 17748 - protein, 413 aa, unidentified
LKVFVLNMRGKPLMPCSPAKARHMLKAGKAFVVRRTPFTIKLTIATGETKQDVTLGVDAGARHVGISATTEKEEVFASEVALRQDITGLLADRLAFRRARRNRKTRYRAPRFNNRVRSKHKGWLAPSVENRIQAHISRIEAVCRLLPVTKIVIETASFDIQKIRNPEVEGTGYQQGDQLGFWNVREYVLFRDSHICQHCRGRSKDPILNVHHLESRKTGGDAPNNLITLCETCHKAYHAGKIKLKVKRGQSFRAEAFMGIMRWTLLDRVRKTHPKLPVENTYGYLTKHKRIALGLPKTHCADAFCIAGNLKALRRGDFLFQQQTRKHNRQIHKCSILKGGVRKLNQAPFLVKGFRLFDKVRIGGQIGFVFGRRVRGTFNIRRLDKTVIGTDINCKKLSLLETRKTFLTELRKE

SEQ ID NO: 17749 - protein, 421 aa, Clostridium sp.; identical to SEQ ID NO: 4238

SEQ ID NO: 17750 - protein, 427 aa, unidentified
MQNYVFLLNADRTPLDMIHSARARELQSKGKAKVFRQVPYVLILQNQILNPVTKQYSIKIDPGAKWTGFALQCGDEILFRMEMQHRGDTIESNLLRRAGFRRGRRSRNLRYRKKRFNRTKPEGWLAPSLRHRLQTVETWIKRFIRYCPVTCIEIEQVRFDTQKLINPEIDGTEYQQGELMGYEMREYLLQKWGRKCAYCGVENVPLEVEHIHPKSKGGSDRVSNLTLACHTCNQAKGDQDVRDFLSGKPDLLNQILQQVKQPLKDAAAVNSTRFAIVRVAKTLCEKVNCWTGGRTKFNRCSQGLEKSHSIDAACVGASGESIKLKTNQPLIVMCKGHGNRQARRVNASGFPAVHNAKEVFHHVTAGDIVKVFISKDRKKVKAGIYTTRVKTPTKKGCEVLIDGNRISLKNMNDITFVHRNDGYGYGY

SEQ ID NO: 17751 - protein, 418 aa, unidentified; identical to SEQ ID NO: 4950

SEQ ID NO: 17752 - protein, 406 aa, unidentified; identical to SEQ ID NO: 6943

SEQ ID NO: 17753 - protein, 484 aa, unidentified
VKPMQKLRKRNTYTPTDIPHVRSNCDSQLNSPEGRGSAARLKTSLNNPDAALTACEQAGQDLRVPAVYVQSKRGEPLMPTTPRKARRLLKEGRAVVVQRTPFTIRLLFATGEALQPVLLGVDGGYSHIGLSAISEKKELYCGEILLREDIVKLNAERREYRRNRRFRKTWYRKSRFLNRGKAGWIAPSLQNKLHAHLKAIETIGKILPLSQITVEIASFDIQKIQKMDIEGVDYQQGVQWGFANVRAYVLHRDHHTCQHCKGRSKESTLHVHHIESRQTGGDRPDNLITLCSSCHRDYHERNIALKVKRSPGFKAETFMTMIRRRLIDHLRKRKIPVTPTYGYITKEKRENLNMIKSHVNDAFVIAGGTKEKRALMSYFTKQVRKCNRKLFKGDRSHLPNKAPRCIQGFQRFDKVLWMGKECFIFGRRTSGYFDLRLLNGMKIHTSAKMRDLKILESARTFLTEKRRAHSSVSTSLSVSCANFL

SEQ ID NO: 17754 - protein, 406 aa, unidentified; identical to SEQ ID NO: 2752

SEQ ID NO: 17755 - protein, 552 aa, Streptomyces sp.; identical to SEQ ID NO: 12801

SEQ ID NO: 17756 - protein, 535 aa, unidentified; identical to SEQ ID NO: 6116

SEQ ID NO: 17757 - protein, 515 aa, Actinoplanes sp.; identical to SEQ ID NO: 2700

SEQ ID NO: 17758 - protein, 443 aa, Anoxybacillus sp.; identical to SEQ ID NO: 7070

SEQ ID NO: 17759 - protein, 406 aa, unidentified
MVYVQDIDGKPMMPTTRHGKVRRLLKANKATVVNLCPFTIQLTYKSTDHKQPVTLGIDAGAKHIGFSATTEKEELFACETTLRTDIVDLLSMRLQNRRTRRSRLRYRKSRFNNRGSSKKKGWVAPSVKQRIDSHLNEVNEIHKILPITKIVIEVAQFDTQKMKNHDISGADYQNGEQLGFWNVREYVLFRDGHKCSHCKGKSKDPVLNVHHLESRKTGGDSPSNLITLCESCHKAFHKGEIELKKKRGKSLRDAAVMGIMKWKLYEELKSRYDNVSMTFGYITKHNRIKYGIEKNHTSDAFVISRNFNAKRIERQYLKRLIRRHNRQIHKMKILKGGKKKNNQAPFEVFGFRLFDKVLYNNEICFIYGRRKSGNFNIRDFNGENPKDVSHKKFKLIRGKRHPIILK

SEQ ID NO: 17760 - protein, 337 aa, unidentified
SARRALRQSRRNRKTRYRAPRFDNRIRTKRKGWLAPSVENRINAHLSRIEAVLRLLPVTKITVETASFDLQLLKNPDISGKEYQEGEQLGFWNIREYVLCRDGHVCQHCYGRSKDPVLNVHHLESRRTGGDSPGNLVTLCETCHKALHRGEITLKAKRGQSFRAEAFMGIMRWEVQNRLKASHPELEVNNTYGYRTKHARIANDIAKSHCADAFCIAGNLGAERLGEFFFQKQTRRNNRQIHKLSILKGGIRKRNQAPFEVNGFRLFDKVACKGEEGFIFGRRSSGYFDVRKLDGTCISAGISYKKLHLLEKRRTYLTEIRKEKALPPLPGGSGLRA

SEQ ID NO: 17761 - protein, 459 aa, unidentified; identical to SEQ ID NO: 9971
  source 1..459: note = uncultured beta proteobacterium

SEQ ID NO: 17762 - protein, 447 aa, unidentified
VPAYRFKHITKKEAPYMVYVLDIDGQPLMPTSRHGKVRRLLNSHLAKVVKRCPFTIQLLYQSTKETQPVSLGVDAGSRHIGLSATTEREVVYQEELVPRNDVVKLLSARRALRSSRRSRKTRYRKPRFNNRVHSKHKGWLAPSVEVKIQEHITAIKRICQILPISDIHVETAEFDLQRLKAMEEGRPLPVGTDYQLGEQYDFYNTRQYVLHRDEYTCQCCGTHDNNVKLHVHHIESRQTGGDAPNNLITLCEHCHKSIHAGKMMLPKGKKRGKSYRDATFMGIMRKTLLERLKKEIDVPVEGTYGYITKYWREKAGLEKSHINDAICISKHPYARPLETYYLTKAVRHHNRQIHKTKFSKGGIRKRNQAPYLVKGFRLFDKVLYQGESYFIFGRRITGYFDIRTLDGTKVNKGSTSYKKLRIQDTAEAYLTEVRAIPHMNEFTCVLA

SEQ ID NO: 17763 - protein, 439 aa, unidentified
  REGION 1..439: note = IscB polypeptide
MVYVLSIDGKPLMPTNNAKARILLKNKKAKVKTTKPFTIQLLYVTTTYTQPITLGIDPGYSNIGFSAVTDKKELISGTVNLLQDVSKRLAERKMYRNFRRGRLRYRKCKNEKKKGKGWLAPSIVHKLDSHIRFVEKLKKILPITKVILEVANFDIQKINNPDISGKEYQEGNLYGFYNIRQYVFFRDDYKCQNPNCKNTDKQPILQEHHIIFKENGGTDKPDNLITLCTQCHTPENHKKGKFLYLWQTTKPKLQQYKAETYMSIVRWRLVNALVCDCTYGYITKSKRIELGLEKTHYNDAFVIANGSSQTRSIPITYKQVRRNNRELEKFYDAKYIDIRTREKVPANALNNGRRVRNKNKNSVNLRKYRGEKISKGYRALKKKKRYTYQRNDLVKYKGKIYRVLGNQGSTNGVVLEGKKYPSADKLTLYRFGKGFSCLL

SEQ ID NO: 17764 - protein, 453 aa, Lactobacillus sp.; identical to SEQ ID NO: 4050

SEQ ID NO: 17765 - protein, 406 aa, unidentified; identical to SEQ ID NO: 3980

SEQ ID NO: 17766 - protein, 406 aa, unidentified; identical to SEQ ID NO: 10802

SEQ ID NO: 17767 - protein, 451 aa, unidentified; identical to SEQ ID NO: 2436

SEQ ID NO: 17768 - protein, 432 aa, unidentified
MLTGLLAEQVDPAGIRKGDTLKVFVLNMRGKPLMPCSPAKARHMLKAGKAVVARQTPFTIKLTIATGETKQDVTLGVDAGAKHVGISATTEKEEVFASEVELQQDITGLLADRLAFRRSRRNRKTRYRAPRFDNRVRSKHKGWLAPSVENRIQAHISRIEAVCRVLPITKIVIETASFDIQKIKNPEVEGTDYQQGDQLGFWNVREYVLFRDGHVCQHCRGRSKDPILNVHHLESRKTGGDAPNNLITLCETCHKAYHAGKIKLKARRGTSFRAEAFMGIMRRTLLDRVRKAHPELSVENTYGYLTKHKRIALGLPKTHCADAFCIAGNLNALRRGDFLYQRQTRKHNRQIHKCSILKGGVRKLHQAPFLVKGFRLFDKVKCTGRIGIIFGRRSTGSFDVRTLDGTRLSADISSKKLTLLEKRTTFLTQLRK

SEQ ID NO: 17769 - protein, 404 aa, unidentified
MPNKVYVINKHGRPLMPCSPAKARHLLDAGKAKVKKRTPFTIQLVYGSSGYTQEVILGVDAGSKTIGMSASTTKEELLSAEVKPRNDVVDLLSTRREFRRARRNRKTRYRKPRFDNRVRSKHKEWLAPSVEVKIQEHITSIKRVCRILPVSKVVVETAEFDLQLLKAIADGKPVPQGEDYQKGEMYGHYNVRQYVLWRDNYTCQCCGAHATKKKEVRLHVHHLESRKVGGDAPDNQVTLCESCHEKLHKGLIAEKDFKKRKRKSTRDATFMGIMRKTLMQRLCSELPIPVIETRGYITKATREKLLVLPKSHTNDALAIAQGKRGFNVGYLPEIAQIDKIYTIRPVRHHNRQLHKAAILKGGIRKSNQTGKYVLGIVFLTKSNLTDRTASFGEEELPESLPLKR

SEQ ID NO: 17770 - protein, 428 aa, unidentified; identical to SEQ ID NO: 8823

SEQ ID NO: 17771 - protein, 417 aa, unidentified; identical to SEQ ID NO: 15591

SEQ ID NO: 17772 - protein, 398 aa, Desulfobacter sp.; identical to SEQ ID NO: 17607

SEQ ID NO: 17773 - protein, 423 aa, unidentified; identical to SEQ ID NO: 3576

SEQ ID NO: 17774 - protein, 415 aa, Bacillus sp.; identical to SEQ ID NO: 2431

SEQ ID NO: 17775 - protein, 418 aa, unidentified
MSTCVCVLSNSGERLMPTFRLGKVRHLLKDGKAKIVKHHPFTIQLLYDSKTNTQPIEICEDVGYNYIGISVKSQSHEYVSAQYDTLQDEKACHDSCRKYRRTRRNRLRYRKPRFDNRKRSEGWLAPSLEHKKQLNIRLIERYVSVIPITHATVEVGSFDTMLLQAIQKGKSKPEGVDYQKGPRYNLATLREAVFYRDNYTCQVCGRKIADGAILHMHHMFYWKGRHGYQLDELVTACEKCHTPANHQKGGKLFGFGEDKEFANLSGAAFMNTVRWQIVNALYATYGKEFVTITYGAMTKEKRIALQLEKTHNNDAYAMGDYHPACRCKFRHYQKRRRNNRVLEKFYDATYIDARTGNKAKGKELFNGRISRNHKKDSEDLHKYRSKKVSKGRRSIRRQRYAIQPYDTVRLESKSYITK

SEQ ID NO: 17776 - protein, 431 aa, unidentified; identical to SEQ ID NO: 6055

SEQ ID NO: 17777 - protein, 422 aa, unidentified; identical to SEQ ID NO: 5333

SEQ ID NO: 17778 - protein, 457 aa, unidentified; identical to SEQ ID NO: 15699

SEQ ID NO: 17779 - protein, 294 aa, unidentified
LLFYRKEHGIMQYVYVLNKHGEPLMPCSPGKARLLLKQQKACVVRRTPFTIKLLYGSAGYKQPITLGVDAGSKHVGLSASTEKRELYSEEFTPRSDVVKLLSTRKQNRRSRRYRKTRYRAPRFDNRVHSKHKGWLAPSVEVKIQEHITVIKRICKILPISLVRVETAEFDTQRLKAMLAGKPLPVGTDYQLGEMYDEYNVRQYVLKRDHYTCQCCGAHNTAEKVVKLHVHHLESRKTGGNAPSNLVTLCTTCHKNLHKGKVTLDGKERGKPLRDAAFMGIMRKTLMARLKEELP

SEQ ID NO: 17780 - protein, 417 aa, unidentified
MPCSPAKARILLKEKKAVVTRRMPFTIQLTIATGETKQPVTLGVDAGYKHVGLSVCTEKTELFASEVELRQDITDLLAARLQLRRARRNRKTRYRAPRFDNRVRSKHKGWLAPSVENRIDAHLSRIDAVLRILPVSKIIIETAAFDTQLLKNPGIEGEAYQQGEQLGFWNVREYVLFRDGHVCQHCHGKSKDPVLNVHHLESRRTGGDAPNNLITLCKTCHQALHHGEIKLKAKRGASFKAQTFMGIMRWNVLNRLKAMHPEIEIRNTYGYLTKHSRISHGIAKSHCADAYCIAGHLKAKRLDGYYFQKQTRRHNRQIHKLTILKGGLRKKNQAAYEIKGFRLFDKVKVFGEEGFIFGRRASGYFDVRKLDGKRISAGISCKKLTVVEKRKTYLTEYRKEAALPPLNEFRSFRADAL

SEQ ID NO: 17781 - protein, 483 aa, unidentified; identical to SEQ ID NO: 17192

SEQ ID NO: 17782 - protein, 428 aa, unidentified; identical to SEQ ID NO: 5143

SEQ ID NO: 17783 - protein, 467 aa, unidentified; identical to SEQ ID NO: 14958

SEQ ID NO: 17784 - protein, 431 aa, unidentified
MPNKVYVINKHGRPLMPCSPAKARHLLDEGKAKVKKRTPFTIQLVYGSSGYTQEVILGVDAGSKTIGVSASTKKEELFAANVIPRNDVVDLLSTRRESRRARRNRKTRYRKPRFDNRVRSKHKGWLAPSVEVKIQEHITSIKRVCRILPVSKVVVETAEFDLQLLKAIADGKPVPQGEDYQKGEMYGHYNVRQYVLWRDDYTCQCCGAHATKKKEVRLHVHHLESRKVGGDAPDNQVTLCESCHEKLHKGLIAEKDFKKRKRRSTRDATFMGIMRKTLMQRLCSELPIPVVETRGYITKATREKLLVLPKSHTNDALAIAQGKRGFNVGYLPGILQIDKIYTIRPVRHHNRQLHKAAILKGGIRKSNQAGKYVFGYRLFDKVQFNGQDCFIWGRRTTGIFTIKTINGKMIKDGISFKKLKLVEKSTSYLIA

SEQ ID NO: 17785 - protein, 462 aa, unidentified
LKKLSKRNTCTPTDASQVSGNCDRILNREETLSVSGLKTLDNRSEVNQSKHRKQDLRVPVYVLNMRGQPLMPTRAAKAKHLLKMGKAKVVKRTPFTIQLKYATGETKQEIILGIDSAFKTIGYSARTRTAELISGEVILRTDIPDKLKEKMMYRRGRRNRNTQYREPRFLNRSIPKGWFAPSIEHKINSHLELIEKIKKLLPITEIDVEVASFDTQKMQNPEISGIEYQQGELQGYEVREYLLEKFQRKCAYCGKTDIRLEIEHVTPSSKGGSDRVSNLTIACHKCNQKKGNKTAAEFGHPEIEALCKKSLKASAFMNTVRWELVKRLKNLYGKTAVNHTYGYITKKFRIYLGLEKSHVNDAFAISKGTDQERCRPHAVKQNRRNNRSLQLNRKGFKPSIRRERYKFQPHDLVRLNGQAYTVKGIFNYGAWIRLQNDNGKDINSNIKNVELITYGKGLQFGF

SEQ ID NO: 17786 - protein, 512 aa, unidentified
MSTVYVLNKDGKPLMPTTRGGHVRHLLKEQKARVVRAKPFTIQLLYETNDVVQPLYLGIDPGRTNIGVAVVKANGTAVFTAHLETRNKEIPKLMQDRKKARRARRTNGRRCRRQRRAKANGTISKKCVKQTTAQNGSVSKRAKDIGVIKRHLPGCEKEVLCIGIKNKEAKFSNCTRPEGWLTPTANQLLQTHINLVKKIQKFLPISDVVLEINKFAFMRLDNPNVQKWQYQQGPLYQKASLEEAVSEMQEHHCLFCKNTIDHYHHVVPQSENGSNTIGNIVGLCTKHHDLVHKDTSWQEKLAKKKTGLNKRYGALSVLNQIIPALTKELSSLFPKHFFATNGKSTYDYRAAHGVSKDHWLDAYCIAGSVLPNDACDNNINNHVPYELKQFRRHDRRALHKENMGRVYTLNGKSVATNRHKAIKQTTDSLEEFRQRQPNDVCKLKVKEHHPEYRNPKRNFPGCVFLVGKHTHVMQGTSGSHNGKADGYYDTNGNSYSSGKCKFVVKNEGIVFT

SEQ ID NO: 17787 - protein, 385 aa, unidentified
MFKAGLIMRKLPKFAADKFITCHYIRNTESRFCNRKRPDGWLTPTSRQLVETHINLIHKIQKYLPVTDIAMEVNRFAFLSLENPSVSGVNFQNGPLKGFDNLYDAVNELQHGKCLLCDKKIEHYHHIVPRSMNGSNTIGNIAGLCMECHDKVHKHASYQKKLNDVKKGLDKKRGALSALNQAVPFICKRLEAEFGKEHVSYCTGRDTAKMRNSFGFQKTKDNQMHETDAWCIGILALNKVPDVIPDFGQTYRIRQFRRQDRSFICYQTERVYKLDGVAVAKNRKKRTEQKTDSLEDWYNRQVALHGKKEADFMRSHLTAVKSKRRYNDLTRVMPGAVFMYNGECHVLSGQLTEGRYFRAVGNAKTNYPASKCKIIRHNEGLVFVY

SEQ ID NO: 17788 - protein, 341 aa, unidentified
TDLLSARRALRQSRRNRKTRYRAPRFDNRIRTKRKGWLAPSIENRINAHLSRIETVIRLLPVTKISVETTSFDMQLLKNSDIAGKEYQESEQLGFWNVREYVLFRDGHVCQHCHGRSKDPVLNVHHLESRRTGGDSPGNLITLCETCHKELHRGEITLKAKRGQSFRAETFMGIMRWEVLDRLKASHPKLEVQNTYGYRTKHARIVNGIAKSHCADAFCIAGNLGAERLGEFLFQKQTRRNNRQIHKLSILKGGIRKRNQVPFEVKGFRLFDKVACKGEEGFIFGRRSSGYFDVRKLDGTRISTGISYKKLRLLEKRQTYLTEIRKEEALPPLPEGRGLRA

SEQ ID NO: 17789 - protein, 465 aa, unidentified
MSTCVCVLSNSGERLMPTFRLGKVRRLLKDGKAKIVKHHPFTIQLLYDSKTNTQPIEICEDVGYNYIGISVKSEFHEYVSVQYDTLQDEKDCHDGCRRVRRSRRNRLRYRQARFDNRKRDDGWLAPSFEHKKELNVNVIKMYCKVMPITHAIVEVGSFDTMLVKAIEEGKATPESADYQKGPRYKLATLREAVFYRDNYTCQVCGRKANEGAILHVHHMFYWKGRHGNSLSELITVCEKCHTPANHQKGGKLYGFGEDIKFANLSGAAFMNTVRWQIVNVLYAAFGKPFVTFTYGAMTKEKRIALHLEKSHNNDAYAMGSFHPVNRCAFEHYEKVKRNNRILEKFYDSQYIDTRTGELTNGKSLFNGRISRSHKKDSENLHKYRGKRICKGHRALRRKKVALNPGDLVSLNGEILVVHGTHTKKNGSVNVEFKTPSRGGKKSASLKKLKIVKTSNLMHSAWTKVA

SEQ ID NO: 17790 - protein, 420 aa, unidentified
MQYVYVLSKHGEPMMPCSPGKARLLLKQQKACVVRRTPFTIKLLYGSAGYKQPITLGVDAGSKHVGLSASTEKRELYREEFTPRNDVVELLSTRRQNRRSRRNRKTRYRAPRFDNRVHSKHKGWLAPSVEVKIQEHITIIKRICKILPISLVRVETAEFDTQRLKAMLAGKPLPVGTDYQLGEMYDEYNVRQYVLKRDHYTCQCCGTHNTAKKVVKLHVHHLESRKTGGNAPSNLVTLCTTCHKNLHKGRVTLDGKERGKPLRDAAFMGIMRKTLMVRLKEELPIPVQGTYGYITKMRREQNDIKKSHTNDARCISKHPLAEPCSVCYRTKAIRHHNRQTHKANFSKKGIRKRSQMPYLVEGFRLWDKVLYKGQECFVSGRRSSGSFTLKKLDGTSISKGVTFKKLRLLEPATNYLIERM

SEQ ID NO: 17791 - protein, 545 aa, unidentified; identical to SEQ ID NO: 6325

SEQ ID NO: 17792 - protein, 431 aa, unidentified
MPNKVYVINKHGRPLMPCSPAKARHLLDAGKAKVKKRTPFTIQLIYGSSGYTQEVILGVDAGSKTIGMSVSTTKEELLSAEVKPRNDVVDLLSTRREFRRARRNRKTRYRKPRFDNRVRSKHKGWLAPSVEVKIQEHITSIKRVCRILPVSKVVIETAEFDLQLLKAIEEGKPVPQGEDYQQGEMYGHYNVRQYVLWRDGYTCQCCGAHATKKKEVRLHVHHLESRKVGGDAPDNQVTLCESCHEKLHKGLIAEKDFKKRKRKSTRDATFMGIMRKTLMQRLCSELPIPVVKTRGYITKATREKLLVLPKSHTNDALAIAQGKRGFNVGYLPEIAQIDKIYTIRPVRHHNRQLHKATILKGGIRKSNQTEKYVFGYCLFDKVQFNGQDCFIWGRRTTGIFTIKTINGKMIKDGISFKKLKLVEKSTSYLIA

SEQ ID NO: 17793 - protein, 358 aa, unidentified
TEKAELYASEVELRPDVSDLLSARRTLRQSRRNRKTRYRAPRFDNRIRTKRKGWLAPSVENRINAHLSRIGAILRLLPVTKITVETASFDTQLLKNPDISGKEYQEGEQLGFWNVREYVLFRDGHACQHCHGRSKDPVLNVHHLESRRTGGDSPGNLLTLCETCHKALHRREIKLKTKRGQSFRAEAFMGIMRWEVLNRLKASHPELEVHNTYGYRTKHTRIVNGIDKSHCADAFCIAGNLGAKRLGEFFFQKQTRRNNRQIHKLSILKHGLRKRNQAPFEVKGFRLFDKVVCQGEEGFIFGRRSSGSFDVRKLDGTRISAGISYKKLRLLEKRRTYLKEIRKEEALPPLPEGRSLRA

SEQ ID NO: 17794 - protein, 455 aa, unidentified
MVFVLDRHHKPLMPCHPARARRLLGKGRARIHKLYPFTIRLVDRELKDSTVQPVVLKLDPGSKETGMALVREDETKTHHALYFVNLKHRGSEIKPSLLQRRNFRRSRRSRNLRFRAPRFLNQTRLQGWLAPSLRHRVDTTLSWVERLRKLAPVATLEMELVKFDTQKMQNPEIDGVAYQQGKLAGFEVREYLLEKFGRKCIYCGAEGVPLNIDHIVPKSAGGSNRVSNLVPACVDCNQKKNNLPFEVFLKGDKAKINRIRSQLKTPLKDAASVNTTRWQLFEALKLTGLSLTTATGARTKYNRHQFGVPKEHWLDALCVGETAAVRGWQPLGVLVVKCTGRGAYKRTRLTKDGFPRGYLTRTKRFFGFGTGDMVVATVFAGKKKGSYKGRVAVRKSGSFAIQTASRKVDGISYRYCRLLSRADGYGYSWHSSKSLINSTKETALLPRINTQVSAP

SEQ ID NO: 17795 - protein, 447 aa, unidentified
VPAYRIKHITKKEVPYMVYVLDIDGQPLMPTSRHRKVRKLLNSHLAKVAKRCPFTIQLLYQSTKETQPVSLGVDAGSRHIGLAATTEQKVVYQEELVPRNDVVKLLSARRALRSSRRSRKTRYRKPRFNNRVHSKHKGWLAPSVEVKIQEHITAIKRICQILPISDIHVETAEFDLQRLKAMEEGRPLPVGTDYQLGEQYDFYNTRQCVLHRDEYTCQCCGTHDNNVKLHVHHIESRQTGGDVPNNLITLCEHCHKLLHAGKTIIPKGKKRGKSYRDATFMGIMRKTLLERLKKEIDVPVEGTYGYITKYWRERAGLEKSHIHDAVCISKYPYAKPLDIYYLTKTVRHHNRQIHKSNFSKGGIRKRNQAPYLVKGFRLFDKVLYQGKSYFIFGRRATGFFDIRTLNGAKVNKGSISYKKLRIQDTANAYLKEIKAIPHMNKFTCVLA

SEQ ID NO: 17796 - protein, 422 aa, unidentified
MQYVYVVGSNCKPLMPCSPAKARELLKSKSAAVLQRTPFTIKLLHHAGGYKQPITLGVDAGSKHVGLSACTDTEELYKEELTPRNDVVKLLSARRECRRGRRHRKTRYRAPRFNNRVHSKHKGWLAPSVEVKIQEHITAIHRICRRLPITKIVVETAEFDTQRLKAMLEGKPLPVGIDYKRGEMYDEYNVRQYVLKRDNYTCQHCGARGSAEKGIKLHVHHLETRQTGGNAPNNLITLCKDCHTALHDGKITLKLDKKKRGKPLRDSAFMGIMRKTLLSRIRKEVAIPVVETQGYITKLLREENHIQKSHTNDARCIAGCPKALPCDTTYHTKAIRHHNRKIHKTNILKGGVRKLNQAPYKVFGLRIWDKVKYKGQECFITGRRSSGYFALKKLGGTTISNSTNYKKIHFLEPANHYIIERS

SEQ ID NO: 17797 - protein, 419 aa, unidentified; identical to SEQ ID NO: 3670

SEQ ID NO: 17798 - protein, 365 aa, unidentified
LGVDADSKHVGLSASTEKRELYSEEFTPRSDVVKLLSTRKQNRRSRRYRKTRYRAPRFDNRVHSKHKGWLAPSVEVKIQEHITVIKRICKILPISLVRVETAEFDTQRLKAMLAGKPLPVGTDYQLGEMYDEYNVRQYVLKRDHYTCQCCGAHNTAKKVVKLHVHHLESRKTGGNAPSNLVTLCTTCHKNLHKGKVTLDGKERGKPLRDAAFMGIMRKTLMARLKEELPIPVQGTYGYITKMRREQNDIKKSHTNDARCISKHPLAEPCSVCYRTKAIRHHNRQTHKANFSKKGIRKRSQMPYLVEGFRLWDKVLYKGQECFVSGRRSSGSFALKKLDGTSISKGVTFKKLRLLEPATNYLIERM

SEQ ID NO: 17799 - protein, 420 aa, unidentified
MQYVYVLNKHGEPLMPCSPGKARILLKQQKACVVKRTPFTIKLLYGSAGYKQPITLGVDAGSKHVGLSASTEKRELYSEEFTPRNDVVELLSTRRQNRRSRRNRKTRYRAPRFNNRIHSKHKGWLAPSVEVKIQEHITVIKRICRILPITLVRVETAEFDTQRLKAMLAGKPLPVGTDYQLGEMYDEYNARQYVLRRDNYTCQRCGAHTTKKKTVKLHVHHLESRKTGGNAPSNLITLCVDCHKAFHAGKVKLDGKKRGKSLKDAAFMGAMRNTLLTRLRNELNIPVQNTYGYITKLLREQNDIKKSHVNDARCISKHPLAEPCSVCYRTKAIRHHNRQTHKANFSKKGIRKRSQMPYLVEGFRLWDKVLYKGQECFVSGRRSSGSFALKKLDGTSISKGVTFKKLRLLEPATNYLIERM

SEQ ID NO: 17800 - protein, 515 aa, Ruminococcus sp.; identical to SEQ ID NO: 2456

SEQ ID NO: 17801 - protein, 450 aa, Alkalispirillum sp.; identical to SEQ ID NO: 10898

SEQ ID NO: 17802 - protein, 456 aa, unidentified
MSTCVCVLSNSGERLMPTFRLGKVRRLLKDGKAKIVKHHPFTIQLLYDSKTNTQPIEICEDVGYNYIGISVKSQSHEYVSAQYDTLQDEKACHDSCRKLRRTRRNRLRYRKPRFDNRKRGEGWLAPSLEHKKQLNIRLIERYVSVIPITHATVEVGSFDTMLLQAIQKGKSKPEGVDYQKGPRYNLATLREAVFYRDNYTCQVCGRKIADGAILHMHHMFYWKGRHGYQLDELVTACEKCHTPANHQKGGKLFGFGEDKEFANLSGAAFMNAVRWQIVDALHATYGKEFVTITYGAMTKEKRIILGIEKTHNNDAYAMGDYHPVHRCVFRHYQKRRRNNRVLEKFYDATYIDTRTGNKAKGKELFNGRISRNHKKNSEDLHKYRSKKVSKGRRSIRRQRYAIQPYDTVRLESKTYITSGCHNKGTRLLIPANGKSKSVAISKVQVVCHAGAWIQII

SEQ ID NO: 17803 - protein, 429 aa, Parasutterella sp.; identical to SEQ ID NO: 4241

SEQ ID NO: 17804 - protein, 416 aa, unidentified
MVYVLDKNGQPLMPTDRHRKVRLMLQSGQAKVIKRCPFTIQLNYDSGHQTQEISLGIDAGSKHIGVSATTKIKVLYEADVELRNDIVNLLSSRRERRRGRRNRKIRYRQAKFNNRRRGNGWLAPSIRQKIGTHLIVVENICKILPISRIMVETASFDIQKIKNPDIQGAEYQQGDQLEFWNVREYVLFRDGHTCQCCKGKSKDKILNVHHIESRKTGGNAPNNLITLCETCHTGYHKGTVQLPKAIKRGMRFKDAAFMGIMRWAFYEALKQQYEPVGTPVHNTYGYITKHTRIAYNLPKEHYVDARCISGNPEASSNGEYYYQKKVRCHNRQIHKLTVLKGGIRKQNQATYLVKGYRLFDKVSYQGKGYFVFGRRQSGFFDIRTLSGEKVNKGSLSCKKLKFIATRTYYLTERRAV

SEQ ID NO: 17805 - protein, 420 aa, unidentified; identical to SEQ ID NO: 5136

SEQ ID NO: 17806 - protein, 420 aa, unidentified; identical to SEQ ID NO: 8301

SEQ ID NO: 17807 - protein, 378 aa, Moorena sp.; identical to SEQ ID NO: 2642

SEQ ID NO: 17808 - protein, 406 aa, unidentified
MVYVQDINGKPLMPTTRHGKVRRLLKDKKAVVVNLCPFTIKLTYVTSDYKQEIVLGVDAGTKHVGLSATTKSKELYSSEVILRNDIVDLLSTRRELRRTRRNRLRYRKPRFNNRIKSKRPGWTAPSVKYKIDAHIRVIDNVCSILPISRIVIEVAQFDTQKINNPEISGKEYQEGDQLGFWNVREYVLARDGHKCQYCKGKSKSKILNVHHLESRKTGGDSPSNLITLCETCHDDYHKGNIDLKIRRGKSLRDAAVMGIMKWRLYEELKSKYDRVFMTFGYVTKYNRIKHGIEKSHVSDAFVISKNINAKRIERQYLKRLIRRHNRQIHKMKILKGGKKKNNQAPFEVFGFRLFDKVLYNNKIFFVYGRRKSGNFNIRDFNGENPKDVSRKKFKLIRGKRHPIILK

SEQ ID NO: 17809 - protein, 544 aa, unidentified
MRQKKQKVMVYILNKKGKPLMPTTRCGHVRKLLDSKKAVVVNSNPFTIRLKYDTPNGVQDVFAGIDSGRENIGSGASNEDGDCLYLGELKTSNKSIKLKMTERAGFRKERRRHDRQNKQRKARKDHTEIQNGNADICRTAISCKSVQISYPAAEESVTHKIIRGKEGKFANRHRDEGWITPSARQLVQMHMNDLKSMCKILPISHVTLERVAFDFQKLENENIKVWEYGKGKLYGYDSPEEYIHDVQNGKCLVCGKPHIDYLHHIIPRSKGGSDKVSNIAGLCYDCHYGPMGVHNCQDTQDRLPELKNEADKQYKVSLLNSVMPVLIEEMDKFCKANSIIFSICEGHDTAKIRDMYGLQKDHCVDGFAISLVGRNVKSVDVMPDRIYQKQRYKKKSKNIIQKRNCREYYDGKKLVAVNRHKGTDQKADSLEEYMNTYAETHTADECKKHFESLTVKPARRTYTFHKEGRICPLHIGDKVRYEKKNKIKGNTKVDTFICEGIYFSKDENKAKVEHNKTKSKKMKFCRAIESGCIPYIDYIKLALI

SEQ ID NO: 17810 - protein, 443 aa, unidentified
LDAKSRFNISEGNFTPKGSAGMQNFVFVLDANKQPISPCHPSVARKLLRDRKAAVYRRFPFTIILKRAVDKPIVEPITVKVDPGSKTTGIALIQSNKVVFAAEVEHRGQAIKDALESRRAIRRGRRQRKTRYRQPRFLNRTKKKGWLAPSLKSRVDNLQTWLVRFLKLCNVRSISMELVRFDMQLMQDAEISGVEYQQGELAGYEVREYLLEKFNRKCCYCGKSDIPLEIEHITPKSRGGSNRVSNLCLACRSCNVSKGNQTATEFGFPNIQAHAKKPLKDAGAVNSVRWAIWRMFDASGLPVEVGTGGRTKFNRAQRAPAQNYPKAHWIDAACVGESGQAVKLCPEQKPLRIKAVGRQSRQMCRPNKFGFPRTASKQSRVVKGGFQTGDIVKAVLPSGKYVGTHIGAVAVRATGSFRVGKTDGISWKYCQRLHALDGYSYAN

SEQ ID NO: 17811 - protein, 458 aa, Lactobacillus sp.
LKGVGMMSEIKKVDYIYVVDSKGTPLMPTSRLGMVCRWLKTGQAKWFRNSRNTIQFVRPVTTNTQELTLGVDAGFHLGLSVVGNNRECYVSESLRKSEKDRITSRRESRRTRRNRLRYRKARFDNRRRKDGWLAPSIQHRLDFTIKEIKRLYMFLPITNLVVEVTPFDNQKLLNPDIQGWQYQKGKMYGFKTIKDYLLARDNYRDALDGKQYPASQLRVHHLVQRKDGGSNQPDNLVLLSDINHNQANHNNGILAKLKENRQKTIDYRGAYFMSILATRLSDYFDEYTTTQGYLTANLRQKYEIEKSHLNDAFVIAGGTDTTLRTNNVYSRQKLRNNNRVLQKFYDAKYIDSRDGKQKAGKELSSGRTRRSQELNYDNLRQFRKEKVKKGRVSIRRGHYQLRPHDVVLNTRTNRIETVKGVQNSGTVIKFQTGKTCSIKSVVSLYHVNGILEKKMENV

SEQ ID NO: 17812 - protein, 427 aa, unidentified
LRVFVFNKRGKPLMSCSPAKARLLLKEKKAIVVRRTPFTIQLTIATGESKQPVSLGVDAGYKHVGLSASTEKAELYASEVELRKDITDLLSARRALRQSRRNRKTRYRAPRFDNRIRTKRKGWLAPSVENRINAHLSRIEAVLRLLPITKITVETASFDMQRLKNPDISGKEYQEGEQLGFWNVREYVLFRDGHVCRHCHGRSKDPVLNVHHLESRRTGSDSPDNLITLCVTCHKALHRGEITLKAKRGQSFRAQAFMGIMRREVLNRLKASYPELKVHETYGYLTKHARIANGIVKSHGADAFCIAGNLGAERLGEFFFQKQTRRNNRQIHKLSILKGGIRKRNQAPFEAKGFRLFDKVACQGEEGFIFGRRSSGSFDVRKLDGTRISAGISCKKLRLLEKRRTYLTEIRKEEALPPLPEGRGLRA

SEQ ID NO: 17813 - protein, 414 aa, Selenomonas sp.; identical to SEQ ID NO: 10452

SEQ ID NO: 17814 - protein, 431 aa, unidentified
MPNKVYVINKHGRPLMPCSPAKARHLLDDGKAKVKKRTPFTIQLIYGSSGYTEEVILGVDAGSKAIGLSASTKKEELFAANVTPRNDVVDLLSTRREFRRTRRNRKTRYRKARFNNRVHSKHKGWLAPSVEVKIQEHITCIKRVCNILPVSKVVVETAEFDLQLLKAVEEGKPVPQGEDYQKGEMYGHYNVRQYVLWRDGYACQCCGAHSTKKKDVKLHVHHLESRKTGGDAPSNLITLCEDCHKKLHRGLISETDFKKRKRKSTRDAAFMGIMRNTLMQRLRCELSIPIVETRGYITKATREKLLVLPKSHTNDALAIAQGRQGFNVDYFPNIVQVDKIYMIRPVRHHNRQLHKATILKGGIRKANQARKYVFGFRLYDKVRYNNVECFVWGRRNRGEFLLRHLDGTKVKDGISYKRLKLLERSQSYLIA

SEQ ID NO: 17815 - protein, 515 aa, unidentified
MATVYVLNKDGKPLMPTTRCGHIRHLLKEKKARVVRTNPFTIKLVYETDDVVQPLYLGIDPGRTNIGVAVVKVDGTAVFTAHLETRNKEIPKLMAKRKEHRQGRRHYRRCKRQRRAAAHGTLSKKCKKQDTAQGGNISKRAQTIGVFERNLPGCEKSVLCIGIKNKEARFNNRVRPARWLTPTANQLLLTHVNFVKKICKFLPISDVVLEINKFAFMALDNPNIQKWQYQQGPLYQKGSLENAVSEQQDHHCLFCEKTIEHYHHVILRSENGSDTIANIVGLCAEHHDLIHKDDKLKEELAKKKQGLNKKYGALSVLNQIIPALTYELGSRFQGHFYVTTGKSTYDYRAAHSVSKDHWLDAYCIACSVLPDGCFDNTINSRVPYELKQFRRHDRQVCQQQNVKRKYYLDKKLVATNRHKAIKQETDSLEEYRNNGGTTDKLVVKEHKPTNKRLNRILPGALMAANGKLNVMVASRGLHNGIPDNYVFDNNSKAKPSKCTLINKNKGIVFVSNSVS

SEQ ID NO: 17816 - protein, 536 aa, unidentified; identical to SEQ ID NO: 4526

SEQ ID NO: 17817 - protein, 353 aa, Erysipelotrichaceae sp.
  VARIANT 286..298: note = X can be any naturally occurring amino acid
MLQDEKKRHDDRRKMRRARRNRLRYRKPRFDNRTASKKEGWLAPSLRNIRDQHIRIFERFLEVMPIVSATFEMGSFDVHAMHEFEATGTVLKGDDYQKGPRYGMNTLRKAVFYRDNYTCQVCGETADEGAILRVHHIGFETGDHTNRMSNLLTVCTKCHTSANHKPGGKLYDLKPRTKPFNGAAFMNAVRWQMFRTLKSTHPDLEWHMTYGAATQEARRVLHLEKSHANDAYAMGEFHPRRRTPFMHFQKLRRNNRILEKFFDAKYVDARDGKTKKGAELSCGRTXXXXXXXXXXXXXHYTLRPGDTVVIGGEKHRAKGVHNKGTYVVTDAKKSVPVKKVEKIIHAGGYMSVK

SEQ ID NO: 17818 - protein, 424 aa, unidentified; identical to SEQ ID NO: 3351

SEQ ID NO: 17819 - protein, 419 aa, Aneurinibacillus sp.; identical to SEQ ID NO: 4563

SEQ ID NO: 17820 - protein, 480 aa, unidentified
MKGENMVIALDRNKRPLGFMGERRCRILLERKRAVLYRYFPTIVILKDVDARKLSGLSSYRIKIDPGAKYTGIAIVRDDTNEFMYAMQIEHRGEQIKKNLDTRRNARGDRRSRETGYRRPKWGNQCTAKEQRQSYDSRRDENWLPPSVKSTADNIISWVRRLSRWINITNCSFESVRFDTQLMENPEIEGVEYQQGTLYGYEVKEYLLEKYGHTCQYCGGKSSDPILEWEHMIPRSRGGSDRLKNATLACHNCNQDKGNHTLEEWQTIFQDRLPKERGKQKELDQMRQKYVQQVMEGKAPLKGLRYAAWVNSSRRYSQRHLYLRFPELECSSGGRTKYNRNALGYPKEHHYDALCVGKIPEDGFVDWTHGYYLYAKATGRGTRLRGQLNGCGVIISKWKNRSKTAFGFQTGDLVVANVPKDTKYKYKGRFVGRVMIRKSGSFDIRTLSGELVTVNAKFCRLLQNNSGYQMMIKRAIPLGD

SEQ ID NO: 17821 - protein, 428 aa, unidentified
LKVFVLNMRGRPLMPCSPAKARHLLKAGKAVVRRRTPFTIQLRIATGETKQSVTLGVDAGAKHVGLSAATEKEEVFASEVELRQDITGLLAARLSLRRERRQRKTRYRAPRFLNRVRSKHKGWLAPSVENRIQAHMSRIDAICGLLPVTKIVIETASFDIQKIKHPDVEGTDYQQGDQLGFWNVREYVLFRDGHVCQHCHGHAKDKILNVHHLESRQTGGDAPNNLITLCETCHKAYHAGKIKLKVKRAQSFRAEAFMGIMRWTLLDRMRKAHSGLPVENTYGYLTKNTRITLGLPKTHCVDAYCIAGNLKAVRRGVCLHQRQVRKHNRQIHKCTVLSKTLKDGTKIGYRKLNQTPHLVKNFRLFDKVRCLGQTGFIFGRRSSGYFDVRRLDGVKISSCISYKKLTLLEKRSTCLTELRKEDGASSPV

SEQ ID NO: 17822 - protein, 442 aa, unidentified
MVTVQQSTHHLPFGRVFIRRNLFMVYVISQDSKPLMPCSNPIARLLLKQGKAKVKRREPFTIKLIYETTDYTQDLTLGVDTGSGTIGAAVSKDNGDIVYMSEVVVRNDITDKMTQRAKYRRNRRNRKTRYRKARWLNRSNSIKKDRFSPTMQSKLHSHVKEIEYIQSILPITEMVFETGQFDMHLMKDPSLANPKVRPWGYQKGTNYGFENTKAMVLNRDNYTCQCCKGKHKDSKLEVHHIVFRSQGGSDEESNLITLCHTCHKDLHSGKINLKLSGKVKGNLKYATQMNSIRKQLFRLYPNAIETFGYVTKANRLHLGVDKEHYYDACTIATQGNTFNVKSNLYKKKCVSDGDFQKTKGICSEQPIVTDKICSFRKFDKVRYFGKDYFIKGRMSTGYAILMDIDGNKIDFSTMPRGYKTPKLSNCKRITARSTVMTQVKVV

SEQ ID NO: 17823 - protein, 512 aa, unidentified
MSTVYVLNKDGKPLMPTTRGGHVRHLLKEQKARVVRTKPFTIQLLYETNDVVQPLYLGIDPGRTNIGVAVVKTDGTAVFTAHLETRNKEIPKLMQGRKKARRARRTNGRRCRRQRRAKANGTISKKCVKQTTAQNGSVSKRAKKIGVIKRHLPDCEKEVLCIGIKNKEAKFSNRTRQEGWLTPTANQLLQTHVNLVKKIQKFLPISDVVLEVNKFAFMQLDNPNVQKWQYQQGPLYQKANLEEAVSEMQEHHCLFCKKKIDHYHHVVPQHKNGSNTIDNIVGLCTKHHDLVHKETAWQEKLAKKKTGLNKKYGALSVLNQIIPALTKGLSSLFPKHFFVTTGKSTYDYRAAHDVCKDHWLDAYCIACSVLPNDVCDSNINSHVPYELKQFRRHDRRALHKENMNRVYTLNGKKVATNRHKAIEQTTDSLEEFRQRQPNDVCKLKVKEHHPEYRNPKRSFPGCVFLVGKQTHVMQGTSGSHNGKADGYYDTNGNSYPFGKCKFVAKSEGIVFA

SEQ ID NO: 17824 - protein, 436 aa, Ktedonobacter sp.
  VARIANT 331..344: note = X can be any naturally occurring amino acid
MVFVLDRHKKPLMPCTPKRARLLLGRGRAVVHRVKPFVIRLRDRRVEDSTLQPLALKIDPGSKTTGIAVARVQETEEGEVHHAVFLFEVAHRGDKVQGAKQTQRNARRRRRSANLRHRAPRFANRGIPKGWLPPSLLSRIGNVLTWTGRCRRWVAVSRIDVERVRFDTQLLQHPEIAGVAYQQGTLAGWEARAYLLLKYAYRCAYCGKTDCAFELDHIVPRSRGGSNRVSNLCLACHACNQAKGDKTAAEWGHPEVEAQAKQALKDAAAVNATRFKLVEALQVFGLPIGTWTGGRTRWNRARFGIDKTHALDALCVGQMAAVSAARLKTLXXXXXXXXXXXXXXLPDTSETRPWLSDRRPGASSGPCSSQNGGNPSGTRAGAQKRIVSCRLRRWGWSGVLPDGAESRWVWVCACLTEKQVPHLPCPKQGMRHSSLL

SEQ ID NO: 17825 - protein, 552 aa, Streptomyces sp.; identical to SEQ ID NO: 10782

SEQ ID NO: 17826 - protein, 435 aa, Lactobacillus sp.; identical to SEQ ID NO: 9795

SEQ ID NO: 17827 - protein, 428 aa, Macromonas sp.; identical to SEQ ID NO: 15026

SEQ ID NO: 17828 - protein, 430 aa, unidentified; identical to SEQ ID NO: 7436

SEQ ID NO: 17829 - protein, 447 aa, unidentified
VPAYRFKHITKKEVPYMVYVLDIDGQPLMPTSRHGKVRRLLNSHLAKVVKRCPFTIQLLYQSTKETQPVSLGVDAGSRHIGLSATTEREVVYQEELVPRNDIVKLLSARRALRRSRRNRKTRYRKVRFNNCVHSKHKGWLAPSVEVKIQEHITAIKRICQILPISDIHVETAEFDLQRLKAMEEGRLLPAGTDYQLGEQYNFYNTRQYVLHRDEYTCQCCGTHDNNVKLHVHHVESRQTGGEAPNNLITLCEHCHKSIHAGKMMLPKGKKRDKSYRDAAFMGIMRNTLLERLRKEVNVPVTMTYGYITKYWREKAGLEKSHINDAICISKHPYARPLETYYLTKAVRHHNRQIHKTKFSKGGIRKRNQAPYLVKGFRLFDKVLYQGESYFIFGRRITGYFDIRTLDGTKVNKGSTSYKKLRIQDTAEAYLTEVRAIPHMNEFTCVLA

SEQ ID NO: 17830 - protein, 450 aa, unidentified; identical to SEQ ID NO: 2935

SEQ ID NO: 17831 - protein, 424 aa, unidentified; identical to SEQ ID NO: 6692

SEQ ID NO: 17832 - protein, 535 aa, Streptomyces sp.; identical to SEQ ID NO: 6333

SEQ ID NO: 17833 - protein, 253 aa, unidentified
MVYVQDINGKPMMPTTRHGKVRRLLKDKKAVVVNLCPFTIKLMYVISDYKQEIVLGVDAGTKHVGLSATTKSKELYSSEVILRNDIVDLLSTRRELRRARRNRLRYRKLRFNNRIKSKRPGWTAPSVKYKIDAHIRVIDNVFSILPVSRIVIEVAQFDTQKIKNPNISGKEYQEGDQLGFWNTREYVLARDGHKCQYCKGKSKDKILNVHHLESRKTGGDSPSNLITLCETCHKEYHKGNIDLKIKRGSSLRD

SEQ ID NO: 17834 - protein, 442 aa, unidentified
MVTVQQSTHHLPFGRVFIRRNLFMVYVISQDSKPLMPCSNPIARLLLKQGKAKVKKCEPFTIKLTYETTDYTQDLILGVDTGSGTIGTAVSKDNGDIVYMSEVVVRNDITDKMTQRAKYRRNRRNRKTRYRKARWLNRASSIKKDRFSPTMQSKLHSHVREIEYIQSILPITEMVFETGQFDMHLMKNPSLANLKVRPWGYQKGANYGFENTKAMVLNRDNYTCQCCKGKHKDSKLEVHHIVFRSQGGSDEESNLITLCHTCHKDLHSEKINPELSGKVKGNLKYATQMNSIRKQLFRLYPNAIETFGYVTKANRLHLGVDKEHYYDACTIATQGNAFNVKSNLYKKKCVSDGDFQKTKGIRSEQPIVTDKICGFRKFDKVRYFGNDYFIKGRMSTGYAILMDIDGNKIDFSTMPRGYKTPKLSNCKRITARSTVMTQVKVV

SEQ ID NO: 17835 - protein, 413 aa, unidentified; identical to SEQ ID NO: 11242

SEQ ID NO: 17836 - protein, 426 aa, unidentified; identical to SEQ ID NO: 8077

SEQ ID NO: 17837 - protein, 396 aa, unidentified; identical to SEQ ID NO: 4508

SEQ ID NO: 17838 - protein, 420 aa, unidentified
MQYVYVLSKHGEPLMPCSPRKARLLLKQKKACVVKRTPFTIKLLYGSTGYKQPITLGVDAGSKHIGISAATEKYELYCEEATPRNDVVDLLSARRAFRRSRRNRKTRYRAPRFNNRVHSKHKGWLAPSVEVKIQEHITLIKRVCRILPVTFVRVETAEFDTQRLKAMLEGKPLPVGTDYQLGEMYDEYNVRQYVLKRDNYTCQCCGAHPTKAKAVKLHVHHIETRRTGGNAPNNLITLCTACHKALHAGKVTLDGKKRGKPLKDASFMGIMRKTLMERLLKELKIPVQGTYGYITKYLREKHSIPKSHTNDARCISKNPLAIPCDTCYYTKAIRHHNRQLHKATILKGGIRKANQAPYTVKGYRLWDKVSYNGSECFITGRRTSGYFALKKLDGTVVSNSASYKKMRLLEVATNYITERR

SEQ ID NO: 17839 - protein, 443 aa, Anoxybacillus sp.; identical to SEQ ID NO: 5909

SEQ ID NO: 17840 - protein, 427 aa, unidentified
LRVFVRNKRGKPLMPCSPAKARLLLKEKKAIVKRRTPFTIQLTIATGESKQPVSLGVDAGYKHVGLSASTEKAELYASEVELRQDVSDLLSARRALRQSRRNRKTRYRAPRFNNRLRTKRKGWLAPSVENRINAHLSRIEAVLRLLPVTKITVETASFDLQLLKNPDISGKEYQEGEQLGFWNIREYVLCRDGHVCQHCYGRSKDPVLNVHHLESRRTGGDSPGNLITLCETCHKALHRGEITLKAKRGQSFRAEAFMGIMRWEVQNRLKASHPELEVNNTYGYRTKHARIANDIAKSHCADAFCIAGNLGAERLGEFFFQKQTRRNNRQIHKLSILKGGIRKRNQAPFEVNGFRLFDKVACQGEEGFIFGRRSSGYFDVRKLDGTCISAGISYKKLHLLEKRRTYLTEIRKEEALPPLPEGRGLRA

SEQ ID NO: 17841 - protein, 513 aa, Acrocarpospora sp.; identical to SEQ ID NO: 10445

SEQ ID NO: 17842 - protein, 371 aa, unidentified
MVGLETFCRCRQAITTLAKGTLLFSILSEGGRRILFVYVLNKHGTPLMPCQPRKARILLRDGKAKVIQREPFTIQLLYGSSGYKQKISLGIDAGSKHVGASASTQKKELYASQTELRGADIVKLLSTKRELRRSRRNRKTRYRKSRFLNRVSRKRKGWLAPSIENKIAAHLRIVADICKMLPIFSITVETASFDIQKIKHPDIAGIEYQQGEQLGFWNVREYVLFRDGHTCQCCHGKSKDKILNVHHIESRKTGGDAPNNLITLCKTCHTGYHKGTVKLPKTIRRGMRFRDAAFMGIMRWAFYERLKKLYQNVHMTFGYITKNKRIENKIVKTHTADAFCIAGNLEAERLPYSFLQAQVRRTIARLTSRRF

SEQ ID NO: 17843 - protein, 402 aa, unidentified
GKAKVKKRTPFTIQLVYGSSGYTQEVILGVDAGSKTIGVSASTKKEELFAANVIPRNDVVDLLSTRREFRRARRNRKTRYRKPRFDNRVRSKHKGWLAPSVEVKIQEHITSIKRVCRILPVSKVVIETAEFDLQLLKAIEEGKPVPQGEDYQQGEMYGHYNVRQYVLWRDDYTCQCCGAHATKKKEVRLHVHHLESRKTGGDAPRNLITLCDSCHKKHHDGLITEDDFKKRKRRSTRDATFMGIMRKTLIQRLRAELTIPVAETRGYITKATREKLLVLPKSHTNDALAIAQGKHGFNVGYLPGILQIDKIYTIRPVRHHNRQLHKAAILKGGIRKSNQAGKYVFGYRLFDKVQFNEQDCFIWGRRTTGIFTIKTINGKMIKDGISFKKLKLVEKSTSYLIA

SEQ ID NO: 17844 - protein, 378 aa, Moorena sp.; identical to SEQ ID NO: 2642

SEQ ID NO: 17845 - protein, 493 aa, unidentified
LYLLDNRFLALVIAAIERYAADMNYVMEKVKDTPLDVLVSLKLCECQSRNYTNVLYRQQRNTCTIHDIGKTKNTPKGRFPEMENKIEYCFVIDKDNKPLAPTKVNKGWYLIRKGRAKLKSKYPMVIQLNKKVEFNENDKSYIICGIDDGSIHVGIAIVQKCSTKNKVVFKGIIEQRQDVKHLMDTRRRYRQYHRYHKRHRPMRFNNRSSSKKVGRLTPTIKQKKDAILRVLYQLNKWINIKEYYLEDVCIDIRAMTDDYKPYKWQYQKSNRLDENLRKATIIRDNYKCQECGKSNCKLEVHHIRARKYHGADTIGNLITLCFKCHDKTKGKEKDFEDKYFKIINSKPKRFDYAMHVMQGKNYLRNKISELGLLHLTNGGATANKRIEWNIEKSHSNDAICITNDIPDSCNIKEWTIKPMRRKSKAKTNNVLGIKHRDLVSYTYKNGEIHTGYVTALYPEQLVLNFQSKTKHCKKVNAQKCKLIWKFNKIYWLE

SEQ ID NO: 17846 - protein, 426 aa, Moorena sp.
MQNYVFVIDTNKQPLNPIPPKKARRLLNKGKAAVFRMYPFTIILKTAINNPTISPCQIKIDPGSKVTGFALVQNNQVIWGMELEHRGGLIKKKLESRSAVRRRRRNRNTRYRKPRFLNRKRPEGWLPPSLEHRILTIQTWVKRLIKFCPVNEIWVERVKFDTQKMQNPEISGIQYQQGELAGYEVREYLLEKWGRECTYCGKQSVPLQIEHIHPRSLGGSDSAKPTLRERVSNLCLACKKCNQRKGNKPIEDFLKKKPSLLQKIKSKAKQPLKDATAVNATRNKLVKVLQLIKVVVTGTGAQTKYNRTRLELPKQHWIDAACVGDIETLVLRTSQPLLVTCKGPGGRQKAALNKYGYPIRHNPLKPIKGWVTGDIAQHPLLGIGKVTPRSKGSFGFTPLGTKGYKSCKPQDISAIYRKDGYTYSFC

SEQ ID NO: 17847 - protein, 419 aa, Anoxybacillus sp.; identical to SEQ ID NO: 7669

SEQ ID NO: 17848 - protein, 512 aa, unidentified
MPTVYVLNKDGKPLMPTTRCMHVRHLLKNGKARVVKSKPFTIQLLYETDDVVQPLYLGIDPGRTNIGVAVVKADGAAVFTAHLETRNKEVPKLMKKRKESRCARRTNGRRCRRQRRAKTNGTISKKCVKQTTAQNGSVSKRAKEIGVIKRHLPGCEKDVLCIGIKNKEAKFTNRARPEGWLTPTTNQLLQTHINLVKKIQKFLPISDVVLEVNKFAFMQLDNPNIQKWQYQQGPLYQKGSLENAVSEMQEHHCLFCEKPIEHYHHVVPKSENGSNTIANIVGLCTEHHNLVHKDATWQKKLAKEKVGLVKKYSALSVLNQIIPALTKEMNSLFPKHFFVTNGKSTYDYRTAHGVSKDHWLDAYCIACSVLPNDVCDSNINSHVPYELKQFRRHDRRVLHKANMSRVYTLNGKTVATNRHKAIKQTTDSLEEFRQSHPGDVCKLKVKEHHPAYRNLNRNYPGSVFLVDGQVHVMQGVSGSHNGKADGYYNTNGNAYPYYKCKFVVKNEGIVFA

SEQ ID NO: 17849 - protein, 442 aa, unidentified; identical to SEQ ID NO: 2903

SEQ ID NO: 17850 - protein, 407 aa, unidentified; identical to SEQ ID NO: 3417

SEQ ID NO: 17851 - protein, 515 aa, unidentified; identical to SEQ ID NO: 4456

SEQ ID NO: 17852 - protein, 439 aa, Campylobacter sp.; identical to SEQ ID NO: 4429

SEQ ID NO: 17853 - protein, 466 aa, unidentified
MSEYIYVIGMDGDPQMPTKRKRHVEQLLQTGRARVFRQVPFTIQLTYKNEPVLQPVTIAEDPGRSNIGMAVVSLSGELLSAAVVQTRNKEIVKLMDKRKQHRRASRNGERKARQRLAKKCHTMVKAGSLMRKLPMYGKDKRVRCNVIKNTEARFCNRKREDGWLTPSAEHLVRTQINLIHKMQKFLPITDVAIEINRFAFLSLEDPSISGVDFQNGPLKGYDDLNAAVEDLQDGHCLMCNSPIEHRHHIVPRSMQGSNSIGNIAGLCCKCHERVHKDSAFEDSLKKKKAGLNKRYAAVSVLNQAIPFICKRLEQEFRKEHVHYCSGRDTSMVRRSLGYHKTKEEQLHEVDAWCIAVLSLQQIPEKAPSFDHVHEILQFRRQDRSRIKAQTSRAYYHERKKIAKNRKKAEGQREDSLQEWRKRQVERYGEEQTRKMISQLKVKKSIRRYNRLDRLMPGAVFYYQGVR

SEQ ID NO: 17854 - protein, 482 aa, unidentified
LVWNVQAPWDVYPSPTLCGLCLKVLRGRNGDADKKPIPTLTKDENRPSGRTTGLRAEQAEPAGIRKGDTLKVFVLNMRGKPLMPCSPAKARHMLKAGKAFVVRRTPFTIKLTIATGETKQDVTLGVDAGARHVGISATTEKEEVFASEVALRQDITGLLADRLAFRRARRNRKTRYRAPRFNNRVRSKHKGWLAPSVENRIQAHMSRIEAVCRLLPVTKIVIETASFDIQKIRNPEVEGTGYQQGDQLGFWNVREYVLFRDGHVCQHCHGRSRDKILNVHHLESRKTGGDAPNNLITLCETCHKAYHAGKIKLKVKRGQSFRAEAFMGIMRWTLLDRVRKTHPKLPVENTYGYLTKHKRIALGLPKTHCADAFCIAGNLKALRRGDFLFQQQTRKHNRQIHKCSILKGGVRTLNQAPFLVKGFRLFDKVRIGGQIGFVFGRRVRGTFNIRRLDKTVIGTDINCKKLSLLETRKTFLTELRKE

SEQ ID NO: 17855 - protein, 484 aa, Actinomadura sp.
MLGASPGVERVTPGSTAGEKVREGHPAAFVLDKHGVAVQPTTPARARMLLKKGRAVVARYTPFVIRLKDRTIGESQVDGVELGIDPGSRHTGITVFTDKDGNRRGLYGIDLVHRGGSIRDKMSQRAAYRRGRRSRNLRYRAPRFSNRTKPRGWLAPSLRHRVETTITWTARLARWAPVQAVHIERVAFDTHAISADRPLEGAEYQQGTLHGTEVREYLLAKWGRACAYCGATGVPLNIDHIRPRSRGGSNRVSNLCTACIPCNQAKGNRPVEDFLGQAPGQLSRILAQAEAPLRDAAAVNATRWALWRALHAAFPTVRTASGGRTKWNRTRVGLPKTHTLDALCVGHLNTIDRTPRTVLIAAATGRGAYTRTRTDRYGFPRLRLPRTKRFFGFATGDLVRATVPTGRWAGTHTGRVAVRSSGSHTVTTPAGAVKASHKNLALLQRGDGYAYTTKPEGAVINAAARQVRAPLGPWMPVRAFVPPD

SEQ ID NO: 17856 - protein, 427 aa, unidentified; identical to SEQ ID NO: 2799

SEQ ID NO: 17857 - protein, 451 aa, unidentified; identical to SEQ ID NO: 9095

SEQ ID NO: 17858 - protein, 424 aa, unidentified
MRVFVLNMRGDSLMPCTQRKARILLKEGKAVIYKYNPFTIQLTHATGENTQDCHVGIDTGAKHVGVAITSEGKVLFKGEIELRQDVKSNLDTRRIYRRSRRNRKTRYRQPRFLNRRKADKWLPPSLQNRLDHTFHWIDTLRGLVPSPTLHIEVGKFDTAKMIDPEIHGVDYQHGQTYGFFDERYYVFARDNYTCQCCGKSKGKILQTHHIIYRSNGGTDRADNLITVCTDCHTSKNHQKGGILYMWQEQHKKVRQYKEPPFMNTLRRRIFAKYPDAAITYGSETTPKRKEKGLDKTHYNDAIIISGVQTISENPDEWLFIRQFRKKKRSLHEGTPRKGRKEPNRTQKRNSKNTPYYRGYHLNDKVRVLGKTGYISGFTGGAAYVKDSDNQYITLPNKSYKQVGISNLQHVCHNNNWQYITKTTA

SEQ ID NO: 17859 - protein, 478 aa, Pantoea sp.
VAVFVLDIHGKALMPCTEKRARLLLDRGRARVHRLLPMVVRLVDRQAGDCEFQPLRLKIDPGSKTTGLALVREVAAVDALTGEVQLGVAVLNLLELVHRGRQISEAMTVRRQMRRRRRSNLRYRAPRFLNRGGDKTGRLAPSLQHRVDTTMTWVRRIQRWAPVRAISSELVRFDMQALQNPEIDGIEYQQGTLFGYELREYLLEKWGRQCAYCGARNLPLQIEHIRARAHGGSNRASNLTLACACCNQKKAARSIEDFLSQDHKRLNAILAQAQKPLRDAAAVNATRWALANALQATGLPVELASGGRTKFNRSALGVPKTHALDAACVGQVHSIENWNSPTLALKAMGRGSYQRTRLDKFGFPRGYLMRSKRVHDFATGDMVRADVPKGLKAGVHTGRVAIRATGRFNIQLNQAGVSAVVQGIHYRHCRIVQRNDGYGYFLNPANHTKRDQVRPKASDASHPALYLPGMNAEVSRAL

SEQ ID NO: 17860 - protein, 376 aa, unidentified
MVYVLNIQGNPLMPCKEAKARRLLKNSLAKIIKRTPFTIQLLFECENKTQDITLGIDAGSKTIGVSASTEKQELYSAEVVLRNDIVDLISTKKQNRRTRRNRLRYRKPRFNNRIKFKKKGRLAPSVSQKIETHLNVIKKIHKILPISKIIVETASFDIQKIKNPNITGVEYQQGEQLGFWNVREYVLHRDGHTCQHCKGKSKDKILNVHHIESRKTGGDSPSNLITLCETCHKKYHNGEIKLKVKRGQSFRDSAFMGIMRWAFYEKLKETYQNVRMTFGYITKNTRISNNLPKEHCIDAYCIAGNLKAKLMDSYFYQIKKRCQNRQIHKANFLKGGRKKLNQAPYIVKGFRLFDKVSYQDKPYYIFGRRSSGAFDV

SEQ ID NO: 17861 - protein, 443 aa, unidentified
NIGEGSQPVERPRRQNLRVFVLNKRGKPLMPCSPAKARLLLKEKKAIVVRRTPFTIQLTIATGESKQPVSLGVDAGYKHVGLSASIEKAELYASEVELRKDITDLLSARRALRQSRRNRKTRYRAPRFDNRIRTKRKGWLAPSVENRINAHLSRIEAVLRLLPITKITVETASFDMQRLKNPDISGKEYQEGEQLGFWNVREYVLFRDGHVCRHCHGRSKDPVLNVHHLESRRTGSDSPDNLITLCETCHKALHRGEITLKAKRGQSFRAQAFMGIMRREVLNRLKASYPELKVHETYGYLTKHARIANGIVKSHGADAFCIAGNLGAERLGEFFFQKQTRRNNRQIHKLSILKGGIRKRNQAPFEAKGFRLFDKVACQGEEGFIFGRRSSGSFDVRKLDGTRISAGISCKKLRLLEKRRTYLTEIRKEEALPPLPEGRGLRA

SEQ ID NO: 17862 - protein, 426 aa, unidentified; identical to SEQ ID NO: 4206

SEQ ID NO: 17863 - protein, 423 aa, Cyanothece sp.
  source 1..423: note = isolate UBA12306
MPNFVFVLDTTKKPLNPVHPGQARRLLKEGKAAVFRRYPFTIILKEEVTESPENIIIKLDPGSKFTGIALVQNNQVIWGAELQHRGQQIKDNLTSRRQLRRGRRGRKTRYRQPRFLNRKRPKGWLPPSLQHRVETTLTWVKRLIRYCPINSLSVELVKFDLQKQEKPEISGVEYQHGTLYGWEVREYLLAKFNRICQYCGATDKPFEVDHIHPRSKGGSDRVSNLTLACHDCNQAKGNQDIKDFLKGKPDLINRILKQAKTPLKDAAAVNSTRWKLFNSLKELGLPVETGSGGLTKFNRKRLKIPKSHWQDAACVGKVPLNLVFKTNQPLLIKATGHGTRQRCRPNKFGFPKSHAPKAKFFQGFQTGDLVSASISKGKFAGQYTGRIAIRFRPSFVLQLPDKKFDVHPKYLTHIHRNDGYNYA

SEQ ID NO: 17864 - protein, 431 aa, unidentified
MPNKVYVINKHGRPLMPCSPAKARHLLDAGKAKVKKRTPFTIQLVYGSSGYTQEVILGVDAGSKTIGVSALTKKEELFAANVIPRNDVVDLLSTRREFRRARRNRKTRYRKPRIDNRVRSEHKGWLAPSVEVKIQEHITSIKRVCRILPVSKVVIETAEFDLQLLKAIADGKPVPQGEDYQKGEMYGHYNVRQYVLWRDDYTCQCCGAHATKKKEVRLHVHHLESRKVGGDAPSNLITLCDSCHEKFHKGIITAANLKKRKRRSMRDATFMGIMRKTLIQRLRAELTIPVAETRGYITKTTREKLLVLPKSHTNDALAIALGKHGFNVGYLPEIAQIDKIYTIRPVRHHNRQLHKAAILKGGIRKSNQAGKYVFGYRLFDKVQFNGQDCFIWGRRTTGIFTIKTINGKMIKDGISFKKLKLVEKSTSYLIA

SEQ ID NO: 17865 - protein, 415 aa, unidentified; identical to SEQ ID NO: 5395

SEQ ID NO: 17866 - protein, 451 aa, Marinobacter sp.; identical to SEQ ID NO: 8862

SEQ ID NO: 17867 - protein, 449 aa, Allochromatium sp.; identical to SEQ ID NO: 10301

SEQ ID NO: 17868 - protein, 455 aa, unidentified
LVWNVQAPWDVYPSPTLCGLCLKVLRGRNGDADKKPIPTLTKDENRPSGRTTGLRAEQAEPAGIRKGDTLKVFVLNMRGKPLMPCSPAKARHMLKAGKAFVVRRTPFTIKLTIATGETKQDVTLGVDAGARHVGISATTEKEEVFASEVALRQDITGLLADRLAFRRARRNRKTRYRAPRFNNRVRSKHKGWLAPSVENRIQAHISRIEAVCRLLPVTKIVIETASFDIQKIRNPEVEGTGYQQGDQLGFWNVREYVLFRDGHICQHCRGRSKDPILNVHHLESRKTGGDAPNNLITLCETCHKAYHAGKIKLKVKRGQSFRAEAFMGIMRWTLLDRVRKTHPKLPVENTYGYLTKHKRIALGLPKTHCADAFCIAGNLKALRRGDFLFQQQTRKHNRQIHKCSILKGGVRTLNQAPFLVKGFRLFDKVRIGGQIGFVFGRRVRGTFNIRRLDKT

SEQ ID NO: 17869 - protein, 413 aa, unidentified; identical to SEQ ID NO: 2636

SEQ ID NO: 17870 - protein, 418 aa, unidentified; identical to SEQ ID NO: 16412

SEQ ID NO: 17871 - protein, 415 aa, unidentified; identical to SEQ ID NO: 10513

SEQ ID NO: 17872 - protein, 456 aa, Coprobacillus sp.; identical to SEQ ID NO: 12190

SEQ ID NO: 17873 - protein, 512 aa, unidentified; identical to SEQ ID NO: 4446

SEQ ID NO: 17874 - protein, 382 aa, unidentified
VCRIPFTIQLDYDTTDYTQPISLGIDAGSKHIGISATTSEKELYAADVELRNDIVEKLSTRREQRRTRRSRLRYRKARFNNRVSSKRKGWLAPSIENKIQTHLTVVEKIHKFLPITNIVVETASFDIQKIKNPSISGVEYQQGEQLDFFNVREYILFRDGYTCQHCKGKSKDKILNVHHIESRKTGGDSPNNLITLCETCHKAYHRGEFELNVKRGKSFRDSAFMGIMRWSLYDRLKNIYPNVNMTFGYITKNTRITNNLPKEHYVDARCISGNPVAKPLGYYFYQKKVRCQNRQIHKANFLKGGRKKLNQAPFLVKGFRLFDLVEYQKDLYYIFGRRSSGSFDIRKLDGTKVKKGSISCKHLRLIDKRKSILTEKRMQVNL

SEQ ID NO: 17875 - protein, 478 aa, Lactobacillus sp.; identical to SEQ ID NO: 16509

SEQ ID NO: 17876 - protein, 448 aa, Sarcina sp.
MPTFNIKKVRRFLGCGKAEIFRHHPFTVRLLYAESLDVQSVEMCIDAGDGHIGISVISRKHEFAHSQYDPLPDEKERHEDRRRYRRMRRDRLRCRKPRFDNRRKPEDWLAPTVEHKKDLHVGLAVMFKCVCPLTSVTVETGSFDTQELEAIERGLPLPKGTDYQQGPRYRVNTLRDAVFYRDGHTCRLCGGKGKVLRMHHAGYWRGDHSDRMGNLITLCTGCHTAANHKKGGPLYGWKPKVMPMKGAAFMNQVRFRVVEEIREKTGLPVNVTWGSATKTARKYFCIRKTHANDAFVMGVFHPAHRCREQAFCKQRRNDRRLQKFYDAVYTDIRDGKEKSGQELSCGRTKRSEPRRSERDLRPFRGHKVKKGHITIRRQRTQIKPGSQVRYGNEILLVHGTHTRRDKKSGQVNTNVEFTHPAKNGRKSADLRKVTVIREQYTNAWRRVT

SEQ ID NO: 17877 - protein, 413 aa, unidentified; identical to SEQ ID NO: 3751

SEQ ID NO: 17878 - protein, 430 aa, unidentified; identical to SEQ ID NO: 8226

SEQ ID NO: 17879 - protein, 512 aa, unidentified; identical to SEQ ID NO: 5549

SEQ ID NO: 17880 - protein, 450 aa, unidentified; identical to SEQ ID NO: 2935

SEQ ID NO: 17881 - protein, 411 aa, unidentified; identical to SEQ ID NO: 6244

SEQ ID NO: 17882 - protein, 414 aa, unidentified
MPCSPAKARLLLKEKKAIVKRRTPFTIQLTIATGETKQPVGLGVDAGYKHVGLSASTEKAELYASEVELRKDITDLLSARRALRRARRNRKTRYRAPRFNNRIRTKRKGWLAPSVENRINAHLSRIEAVLRLLPVTKITVETASFDMLLLKNPDIAGKEYQEGEQLGFWNVREYVLFRDGHVCQHCYGRSKDPVLNVHHLESRRTGGDSPGNLITLCETCHEALHRGEIALKTKRGHSFRAEAFMGMMRWEVLNRLKASHSELEVNNTYGYRTKHARIVNGIDKSHCADAFCIAGNLGAERLCEFFFQKQTRRNNRQIHKLSILKGGIRKRNQAPFEAKGFRLFDKVACQGEEGFIFGRRSSGYFDVRKLDGTRISAGISCKKLRLLEKRRTYLTEIRKEEALPPLPEGRGLRA

SEQ ID NO: 17883 - protein, 512 aa, unidentified; identical to SEQ ID NO: 16617

SEQ ID NO: 17884 - protein, 431 aa, unidentified
MVYVLDMDGQSLMPTVRYGKVRKLLNSHLAKVVKRCPFTIQLLYKSTKETQPVSLGVDAGSKHIGLAATTEKKVVYQEELIPRNDVVKLLSARRTLRRTRRNRKTRYRKPRFNNRVHSKHKGWLAPSVEVKIQEHITAIKSVCKILPVSEIHIETAEFDLQRLKAMEEGKPLPVGTDYQLGEQYDFYNTRQYVLHRDGYTCQCCGTHDKDVKLHVHHIESRQTGGNAPNNLITLCEHCHKALHEGKIELPKGRKRGKSYRDATFMGIMRNTLLERLEKEVDVPVMMTYGYITKYWREKTGLEKSHINDAICISKHPYAKPLDTYYLTKAVRHHNRQIHKVKFSKGGIRKRNQAPYLVKGFRLFDKVLYQNKEYFIFGRRATGRFDIRTLDGTKVNKGSISYKKLRIQDTANAYLKEVRAIPHMNKFMGVLA

SEQ ID NO: 17885 - protein, 477 aa, unidentified
MKLLVNDREEIEMSECHPSPDLFGCRLNSSSGCGTVSVSSNLPISDRGEVENSGCSESVVYAQDQHTGRSKSIVYVLNQDGKPLMPCKFVKAKHLLRDGKAKVVSRLPFTIKLLWQCECNTQEVVGGLDTGSVTIGCAAVSDGKVLYMSEVKLRNDITKKMVRRKSSRIHRRMRHTRYRPERWGNRASSLRKGRLAPTLLSKLNSHYREISFVESILPITRWKVELANFDINRIENPDVDKSGHKDGQQKSFYNTKAYIVDRDAYCCKGCRAKNVPLQVHHIIFRSNGGTNIHNNLVSLCKECHEKVHRGELKFLARKSVTKHAGEVGVIKSQLKKGNKKFETTYGYETKFKREVVLGLPKTHYYDAIAICFEDEDNIKQTNSVVFMKRHIAGGDYKQTKGSRSEKKVPTGKLFGVRRYDLVKTDKGIGFVKGKRVNGFFEISTLGGRKISGTANMKKPFTRITARSTTLIDTVVAI

SEQ ID NO: 17886 - protein, 447 aa, unidentified; identical to SEQ ID NO: 5316

SEQ ID NO: 17887 - protein, 451 aa, unidentified; identical to SEQ ID NO: 3581

SEQ ID NO: 17888 - protein, 431 aa, Escherichia sp.; identical to SEQ ID NO: 3801

SEQ ID NO: 17889 - protein, 414 aa, unidentified; identical to SEQ ID NO: 7795

SEQ ID NO: 17890 - protein, 454 aa, unidentified
MKTVAVISASGKKLMPTTAYRARKLLKSGRAKIFKYRPVFTIQLLDREDGYTQPMEYSCDTGYMYIGVSTKSRKHEYVNRQYDLLPDEPERHNKRRKYRRTRRNRLRYRKPRWNNRKSLMTKGDPFAPSLRNKRDQHIQVFKAFLAVMPITKATFEMGQFDTQVLKAVEEGKPLPKGTDYQRGERYGYDTLREAVFSRDDYTCVVCKKGIKQGKILRIHHLGYLRGDRSNRMSNLATVCTDCHTSKNHKQGGKLYGLEPKLKAFKGATFMTTVRWDMYQKLKEACGDEVELNITYGAITKEKRKKLNIKKTHSNDAYCIGEYHPKHRSDFEHFQKQRRNNRILRKFHDAKYIDTRDGSTKSGAQLSCGRTNRSVSRRSELNERIYRGEKVKRGSYSIRKTRYPFRPGDTVWTRSGKYTIKGSCHYGQYLITTTGKNISVKQVTRTIHCGGWVLI

SEQ ID NO: 17891 - protein, 442 aa, unidentified; identical to SEQ ID NO: 17475

SEQ ID NO: 17892 - protein, 456 aa, Halomonas sp.
MAVFVLGKNKQPLMPCSEKRARLLLERGRAVVVNLTPFVIRLRDRCLSDCALQPTLLGIDPGSKETGLALMRLEDNATDEQAPATRHVLCLFQLVHRGFQIRQALEQRAGFRRRRRSKNLRYRQPRFDNRTRKKGWLPPSLQHRVDTTMAWMDKLCRWAPVTHLNMELVRFDLQKMENPEISGVKYQQGTLLGYEVREYLLEKWGRECAYCGTGDTHLEIEHVVAKSRDGSSRVSNLAIACHDCNQAKDSQWLVDFFAADKGLKKRLKANGLSATVRLERVQRHLKLPLRDATAVNATRWTLFGTMKATGLPVAVGSGGRTKYNRQRLGIPKTHALDAACVGKFDTLKGWQVPTQVIKAMGRGSYQRTRLDKYGFPRGYLMRQKQVQGFQTGDRVRAIVPAGKKTGSHTGRVAIRKTGSFNIQTEQGAVQGISWRHCTLLQRGDGYGYHPLPTIQH

SEQ ID NO: 17893 - protein, 518 aa, unidentified; identical to SEQ ID NO: 7359

SEQ ID NO: 17894 - protein, 442 aa, unidentified; identical to SEQ ID NO: 3791

SEQ ID NO: 17895 - protein, 424 aa, Enterococcus sp.; identical to SEQ ID NO: 5552

SEQ ID NO: 17896 - protein, 420 aa, unidentified; identical to SEQ ID NO: 6680

SEQ ID NO: 17897 - protein, 420 aa, unidentified; identical to SEQ ID NO: 8060

SEQ ID NO: 17898 - protein, 340 aa, unidentified
MTNYAFVLDANNKQLTPTKEQKAWFLIRKKRATLVSKYPMVIQLKKKIPDKEICKDEVRCGIDDGGLHVGVALVQKCQTRNKVVFKGVIEQRNDVKHLIDVRCGYRRYHRYHKRYRSARFNNRNSSKREERIAPSILQKRQATIRVINQLNKWINITNYWLEDVAIDIRALTDGYKPYRWQYQKSNRLDENIRKAVILRDGCKCMECGKSNCRLEVHHIKPRRLKGSSTLDNLITLCTKCHQKTESVEELYMDRYFALLNSSDNKNLNYAQHVMIGKKWLREQLSNLGMLYLTNGGDTANKRIDWDIAKSHSNDAICITDLRPDTCEIKEWVIKPMRKQS

SEQ ID NO: 17899 - protein, 415 aa, unidentified; identical to SEQ ID NO: 3635

SEQ ID NO: 17900 - protein, 392 aa, unidentified
FTIQLVYGSSGYTQEVILGVDAGSKTIGMSASTTKEELLSAEVKPRNDVVDLLSTRREFRRARRNRKTRYRKPRFDNRVRSKHKGWLAPSVEVKIQEHITAIRRVCGILPVSKVVIETAEFDLQLLKAIADGKPVPQGEDYQQGEMYGHYNVRQYVLWRDGYTCQCCGAHATKKKEVRLHVHHLESRKVGGDAPDNQVTLCESCHEKLHKGLIAEKDFKKRKRKSTRDATFMGIMRKTLMQRLCSELPIPVIETRGYITKATREKLLVLPKSHTNDALAIAQGKQGFNVGYLPGIVQINKIYTIRPVRHHNRQLHKATILKGGIRKSNQTEKYVFGYCLFDKVQFNGQDCFIWGRRTTGIFTIKTINGKMIKDGISFKKLKLAEKSTSYLIA

SEQ ID NO: 17901 - protein, 485 aa, unidentified
KEQKARVVQSNPFTIQLLYETNDVVQPLYLGIDPGRTNIGVAVVKADGTAVFAAHLETRNKKIPKLMQDRKKARRARRTNGRRCRRQRRAKANGTISKKCVKQDTAQSKNPSKRAKEIGVIKRYLPGCKKDVLCVGIKNKEAKYTNRARLEGWLTPTANQLLQTHINLVKKIQKFLPISDAVLEVNKFAFMRLDNPNIQKWQYQQGPLYQKGSLENAVSEMQEHHCLFCEKPIEHYHHVVPKSENGSNTIANIVGLCAEHHNLVHKDVAWQEKLVEEKTGLNKKYGALSVLNQIIPALTKELSFLFPKHSFMTNGKSTHDYRAAHGISKDHWLDAYCIACSGLPIDVCDSTINNCVPYELKQFRRHDRRALNNENMNRVYTLNDKVVATNRHKATEQEAASLEEFRKEHPNDVCKLKVKEHHPTYRNMNRNYPGSVFLVGKQIHVMQGIASSKDGKATKYNDTRATTIAAGKCKFVAKNSGILFV

SEQ ID NO: 17902 - protein, 512 aa, unidentified; identical to SEQ ID NO: 13775

SEQ ID NO: 17903 - protein, 357 aa, unidentified
EIRCGIDDGGLHVGIALVQKCKSKNKVVFKGTIEQRNDVKHLMEVRRNYRRYHRYHKRYRQARFDNRKSSKRKGRIAPSILQKRQATIRVINRLNKWINITNYWLEDVSIDIRVLTDGYKSYSWQYQKSNRLDENIRKATILRDGGKCMECGKSNCRLEVHHIKPRRRNGSNTLDNLITLCESCHQKTEGQEELYMDRYFSLLKSSDNKNLNYAQHVMIGKMWLRKQLSGLGVLYLTSGGDTANKRIDWNIEKSHTNDAVCITDLQPDTCDIKEWAIKPMRRQSKAKTDHVLGIHHRDLVEYTFKNGETHRGYVTALYPDQKAINFQSQTKHCKKVNARKCKLLWNYSKIYWFENAS

SEQ ID NO: 17904 - protein, 419 aa, unidentified; identical to SEQ ID NO: 4131

SEQ ID NO: 17905 - protein, 524 aa, unidentified
MQNKCLSKGNIYRMQSSQAVFVLTGRRLLLMTTVYIQTRSGKPLMPTTRCGYVRRLLKFGKARVVSTCPFTVQLLYETEEKTQPLVLGIDPGRTNIGMAIVTEDAGPEMLLQAETRNKEMPKLMEKRKSFRQKHRKCRREKRRRRAKAAGTESPKGEIERILPGCEKPIVCKGIKNKEARFNNRKRPAGWLTPTAKHLLQTHLNLVETVGRILPITDVVLEVNKFAFMALDNPNIRPWEYQKGPLYRQGSVEKAVFAMQDGTCLFCGKPITRYHHVVPRSKGGSDTLENRVGLCEEHHALVHTDPEWAKKLKEQKTGMNKKYHALSVLNQIIPFLTDELAKRFPDHTYVTSGKSTFDFRNVHDIPKDHYLDAYCIACSILDKSDSRVLNEKPYLVRQFRRHDRQACHQQNCKRRYMLDGKVVAVNRHQAFEQKETSLEKYLANGGGSDNLTVKRQKPTYKRQDRIMPGALFCVNGLIKAMTASTGLHNGIPDYFHFADQTKSTPKRSYKLLNNTGLVFADVLNN

SEQ ID NO: 17906 - protein, 512 aa, unidentified; identical to SEQ ID NO: 7341

SEQ ID NO: 17907 - protein, 419 aa, unidentified
MVYVINKDGQALMPTERFGKVRRLLKNGLAHVVCRIPFTIRLDYETTHFVQPISLGVDAGSKHIGISATTSKKELYAADVELRNDIVDKLSTRREQRRTRRSRLRYRKARFNNRVSSKHKGWLAPSVENKIQTHLTVVEKIHKFLPITKIIVETASFDIQKIKNPSISSKEYQQGEQLGFFNVREYVLFRDNHTCQHCKGKSKDHILNVHHIESRKTGGNSPSNLITLCESCHKAYHNGKIDIKIKRGASFRDATFMGIARWTTYERLKNIYPNVSMTFGYITKNTRITNGLPKEHYVDARCISGNPKSKPLGYYFYQKKVRCQNRQIHKANFLKGGRKKLNQSPFLVKGYRLFDLVEYQKELYYIFGRRDRGFFDIRKLDGTKVNKGSISCKHIRLVSKRRSILTERRNSCSIPPTKL

SEQ ID NO: 17908 - protein, 408 aa, unidentified
MVYVLNKQGEPIMPCKEAKARKLLKQNKAKIAKHEPFTIQLLFDCENQTQEVNLGIDAGSKYIGVSATTEKQVLYEADVELRNDIVNKLSSRRENRRTRRNRLRYRPARFNNRVKSKYKGWLAPSIEQKINTHIQVIKHLYEVLPITKLIVETAQFDIQKINNSEISGKEYQQGNQLGFWNVREYVLFRDNHECQRCHGKSKDSILNVHHIESRKTGGNTPNNLITLCETCHKAYHNGEVKLNFKRGKSYRDAAFMGIMRKTLFNRLCELYPNVYEIYGYITKNTRIENNLPKKHYVDARCISGNPKANPLDYYIYQKCVRRQNRQIYKNNFLKGGRKKNTKLNGNIFGFELFDTVKYQNKQCFVFGKRKSGYLDVRNLNGEKVNNGSISYKKLKRIKHNSTKLTERR

SEQ ID NO: 17909 - protein, 408 aa, Bacillus sp.; identical to SEQ ID NO: 9968

SEQ ID NO: 17910 - protein, 419 aa, unidentified; identical to SEQ ID NO: 17238

SEQ ID NO: 17911 - protein, 423 aa, Moorena sp.
MRVFVLNKNRQPLDPCKPARARILLSVGKAKVYRRYPFTIILTEEVKQPITHDHQLKIDPGAKISGLAIVQGKRVIWGSELTHRGFQIQEALTSRRQLRRSRRNRKTRYRKPRFLNRTRSKGWLAPSLTSRVQNILTWVKKLSRFCPVTGISQELVRFDTQKLQNPEISGIEYQQGTLYGYELREYLLEKWNRKCAYCGVAGTQLEIEHIKPLSKGGSNRVSNLAIACRPCNQAKSNQDIELFLSKKPSILKRILSQAKRSLADAASVNTTRWKLYHDLKSIGLPVEVGSGGLTKFNRCRQSLPKTHWLDAANVGKVETLIIEVTLPLAISAKGHGTRQLCRTNKYGFPTRHCSRIKFHKGFQTGDLVRAVVTKGKKIGTYVGRVATRKSGSFNISTKSGLVQGISHKYCKFIHRKDGYAYAN

SEQ ID NO: 17912 - protein, 428 aa, unidentified
LKVFVLNMRGRPLMPCSPAKARHLLKAGKAVVRRRTPFTIQLRIATGETKQSVTLGVDAGAKHVGLSAATEKEEVFASEVELRQDITGLLAARLSLRRDRRHRKTRYRAPRFLNRVRSKHKGWLAPSVENRIQAHMSRIDAVCRLLPVTKIVIETASFDIQKIKDPSVEGTDYQQGDQLGFWNVREYVLFRDGHVCQHCHGHSKDKILNVHHLESRKTGGDAPNNLITLCETCHKAYHAGKIKLKVKRGQSFRAEAFMGIMRWTLLDRVRKAHPGLPVENTYGYLTKNTRITLGLPKAHCVDAYCIAGNLKAVRRGVHLYQRQVRKHNRQIHKCTVLSKTLKDGTKIGYRKLNQTPHLVKNFRLFDKVRCLGQTGFIFGRRSSGYFDVRRLDGVKISSCISYRKLTLLEKRSTYLTELRKEDGASSPV

SEQ ID NO: 17913 - protein, 418 aa, unidentified
MVYVLGQDGHPLMPTCRHGKVRRMLKSGMAKVVKRCPFTIQLQYESTIHTQEINLGIDAGSKTIGVSATTEKKVLYESEVILRNDIVGLLSGRRALRSSRRNRKTRYRKPRFDNRKKPDGWLAPSIRQKIETHVTVVGNVIKILPVTKIIVETASFDIQKIKNPEIEGEGYQHGEQLNFWNVREYVLFRDGHTCQCCKGKSKDSILNVHHIESRKTGGNAPNNLITLCETCHKAYHKGIITLPKEIYRGMRFRDAAFMGVMRWAFYDRLKELYNPLGVEVINTYGYITKNTRIEHGLPKEHYVDARCISDNPAAKPLDHYYFQKKVRCHNRQIHKNTILKGGTRKRNQAAYLVKGFRLFDKVKYQDQEYFIFGRRTRGSFDIRTLDGTKVNKGSISCKKLQLVEKSKHYLTEQRKVTA

SEQ ID NO: 17914 - protein, 419 aa, unidentified
MKKRKESRRTRRTNGRRCRRQRRAKANGTISKKCVKHGTAQNGSVSKRAKEIGVIKRHLPGCEKDVLCIGIKNKEAKFSNRTRPEGWLTPTANQLLQTHINLVKKIQKFLPISDVVLEINKFAFMRLDNPNVQKWQYQQGPLYQKANLEETVSEMQEHHCLFCKKKIDHYHHVVPQHKNGSNTIDNIIGLCTQHHDLVHKDATWQKRLAKKKTGLNKKYGALSVLNQIIPALTKELSSLFPKHFFVTNGKSTYDYRAAHGVSKDHWLDAYCIACSVLPNDTCDKTINSRVPYELKQFRRHDRRALNNENMSRVYTFNGKMVATNRHKATEQTTDSLEEFRQRQPNDVCKLKVKEHHPTYRNMNRNYPGSVFLVGNQVHVMQGIAGSKDGEATTYKDTNANSIAAGKCKFVAKNSGILFV

SEQ ID NO: 17915 - protein, 456 aa, unidentified; identical to SEQ ID NO: 6857

SEQ ID NO: 17916 - protein, 373 aa, unidentified
ILLKDETERHNDCRKYRRTRRNRLRYRKALWNNRHDNLICKDGFAPSIRNKRDTHIILFKMYYEVCPITSATFEMGQFDTQLLKAIENGENIPQSTDYQHGEQYGYSTLREAVFTRDNYKCICCGKSAIKNGSILKIHHLGYRIGDRTNRMNNLATVCSNCHTSKNHQKGGKLYDLKPRLKGFKGATFMTMVRYDMFAKLKEVTPNIDFNMTYGALTKLKRKDYHIKKSHSNDAYVMGMFHPKHRTDFKCYQKLRRNNRILSKFYDAKYIDLRDGTVKSGKQLSYNRTSRNELRNSNKNERIYRGQKVSKGKIVVRKQHYQYRPYDFIWYENVKYIVKGVQDKGKRIALQNHLPVSLSRVDKCVHTNGWSLVN

SEQ ID NO: 17917 - protein, 513 aa, unidentified; identical to SEQ ID NO: 8629

SEQ ID NO: 17918 - protein, 408 aa, unidentified; identical to SEQ ID NO: 3192

SEQ ID NO: 17919 - protein, 434 aa, unidentified; identical to SEQ ID NO: 5659

SEQ ID NO: 17920 - protein, 414 aa, unidentified
MPCSPAKARLLLKEKKAIVKRRTPFTIQLTIATGESKQPVTLGVDAGYKHVGLSASTEKAELYASEVELRQDVSDLLSARRALRQSRRNRKTRYRAPRFDNRIRTKRKGWLAPSVENRINAHLSRIEAVLRLLPITKITVETASFDMQRLKNPDISGKEYQEGEQLGFWNVREYVLFRDGHVCRHCHGRSKDPVLNVHHLESRRTGSDSPDNLITLCETCHKALHRGEITLKAKRGQSFRAQAFMGIMRREVLNRLKASYPELKVHETYGYLTKHARIANGIVKSHGADAFCIAGNLGAERLGEFFFQKQTRRNNRQIHKLSILKGGIRKRNQAPFEAKGFRLFDKVACQGEEGFIFGRRSSGSFDVRKLDGTRISAGISCKKLRLLEKRRTYLTEIRKEEALPPLPEGRGLRA

SEQ ID NO: 17921 - protein, 417 aa, unidentified; identical to SEQ ID NO: 15658
  source 1..417: note = Spirochaetales bacterium UBA4673

SEQ ID NO: 17922 - protein, 489 aa, unidentified; identical to SEQ ID NO: 15226
  source 1..489: note = uncultured beta proteobacterium

SEQ ID NO: 17923 - protein, 419 aa, Aneurinibacillus sp.
MVVYVINRQGKPLMPCSPRKARILLKQQKAKVVKRTPFTIQLFYGSRGYRQPVSLGVDAGTKHIGLSATTETRVLFEGDVQLRTDIPQLLATRLQFRRARRSRTTRYRKARFLNRKKSKGWLAPSVQHKVDSHLKVVQLVHRIFPVTKITVEVAQFDTQLLKNPSIKGEEYQQGEQMGFWNVREYVLFRDKHTCQRCKGKKKDNILNVHHIESRKTGGDSPDNLITLCETCHNEIHQKGLEHTIKRKTQTLRDVSQMTVMRWFIYNGLKERYPHIQLTYGYITKNTRITNGLGKSHEVDARCISGYPLAKPMDTVYHLKFVRKNNRQLHKATISKGGKRKSNKAERFVKGFQLFDKVLYEGQECFIFGRRSSGYFDIRKLDGTKIHASASYKKLTRIEYARTLLIERRKGDSSPTYATA

SEQ ID NO: 17924 - protein, 428 aa, unidentified
LKVFVLNMRGQPLMPCSPAKARHLLKAGKAVVRRRTPFTIQLRIATGETKQSVTLGVDAGAKHVGLSAATEKEEVFASEVELRQDITGLLAARFSLRRERRQRKTRYRAPRFLNRVRSKHKGWLAPSVENRIQAHMSRIDAICGLLPVTKIVIETASFDIQKIKHPDVEGTDYQQGDQLGFWNVREYVLFRDGHVCQHCHGHAKDKILNVHHLESRQTGGDAPNNLITLCETCHKACHAGKIKLKVKRGQSFREEAFMGIMRWTLLDRVRKAHPGLPVENTYGYLTKNTRITLGLPKAHCVDAYCIAGNLKAVRRGVYLHQRQVRKHNRQIHKCTVLSKTLKDGTKIGYRKLNQTPHLVKNFRLFDKVRCLGQTGFIFGRRSSGYFDVRRLDGVKISSCINYRKLTLLEKRSTCLTELRKEDGASSPV

SEQ ID NO: 17925 - protein, 423 aa, Moorena sp.; identical to SEQ ID NO: 2845

SEQ ID NO: 17926 - protein, 450 aa, unidentified
MVYVINFEGKPLMPTTNAKARKLLKQKKATVKRVNPFIIQLLYKTDTEYIQTITLGIDSGYLNIGFSAITDSKELIVGEVKLLQGMKDRLLEKSQYRRIGRQRLRYRKPRWNNRKIRQGWLAPSLQHKLDTHVKFIDYLNTILPIRNIVLEVANFDIQKIKNPDISGVEYQQGEQMGFWNVREYVLHRDGHKCQNPNCKNKSKEQILEIHHIKYKSEGGSDAPSNLITLCNKCHTSPNHKKGKFLYDWCENGKKVRGFRDATFMSMIRWYLLEQLKEKYTNIKATYGYLTKNHRIEHGIEKSHFNDAFAIAKGVNQVRNLEIFKVEQSRLNNRSLEKFYDAKYIDNRTGEKVSASELNCGRRTRNKNLNSENLRVFRGQKISKGQRRIRKKKSLYQSNDLIKYESKVYTVKGSQNEGKYIALKEIKKVPNVKLIKPYIFKKGLNWSHGLC

SEQ ID NO: 17927 - protein, 456 aa, unidentified
MSTCVCVLSNSGERLMPTIRLGKVRRLLKDGKAKIVKHHPFTIQLLYDSKANTQPIEICEDVGYNYIGISVKSESHEYVSAQYDTLQDEKEHHDDCRKYRRTRRNRLRYRKPRFDNRKRSEGWLAPSLEHKKQLNIRLIERYVSVIPITRATVEVGSFDTMLLQAIQKGESKPEGVDYQKGPRYNLATLREAVFYRDNYTCQVCGRKIADGAILHMHHMFYWKGRHGYQLDELVTACEKCHTPANHQKGGKLFGFGENKEFANLSGAAFMNAVRWQIVNALYATYGKEFVTITYGAMTKEKRIILGIEKTHNNDAYAMGDYHPAHRCVFRHYQKRRRNNRVLEKFYDATYIDARTGNKAKGKELFNGRISRNHKKDSEDLHKYRSKKVSKGRRSIRRQRYAIQPYDTVRLESKTYITSGCHNKGTRLLIPANGKSKSVAISKVQVVCHAGAWIQII

SEQ ID NO: 17928 - protein, 427 aa, unidentified
  source 1..427: note = Cyanobacteria bacterium UBA11148
VAEMPNYVFVLDTNKQPLNPIPPARARELLTKQKAAVFRMYPFTVILKHAVHDPTPKPLTIKLDPGSKFTGIAVLEGENVIWVAELEHRGWQIKDSLGSRRSLRRSRRHRQTRYRQPRFNNRKRQEGWLAPSLRHRVLTVETWVKRLCRYAPITQIAMELVKFDTQKMQNPEIDGVEYQQGELAGYEVREYLLEKWGRKCAYCDKEGVSLQIEHIHPRAKGGSNRVSNLALSCERCNIKKGTKFIDEFLKKDSSRLEKIKLQAKQPLKDAAAVNTTRWALFRALKEILPTTTGTGGQTKYNRIRLELPKHHWVDAACVGEVEKFNLLTQQPLRIKCTGWGTRQMCGTDKYGFPIRHRERKQIHFGFRTGDIAKVVVTSGKKVGQYIGRVLCRRTGSFDIATKTGRVAGISYKFCTSIHKKDGYSYAF

SEQ ID NO: 17929 - protein, 451 aa, unidentified; identical to SEQ ID NO: 2436

SEQ ID NO: 17930 - protein, 418 aa, unidentified; identical to SEQ ID NO: 12063

SEQ ID NO: 17931 - protein, 431 aa, unidentified; identical to SEQ ID NO: 4306

SEQ ID NO: 17932 - protein, 406 aa, unidentified
MVYVQDIDGKPMMPTTRHGKVRRLLKDNKAVVVNTCPFTIKLTYKTSDYKQEIVLGVDAGTKHVGLSATTKSKELYSGEVILRNDVVELLSTRRESRRARRNRLRYRKPRFENRVKSKRLGWVAPSVRHKVDAHIRVIDNICSTLPISRIIVEIAQFDTQKIKNPDISGNEYQEGDQLGFWNVREYVMARDGHKCQHCKGKSKDPILNVHHIESRKTGGDSPSNLITLCETCHKEYHKGNIDLKVKRGKSLRDAAVMGIMKWKLYEELKSRYPNVSMTFGYITKYNRIKYGIEKSHTSDAFVISRNFNAKRIERQYLKRLIRRHNRQIHKMKILKGGKKKNNQAPFEVFGFRLFDKVLYNNEICFIYGRRKSGCFDIRDFDGKNSKNVTYKKLKLIRGKRYPIILK

SEQ ID NO: 17933 - protein, 450 aa, unidentified; identical to SEQ ID NO: 2935

SEQ ID NO: 17934 - protein, 457 aa, unidentified
VWLYQAVYNHGEGFLPSSEERTAFYWLLIYRKEHGIMQYVYVLNKHGEPLMPCSPGKARLLLKQQKACVVKRTPFTIKLLYGSAGYKQPITLGVDAGSKHVGLSASTEKRELYREEFTPRNDVVDLLSTRRQNRRSRRNRKTRYRAPRFDNRVHSKHKGWLAPSVEVKIQEHITVIKRICRILPITLVRVETAEFDTQRLKAMLKGKPLPVGTDYQLGEMYDEYNVRQYVLKRDNYTCQCCGAHPTEKKPVRLHVHHLESRHVGGNAPNNLITLCVACHKALHEGKITLDKGKKRGKPLRDAAFMGIMRNTLLARLKDELNIPVKQTYGYITKLLREKNKIPKSHVNDARCIAKAPNAKPCDTMLYTRALRHHNRQIHKAKILNGGIRKKNQAPYLVKGFRLWDKVRYNGEECFITGRRSSGYFALKKYDGTVISNSASYKKLMLLEAATNYITERS

SEQ ID NO: 17935 - protein, 417 aa, unidentified; identical to SEQ ID NO: 14385

SEQ ID NO: 17936 - protein, 419 aa, unidentified; identical to SEQ ID NO: 3670

SEQ ID NO: 17937 - protein, 415 aa, unidentified; identical to SEQ ID NO: 16389

SEQ ID NO: 17938 - protein, 236 aa, unidentified
LLMVAVVDLFGKPLMPTNEYRARKLLKQKKAKIFGYRPFTIQLTERKSAEIQPIELCMDTGYIHIGISAKSERHEYLGMQIDTLTDEKLKRDDKRQYRRQRRNRKRYRAPRFDNRRRKEGWIAPSLEHKKEIHIDAIQRICKVMPITDITLEIGNFDTHVLKAVEEGKPLPQGSDYQHGERYGIATLREAVFFRDGYKCQCCEKSVKDGAILHVHHIKYRSQGGTNRMSNLITVCD

SEQ ID NO: 17939 - protein, 441 aa, unidentified
MQRTLVLDKDKRPLMPCHPARARALLKNGKAAVYRKFPFTIILNNRDGGSVQPIEVKLDQGSKTTGIALNLHGKRGVKTIWCANLNHRGHQISEALASRAATRRARRNRKTRYRQARLDNRAKPKGWMAPSLMSRVYNCETWCSRLAKFAPVSAFVVETARFDTQKMSNPDISGAEYQQGELAGYEVREYILFRDRHVCQYCHGASNNRVLNVDHKHPRSKGGSDSVKNLVTSCRKCNEDKSNLLLEDWLAKEKKMRSKLAKSRVLHIPKVIAGKFMPMRDAAAVNAARYRLGDSVKKFGLPVTFTSGGQTKFNRTKQGYEKEHWVDASCAGDTGSSVLIPMGLKPLVISAKGHGTRQMCRVDKYGFPRTSAKLNSVINGFRTGDIVLADVPSGKKQGRHTGRVAVRANGFFNITTIDGTVQGISHKHCRLQQVSDGYQYN

SEQ ID NO: 17940 - protein, 513 aa, unidentified; identical to SEQ ID NO: 3179

SEQ ID NO: 17941 - protein, 415 aa, Eubacterium hallii; identical to SEQ ID NO: 15461

SEQ ID NO: 17942 - protein, 411 aa, unidentified; identical to SEQ ID NO: 3917

SEQ ID NO: 17943 - protein, 426 aa, unidentified
MSNSTNYVFVLDASKKPLTPCKPSMARSLLKAGKAKVFRRYPFTIIVNKLVAEKHQGLLLKIDPGSKQTGFAIVTQGGEVIFAMVLVHRGQQIKNALERRRTIRRSRRNRKTRYRQPRFLNRKRKKGWLPPSLMHRVLTTETWVNRLIKLAPIDSIAMELVSFDTQKMVNPEVSGVEYQQGELAGYEVREYLLLKFNRTCAYCDAKNVPLEVEHIQPRSKGGSNRISNLTLACRPCNEAKGNQDIKDFLRGKPNLAIRILSEAKTPLKDAAAVNATRWKLFETLKAKGLPITTGSGARTKYNRCRLDLPKEHWIDAACVGEVEQLIILTTQPLLVTAMGHGCRQMVQMDKYGFPRKGYQAKKPVPGWKTGDMINVVKGKNIGLKGVRIKTVRSKGNFDIRHGDKILSVSRNHIQPIHRGDGYNYSF

SEQ ID NO: 17944 - protein, 537 aa, unidentified; identical to SEQ ID NO: 2454

SEQ ID NO: 17945 - protein, 406 aa, unidentified; identical to SEQ ID NO: 9290

SEQ ID NO: 17946 - protein, 425 aa, Moorena sp.
MSTNYVLVLDTNRKPLNPCKPGMARSLLKAGKAAVFKQYPFTIILNKAVDDAPKPVQLKIDPGSKVTGLALVQDDKVLWGAELYHRGQQIKADLEDRRKLRRGRRNRKTRYRQPRFLNRTRPEGWLAPSMLHRVLTTMTWVRRLTKFVPVTGISLERVRFDMQKMINPEVSGVDYQQGELQGYEVREYLLEKWNRQCAYCKATDTRLEVDHIHPKSKGGSDRVSNLTVACHDCNQAKGNRNITDFLSGKSDLLNRILSQVKQPLLDAAAVNSTRNKIAEELIATGLPIEFGTGGQTKYNRCRLDLPKTHWLDAACVGVVVHLTLETKQCLTITASGHGNRQMAGVDKYGFPYRHRTRQQVHFGFRSGDIVRAVVPKGKKAGTHLGRVLCRKSGSFDIQTKSGRVTGINHKYCSTIHGRDGYAYVF

SEQ ID NO: 17947 - protein, 431 aa, unidentified
MPNKVYVINKHGRPLMPCSPAKARHLLDAGKAKVKKRTPFTIQLVYGSSGYTQEVILGVDAGSKTIGMSASTTKEELLSAEVKPRNDVVDLLSTRREFRRARRNRKTRYRKPRFDNRVRSKHKGWLAPSVEVKIQEHITSIKRVCRILPVSKVVVETAEFDLQLLKAIADGKPVPQGEDYQKGEMYGHYNVRQYVLWRDNYTCQCCGTHPSKKKEVRLHVHHLESRKVGGDAPDNQVTLCESCHEKLHKGLIAEKDFKKRKRRSTRDATFMGIMRKTLMQRLCSELPIPVVKTRGYITKATREKLLVLPKSHTNDALAIAQGKRGFNVGYLPEIAQIDKIYTIRPVRHHNRQLHKATILKGGIRKSNQTEKYVFGYRLFDKVQFNGQDCFIWGRRTTGIFTIKTINGKMIKDGISFKKLKLVEKSTSYLIA

SEQ ID NO: 17948 - protein, 428 aa, unidentified
MNYVYVLDKKGKPLMPTTRYGKVRRMLKSGQAKPVQNLPFTIQLTYIPKTTVCQPVIVGFDPGRTNIGISAVREDGTCLNLTHCETRNREIPKLMQKRKEHRQTSRRGERLVRKRLAKRHGTVSSKPLERILPSCEKPLKVKDIINTESRFNNRLRSEGWLTPTATQLLRTHVNLLKRMCQILPATDVVMEVNRFAFMQLDQPNVKKCGIDFQHGPLFGTDGIKEAVSIQQDGRCLLCEKRTIEHYHHIVPRAYRGSDTAENIAGLCAGCHKLVHTSREASNKLKHKKDGINKKYGGISVLNQVIPFLFMEFEQMFPGHTYATNGWNTKQFREKYRLAKDHSVDAYCIAASILPEPKVELPEDTHEIVQYRRHDRARIKRQTERTYCLGKKGVCKNRHKRFEQKTDSLEEYVEKYPNFLSNLTVKKSQ

SEQ ID NO: 17949 - protein, 401 aa, unidentified
RRQRRAKANGTISKKCVKQDTAQNGSVSKRAKKIGVIKRHLPGCEKEVLCIGIKNKEAKFSNHVRPEGWLTPTANQLLQTHINLVKKIQKFLPISDVVLEVNKFAFMQLNNPNIQKWQYQQGPLYQKANLEEAVSEMQEHHCLFCKKPIAHYHHVVPQSENGSDTIGNIVGLCTKHHDLVHKDTEWQKKLAKKKTGLNKKYGALSVLNQIIPALTKELSSLFPKHFFATNGKSTYDYRAAHGVSKDHWLDAYCIACSVLADDVCDNNINSHVPYELKQFRRHDRRALHKENMSRVYTLNGKSVATNRHKATEQTTDSLEEFRQCQPDDVCKLKVKEHYPEYRNPKRNFPGCVFLVGKHTHVMQGTSGSHNGKADGYYDTNGNSYSSGECKFVAKNEGIVFA

SEQ ID NO: 17950 - protein, 411 aa, unidentified
VWLTQTTCDIGEGFQLSAKRERLLFSRQIFRKEHGIMQYVYVLNKHGKPLMPCSPGKARLLLKEGKARVVKRTPFVIKLLHGSAGYKQPVALGVDAGSRHVGLSACTEGRELYKEELSPRNDVVELLSVRRQYRRSCRNRKTRYRAPRFNNRVHSKHKGWLAPSVEVKIQEHITVIKRVCRILPIVLVRVETAEFDTQRLKAMLEGKPLPVGSDYQLGEMYDEYNVRQYVLKRDNYTCQCCGAHPAEKKPVRLHVHHIESRHVGGNAPNNLITLCAVCHKALHEGKITLGNGKKRGKPLRDAAFMGIMRNTLLARLKDELNIPVKQTYGYITKLLREENHVEKSHTNDARCIAKAPNAKPCDTMFHTRALRHHNRQIHKAKIIKGGTRKKNQAPYLVKGFRLWDKVRYNGE

SEQ ID NO: 17951 - protein, 456 aa, Halomonas sp.
MAIFVLDKKKQPLMPCSEKRARLLLARGRAVVHKRYPFTIRLKDRVGGETQPLRLGIDPGSKTTGLALMREPDSQQRHMLCLFELVHRGLQIKKALQQRAAFRRRRRSANLRYRAPRFNNRTKPKGWLAPSLQHRVDTVTAWVKRLSRLAPVTAISQELVRFDTQKLENPEISGVEYQQGTLLGYEVREYLLEKWERECAYCGTGDTPLEIEHVVPRSRGGSNRVSNLTLSCHPCNAEKDSQTLTDFFATNKGLKKRLKANGLSADAQLERVQRQLKQPMRDASAVNATRWALFSALKTTDLPVAVSSGGRTKYNRQRLNIPKTHALDAACVGAFEKLHDWTVPTLTIKAMGRGSYQRTRLTKHGFPRGYLMRQKQVHGFQTGDMVRAIVPTGKKAGTYTGRVAVRKRGSFNIQRSAGTVSDISYKYCTLIQRSDGYGYYVTPFTNLTGGAGQAVA

SEQ ID NO: 17952 - protein, 470 aa, unidentified; identical to SEQ ID NO: 6354

SEQ ID NO: 17953 - protein, 442 aa, unidentified; identical to SEQ ID NO: 8268

SEQ ID NO: 17954 - protein, 408 aa, unidentified; identical to SEQ ID NO: 4614

SEQ ID NO: 17955 - protein, 413 aa, unidentified
MTNYAFVLDANGKQLAPTKEQKAWFLIRKKRATLVSKYPMVIQLKKEISDEQICKDEICCGIDDGGIHVGLALVQKCKTKNKVVFKGTIEQRNDVKHLIEVRKGYRNYHRFHKRYRQARFNNRKSSKRKGRIAPSIFQKRQATIRVIKQLNKWINIANYSLEDVAIDIRALTDGYKSYRWQYQQSNRLDENIRKAVILRDGCKCMECGKSNCRLEVHHIKPRRLNGSNTLDNLISLCEKCHQRTEGQEELYMDRYFSILSSTDNKNLDYAQHVMIGKKWLREQLSELGTLILTTGGDTANKRIDWNIEKSHANDAICITGLQPDACNVKEWTIKPMRKQSKAKTDNVLGIKHRDLVEYTFKNGETHRGYVTALYPKQNAINFQSPTKHCKKVNAKKCKLIWKYSKIYWLDNVL

SEQ ID NO: 17956 - protein, 502 aa, unidentified; identical to SEQ ID NO: 2616

SEQ ID NO: 17957 - protein, 536 aa, unidentified; identical to SEQ ID NO: 4526

SEQ ID NO: 17958 - protein, 521 aa, unidentified; identical to SEQ ID NO: 3983

SEQ ID NO: 17959 - protein, 438 aa, unidentified
MYVFVLDKHKKPLTPCRPSRARHLLGSGRAVVHKRFPFTIRLKDRTAEESVIKPVRVKVDPGARFTGIAIVREDRQGGPRLIAGIELEHRGNAIRDNMTKRAGYRRRRRSANTRYRAPRFDNRRRPEGRFPPSLRHRIDTTVSWMRRLTRIAPVSGFSVESVKFDTQKMLDPEVSGKEYQQGELEGYEVREYLLEKWCRKCAYCNAGNVPLQVEHIVPRARGGSDRVSNLTLACERCNRAKGARPVKEFLHDKPALLGRIRAHVKAPLSSAAAVNSTRNALFGEMRAFGLPVETGSGGLTKYNRTRLGLPKSHVLDALCVGTVSSAKVLTDSVLHVRCTGRGRYSRTLTDKYGFPRAYLPRGKRFFGFATGDIVRTAVPKGKYKGTWTGRVAVRESGWFALSTGKNTPDGKKERVNVKWDTCKILERNNGYEYSVIAV

SEQ ID NO: 17960 - protein, 424 aa, unidentified; identical to SEQ ID NO: 8456

SEQ ID NO: 17961 - protein, 431 aa, unidentified
MPNKVYVINKHGRPLMPCSPAKARHLLDAGKAKVKKRTPFTIQLVYGSSGYTQEVILGVDAGSKTIGMSASTTKEELLSAEVKPRNDVVDLLSTRREFRRARRNRKTRYRKPRFDNRVRSKHKGWLAPSVEVKIQEHITAIRRVCGILPVSKVVVETAEFDLQLLKAIADGKPVPQGEDYQKGEMYGHYNVRQYVLWRDDYTCQCCGAHATKKKEVRLHVHHLESRKVGGDAPDNQVTLCESCHEKLHKGLIAEKDFKKRKRKSTRDATFMGIMRKTLMQRLCSELPIPVVETRGYITKATREKLLVLPKSHTNDALAIAQGKQGFNVGYLPEIAQIDKIYTIRPVRHHNRQLHKAAILKGGIRKSNQAGKYVFGYRLFDKVQFNGQDCFIWGRRTTGIFTIKTINGKMIKDGISFKKLKLVEKSTSYLIA

SEQ ID NO: 17962 - protein, 425 aa, unidentified; identical to SEQ ID NO: 14294

SEQ ID NO: 17963 - protein, 448 aa, Eubacterium sp.; identical to SEQ ID NO: 9395

SEQ ID NO: 17964 - protein, 515 aa, unidentified
MTALEERLSKTEYIYVLGFDGKPQMPTRRKRHVLKLLKTGRARIAEDIPFTIRLTYRNAPVLQPVTLAEDPGRTNIGAAVLSPLGGLLFAAVIETRNKEIKKLMADRKKSRQASRRGERKARQRLAKRYGSMVKSGMVMRKLPMYAADKFVICKFIRNTQARFCNRKRCPDWITPTVQHLVQTHLNIIRKISRYLPVTDIAFEVNRFAFMHMENPEAMGVDFQNGPLKGYDDVKEAICTQQHGKCLMCKKPIAHFHHIVPRSRGGSDTIQNLAGLCPECHTKVHTDTTFRKDFDRKKSGQLKKYGALSALNQAVPFICKKLLEEYGEEHVHFCGGLDTSLIRTALGFEKTKKNQMHEVDAYCIGLAALEVNEVETPAFDHTFQIRQFRRQDRSIIHHQTGRSYYQGKEKVAQNRKPGFEQKTTALSQWYKEQIRIHGEKEAEKLRSQLRVEKSCRHYNDMDRFLPGAVFLYEGKRYVLSGRITNGKYLRACGQGMKNFPATECTFIRHNAGLVFI

SEQ ID NO: 17965 - protein, 424 aa, unidentified; identical to SEQ ID NO: 4955

SEQ ID NO: 17966 - protein, 431 aa, unidentified
MPNKVYVINKHGRPLMPCSPAKARHLLDAGKAKVKKRTPFTIQLVYGSSGYTQEVILGVDAGSKTIGMSVSTTKEELLSAEVKPRNDVVDLLSTRREFRRARRNRKTRYRKPRFDNRVRSKHRGWLAPSVEVKIQEHITSIKRVCRILPVSKVVIETAEFDLQLLKAIADGKPVPQGEDYQKGEMYGHYNVRQYVLWRDNYTCQCCGAHATKKKEVRLHVHHLESRKVGGDAPDNQVTLCESCHEKLHKGLIAEKDFKKRKRKSTRDATFMGIMRKTLMQRLCSELPIPVIETRGYITKATREKLLVLPKSHTNDALAIAQGKQGFNVGYLPGIVQIDKICTIRPVRHHNRQLHKAAILKGGIRKSNQAGKYVFGYRLFDKVQFNGQDCFIWGRRTTGIFTIKTINGKMIKDGISFKKLKPVEKSTSYLIA

SEQ ID NO: 17967 - protein, 432 aa, unidentified; identical to SEQ ID NO: 6070

SEQ ID NO: 17968 - protein, 423 aa, unidentified; identical to SEQ ID NO: 3538

SEQ ID NO: 17969 - protein, 512 aa, unidentified; identical to SEQ ID NO: 3720

SEQ ID NO: 17970 - protein, 428 aa, unidentified; identical to SEQ ID NO: 5055

SEQ ID NO: 17971 - protein, 415 aa, unidentified
MVYVVANDGQPLMPTERHGKVCRMLKSGMAKVVKKCPFTIQLQYESERNVQPVSLGVDAGSKHIGISATTKTKVLYESDVELRDDIVKLLATRRQLRRSRRSRKTRYRPVRFDNRKRKEGWLAPSIRQKIGSHLTVVANACKILPINQIIVETASFDIQKIKDPEIQGIEYQQGEQMDFWNIREYVLFRDGHICQCCKGRFKDKILNVHHIESRKTGGNAPNNLITLCETCHKGYHNGTVILPKNIKHGMQFKDAAFMGIMRWTFYNTLKEQYEPDIPVSMTYGYLTKNTRIEHGLPKEHYIDARCISGNPDAVSDGTYYYQKKVRCHNRQIHKQTILKGGIRKSNQAEYLVKGYRLFDKVRYQGREYFIFGRRKSGFFDIRTLSGEKVNKGSISVKKLTFADTRKNYLIERRTV

SEQ ID NO: 17972 - protein, 426 aa, unidentified
MTKTLTTRTIQACVLDRHGKPLMPTTRLGKVYRLLKAQKAHIVSYEPFTIQLDYEPDTQVIQPMTLGVDSGAIHSGYSVANEHREYYSAEVIARNDISNRLSDRHMHRRNRRSRKTRYRKPRFNNRKNKKKGWLAPSLEQKVAVQANEIEHIYRHFPIETIIVETAEFDIQKIKNPNISGIEYQQGTLQGYNIRNYLLEKHGRKCFYCGKTVSGFEVEHMLPKSRGGSHRIDNLTLSCHDCNQKKDTLTAEEFIRQILPAKKAAAKLKQLPNEKRVFKYMAHMNATRWTLYDTVKEKYPNVKMTYGYITKHNRIQAELPKAHHIDAKCITGFATVPSISQTVVKVKMRRHNRQLHRATFSKGHVRKAANLPTVTFGFQLHDLVCFNNHRYYIKGRRSSGSFALVSVEGLKDENRNYKKLTLLAHTN

SEQ ID NO: 17973 - protein, 380 aa, unidentified
LVSKYPMVIQLMKEIPENEICQDEIRCGIDDGGLHVGIALVQKCKTKNKVVFKGTMEQRNDVKHLMEVRRGYRRYHRYHKRYRQARFDNRKSSKREGRIAPSILQKRQATIRVIHWLNKWINITNYWLEDVSVDIRALTDGYQSYRWQYQRSNRLDENIRKAAILRDGGKCMECGKSNCRLEVHHIKPRRRNGSNTLDNLITLCESCHQKTEGQEELYMDRYFSLLKSSNNKNLNYAQHVMIGKRWLRKQLSGLGVLYLTSGGDTANKRIDWNIEKSHTNDAVCITDLQPDTCDIKEWAIKPMRRQSKAKTDHVLGIHHRDLVEYTFKNGETHRGYVTALYPDQKAINFQSQTKHCKKVNARKCKLLWNYSKIYWFENAS

SEQ ID NO: 17974 - protein, 417 aa, unidentified
MNMIYVRSKENKALMPTERGGRIGYLLRHGKAHVVSRVPFVVQLDYESHTYTQAVSLGIDAGSKHIGVSASTEKKELFAAQVELRSDVTKLLSDRRELRRARRYRKTRYRKSRFDNRRKKTGWLAPSIEQKVGSHLKVIRLVRGLLPLSRITIEVAQFDIQKIKNPNIAGEEYQQGEQLGFWNVREYVLARDGHRCVHCKGKSKDPILNVHHLESRKTGGNSPSNLVTLCETCHKAYHRGEFELKIKRGSSFRDASVMSIMRWAVYERARSEFGNVNLTYGYFTKHTRIENGIAKTHAADAFCIARNVHARRSDSFFLCRCVPRHTRALHVANPKKGGIRRSTIAPHKIGGSRFQRFDMVRWKGKECFIFGSTHGRPILRNCSGDRMHEISSVNLKTVKFMKRLRNNILMEERASES

SEQ ID NO: 17975 - protein, 442 aa, unidentified; identical to SEQ ID NO: 2903

SEQ ID NO: 17976 - protein, 458 aa, unidentified
MGRNSVAYIKTLYNIVDGYITGLVPELSIKLDRREFMQLVYVLNKDGLPLMPTHKLGKVRHLLKDGKAEIVKYSPFTIQLEYECENHIQPVTLGVDAGSKHIGLSASTEKIELYCSDVEIRNDIVELISTRRETRRTRRNHLRYRPARFNNRKASKPEGWLAPSVKQKVESHLKVVEEVYKIIPISTIIVEVASFDTQLLKAEAEGKTISGKDYQNGEMLGYNTREYVLFRDNHTCQHCHGKSKDKVLEVHHLESRKTGGNAPSNLITLCKTCHENYHKGKIKLKQTRAEKYNDATFMGIMRWSFYNELKEIYPDVSLTYGYITKNNRIKYNLAKEHYNDAYCIAQNFKAEPLDKVIYQKKVRCHNRQIHKANFLKGGKKKLNQAPYTVKTFRLFDKVKCQNQECFIFGRRSSGYFDIRMLDGTKVNNSVSYKKLELLEARKNYLKEERSRQFLPLIK

SEQ ID NO: 17977 - protein, 414 aa, unidentified; identical to SEQ ID NO: 11971

SEQ ID NO: 17978 - protein, 424 aa, unidentified; identical to SEQ ID NO: 3434

SEQ ID NO: 17979 - protein, 488 aa, unidentified; identical to SEQ ID NO: 9276

SEQ ID NO: 17980 - protein, 429 aa, unidentified
MLVYVLKQNGQPFMPTARFGKVRRLLKAKKAKVVRREPFTIRLLYEPETNVVQECYCGVDTGSKHIGVAVVSNDKVLYQSQTELRNDIKRKMDARRQARRFRRSRKTRYRKPRFLNRSNSTKGDRLPPSVKHKVQAHIDEIEFCKKILPVSDLIVEVSQFDTALMKDPRLISEKVKHWGYQQGFNYGYSSRREAILHRDNYTCQCCGKKNCRLEVHHVKFKSNGGTDDEENLITLCEDCHKGVHAGTVVLDKKPKKSKNLKYATQMSIIRSYLLKKYPNAIETFGFVTSENRNHLNLEKDHYIDACIVASGGLEFKELDVIYKKRRVSVQDRVLTKGVRGEQKLPTGKIFGFKKFDKVEYLGKTCFIKGRRSSGSFVLMNIDNKSIDFRDRGGKQNPSYRSIERVNTRRSILCISERIKGKERLIPVLS

SEQ ID NO: 17981 - protein, 363 aa, unidentified
GLSASTEKAELYASEVELRQDITDLLSARRALRQSRRNRKTRYRAPRFDNRISTKRKGWLAPSVENRINAHLSRIEAVLRLLPVTKITVETASFDIQLLKNPNIAGKEYQEGEQLAFWNVREYVLFRDGHVCQHCHGRSKDPVLNVHHLESRRTGGDSPGNLITLCETCHRALHRGEMKLRAKRGQSLRAEAFMGIMRWEVLGRLKTSHPELEVNNTYGYRTKHVRIRNGIAKSHCADAFCIAGNLGAERLGEFFFQKQTRRNNRQIHKLSILKGGIRKRNQAPFEVKGFRLFDKVACQGEEGFIFGRRSSGFFDVRKLDGTRISAGISYKKLHLLEKRRTYLTEIRKEEVLPPLPEGRGLRA

SEQ ID NO: 17982 - protein, 454 aa, unidentified
LDTVAVISASGRKLMPTNSYRARRLLKLKRAVIYKYRPVFTIKLVDRTNGYTQPIEYKCDTGYQNIGISICSDTKEFVNEQRELLKDEVKRHSDSRKYRRTRRNRLRYRKKRFDNRKGMISKDGFAPSIRNKRDVHIHLYEEYYKVFPITKAVFEMGQFDTQVLKAVEAGLPIPDGTDYQRGEQYGYATLREAVFARDNYKCICCGKSAVRDGVKLRIHHIGYLSGDRSNRMANLGSVCESCHTSKNHKPGGKLYSLKPELKTFKGATFMTTVRYSMVKKLKVMTPTVGIKVTYGAATKLARRVLSVKKTHSNDAYCMGEFHPKHRSDFKHYKKCRRNSRVLSRFYDAKYRDLRDGSVKTGSQLSCGRTNRKISRHAELDERIYRAHKISKGRVSTRRQHYSLRPGDKVLYDGKVYFVTGMQNSGTHVKLTNGKVCSLKKVHVLQHCNAWTAVI

SEQ ID NO: 17983 - protein, 481 aa, unidentified
VQPLYLGIDPGRTNIGVAVVKANGTAVFTAHLESRNKEIPKLMQDRKKARRARRTNGRRCRRQRRAKANGTISKKCVKQDTAQNGSVSKRAKKIGIIKRHLPGCKKDVLCIGIKNKEAKYTNRTRPEGWLTPTANQLLQTHINLVKKIQKFLPISDVVLEVNKFAFMRLDNPDIPDIQKWQYRQGPLYQKGSLENAVSEMQEHHCLFCEKPIDHYHHVVPKSENGSNTIANIVGLCAEHHNLVHKDVAWQEKLVEEKTGLNKKYGALSVLNQIIPALTKELSFLFPKHSFMTNGKSTHDYRAAHGISKDHWLDAYCIACSVLPIDVCDSTINNCVPYELKQFRRHDRRALNNENMNRVYTLNDKVVATNRHKATEQEAASLEEFRKEHPNDVCKLKVKEHHPTYRNMNRNYPGSVFLVGKQIHVMQGIASSKDGKATKYNDTSATTIAAGKCEFVAKNSGILFVQCKFRKVFSDETTKKLQ

SEQ ID NO: 17984 - protein, 411 aa, unidentified; identical to SEQ ID NO: 3731

SEQ ID NO: 17985 - protein, 477 aa, unidentified; identical to SEQ ID NO: 2707

SEQ ID NO: 17986 - protein, 406 aa, Moorena sp.
MRVFVLNKNRQPLDPCRPARARILLSTGKAKVYRRYPFTIILTEEIIDPVTHDHKIKIDPGAKTSGFAIVQGERVVWGAELIHRGFQIRDSLTSRRQLRRSRRNRKTRYRKPRFLNRTRPKGWLAPSLMSRVQNIETWTKKLIKLCPVAGISQELVKFDTQKLENPEISGIEYQQGTLYGYELREYLLEKWNRKCAYCGTTGTQLEIEHIKPKSKGGSDRVSNLAIACHPCNQAKSNQDIELFLSNKPSILKRILSKAKRPLADAACVNSTRWKLYHDLKSTGLPVEVGSGGLTKFNRCRQNLPKTHWLDAANVGKVETLIIEVTNPLIITAKGHGTRQICRTNKYGFPTRHCSRIKFHKGFQTGDIVRAVVTKGKKIGTYVGRVATRKSGSFNISTKSGCAACSK

SEQ ID NO: 17987 - protein, 431 aa, Aphanizomenon sp.; identical to SEQ ID NO: 3492

SEQ ID NO: 17988 - protein, 431 aa, unidentified
MPNKVYVINKHGRPLMPCSPAKARHLLDDGKAKVKKRTPFTIQLVYGSSGYTQEVILGVDAGSKTIGVSASTKKEELFAANVIPRNDVVDLLSTRREFRRARRNRKTRYRKPRFDNRVRSKHKGWLAPSVEVKIQEHITSIKRVCRILPVSKVVIETAEFDLQLLKAIEEGKPVPQGEDYQQGEMYGHYNVRQYVLWRDDYTCQCCGAHATKKKEVRLHVHHLESRKVGGDAPDNQVTLCESCHEKLHKGLITEGDFKKRKRRSTRDATFMGIMRKTLIQRLRAELTIPVAETRGYITKATREKLLVLPKSHTNDALAIAQGKHGFNVGYLPGIEQIDKIYTIRPVRHHNRQLHKATILKGGIRKSNQAEKYVFGYRLFDKVQFNGQDCFIWKRRTSGYFVVKTIDGKIIHNSASFKKLRIAERASNYLIA

SEQ ID NO: 17989 - protein, 414 aa, unidentified; identical to SEQ ID NO: 3441

SEQ ID NO: 17990 - protein, 442 aa, unidentified; identical to SEQ ID NO: 2903

SEQ ID NO: 17991 - protein, 470 aa, unidentified; identical to SEQ ID NO: 2825

SEQ ID NO: 17992 - protein, 413 aa, unidentified
LKVFVLNMRGKPLMPCSPAKARHMLKAGKAFVVRRTPFTIKLTIATGETKQDVTLGVDAGARHVGISATTEKEEVFASEVALRQDITGLLADRLAFRRARRNRKTRYRAPRFNNRVRSKHKGWLAPSVENRIQAHMSRIEAVCRLLPVTKIVIETASFDIQKIRNPEVEGTGYQQGDQLGFWNVREYVLFRDGHVCQHCHGRSRDKILNVHHLESRKTGGDAPNNLITLCETCHKAYHAGKIKLKVKRGQSFRAEAFMGIMRWTLLDRVRKTHPKLPVENTYGYLTKHKRIALGLPKTHCADAFCIAGNLKALRRGDFLFQQQTRKHNRQIHRCSILKGGVRKLNQAPFLVKGFRLFDKVRIGGQIGFVFGRRVRGTFNIRRLDKTVIGTDINCKKLSLLETRKTFLTELRKE

SEQ ID NO: 17993 - protein, 475 aa, unidentified
MTALEEKLSKTEYIYVLGFDGKPQMPTRRKRHVLKLLKTGRARIAEDIPFTIRLTYRNAPVLQPVMLAEDPGRTNIGAAVLSPLGDLLFAAVIETRNKEIKKLMADRQKSRQASRRGERKARQRLAKRYGSMVKSGMVMRKLPMYAADKFVICKFIRNTQARFCNRKRCPDWITPTVQHLVQTHLNIIRKISRYLPVTDIAFEVNRFAFMHMENPEAMGVDFQNGPLKGYGDVKEAIRTQQHGKCLMCKKPITHFHHIVPRSRGGSDTIQNLAGLCTECHTKVHTDTAFRKDFDEKKSGQLKKYGALSALNQAVPFICKKLLEEYGEEHVYFCRGLDTSLIRTAFGFEKTKKNQMHEVDAYCIGLAALEVNEVETPAFDHTFQIRQFRRQDRSIIHHQTGRSYYQGKEKVAQNRKPGFEQKTTALSQWYKEQIRIHGEKEAEKLRSQLRVEKSCRHYNDMDRFLPGAVFLYEGKR

SEQ ID NO: 17994 - protein, 415 aa, Bacillus sp.; identical to SEQ ID NO: 15146

SEQ ID NO: 17995 - protein, 414 aa, unidentified; identical to SEQ ID NO: 2588

SEQ ID NO: 17996 - protein, 360 aa, unidentified; identical to SEQ ID NO: 12847

SEQ ID NO: 17997 - protein, 426 aa, unidentified; identical to SEQ ID NO: 3614

SEQ ID NO: 17998 - protein, 414 aa, unidentified
MPCSPAKARLLLKEKKAIVVRRTPFTIQLTIATGEAKQPVSLGVDAGYKHVGLSASTEKAELYASEVELRQDVSDLLSARRALRQSRRSRNTRYRAPRFDNRIRTKRKGWLAPTVENRINVHLSRIETVLRLLPVTKITVETASFDTQLLKNPDIAGKEYQEGEQLGFWNVREYVLFRDGHVCQHCHGRSKDPVLNVHHLESRRTGGDSPGNLITLCETCHKALHRGEIKLRAKRGQSFRAETFMGIMRWGVLNRLKASHPKLEVHNTYGYRTKHARIANGIAKSHCADAFCIAGNFGAKRLGEFFFQKQTRRNNRQIHKLSILKGGIRKRNQAPFEVKGFRLFDKVACQGEEGFIFGRRSSGYFDVRKLDGTCISAGISYKKLHLLEKRRTYLTEIRKEEALPPPPEGRGLRA

SEQ ID NO: 17999 - protein, 445 aa, unidentified
LKWEAPCESWERRSQTPSNNPDVDIQSGMTGRDLRVPVLNMRNEPLMPTTPGRARKLLKQNKARVISSNPFTIQLLYATGETKQPVRLGVDSGYKRTGFSVVTQKRELISGEAVIRTDIPKLNQEKSMYRRGRRNKLWYRQPRFMNRGNKKEGWLAPSINHKLQTHVKLIEKLKRILPITETVIEVASFDAQKMQNPEISGIEYRQGELQGYEIREYLLEKFHRTCVYCGKTNVPLEIEHLTPRSRGGPDTVNNLAISCHECNQRKNNLTAEEFGYPEVRKMALVTLRDAAFMNTVRWKLTHLTGSAHTFGYITKKNRISLGLDKSHANDAFVIAGGTDQIRASQYEISQRRRNNRSLQVNRKGFMPSIRRKRYTFQPGDIVVHSHERFSVIGVHSYGKSIVIKGGEMKMDINTKKVKLVKYGKGLRFTAQFLPPLKKVGILGGS

SEQ ID NO: 18000 - protein, 420 aa, unidentified; identical to SEQ ID NO: 15202

SEQ ID NO: 18001 - protein, 512 aa, unidentified; identical to SEQ ID NO: 4031

SEQ ID NO: 18002 - protein, 415 aa, unidentified
MIYVRSKDGKALMPSERGGRIGYLLRHGKAHVVSRVPFVVQLDYESTTYTQEVSLGIDAGSKHIGVSASSEKKELLAAQVELRNDVVNLLSTRRELRRTRRNRKTRYRKVRFDNRKKKDGWLAPSVKQKVESHLKVIRLVRKLLPITKTTIEVAQFDAQKIKRPDIQGEEYQQGEQMGFWNVREYVLARDGHRCVHCKGKSKDHILNVHHLESRKTGGNSPSNLVTLCETCHKAYHRGEFELKIKRGNSLRDAAVMNIMRWVVYERAKEEFENVHLTYGYVTKHTRIENGIAKTHAADAFCIAKNVNAMRLSSFFMCRCVPRHTRVLHVANPKKGGIRRSTIASHKIGKSRFQRFDMVRWRGKECFIFGSTHCNVVLRKIDGVKVHETQAVSAKTIKFLKRIRNNILVEEIVSIS

SEQ ID NO: 18003 - protein, 396 aa, unidentified
LLKQKKACVVKRTPFTIKLLYGSTGYKQPITLGVDAGSKHIGISAAAEKYELYCEEATPRNDVVDLLSARRAFRRSRRNRKTRYRAPRFNNRVHSKHKGWLAPSVEVKIQEHITLIKRVCRILPVTFVRVETAEFDTQRLKAMLEGKPLPVGTDYQLGEMYDEYNVRQYVLKRDNYTCQCCGAHPTKTKAVKLHVHHIETRRTGGNAPNNLITLCTACHKALHAGKVTLDGKKRGRSLKDAAFMGVMRKTLMERLLKELKIPVQGTYGYITKYLREKHSIPKSHTNDARCISKNPLAIPCDTCYYTKAIRHHNRQLHKATILKGGIRKANQAPYTVKGYRLWDKVSYNGSECFITGRRTSGYFALKKLYGTVVSNSASYKKMRLLEVATNYITERR

SEQ ID NO: 18004 - protein, 460 aa, unidentified
MVAVVDLFGKPLMPTNEYRARRLLKQKKAKIFGYRPFTIQLTERKSTEIQPIELCMDTGYIHIGISAKSERHEYLGMQIDTLTDEKLKRDDKRQYRRQRRNRKRYRAPRFDNRRRKEGWIAPSLEHKKEIHIDAIQRICKVMPITDITLEMGNFDTHVLKAVEEGKPLPQGSDYQHGERYGIATLREAVFLRDGYKCQCCEKSVKDGAILHVHHIKYRSQGGTNRMSNLITVCDKCHTPKNHKPGGKLWNWKPKLAEFKGVSYMTSIRWTLYNEVTALLPNSSVHITYGAKTKESRRKLDIKKSHVNDAYVMGLFCPKHRTKSVYFKKKRRNNRVLEKFYDAKYIDSRDGKKQSGQELFNGRISRNHRKDSENLHLYRKQKVTKGKRSIRNKHYPIQPHDILLYQKKKYENAGCHNNGSRVILLPEKKSVALKQLTIYQYAGGYYRVPYESNKKEERTGS

SEQ ID NO: 18005 - protein, 467 aa, unidentified
MKVFVIGMTGKRLCPTSPSKAKKLLKTGKAHVYRRVPFTIRLDYKTGGSAPPLKLGIDTGEQHIGTAVCNDATVFCKSEIELIKSMEKKKRLEKRKIYRRSRRYRKTRYRHPKFRFRTKRIYVEGGYRKRKGGKMVLRHWKKVPNTVMTNRHEGWLPPSIESKVKHHIDWINRYMDVLPDGTMLGIEVARFDIARMKDPSIRGELYQFGRMYGRENTKAYVLAKFDYTCPICKKKFDRDRKPRMHHVTMRKNAATDNPDEYAPVCVLCHSGEEHLPGGVLDKLAKECRRREYREPTFINILRRRLFETYPEAEFTYGNITNADRKMLGLEKTHANDAVSIAMHGAKKVIDCEDTVYYRQVHRKKRSLHEATPRKGKKEPNHTAKRNVKNVPYVGKFHINDKVKGPDGNIGFITGFTGSAAYITDFIGEYIYPEGKDYKQHTLSSLRYVHHCGNWITSSVSGAAVSHD

SEQ ID NO: 18006 - protein, 416 aa, unidentified
MPCSEKRARLLMERGRAVVHRMEPFTIRLKDRTLAQSETEPLRLKLDPGSKTTGMAVMSESGRVVFLGEVVHKKGIKMALESRRALRRTRRSRKTRYRKPRFLNRTRAKGWLPPSLEARVNQTLNAAAKLRNLLPIAAISTEHVKFDTQLMENPEISGVEYQQGELLGYEIREYLLEKWGRKCAYCGAENVPLEVEHIVPKTRGGSNRLSNLAIACTPCNQKKNSMTAEEFGFPDIQAQARKPLRDAAMMNATRWRLFERLRETGLPVECGTGARTKMQRLQHRLPKTHYFDACCVGASTPEELVISARYAAVWTATGRGKRQMCQTDKYGFPKTHRANRKVQFGFQTGDIVTADVPMGKYQGAWRGRATCRASGQFDLRDGQKAIICRTNYKRCRLIQRGDGWQYERVPITRREG

SEQ ID NO: 18007 - protein, 415 aa, unidentified
LMPCSPAKARLLLKEKKAIVVRRTPFTIQLTIATGETKQPVSLGVDAGYKHVGLSASTEKAELYASEVELRQDITDLLSARRALRQSRRNRKTRYRAPRFDNRIRTKRKGWLAPSVENRINAHLSRIEAVLRLLPITKITVETASFDTQLLKNPDIAGKEYQEGEQLAFWNVREYVLFRDGHVCQHCHGRSKDPVLNVHHLESRRTGGDSPGNLITLCETCHKALHRGEIKLSAKRGQSLRAEAFMGIMRWEVLNRLKLSHPEREVNNTYGYRTKHARIANGIAKSHCADAFCIAGNLGAKRLGEFFFQKQTRRNNRQIHKFSILKGGIRKRNQAPFEVNGFRLFDKVACKGEEGFIFGRRSSGYFDVRKLDGTCISAGISYKKLHLLEKRRTYLTEIRKEKALPPLPGGSGLRA

SEQ ID NO: 18008 - protein, 466 aa, unidentified
MSTCACVLSKNGERLMPTIRLGKVRHLLKDGKAKIIKHHPFTIQLLYDSKTDTQPIEICEDVGYNYIGISVKSESHEYVSAQYDTLQDEKDCHDDCRKMRRSRRNRLRYRQTRFDNRKRGEGWLAPSLEHKKELNVNVIKMYCEVAPITHATVEVGSFDTMLVKAIEEGKAAPEGVDYQKGPRYNLATLREAVFYRDNYTCQVCGREAQKDSAILHVHHMFYWKGRHGNSLSELLTVCEKCHTPANHQKGGKLYGFGENIKFANLSGAAFMNTVRWQIVNGLYAAFGKPFVTFTYGVMTKEKRIALNLEKSHNNDAYAMGSFHPADRCAFEHYEKVKRNNRILERFHDSQYIDIRTGNVTNGKSLFNGRINRSHKKDSENLHKYRGKRIRKGYRALRRKKVALNPGDSVSLNGEILIIQSTHTKKNGSVNVEFKTPSKSGKKSASLKKLKIVKMSNSMHSAWTKVS

SEQ ID NO: 18009 - protein, 557 aa, unidentified
MIYNLGSTRERGFMKQKKQKVMVYILNKKGKPLMPTTRCGHVRKLLNSKKAVVVNSNPFTIRLKYDTPNGVQDVFAGIDSGRENIGSGASNEDGDCLYLGELKTSNKSIKMKMTERVGFRRERRKHDRQNKQRKARKDHTEIQNGKDDICRATISCKSVQISYPTAEESVTHKIIRGKEGKFANRHRDGDWITPSARQLVQMHMNDLKSMCKILPISHVTLERVAFDFQKLENENIKVWEYGKGKLYGYDSPEEYIHDVQDGKCLVCGKPHIDYLHHIIPRSKGGSDKVSNIAGLCYDCHYGPMGVHNCQNTQDRLPELKNEVNKQYKVSLLNSVMPVLIEEIDKFCKANSIMFSICEGHDTAKVRDMYDLQKDHCIDGFAISLVDRNVKSVDVMPDRIYQKQRYKKKSKNIIQKRNYREYYDDKKLVAINRHKGTDQKADSLEEYMNTYAETHTADECKMHFESLTVKPARRTYTFHKEGRICPLHIGDKVRYEKKNKIKGNTKVDTFICEGIYFSKDENKAKVEHNKTKSKKMKFCRAIESGCIPYIDYIKLALI

SEQ ID NO: 18010 - protein, 490 aa, unidentified
MYVVYVLDRQGKPLMPTKRFGHVRRMLKTNKAKAISTKPFVIQLQYESTDFVQPLYGGTDPGRTNIGEAVLNNKGEVVYAAHVLTRNKEIPKLMADRAAHRKASCRGERLRRKRRAKANGTMTCFPEGRKLPGYKDGVLELKDIINTESRFNNRKRPAGWLTPTARQCIQTHLNMVQNICKILPVTNWTLEYNRFAFMQLEDGSVRGWDFQNGRFKGYASKEDYVYALQGGVCVCCGASIEHYHHIKPRHKGGSNTHENLVGLCSVCHAEIHIGKRNLDKIGKYKKYAGTSIVNIAIPFIWDGIVKMFGDKAHICEGQETAELRRANNIPKEHFADAVCIAGIGYGITPQYDDNQPFKLRQFRCHDRSRINAQVERTYLDGKTIVAKNRKPRFEQKGDALSDLQSKMTKEHGELAARRAVSKLVVKKSYRRYNVPERIKPSAVFMFNNKKYLLRGQLTNGMYYRAFGEGTKNFPSRNCEVVSSGCSLTYM

SEQ ID NO: 18011 - protein, 512 aa, unidentified
MSTVYVLNKDGKPLMPTTRCGHVRHLLKEQKARVVTSKPFTIQLLYETDDVVQPLYLGIDPGRTNIGVAVVKTDGTAVFTAHLETRNKEIPKLMQGRKKARRTRRTNGRRCRRQRRAKANGTISKKCVKQTTAQNGSVSKRAKEIGVIKRHLPGCEKDVLCVGIKNKEAKFSNRTRQEGWLTPTANQLLQTHINLIKKIRKFLPISNVVLEINKFAFMRLDNPNIQKWQYRQGPLYQKASLEEAVSEMQEHHCLFCKKPIAHYHHVVPQSENGSNTIGNIVGLCTKHHDLVHKDATWQKKLAKKKTGLNKKYGALSVLNQIIPALTKELSSLFPKHFFATNGKSTYDYRAAHSVSKDHWLDAYCIACSVLANDVCDSNINSRVPYELKQFRRHDRRALNNENMSRVYTLNGKVVATNRHKATKQTTDSLEEFRQNHSDDVCKLKVKEHHPTYRNMNRNYPGSVFLIGKQVHVMQGIAGSKNGEATTYKDTNANSIAAGKCKFVAKNSGVLFV

SEQ ID NO: 18012 - protein, 442 aa, unidentified; identical to SEQ ID NO: 3234

SEQ ID NO: 18013 - protein, 410 aa, Bacillus sp.; identical to SEQ ID NO: 12020

SEQ ID NO: 18014 - protein, 428 aa, unidentified
LKVFVLNMRGQPLMPCSPAKARHLLMDKKAVVKRRTPFTLQLTIATGETKQDVTLGVDAGAKHIGLSASTEKEEVFASEVELRQDITGLLAARLAFRRARRHRKTRYRAPRFLNRVHSKHRGWLAPSVENRIQAHMSRIDAICGLLPVTKIVIETASFDIQKIKNPDVEGTDYQQGDQLGFWNVREYVLFRDGHVCQHCRGRSKDKVLNVHHLESRQTGGDAPNNLITLCETCHKAYHAGKIKLKVKRGQSFREEAFMGIMRWTMLDRVRKAHPDLPVENTYGYLTKNTRITLGLPKTHCIDAYCIAGNLNARRRGVYLYQRQMRKHNRQIHKCKVLSKTLKDGTKVGYRKLNQTPYLVKNFRLFDKVRCFGQTGFIFGRRTSGHFDVRTLNRTRLSDCVNSKKLTLLEKRRTFLTELRKEDGASSPV

SEQ ID NO: 18015 - protein, 415 aa, unidentified
MVYVVANDGQPLMPTNRYGKVYRMLRSGMAVVVKKCPFTIQLQYESERNVQPVALGIDAGSKHVGVSATTKAKVLYESDVELRGDIVKLLATRRQLRRSRRSRKTRYRPARFDNRKRKNGWLAPSIRQKIESHLTVVANVCKILPVSRIIVETASFDIQKIKNPDIQGTEYQQGEQMDFWNVREYVFFRDGHTCQCCKGRSKDKILNVHHIESRKTGGNAPNNLITLCETCHKGYHNGIVTLPKNIKRGMKFKDAAFMGIMRWTFYNTLKEQYEPDIPVSMTYGYLTKNTRICHDLPKGHCIDARCISGNPDAVSDGTYYYQKKVRCHNRQIHKQTILKGGIRKSNQAEYLVKGYRLFDEVRYQGREYFIFGRRKSGFFDIRTLSGEKVNKGSISVKKLTFVDTRKNYLIERRTV

SEQ ID NO: 18016 - protein, 420 aa, unidentified; identical to SEQ ID NO: 6507

SEQ ID NO: 18017 - protein, 425 aa, unidentified
MYVYVLNQHGEPLMPCSPRKARIMLRDHKATVVRRTPFTIRLLHRSSEYKQDITLGVDAGSKFIGLSACTESKELFAAEVKPRNDVVELLSTRRELRRSRRNRKTRYRAVRFNNRVHSKHKGWLAPSVEVKIQEHITAIKRTCAILPISVVIVETAEFDVQRLKAMLEGKPLPVGTDYQLGEMYDEYNVRQYVLKRDTYTCQCCGIQSTDKAPVKFAVHHKESRHVGGNAPNNLITLCEKCHRLLHAGVVTLEEGKRKRGKSFRDAAFMGIMRKTLMRRLRNELSIPVKETYGYITKLLRETHAIQKSHVNDARCIARVPDAQPSDTLYRIRAVRHHNRQLHKVNPIKGGIRKRNQAPYEVFGFRLWDKVLFNGQECFITGRRVRGYFALKNFDGKKVHTGAPYTALTIVESSTSYLIERRGETT

SEQ ID NO: 18018 - protein, 412 aa, unidentified; identical to SEQ ID NO: 16549

SEQ ID NO: 18019 - protein, 280 aa, unidentified
MPDKVYVISRLGHPLMPCSPAKARHLLDDKKAKVVKRMPFTIRLLYGSTKYIQPIILGVDAGSKTIGLSASTAKEEVFAAEVMPRNDVVENLSTRREFRRARRNRTTRYRKPRSDNCVRSNHERWLAPSVKVKIQEHITSIKRVCTILPISKVVIETAEFDLQLLKAIQEGKPIPEGEDYQKGEMYGSYNVCQYVLWRDNYTCICCGVRGTPKNPVRLHVHHFESRKYGGNAPDNREEENYRFLPAHRGVGFLSKIQANEKWPSVCFVPEAIRFRTISVR

SEQ ID NO: 18020 - protein, 429 aa, unidentified; identical to SEQ ID NO: 8379

SEQ ID NO: 18021 - protein, 443 aa, Ectothiorhodospira sp.
MAVLVLDKRKKPLMPCSEKRARLLLERGRAVVHRMRPFTIRLKDRTVEESVLQPIQIKIDPGSKTTGVTVIREDDTDPEQQQVLMLMEIEHRGQQIKDTLIQRRAFRRRRRGQLRHRAPRFHNRTRPRGWLAPSLQHRVDTTMTWVNRLCRLAPVTGITMERVRFDMQAMDNPEISGVEYQQGTLHGYEVQEYLLEKWQRCCAYCGARKVPLEIDHIHPKSRGGSDRVSNLTLACRGCNQAKGNQPVDVFLADDPKRLQRIKAQAKPPLKDAAAVNSTRWALFRQLQATGLPVITSSGGRTKYNRQRLGIPKTHALDAACVGPVTAVTHWNVPTLTVRAMGRGSYQRTRLNRFGFPRGYLMRQKQVKGFQTGDLVQANVPTGKKAGTYQGRVAIRATGSFNIQTQEGVVQGISHRHCRLLQRADGYGYAFQPKPIKEDATRAA

SEQ ID NO: 18022 - protein, 463 aa, unidentified
LPGKYKYKGGQLMSVAVISKTGERLMPTSEYRARKLLKSGKAVKHSYHPFTIQLTERKTGDVQPIELCMDTGYIHIGISVKSEKHEYLAEQIDTLTDERIRHDACRMYRRQRRGRKRYRKPRFNNRKRDKGWIAPSLKHKKDIHVQAISRINKVMPLTDITMEMGNFDTQVLKAKEEGKPLPQGACYQHGERYGTATLREAVFSRDGYKCQCCGRTIRDGAMLHVHHVKYRSQGGTNSMANLATVCDKCHTPKNHKPGGKLYNWKPKLPDFKGATFMTTIRWQLYNEVKSLFPDINVHITYGAATKEQRRELNIDKSHVNDAFAMGKFHPKHRANAVLYKKKRRNNRCLEKFYDAKYIDSRDGSKKTGQELFNGRINRNHKKDSENLHQYRLQKIKAGKRTIRKQHYSIQPHDIIMYKNRKRETSGCHCNGTRVVLLPDKKTAAIQKVKIYKYAGGYFKSAFN

SEQ ID NO: 18023 - protein, 486 aa, unidentified
MSVSVFVLDKRKKPLMPCRPARARKLLNAGRARVVKTYPFTIRLVDRLLENSAVQPVAVKVDPGSEQSGMAVVRDDGKAHHHALFFINLVHRGQVIQERMTARSAFRRRRRGANLRYRAPRFNNRKRPEGWLPPSLQHRVDTTMSWVKKLRKLVPVTALWVENVKFDTQKLQNPEVSGVEYQQGTLFGFEVREYLLEKFERRCVYCGAENTPLNIDHVVPRAKGGSDRVSNLVLACAECNQKKGAQPLEAFLKGKPEQFERIRRQLKAPLRDAAAVNATRWALFNALKQTGLPVATGTGAQTKFNRKAFGIPKEHWLDALCVGRINGADYPEGMGILQVRCTGRGSYQRTRLNKYGFPRGHLMRQKRVHGFATGDIVKAVKKGVTFQGRVAVRARGSFVLQTPDGKVDGIHWRHCHLISRNDGYGYAWLRPAPHSSLVVNFSQTGTRDPPKIHKPIGFIFETRLVRTGESFLFDSSKYYQIYDKIK

SEQ ID NO: 18024 - protein, 417 aa, unidentified; identical to SEQ ID NO: 13600

SEQ ID NO: 18025 - protein, 447 aa, Petrotoga sp.; identical to SEQ ID NO: 4357

SEQ ID NO: 18026 - protein, 475 aa, Blautia sp.; identical to SEQ ID NO: 4128

SEQ ID NO: 18027 - protein, 410 aa, unidentified
MFVDMVYVQDIDGKPMMPTTRHGKVRRLLKDKKAVVVNLCPFTIRLTYVTSDYKQEIVLGVDAGTKHVGLSATTKSKELYSSEVILRNDIVDLLSTRRELRRTRRNRLRYRKPRFNNRIKSKRPGWVAPSVKYKVDAHIRVIENICSILPISRIVIEVAQFDTQKIKNPEILGKEYQEGDQLEFWNTREYVLARDGHKCQYCKGKSKDKILNVHHLESRKTGGDSPSNLITLCETCHKEYHKGNIDLKIKRGSSLRDAAVMGIMKWKLYEELRSRYDRVSMTFGYITKHNRIKYGIEKSHTSDAFVISKNINAKRIGCQYLKRLIRRHNRQIHKMKILKGGKKKNNQAPFEVFGFRLFDKVLYNNKICFVYGRRKSGSFNIRDFNGENSKDVSRKKFKLIRGKRHPIILK

SEQ ID NO: 18028 - protein, 323 aa, unidentified
TRYRAPRFDNRIRTKRKGWLAPSVENRINAHLSRIEAVLRLLPVTKITVETASFDLQLLKNPDISGKEYQEGEQLGFWNIREYVLCRDGHVCQHCYGRSKDPVLNVHHLESRRTGGDSPGNLITLCETCHKALHRGEITLKAKRGQSFRAEAFMGIMRWEVLNRLKASHPELEVNNTYGYRTKHARIANDIAKSHCADAFCIAGNLGAERLGEFFFQKQTRRNNRQIHKLSVLKHGLRKRNQAPFEIKGFRLFDKVACQREESFIFGRRSSGVFDVRKLDGTRISAGISCKKLHLLEKRRTYLTEIRKEEALPPLPEDRGLRA

SEQ ID NO: 18029 - protein, 518 aa, unidentified
MANLKLIDELLEKTEYIYVLGIDGKPQMPTNRKVRVRSLFKSGMAKVVDTVPFTMQLLYENKPVLQPITIAEDPGRTNIGAAVLTQFGDLVFSAVVETRNKSIKKLMSDRKAHRQASRHGERKARQRLAKKYKSMIKAGMIMRKLPQYAADKFVTCKVIKNTEARFCNRKRMPDWLTPTVNHLVQTHINLIKKVEKYLPITDVAIEVNRFAFMQMENPDASGVDFQNGPLKGFDDVKAAIREQQHGKCLMCKNDIEHFHHIIPRSKGGSNTIQNQVGLCKKCHAKVHTDAEFQAKLKDKKEGLIKKYGALSALNQAVPFICKELLKIYGAEHVHFCTGKDTSLIRSSLGYDKTKDNQMHEVDAYCICLAAIGADKTKRPDFNNVFKIKQFRRQDRSIINYQRERTYYLNGKKIATNRKPRFEQKGDALSDWYSEQVKLKGKKYADKLTGRITVKKSTRGYNSKDRVMPGTIFYYGGKRLVLSGQTTRGKYYKAYGDPKTNYPAAKCQIYKHNEGLAFV

SEQ ID NO: 18030 - protein, 412 aa, unidentified
MTNYAFVLDANGKQLAPTKEQKAWFLIRKKRATLVSKYPMVIQLKKEIPDEQIYKDEICCGIDDGGLHVGISLVQKCKTKNKVVFKGTMEQRKDVKHLMEVRKGYRRYHRFYKRYRQARFNNRKSSKRKERIAPSILQKRQATIRVINQLNKWINITNYWLEDIAIDIRALTDGYKAYRWQYQQSNRLDENIRKAVILRDGCKCMECGKSNCKLEVHHIKPRRLNGSNTLGNLISLCKKCHQKTEEQEEVYMNRYFSMLNSSDNKNLNYAQHVMIGKKWLREQLSKLGTLTLATGGDTANKRIDWNIEKSHSNDAICIAGLQPDTCNVKEWTIKPMRRQSKAKTDNVLGINHRDLVEYTFRNGETHRGYVTALYPGQNAINFQSSTKHCKKVNAKKCKLIWKYSKIYWLANV

SEQ ID NO: 18031 - protein, 443 aa, Ectothiorhodospira sp.; identical to SEQ ID NO: 16597

SEQ ID NO: 18032 - protein, 315 aa, unidentified
MPTVYVLNKDGKPLMPTTRCMHVRHLLKNGKARVVKSKPFTIQLLYETDDVVQPLYLGIDPGRTNIGVAVVKTDGAAVFTAHLETRNKEVPKLMKKRKESRCARRTNGRRCRRQRRAKTNGTISKKCVKQTTAQNGSVSKRAKEIGVIKRHLPGCEKDVLCIGIKNKEAKFTNRARPEGWLTPTANQLLQTHINLVKKIQKFLPISDVVLEVNKFAFMQLDNPNIQKWQYQQGPLYQKGSLENAVSEMQEHHCLFCEKPIEHYHPVHSSHALPSSFQIISIFKIQGGNNYVRWFWFNSRYRWSVRFCRCIRLYIQ

SEQ ID NO: 18033 - protein, 460 aa, unidentified; identical to SEQ ID NO: 7594

SEQ ID NO: 18034 - protein, 453 aa, unidentified
MVYVLNKDGKPLMPTKRYAKIRILRKRGLLKIVSAKPFTVQLLYDTKNITQDVTLGIDSGYLNTGFSAITEKQELISGEVKLLQGQKERLYERASYRRLRRQRLRYRVPRFNNRISSKKEGWLAPSIQHKLDSHIRFIEKLQKILPISKIVIEVANFDIQKIKNPEIEGKLYQEGEMQGFWNLREYILHRDNHKCQNPNCKNKDKDPVLMIHHIVYREHGGTDSPSNLTTLCNKCHTDSNHKKGKFLYDWMMEGRKAKGFKDSTFMSMVRWRLVNYLNSLNVETNHTYGFETKSKRIELGLEKSHFNDAFCIARGNNQTRVETFSIEQVRRNNRSLEKFYDAKFIDLRSGEKVSAGDLSCGRTTRNKNLITENLKIYRGRKVSKGKRTIRKSRYFYQPNDLVKYNNKIYTIKGTHNNGTRAILKETGKSIKVGDLIPYRFSKGFYFKVPSENK

SEQ ID NO: 18035 - protein, 512 aa, unidentified
MSTVYVLNKDGKPLMPTTRGGHVRHLLKEQKARVVRTKPFTIQLLYETDDVVQPLYLGIDPGRTNIGVAVVKTDGTAVFTAHLETRNKEIPKLMKKRKDSRRARRTNGRRCRRQRRAKANGTISKKCVKQTTAQNGSVSKRAKEIGVIKRHLPGCEKEVLCIGIKNKEAKFSNRVRPEGWLTPTANQLLQTHINLVKKIQKFLPISDVVLEVNKFAFMQLDNPNIQKWQYQQGPLYQKASFEEAVSEMQEHHCLFCKKPIDHYHHVVPQHKNGSNTIGNIVGLCAKHHDLVHKDTTWQKKLAKKKTGLNKKYGALSVLNQIIPALTKELSSLFSKHFFATNGKSTYDYRAAHGVSKDHWLDAYCIACSVLPNDVCDSDINNRVPYELKQFRRHDRRALHKENMSRVYTLNGKSVATNRHKATEQTTDSLEEFRQCQPDDVCKLKVKEHHPEYRNPKRNFPGCVFLVGKHTHVIQGTSGSHNGKADGYYDTNGNSYSSGKCKFVAKNEGIVFT

SEQ ID NO: 18036 - protein, 419 aa, unidentified; identical to SEQ ID NO: 12663

SEQ ID NO: 18037 - protein, 414 aa, unidentified
MPCSPAKARLLLKEKKAIVVRRTPFTIQLTIATGETKQPVSLGVDAEYKHVGLSASTEKAELYASEVELRQDITDLLSARRALRQSRRNRKTRYRAPRFDNRIRTKRKGWLAPSVENRINAHLSRIEAVLRLLPVTKITVETASFDTQLLKNSDIAGKKYQKGEQLDFWNVREYVLFRDGHVCQHCHGRSKDPVLNVHHLESRRTGGDSPGNLITLCETCHKALHRGEIKLKAKRGQSFRAEAFMGIMRWEVLNRLKASHPELEVNNTYGYRTKHARISNGIAKSHCADAFCVAGNLGAKRLGEFFFQKQTRRNNRQIHKLSVLKHGLRKRNQVPFEVNGFRLFDKVACKGEEGFIFGRRSSGFFDVRKLDETRISAGISYKKLHLLEKRQTYITEIRKEKALPPLPEGRGLRA

SEQ ID NO: 18038 - protein, 464 aa, unidentified
MYVFVIGLDGTRFMPCKPRKARKLIEAHKAEIYKKQPFTIRLLYKTGCATQPVTIGIDTGSQHIGIAVTSGNKVLYQAEIELRSTMDKRSLMETRRSYRRSRRYRKTRYRSPKFRFHTKRTYSETLVKRKTTGVMTHWVKHTNSMSTNRPDGWLAPSMQSKADHHIRWINRFLDVLPPDTKLRLEIARFDIARMKNLEVHSELYQYGPQYDYENLKAYVFDRDHYKCVVCKRKLGSKQPDGHSLKGMMHHITFRSKGATDNPDQLVTVCEYCHTPQAHKKGGVLWDLKEKHRPVQRGLRDATQMNIIRTRLVKAFPDAELTYGNITAADRKKMHLPKSHAGDAVAIAMKGKTVNICEPTVYIKQVRKKKRSLHEATPRKGRKNPNTQAVRNPKNTKSIGIYHIYDTVRFQNKTGFISGFTGRSAYVQDFDGNYITMPGKSYKQINLSNLELVRHNNNWIQKTGN

SEQ ID NO: 18039 - protein, 443 aa, unidentified
LTKDENRPSGRTTGLRAEQAEPAGIRKGDTLKVFVLNMRGKPLMPCSPAKARHMLKAGKAFVVRRTPFTIKLTIATGETKQDVTLGVDAGARHVGISATTEKEEVFASEVALRQDITGLLADRLAFRRARRNRKTRYRAPRFNNRVRSKHKGWLAPSVENRIQAHISRIEAVCRLLPVTKIVIETASFDIQKIRNPEVEGTGYQQGDQLGFWNVREYVLFRDGHICQHCRGRSKDPILNVHHLESRKTGGDAPNNLITLCETCHKAYHAGKIKLKVKRGQSFRAEAFMGIMRWTLLDRVRKTHPKLPVEYTYGYLTKHKRIALGLPKTHCADAFCIAGNLKALRRGDFLFQQQTRKHNRQIHKCSILKGGVRKLNQAPFLVKGFRLFDKVRIGGQIGFVFGRRVRGIFNIRRLDKTVIGTDINCKKLSLLETRKTFLTELRKE

SEQ ID NO: 18040 - protein, 442 aa, unidentified; identical to SEQ ID NO: 2903

SEQ ID NO: 18041 - protein, 512 aa, unidentified
MPTVYVLNKDGKPLMPTTRGGHVRHLLKEQKARVVRAKPFTIQLLYETDDAVQLLYLGIDPGRTNIGVAVVKANGTAVFTAHLESRNKEILKLMQDRKKARRARRTNGRRHRRQRRAKANGTISKKCVKQDTAQSKNPSKRAKEIGVIKRRLPGHKKDLLCIGIKNKEAKYTNRARPEGWLTPTANQLLQTHINLVKKIQKFLPISDVVLEVNKFAFMRLDNPDIQKWQYQQGPLYQKGSLENAVSEMQEHHCLFCDKPIDHYHHVVPQSENGSNTIANIVGLCAEHHNLVHKDAAWQKKLAEEKVGLNKKYGALSVLNQIIPALTNKLSVLFPKHFCVTTGKSTHDYRESHSVSKDHWLDAYCIACSVLPSNVCDSNINNHVPYELKQFRRHDRRALHKENMSRVYTLNGKAVATNRHKAIKQTTDSLEEFRQSHPGDVCKLKVKEHHPAYRNLNRNHPGSVFFVGEQAHVMQSIVASKDGKATRYKDTNVNKIAAGQCRFVAKNEGIVFT

SEQ ID NO: 18042 - protein, 420 aa, unidentified
MVVVIDKHKRPCNTISAAYARILLFSKQAVIYKRFPFTIRLRNDNAVLKDKSYTVKLDPGSRTTGVAITDDKESVVMLAEIEHRGHIIKKSLDKRRVIRRSRRNRKTRYREARFLNRTRPQGWLAPSVKSRADNVINFIKKHKKLLNINRVMIEDVSFDIAQMSSDIKLWGNDYQQGSLYNKNLREFIFSKTKGRCSYCGAKAKEIDHIVPRAKGGTDSTYNLAASCRSCNEKKSNLSLKEFGKLMNKDYSQLEPKKLPKDAAIVQSARNYMVKEITKIIPDTTTYDAWMTKYNRNQLGLSKQHYYDALSVGEIPTKFNFLTDKILQISAKGRGSRQMCRMDRYGFPRTSAKASKTVKGFQTGDIVKAIVPFGLKQGEYLGKVAVRSSGYFDIQTKTQVIQGIGYKYCHIVQRSDGYSYD

SEQ ID NO: 18043 - protein, 431 aa, unidentified
MPNKVYVINKHGRPLMPCSPAKARHLLDAGKAKVKKRTPFTIQLVYGSSGYTQEVILGVDAGSKTIGMSASTKKEEVFAADVTPRNDVVDLMSTRREFRRARRNRKTRYRKPRFDNRVRSKHKGWLAPSVEVKIQEHITSIKRVCRILPVSKVVIETAEFDLQLLKAIEEGKPVPQGEDYQQGEMYGHYNVRQYVLWRDNYTCQCCGAHATKKKEVRLHVHHLESRKVGGDAPDNQVTLCESCHEKLHKGLIAAKDFKKRKRRSTRDATFMGIMRKTLMQRLCSELPIPAIETRGYITKATREKLLVLPKSHTNDALAIAQGKQGFNVGYLPGILQIDKIYTIRPVRHHNRQLHKATILKGGIRKSNQAEKYVFGYRLFDKVQFNGQDCFIWGRRTTGIFTIKTINGKMIKDGISFKKLKLVEKSTSYLIA

SEQ ID NO: 18044 - protein, 431 aa, unidentified
MPNKVYVINKHGRPLMPCSPAKARHLLDAGKAKVKKRTPFTIQLLFGSTGYTQEVILGVDAGSKTIGLSASAETEELLSAEVKPRNDVVDLLSTHREFRRARRNRKTRYRKPRFDNRVRSKHKGWLAPSVEVKIQEHITSIKRVCRILPVSKVVIETAEFDLQLLKAIADGKPVPQGEDYQKGEMYGHYNVRQYVLWRDDYTCQCCGAHATKKKEVRLHVHHLESRKVGGDAPDNQVTLCESCHEKLHKGLITAKDFKKRKRRSTRDATFMGIMRKTLMQMLCSELPIPVVKTRGYITKATREKLLVLPKSHTNDALAIAQGKRGFNVGYLPEIAQIDKIYTIRPVRHHNRQLHKAAILKGGIRKSNQAGKYVFGYRLFDKVQFNGQDCFIFGRRTSGYFVVKTIDGKVIHNSASFKKLKLVERASNYLIA

SEQ ID NO: 18045 - protein, 421 aa, unidentified
MRGQPLMPCSPAKARHLLRDKKAVVKRRTPFTIQLTIATGETKQDVTLGVDAGAKHIGLSASTEKEEVFASEVELRQDITELLSARRAFRRARRHRKTRYRAPRFSNRVHSKHTGWLAPSVENRIQAHMSRIDAVCGLLPVTKFVIETASFDIQKIKNPDIEGTDYQQGDQLGFWNVREYVLFRDGHVCQHCRGRSKDKILNVHHIESRQTGGDAPNNLITLCETCHKAYHAGKIKLKVKRGQSFKAETFMGIMRWTLLDRVRKAHPDLPVENTYGYLTKNTRITLGLRKTDCIDAYCIAGNLNARRRGVFLYQRQVRKHNRQIHRCTVLSKTLKDGTKVGYRKLNQTPYFVKNFRLFDKVRCLGQTGFIFGRRSSGSFDVRRLDRVKLSSNISYKKLTLLEKRRTFLTELRKEDGASSPV

SEQ ID NO: 18046 - protein, 418 aa, unidentified; identical to SEQ ID NO: 12569

SEQ ID NO: 18047 - protein, 428 aa, unidentified
MPKVYVLNKHGHPLMPCTPAKARHLLDSGKAKVRKRTPFTIQLLYGSSGYKQPVALGVDAGSKTIGLSASTEKKELFAAEVKPRNDVVELLSTRREFRQARRNRKTRYRKPRLDNRVKSKHKGWLAPSVEVKIQEHITAIARVCALLPIAKLIVETAEFDTQRLKAMLEGRPLPVGTDYQLGEMYDEYNVRQYVLKRDNYTCQCCGAHPSAKKEVKLHVHHLESRKTGGNAPNNQVTLCEHCHKLLHKGKITLDKKKRGHSMRDAAFMGIMRKTLILRLRSELAIPVVETYGYITKLVRETHHMDKSHTVDALCIAGHPLADASDVIYLIKPVRRHNRQLHKATILKGGVRKANQAPKSVFGFRLFDKVRYQGQECFIWGRRSSGSFLLKKLDGTKVKDGVSYKKTDSIGKRNKLFNRRKEALLLPMP

SEQ ID NO: 18048 - protein, 502 aa, unidentified; identical to SEQ ID NO: 2616

SEQ ID NO: 18049 - protein, 415 aa, Bacillus sp.; identical to SEQ ID NO: 2431

SEQ ID NO: 18050 - protein, 238 aa, unidentified
VSERIYNVRQYVLKRDNYTCQCCGAHTTAKKAVKLHVHHLESRKVGGNAPSNLITLCVTCHNNLHKGKITLDGKKRGKTLRDAAFMGIMRNTLLTRLRNELNISVQNTYGYITKLLREQNDIKKSHVNDARCISKHPLAEPCSVCYRTKAIRHHNRQIHKAKILKGGIRKANQAPYIVKGFRLWDKVLYNGQECFISGRRSSGYFALRKLDGTAITNSISFRKLRLLEPATNYLIERM

SEQ ID NO: 18051 - protein, 502 aa, unidentified; identical to SEQ ID NO: 2616

SEQ ID NO: 18052 - protein, 441 aa, Anaerostipes sp.
MVTVQQSTHHLPFGRVFIRRNLFMVYVISQDGKPLMPCSDPIARLLLKQGKAKVKKREPFTIKLTYETTNYTQGLTLGVDTGSGTIGTAVSKDNGDIVYMSEVVVRNDITDKMTQRAKYRRNRRNRKTRYRKARWLNRASSIKKDRFSPTMQSKLHSHVREIEYIQSILPVTEMVFETGQFDMQLMKNPSLANPKVRPWGYQKGANYGFENTKAMVLNRDNYTCQCCKGKHKDSKLEVHHIVFRSQGGSDEESNLLTLCHTCHKDLHSGKINPKLSGKLKGNLKYATQMNSIRKQLFRFYPNAIETFGYVTKANRLHLGVDKEHYYDACTIATQGNAFNVKSNLYKKKCVSDGDFQKTKGIRSEQPIVTDKICGFRKFDKVRYFGNDYFIKGRMSTGYAILMDIDGNKIDFSTMPRGYKTPKLSNCKRITARSTVMTQVKV

SEQ ID NO: 18053 - protein, 443 aa, unidentified
VVKANGTAVFTAHLETRNKEIPKLMQDRKKARRARRTNGRRCRRQRRAKANGTISKKCVKQTTAQNGSVSKRAKDIGVIKRRLPGCEKDVLCIGIKNKETKFTNRTRPEGWLTPTANQLLQTHINLVKKIQKFLPISDVVLEVNKFAFMRLDNPNIQKWQYQQGPLYKKESLESAVSEIQEHHCLFCKKPIDHYHHVVPQHKNGSNTIGNIVGLCAKHHDLVHKDSAWEKKLAKKSTGLYKKYGALGVLNQIIPTLTNELSSLFPKHSFVTNGKSTYDYRAAHGVSKDHWLDAYCIACSVLPSNVCDSNINNHMPYELKQFRRHDRRVLNNENMTRVYTLNNKAVAINRHKAKDQKTVSLEEFRKEHPDDVCKLKVKEHHPTYRNMNRNFPGSVFLVGKQIHVMQGIASSKDGKATKYNDTSATAIAAGKCKFVAKNTGILFV

SEQ ID NO: 18054 - protein, 414 aa, unidentified; identical to SEQ ID NO: 12176

SEQ ID NO: 18055 - protein, 426 aa, unidentified; identical to SEQ ID NO: 6377

SEQ ID NO: 18056 - protein, 443 aa, unidentified
LTKDENRPSGRTTGLRAEQAEPAGIRKGDTLKVFVLNMRGKPLMPCSPAKARHMLKAGKAVVVRRTPFTIKLTIATGETKQDVTLGVDAGARHVGISATTEKEEVFASEVALRQDITGLLADRLAFRRARRNRKTRYRAPRFNNRVRSKHKGWLAPSVENRIQAHMSRIEAVCRLLPVTKIVIETASFDIQKIRNPEVEGTGYQQGDQLGFWNVREYVLFRDGHVCQHCHGRSRDKILNVHHLESRKTGGDAPNNLITLCETCHKAYHAGKIKLKVKRGQSFRAEAFMGIMRWTLLDRVRKTHPKLPVENTYGYLTKHKRIALGLPKTHCADAFCIAGNLKALRRGDFLFQQQTRKHNRQIHRCSILKGGVRKLNQAPFLVKGFRLFDKVRIGGQIGFVFGRRVRGIFNIRRLDKTVIGTDINCKKLSLLETRKTFLTELRKE

SEQ ID NO: 18057 - protein, 393 aa, unidentified; identical to SEQ ID NO: 5287

SEQ ID NO: 18058 - protein, 493 aa, unidentified
MAAVYVISASGKPLMPTTRCGHIRGLLNAGKAKVVEREPFTIQLKYETPDVTQPLYLGIDPGRTNVGSAVVREDGECVFTAQLTTRNKDVPKLMKARKQFRMAHRRLKRRCKRQRRAKAAETLSQKGEFQRLLPGYEEPILCKGIRNKEARFNNRQRPAGWLTPTANHLLLTHLNMVKKLQKLLPITDVVLEVNRFAFMAMENPSIRRWQYQQGPLYGKGSVEDAVYAQQDGHCLFCGKPIAHYHHVVPQHKNGSETLENRVGLCNEHHDLVHKDRAWDAKMKETKAGLNKKYHALSVLNQIIPALTEQLTAMFPQHAFVTTGKDTADFREDYGIAKEHHLDAYCIACSVLAEPTKVAAPTGKPHRLMQFRRHDRQVCHKENIKRVYLSEGKAVATNRHKAIEQKDDSLEEFRKTHTQQEVSALTVKDHQPVYKDMRRFMPGGVFLFNGKVYTLQRSHGRYKGMPFYYIDTDGSKNHAKGCIFLQQNCGLRWV

SEQ ID NO: 18059 - protein, 512 aa, unidentified
MSTIYVLNKDGKPLMPTTRGGHVRHLLKEQKARVVMTKPFTIQLLYETDDVVQPLYLGIDPGRTNIGVAVVKADGTAVFTAHLETRNKEIPKLMKKRKDSRRARRTNGRRCRRQRRAKANDTLSTKRVKQTTAQNGSASKRAKEIGVIRRRLPGCEKDVLCIGIKNKEAKFNNRTRPEGWLTPTANQLLQTHINLVKKIQKFLPISDVVLEVNKFAFMQLDNPNIQKWQYQKGPLYQKESLESAVSEMQEHHCLFCKKPIDHYHHVVPQHKNGSNTISNIVGLCTKHHDLVHKEAVWQEKLAKKKTGLNKKYSALSVLNQIIPALTKELSVLFPKHFFVTTGKSTYDYRAAHGVCKDHWLDACCIACSVLPNDVCDSSINNRVPYELKQFRRHDRRVLHKENMNRVYTLNSKKAATNRHKATEQESASLEEFRKEHPDDVCKLKVKEHHPTYRNMNRNYPGSVFFVDKQVHVMQGIARSKDGKATTYKDTNANLITAEGCKFVAKNSGILFV

SEQ ID NO: 18060 - protein, 544 aa, unidentified; identical to SEQ ID NO: 3572

SEQ ID NO: 18061 - protein, 440 aa, unidentified; identical to SEQ ID NO: 12442
  REGION 1..440: note = IscB polypeptide

SEQ ID NO: 18062 - protein, 440 aa, unidentified
LLLKKKTASVVCRHPFTIQLLYKTGCATQKGSIGIDTGSQHIGVGITCGDKVILKDEHALRSSMEKRSLLATRAAMRRGRRYRKVRYRKPKWRHHTKRMYFEKANRRGQHWRKVKTTTQSPRSKGWLPPSLQSKCDHHFCIIDRYLKYLPDPITRNLVIETGRFDMARMNDPTIHGKMYQRGPMYDAENRRAYIFARDNYQCACCKAKAGTTRKADGTTVKLVAHHILFRSRGATDNPKYMVSVCDHCHTTKAHQPGGILYSWMENNKKVTRGLRDATFMNILRKRLFARYPQAAFTYGNITAADRKQYHLPKSHVNDAVAVSLFGKEVPTVRDTCQTTYYKQVRKSKRSLHEAIPRKGRKRPNTKAVRNKKNTTQVNGFKLWDSVLANGKKLFICSFTGTSAYLIDKNGCYISQPGKTYKQWPLSKLKRLHPNGNWLMA

SEQ ID NO: 18063 - protein, 543 aa, unidentified; identical to SEQ ID NO: 11881

SEQ ID NO: 18064 - protein, 442 aa, unidentified; identical to SEQ ID NO: 2807

SEQ ID NO: 18065 - protein, 416 aa, unidentified; identical to SEQ ID NO: 8117

SEQ ID NO: 18066 - protein, 431 aa, unidentified
MPNKVYVINKHGRPLMPCSPAKARHLLDAGKAKVKKRTPFTIQLVYGSSGYTQEVILGVDAGSKTIGMSASTTKEELLSAEVKPRNDVVDLLSTRREFRRARRNRKTRYRKPRFDNRVRSKHKGWLAPSVEVKIQEHITSIKRVCRILPVSKVVVETAEFDLQLLKAIADGKPVPQGEDYQKGEMYGHYNVRQYVLWRDGYTCQCCGAHATKKKEVRLHVHHLESRKVGGDAPDNQVTLCESCHEKLHKGLIAEKDFKKRKRKSTRDATFMGIMRKTLMQRLCSELPIPVVETRGYITKATREKLLVLPKSHTNDALAIAQGKHGFNVGYLPGIEQIDKIYTIRPVRHHNRQLHKAAILKGGIRKSNQTEKYVFGYRLFDKVQFNGQDCFIWGRRTTGIFTIKTINGKMIKDGISFKKLKLVEKSTSYLIA

SEQ ID NO: 18067 - protein, 427 aa, Moorena sp.
MQNYVFVIDTNKQPLNPISPKKARRLLDKGKAAVFRMYPFTIILKRDIENPSISPCHIKIDPGSKVTGFALVQNGQVIWGMELEHRGGLIKKKLESRCAIRRGRRNRNTRYRKARFLNRKRPEGWLPPSLEHRILTIQTWVKRLIKFCMVNEIWIERVKFDTKKMQNPEINGIEYQQGELAGYEVREYLLEKWGRECTYCGKQNIPLQIEHIHPKSQGGSERVSNLCLACEKCNQRKGNKPVEEFLKKKPSLLQKIQTKALSPLKDAAAVNATRNKLVKVLKSIKPIITGTGAQTKYNRTKLGFPKEHWIDAACVGDIETLVLRTSQPLFVTCKGQGGRQKAAPNKYGYPIRHNPLKPIKGWKTGDIAKHQKLGIGKVTPRTKGSFGFTPLGMKGYKSCKPQDISAVHRKDGYVYSFCKYLPGFTRE

SEQ ID NO: 18068 - protein, 427 aa, Nostoc sp.; identical to SEQ ID NO: 2670

SEQ ID NO: 18069 - protein, 524 aa, unidentified; identical to SEQ ID NO: 14781

SEQ ID NO: 18070 - protein, 434 aa, Allochromatium sp.
MAVFVLDKQKRPLMPCTEKRARLLLERGRAVVVRLAPFTIRLKDRIGGALQPLRLKLDPGSRVTGLALVRESETCDADTGAVERLEHGLWFGELVHRGQAIREALTRRRHYRRARRSRKTRYRAPRFLNRPRREGWLPPSLQHRLDTTVNWVQRLRRLAPITALSQELVRFDTQALQNPEISGVEYQQGELAGYEVREYLLEKWRRTCAYCGAMHVPLEIEHIVPRARGGSDRVSNLTLACRACNQRKANQSIEDFLQRQPALLHQIQAQARAPLKDATAVNATRWALLNALKTTGLPVETASGGRTKFNRTRLDIPKTHALDAACVGAVDQVRDWNRPVLSIRATGRGAYSRTRTFNNGFPRGYLIRHKRVQGFQTGDWVRAEVLKGKKAGVHVGRVAIRRTGSFNVQTPGGTVEGLSHRYCRVLQRADGYGY

SEQ ID NO: 18071 - protein, 425 aa, unidentified; identical to SEQ ID NO: 6912

SEQ ID NO: 18072 - protein, 406 aa, unidentified; identical to SEQ ID NO: 5685

SEQ ID NO: 18073 - protein, 514 aa, unidentified
MSTVYVLNKDGKPLMPTTRCGHVRHLLKEQKARVVASKPFTIQLLYETDDVVQPLYLGIDPGRTNIGVAVVKTNGTAVFTAHLETRNKEIPKLMKKRKDSRRTRRTNGRRCRRQRRAKANGTISKKCVKQATAQNGSVSKRAKKIGVIKRHLPGCEREVLCIGIKNKEAKFSNRTRPESWLTPTANQLLQTHINLVKKIRKFLPISDVVLEINKFAFMQLDNPNIQKWQYQQGPLYQKANLEEAVSEMQEHHCLFCKKPIAHYHHVVPQSENGSDTIGNIVGLCTKHHDLVHKDTAWQKKLAKKKTGLNKKYGALSVLNQIIPALTKELSSLFPKHFFATNGKSTYDYRAAHAVSKDHWLDAYCIACSVLANYVCDSNINSHVPYELKQFRRHDRRALHKENMNRVYTLNGKSVATNRHKAIKQTTDSLEEFRQRQPNDVYKLEVKEPHPEYRNPKRNFPGCVFLVGKHTHVMQGTSGSHNGKADGYYGTSGNSYSSGKCKFVAKNEGIVFTLN

SEQ ID NO: 18074 - protein, 433 aa, Lactobacillus sp.; identical to SEQ ID NO: 6213

SEQ ID NO: 18075 - protein, 424 aa, unidentified; identical to SEQ ID NO: 3351

SEQ ID NO: 18076 - protein, 537 aa, unidentified; identical to SEQ ID NO: 3435

SEQ ID NO: 18077 - protein, 528 aa, unidentified; identical to SEQ ID NO: 15389
  REGION 1..528: note = IscB polypeptide

SEQ ID NO: 18078 - protein, 520 aa, unidentified
MNYLDFVLIVDKNKVPCIPIKESTAAYLLRHNKAKIINHDPTVIQRFDEYSADYEIRNIFELKIDSGYLNIGFSVSDSEHEYLAGQVNLLQGMSERLTVRASNRRFKRARLRYRKNKNVDYKIVHNPTYKNGNQDGWIAPSIQHKIDSHIRLIKKIAQWVPIDRIIIEVAKFDIQKMIADLDGRIISGKDYQNGEMKGYENVTAYVRDRDKYTCQMCLSSGKVKNKNNDTIEVHHIIPRAAGGTNRPSNLICLCHHHHRLVHSNNNNNKYFKELQNKKMPDTYKDSTFMNIVRYKIYNALCADFKDVELAYGYETKINRRLIGLPKFHYTDAVCLKEWKNISLTKFIYIVDQKRCNDRKMESFFDAKYIDIRDGKTKSGTELCYTRLDNASSWRTTCKNEVDNLRQYREKKITKGRKQRECHFYCLKPGDLIFINLGNHKGNLAEVKTMQIQKGKYKIFFIYKNQKVDNPTISLSPEEYEQLKKNECSKVKIVRTRRGMIWRKYNRLEYENTYKDQYDKN

SEQ ID NO: 18079 - protein, 458 aa, Lactobacillus sp.; identical to SEQ ID NO: 5912

SEQ ID NO: 18080 - protein, 423 aa, Lactobacillus sp.; identical to SEQ ID NO: 5050

SEQ ID NO: 18081 - protein, 431 aa, Petrotoga sp.; identical to SEQ ID NO: 11592

SEQ ID NO: 18082 - protein, 462 aa, unidentified
MSVLVIGRNGRALMPTNPRKARLLLKKKTASVVCRHPFTIQLLYKTGCATQEGCIGIDTGSQHIGVGITCGDRVILKDEHALRSSMEKRSLLATRAVMRRGRRYRKVRYRKPKWRHHTKRMYFEKANRRGQHWRKVKTTTQSPRPKGWLPPSLQSKCDHHFRIIDRYLKYLPDPITRNLVIEAGRFDMARMNDPTIHGEMYQRGPMYDAENLRAYIFARDNYQCACCKAKAGTTRKADGTTVKLVAHHILFRSRGATDNPKYIISVCDHCHTTKAHQPGGILYSWMENNKKVARGLRDAVFMNILRKRLFARYPQSAFTYGNITATDRKQLRLPKSHANDAVAISLFGKEASTVKNICQTMHYKQIRKSKRSLHEAIPRKGRKNPNTKAVRNKKNTTQVNGFKLWDSVLADGKKLFICSFTGTSAYLIDKNGCYISQPGKTYKQWPLSKLKRLHPNGNWLMA

SEQ ID NO: 18083 - protein, 415 aa, Bacillus sp.; identical to SEQ ID NO: 7870

SEQ ID NO: 18084 - protein, 431 aa, unidentified; identical to SEQ ID NO: 4306

SEQ ID NO: 18085 - protein, 406 aa, unidentified; identical to SEQ ID NO: 7406

SEQ ID NO: 18086 - protein, 442 aa, unidentified; identical to SEQ ID NO: 14485

SEQ ID NO: 18087 - protein, 447 aa, unidentified; identical to SEQ ID NO: 3626

SEQ ID NO: 18088 - protein, 412 aa, unidentified; identical to SEQ ID NO: 10534

SEQ ID NO: 18089 - protein, 423 aa, unidentified; identical to SEQ ID NO: 8242

SEQ ID NO: 18090 - protein, 440 aa, unidentified
LVFVINKNKKPLTPCHFAVARKLLKQGKAVVHKQFPFTIRLKELKEANPKGLIIKLDPGAKQTGVALHKPNGEVVLLATIEHRANKIKQNLEARRAFRRTRRNRKTRYRAPRFLNRKRPEGWLPPSIQSIVDNVKNFIIKLKKLCYIKTIYIETVRFDTQLMLNPLIEGVDYQQGTLLGYEIREYLLYTYGHTCQYCKGLTNDHQLEIEHKHPKSRGGSNSIRNLTLACRTCNQEKGNNTLDEWLQSLSKSKLDKERVKNINSILKTNKPVNLKDTAKVNSSRNTVLREMYKLTSDVAVSTGGVTKHNRVKANLPKTHYYDALCVKETPKIKIHKGLKELYIKSIGRGTRSRTLLNKYGFPRSYLPRQKQFFGYQSGDMVKANIPKGKYIGQYVSNVSCRSTGIFAIYSKKHGKQIDVNHKYLKLTQKGDGYRYELKTLA

SEQ ID NO: 18091 - protein, 439 aa, Ktedonobacter sp.; identical to SEQ ID NO: 9125

SEQ ID NO: 18092 - protein, 417 aa, unidentified
MPCSPAKARLLLKEQKAIVKRRTPFTIQLTIATGQAKQPVTLGVDAGYKHIGLSATTEKAELYACEVELRQDITDLLFARLALRRARRSRKTRYRAPRFDNRVASKREGWLAPSVENRIAAHMSRVEAVMRVLPVTAICIETAAFDTQLLKNPNIAGEMYQQGEQLGFWNVREYVLFRDGHVCQHCRGKSKDPVLNVHHIESRRTGGDTPNNLITLCETCHKALHRGEINLKVKRGKSFKAETFMGIMRWTFFERLKAAYPEIKVRNTYGYLTKHKRITHRIAKSHCADAYCIAGNLAATRLWGFFFQKQIRKHNRQIHKLSILKGGLRKKNQAPYEVKGFRLFDKVACKGEEAFIFGRRSSGSFDVRRLDGTRISAGISYKKLRLLEPRTTYLTEFRKEAALPPAAEAAGFRADFL

SEQ ID NO: 18093 - protein, 424 aa, Moorena sp.; identical to SEQ ID NO: 8180

SEQ ID NO: 18094 - protein, 242 aa, unidentified; identical to SEQ ID NO: 9579

SEQ ID NO: 18095 - protein, 388 aa, unidentified
LVYGSSGYTQEVILGVDAGSKTIGLSASAETEELLSAEVKPRNDVVDLLSTRREFRRVRRNRKTRYRKPRFDNRVRSKHKEWLAPSVEVKIQEHITSIKRVCRILPVSKVVIETAEFDLQLLKAIADGKSVPQGEDYQKGEMYGHYNVRQYVLWRDNYTCQCCGAHATKKKEVRLHVHHLESRKVGGDAPSNLITLCDSCHEKFHKGIITAANLKKRKRRSMRDATFMGIMRKTLIQRLRAELTIPVAETRGYITKTTREKLLVLPKSHTNDALAIALGKHGFNVGYLPEIAQIDKIYTIRPVRHHNRQLHKATILKGGIRKSNQTGKYVFGYRLFDKVQFNGQDCFIWGRRTTGIFTIKTINGKMIKDGISFKKLKPVEKSTSYLIA

SEQ ID NO: 18096 - protein, 442 aa, unidentified; identical to SEQ ID NO: 7655

SEQ ID NO: 18097 - protein, 416 aa, unidentified
MTNCENYAFVLDAEGKQLSPTKEKKAWYLIRKKRAILVSKYPMVIQLNKIVSNDNICKDEIRCGIDDGGLHVGIALVQKCQTKNKTLFKGTIEQRNDVKHLMKVRWDYRRYRRYHKRYRPKRINNRSSSKRTDRIAPSILQKRQATLRVITQLNKWINITSYWLEDVAIDVRVLTDGFSSYGWQYQKSNRLDENIRKAVILRDGCRCMECGQSNCRLEVHHIKPRRLNGSNTLGNLITLCESCHQKTEGKEEQYMQHYFNILESSDNKNLNYASYVMIGKTWLRKQLSQLGVLNLTTGGNTANKRIDWNIEKSHSNDAVCITDLQPDSCNVKDWIIKPMRRQSKAKTDNVLGIKHRDLVSYVYKNGELHTGYVTALYPKLNALNFQSPTKHCKKVNVRKCRVLWKYNKIYWLDSVS

SEQ ID NO: 18098 - protein, 470 aa, unidentified; identical to SEQ ID NO: 2949

SEQ ID NO: 18099 - protein, 469 aa, unidentified; identical to SEQ ID NO: 9316

SEQ ID NO: 18100 - protein, 419 aa, unidentified; identical to SEQ ID NO: 5271

SEQ ID NO: 18101 - protein, 349 aa, unidentified
MPRNDVVENLSTRREFRRARRNRTTRYRKPRSDNRVRSNHERWLAPSVKVKIQEHITSIKRVCTILPISKVVIETAEFDLQLLKAIQEGKPIPEGEDYQKGEMYGSYNVCQYVLWRDNYTCICCGVRGTPKNPVRLHVHHFESRKYGGNAPDNHGTLCDDCHKKFHLGIIADVKLKTRRRQSTRDAAFMGIMRKTLMWRLRTELFIPVAETKGYITKATREKLLVLPKSHTRDALAIAQGRHGFSIKEYAYVEPANHIYTVRPVRHHNRQLHKASILKGGIRKRNQASKYVFGFRLYDKVLYQGKACFVWGRRTSGTFLLRTIDGIKVKDGVSYRNLTLLERSSNYLIA

SEQ ID NO: 18102 - protein, 417 aa, unidentified; identical to SEQ ID NO: 9081

SEQ ID NO: 18103 - protein, 445 aa, Clostridium sp.; identical to SEQ ID NO: 13585

SEQ ID NO: 18104 - protein, 453 aa, unidentified
DPGRTNIGVAVVKTDGTAVFTAHLETRNKEIPKLMKKRKDSRRARRTNGRRCRRQRRAKANDTISKKCVKQDTAQSGSVSKRAKKIGVIKRHLPGCEKEVLCIGIKNKEAKFSNRTRPESWLTPTANQLLQTHINLVKKIQKFLPISDVVLEINKFAFMQLDNPNVQKWQYQQGPLYQKATPEEAVSEMQEHHCLFCKKPIAHYHHVVPQSENGSNTIGNIVGLCTKHHDLVHKDTTWQKKLAKKKTGLNKKYGALSVLNQIIPALTKELSSLFPKHFFATNGKSTYDYRAAHGVSKDHWLDAYCVACSVLPNDVCDSGINSRVPYELKQFRRHDRRALHKKNMSRVYTLNGKSVATNRHKAIKRTTDSLEEFRQRQPNDVCKLKVKEHHPEYRNPKRSFPGCMFLVGKQTHVMQGTSGSHNGKADGYYDTNGNSYSSGKCKFVAKNEGIVFA

SEQ ID NO: 18105 - protein, 413 aa, Sutterella sp.; identical to SEQ ID NO: 6473

SEQ ID NO: 18106 - protein, 456 aa, unidentified
MSTCVCVLSNSGERLMPTIRLGRVRHLLKDGKAKIIKHHPFTIQLLYDSKANTQPIEICEDVGYNYIGISVKSQSHEYVSAQYDTLQDEKACHDSCRKLRRTRRNRLRYRKPRFDNRKRGEGWLAPSLRHKKELNVNVVKMYCAVMPITHATVEVGSFDTMLVKAIQEGKAIPEGADYQKGPRYNLATLREAVFYRDNYVCKVCGRKATEGAILHVHHMFYWKGRHGNSLSELITVCEKCHTPANHQKGGKLYGLGEDIKFANLSGAAFMNTVRWQIVNALYATYGKEFVTITYGAMTKEKRIALQLEKTHSNDAYAMGNCHPAHRCEFGHYQKRRRNNRVLEKFYDATYIDARTGNKAKGKELFNGRISRNHKKDSEDLHKYRSKKVSKGRRSIRRQRYAIQPYDTVRLESKTYITSGCHNKGTRLLIPANGKSKSVAISKVQVVCHAGAWIQII

SEQ ID NO: 18107 - protein, 469 aa, Desulfobacter sp.
MKVYVRSQSGKWLMPTNPANARILLKQGEAKVIQRTPFAIQLLYETTEHVQPVTVGIDDGGIQVGISAVSKGKSLFQQEITLRSDIKLKLDTRRQYRRSRRNRKTRYRKSRFLNRKSSIPICKVCGGNAPASQVICRVCLRKVKGIHQKYAGIPKKVFKIPPSIKAKKEAIIRAVKQIPLPVSRIILEDACFDFQAMENPDISGRQYQHGELLYHKNFKQACLVRDKFKCRVCGAESRLQCHHIKPKANGGTDKLSNLMTLCEGCHERHHKDGLKLPRQESTFYISAAHVQQGKNYLQAELSRIVPLRMTFGYITAHYRNKAGIQKSHVNDAVVIADKQADPLDRYIQTKHVQSRKRSLHEATARKGRKTPNRTQKRNNKNVFTLKGFSRWDTVQYKGKVGFISGFTGSSSCYIVDIKGNYIKNPMKKYKQVNLREVSLICKNQTIISQWVEKSPSESKIRKETSRPEN

SEQ ID NO: 18108 - protein, 512 aa, unidentified
MSTVYVLNKDGKPLMPTTRCGHVRHLLKEQKARVVTSKPFTIQLLYEADDVVQSLYLGIDPGRTNIGVAVVKADGTAVFTAHLETRNKEIPKLMKKRKESRRARRTNGRRCRRQRRAKAKGTISKKCVKHDTAQNGSVSKRAKEIGVIKRHLPGCEKDVLCIGIKNKEAKFSNRTRPEGWLTPTANQLLQTHINLVKKIQKFLPISDVVLEINKFAFMRLDNPNVQKWQYQQGPLYQKANLEETVSEMQEHHCLFCKKKIDHYHHVVPQHKNGSNTIDNIIGLCTQHHDLVHKDATWQKRLAKKKTGLNKKYGALSVLNQIIPALTKELSSLFPKHFFVTNGKSTYDYRAAHGVSKDHWLDAYCIACSVLPNDTCDKTINSRVPYELKQFRRHDRRALNNENMSRVYTFNGKMVATNRHKATEQTTDSLEEFRQRQPNDVCNLKVKEHHPTYRNMNRNYPGSVFLVGNQVHVMQGIAGSKDGEATTYKDTNANSIAAGKCKFVAKNSGILFV

SEQ ID NO: 18109 - protein, 451 aa, unidentified
MSVAVMSKTGMRLMPTSEYRARKLLKSKKATVYRYNPFTIQLTERETGDVQTVELCMDTGYLHIGTSVKSEKHEYLGVQIDTLTDEKQKHDACRMYRRQRRSRKRYRQSRFNNRKRSDGWIAPSLEHKKDIHIQTISRICNAMPITNITLEMGNFDTQVLKALEENRPLPQGTDYQHGERYGIATLREAVFARDKYTCQCCRRTIADSAILHVHHIIYRSRGGTNRMSNLATVCDRCHTPANHKPGGRLYNWKPKIASFKGATFMTAVQWKMYNEVKSKFSNIKIHITYGAKTKEQRRAFDITKSHVNDAFVMGQFHPKHRSRPVCYKKKRRNNRCLEKFYDAKYIDSRDGKKRSGQELFNGRINRNHKKDSENLHQYRQQKVSSGRKTIRKQHYSIQPHDIVVFNRQQFETSGCHCNGARAILLPQKKSVAIKKLSIHKYAGGYFKSDFT

SEQ ID NO: 18110 - protein, 556 aa, unidentified; identical to SEQ ID NO: 17146

SEQ ID NO: 18111 - protein, 498 aa, unidentified
MNYVYVLNTSGMPLMPTTRYGKVRRMLKSGKATVVSTKPYTIRLLYEPETNIKQSITLGTDPGRTNIGVAAVDESGRCLYSAKCETRNKQIPKLMEDRAAHRRASRRGERLVRKRLARKLVTTTKFLEGRRLPGCDNPVMLKEIINTESRFNNRKRPEGWLTPTATQLLRTHLNLIELIKKILPVSRIVVELNKFAFMAMDNPSIQRWQYQKGPLHGYRNIREALENIQNGSCLLCGKSSIEHDHHIVPQSKGGSDTLTNMAGLCENCHTKVHTDVNAFKRLTKIKVGQNKKYHALSVLNQIIPSLLVELIVRFPDQVYVTTGMDTKAYRDENDIMKDHDTDAYCIACSTLKVQSIKDIPKHSFQIKQYRRHNRQMIHLQKERTYRLNGKIVAKNRRKRMDQKEPSLHEWYLETKRQYRRKETRRLQLQMTVIKSTRSYNDPKRTLPGAIFLYEGKRYVMSGQLSGGAYLRAEGFGTKNFPVSKTKIQCQNRGLVYVN

SEQ ID NO: 18112 - protein, 417 aa, unidentified
MPCSPAKARLLLKEKKAIVKRRTPFTIQFTIATGEARQPVTLGVDSGYKHIGLSATTEKDELYASQVELRQDITDLLSARLALRRSRRSRKTRYRAPRFDNRVASKRKGWLAPSVENRIAAHMSRVEAVMRVLPVTAITVETAAFDTQLLKNPDIAGEAYQQGEQLGFWNVREYVLFRDGHVCQHCRGKSKDPILNVHHIESRRTGGDAPNNLITLCETCHKAFHRGEIKLKVKRGKSFKAETFMGIMRWTLFERLKKAHPELRVRNTYGYLTKHKRISHGIAKSHCADAYCIADNLGAKRLEGFFFQKQTRKHNRQIHKLSILKGGLRKKNQAPYEVKGFRLFDKVICKGEEAFIFGRRTSGSFDVRRLDGTRISAGINYKKLRLLEPRTTYLTEFRKEAALPHLHECRGFRAEFL

SEQ ID NO: 18113 - protein, 413 aa, unidentified; identical to SEQ ID NO: 9873

SEQ ID NO: 18114 - protein, 431 aa, unidentified; identical to SEQ ID NO: 2952

SEQ ID NO: 18115 - protein, 414 aa, unidentified; identical to SEQ ID NO: 2588

SEQ ID NO: 18116 - protein, 442 aa, unidentified
MVTVQQSTHHLPFGRVFIRRNLFMVYVISQDSKPLMPCSNPIARLLLKQGKAKVKRREPFTIKLTYETTNYTQDLTLGVDTGSGTIGAAVSKDNGDIVYMSEVVVRNDITDKMTQRAKYRRNRRNRKTRYRKARWLNRASSIKKDRFSPTMQSKLHSHVREIEYIQSILPITEMVFETGQFDMHLMKNPSLANPKVRPWGYQKGTNYGFENTKAMVLNRDNYTCQCCKGKHKDSKLEVHHIVFRSQGGSDEESNLITLCHTCHKDLHSGKINLKLSGKVKGNLKYATQMNSIRKQLFRFYPNAIETFGYVTKANRLHLGVDKEHYYDACTIATQGNAFNVKSDLYKKKCVSDGDFQKTKGIRSEQPIVTDKICGFRKFDKVRYFGKDYFIKGRMSTGYAILMDIDGNKIDFSTMPRGYKTPKLSNCKRITARSTVMTQVKVV

SEQ ID NO: 18117 - protein, 406 aa, unidentified; identical to SEQ ID NO: 6897

SEQ ID NO: 18118 - protein, 460 aa, unidentified; identical to SEQ ID NO: 7594

SEQ ID NO: 18119 - protein, 464 aa, unidentified; identical to SEQ ID NO: 6574

SEQ ID NO: 18120 - protein, 423 aa, Moorena sp.; identical to SEQ ID NO: 11977

SEQ ID NO: 18121 - protein, 477 aa, unidentified; identical to SEQ ID NO: 3241

SEQ ID NO: 18122 - protein, 411 aa, unidentified; identical to SEQ ID NO: 3277

SEQ ID NO: 18123 - protein, 440 aa, Fervidobacterium sp.; identical to SEQ ID NO: 4293

SEQ ID NO: 18124 - protein, 414 aa, unidentified
MPCSPAKARLLLKEKKAIVKRRTPFTIQLTIATGETKQPVGLGVDAGYKHVGLSASTEKAELYASEVELRKDITDLLSARRALRRARRNRKTRYRAPRFNNRIRTKRKGWLAPSVENRINAHLSRIEAVLRLLPVTKITVETASFDMLLLKNPDIAGKEYQEGEQLGFWNVREYVLFRDGHVCQHCYGRSKDPVLNVHHLESRRTGGDSPGNLITLCETCHEALHRGEIALKTKRGHSFRAEAFMGMMRWEVLNRLKASHSELEVNNTYGYRTKHARIVNGIDKSHCADAFCIAGNLGAERLCEFFFQKQTRRNNRQIHKLSILKGGIRKRNQAPFEIKGFRLFDKVACKGEESFIFGRRSSGYFDVRKLDGTRISAGISYKKLRLLEKRRTYLTEIRKEEALPPLPEGRGLRA

SEQ ID NO: 18125 - protein, 476 aa, unidentified; identical to SEQ ID NO: 3164

SEQ ID NO: 18126 - protein, 419 aa, unidentified; identical to SEQ ID NO: 4877

SEQ ID NO: 18127 - protein, 557 aa, Blautia sp.; identical to SEQ ID NO: 7395

SEQ ID NO: 18128 - protein, 506 aa, Halomonas sp.; identical to SEQ ID NO: 8416

SEQ ID NO: 18129 - protein, 421 aa, unidentified
MRGQPLMPCSPAKARHLLRDKKAVVKRRTPFTIQLTIATGETKQDVTLGVDAGAKHIGLSASTEKEEVFASEVELRQDITELLAARRACRRARRHRKTRYRAPRFLNRVHSKHKGWLAPSAENRIQAHMSRIDAICGLLPVTKIVIETASFDIQKIKNPDVEGTDYQQGDQLGFWNVREYVLFRDGHACQHCRGRSKDKILNVHHIESRKTGGDAPNNLITLCETCHKAYHAGKIKLKVKRGQSFKAETFMGIMRWTLLDRVRKTHPKLPVENTYGYLTKNTRITLGLRKTDCIDAYCIAGNLNARRRGVFLYQRQVRKHNRQIHRCTVLSKTLKDGTKVGYRKLNQTPYLVKNFRLFDKVRCLGQTGFIFGRRSSGSFDVRRLDRVKLSSNISYKKLTLLEKRRTFLTELRKEDGASSPV

SEQ ID NO: 18130 - protein, 422 aa, unidentified; identical to SEQ ID NO: 5333

SEQ ID NO: 18131 - protein, 447 aa, unidentified; identical to SEQ ID NO: 5316

SEQ ID NO: 18132 - protein, 415 aa, unidentified
MVYVLANDGQPLMPTERHGKVCRMLKSGIAKVVKKCPFTIQLQYESERNVQPVALGIDAGSKHVGVSATTKAKVLYESDVELRDDIVKLLATRRQLRRRRRSRKTRYRPARFDNRRRKEGWLAPSIRQKIESHLTVVANACKILPINQIIVETASFDIQKIKDPEIQGIEYQQGEQMDFWNIREYVLFRDGHTCQCCKGKSKDKVLNVHHIESRKTGGNAPNNLITLCETCHKGYHNGTVTLPKNIKRGMKFKDAAFMGIMRWTFYNTLKEQYEPDIPVSMTYGYLTKNTRIEHGLPKEHYIDARCISGNPDAVSDGTYYYQKKVRCHNRQIHKQTILKGGIRKSNQAEYLVKGYRLFDKVRYQGREYFIFGRRKSGFFDIRTLSGEKVNKGSISVKKLTFADTRKNYLIERRTV

SEQ ID NO: 18133 - protein, 442 aa, unidentified; identical to SEQ ID NO: 7529

SEQ ID NO: 18134 - protein, 415 aa, unidentified
MSNFVFLIDANKKPMNPIHPAHARELMKKGKAAVFRRFPFTLIMKRVVDKIVTYPLSLRIDPGSKFTGISLVNNRNEVIWGMELQHRGAAIKDALETRKGVRRGRRARHTRYRQARFLNRKRPNGWLAPSLMHRVLTIKTWVKRLIKIAPITEIRQELVRFDLQQLENPEISGVEYQQGELLGYEVREYLLNKWNRKCTYCEIKDVPLQVEHIQPKASGGSNRISNLCLACEKCNQKKGALDVKFFLAHKPELLKKIQLQAKRPLKDAAAVNSTRWVLFNTLKLTGLPVLTGSGGLTKFNRCRLELPKTHWIDSACVGVVNVLKILTTKILSVKATGKGTRRLCRINKFGFPCSNPRQTYQHGWQTGDIATGKGVTGRIVVQSATRLEIRVDGKRIGGKLGDFKLLHSKDSYLYA

SEQ ID NO: 18135 - protein, 447 aa, unidentified; identical to SEQ ID NO: 5316

SEQ ID NO: 18136 - protein, 453 aa, unidentified
CVCVLSNNGERLMPTFRLGKVRRLLKDGKAKIVKHHPFTIQLLYDSKTNKQPIEICEDVGYNYIGISVKSESHEYVSAQYDTLQDEKEHHDDCRKMRRARRNRLRYRKPRFDNRKRSEGWLAPSLEHKKQLNISLVERYVSVIPITHATVEVGSFDTMLLQAIQKGETKPEGADYQEGPRYNLATLREAVFYRDNYTCQVCGRKITDGAILHMHHMFYWKGRHGYKLDELVTACEKCHTPANHQKGGKLFGFGEDKEFADLSGAAFMNAVRWQIVNALHTTYSKEFVTITYGAMTKEKRIALQLEKSHNNDAYAMGDFHPVHRCGFRHYQKRRRNNRVLEKFYDATYIDARTGNKAKGKELFNGRISRNHKKDSENLHKYRSEKVSKGRRSIRKRRYAIQPYDTVRLKGKTYITSGCHNKGTRLLIPVNGKSKSVTISKVQVVCHAGPWIQII

SEQ ID NO: 18137 - protein, 515 aa, unidentified
LTALEELLSKTEYIYVIGTDGRPQMPTKRKRHVLKLLNTGKARIAEKVPFTIQLKYDNIPVLQPIILAADPGRTNIGVTALSPFGDLMFAAVIETRNKEIKKLMADRKSHRQASRRGERKARQRLAKKYGTMIKAGMIMRKLPQYAADKFVTCNVIRNTEARFCNRKRCSDWLTPTVNHLAQTHLNVIKKISRYLPVTDIAIEVNRFAFMQMENPNASGVDFQNGPLRGFDDVKAAIREQQNGKCLMCKNDIEHFHHMVPLSKGGSDTIQNQVGLCPKCHAKAHTEQTFKKKLKDKKSGLLKKYGALSALNQSIPFICKDLLAEYGKEHVHFCTGKETSLIRTSLGYEKTKDNQMHEVDAYCIGLASLELEDIKLQSFVNTYKIKQFRRQDRSIIHHQTERSYYLDEQKIVTNRKPRFEQTGNALSDWYKKQVKACDKAKADKMLNTLKVKKSARSYNSEGRLMPGAVFSYNGQRHVMSGQLTGGRYLRAYGDTKTNYPASKCNISRSNEGLVFI

SEQ ID NO: 18138 - protein, 431 aa, unidentified
MDAWDIIVVLNKRGKPLMPCSPAKARLLLKEKKAIVKRRTPFTIQLTIATGETKQPVSLGVDAGYKHVGLSASTEKAELYASEVELRQDITDLLSARRALRQSRRNRKTRYRAPRFDNRIRTKRKGWLAPSVENRINAHLSRIEAVLRLLPVTKITVETASFDMQLLKNPDISGKEYQEGEQLGFWNVREYVLFRDGHVCQHCHGRSKDPVLNVHHLESRRTGGDSPGNLITLCETCHKALHRGEIKLKAKRGHSFRAQAFMGIMRWEVLNRLKASHPELEVNNTYGYRTKHARIANDIAKSHCADAFCIAGNLGAERLGEFFFQKQTRRNNRQIHKLSILKGGIRKRNQAPFEVKGFRLFDKVACQGEEGFIFGRRSSGFFDVRKLDGTRISAGISCKKLHLLEKRRTYLTEIRKEEALPPLPEGRGLRA

SEQ ID NO: 18139 - protein, 460 aa, unidentified
MVAVVDLFGKPLMPTNEYRARKLLKRKKAKIFCYRPFTIQLTERKDTEIQPIELCMDTGYIHIGISAKSERHEYLGMQIDTLTDEKLKHDDKRQYRRQRRNRKRYRAPRFDNRRRKEGWIAPSLEHKKEIHIDAIQRICKVMPITDITLEMGNFDTQVLKAVEEGKPLPQGSDYQYGERYGIATLREAVFLRDGYKCQCCEKTVKDGAILHVHHIKYRSQGGTNRMSNLITVCDKCHTPQNHKPGGKLWNWKPKLAEFKGASYMTSIRWMLYNEVTAMLPNRSIHITYGAKTKESRRELDIEKSHVNDAYVMGLFHPKHRTQPVYFKKKRRNNRVLERFYDAKYIDGRDGKKRSGQELFNGRISRNHKKDSENLHLYRKQKVTKGKRSIRNRHYPIQLHDILLYQKKKYETAGCHNNGSRAILLPEKKSVALKQLTMYQYAGGYYRVPYESNKKEERTGS

SEQ ID NO: 18140 - protein, 503 aa, Streptomyces sp.; identical to SEQ ID NO: 9513

SEQ ID NO: 18141 - protein, 428 aa, unidentified
MTSARRKILLKRKVTEMSKSYAFVLDASKKQLDPTIEQNAWRLVRQNKATLVSRFPMVIQLHKTIEDPNADEVRCGIDDGANHVGIALIQKCQTRNKVLFKGTIEQRKDVKKLLELRRVYRRCHRYHKWHRPERFNNRASSKMSGRLPPSILQRKQAVLRVIDRLRQWVRIDGYWLEDVKIDIRALTDGYRPYRWQYQKSNHLDNNLRLAAIYRDGCRCMECGKTKTRFEVHHITPRKAGGADTISNLITLCPACHARTFGREGQFADRYYAMIGSKGNIAGLKDAESVMQGKHWLHEQLRIRGTLALTTGTDTANKREDWDIPKTHADDAICITNLEPESIDVPSWTIRPMRRKSKASAGETCGFRHRDYVTYTYRNGETHTGYVTAIYPELHALNFQSPIKHCKKANALKCRLVWRFNKIYWFKCA

SEQ ID NO: 18142 - protein, 264 aa, unidentified
IADGKPVPQGEDYQKGEMYGHYNVRQYVLWRDGYTCQCCGAHATQKKEVRLHVHHLESRRVGGDAPDNLVTLCTACHDKLHKGIIMAADIKKRKRRSTRDATFMGIMRMTLLRRLREQLPVPVVETRGYITKATRENLLVLPKSHTNDALAIAHGPQGFRAEYLPNIRQADRLYTIRPVRHHNRQLHKATILKGGVRKANQAEKYICGFRLYDKVLYNGIECFVWGRRNSGSFLLRQLNGEKVKDGVSYKHLKLLERSQSYLVA

SEQ ID NO: 18143 - protein, 426 aa, Parasutterella sp.; identical to SEQ ID NO: 3045

SEQ ID NO: 18144 - protein, 414 aa, unidentified
MPCSPAKARHLLKEKKAVVVRRTPFTIQLTIATGESKQPVSLGVDAGYKYVGLSASTEKAELYASEVELRQDITDLLSARRSLRQSRRNRKTRYRAPRFDNRIRTKRKGWLAPSVENRINAHLSRIEAVLRLLPVTKITVEMASFDMQLLKDPDISGKEYQEGEQLGFWNVREYVLFRDGHVCQHCHGRSKDPVLNVHHLESRRTGGDSPGNLITLCETCHKALHHGEITLMAKRGQSFRAEAFMGIMRREVLNRLKASHTELEVINTYGYRTKHARIANGIAKSHCADAFCIAGNLGAERLGEFLFQKQTRRNNRQIHKLSILKGGLRKRNQAPFEVKGFRLFDKVACRGEEGFIFGRRSSGYFDVRKLNGTHISAGISYKKLRLLEKRQSYLTEIRKEEALPPLPEGRGLRA

SEQ ID NO: 18145 - protein, 431 aa, unidentified
MPNKVYVINKHGRPLMPCSPAKARHLLDAGKAKVKKRTPFTIQLLFGSTGYTQEVILGVDAGSKTIGLSASAETEELLSAEVKPRNDVVDLLSTRREFRRARRNRKTRYRKPRFDNRVRSKHKGWLAPSVEVKIQEHITAIRRVCGILPVSKVVVETAEFDLQLLKAIADGKPVPQGEDYQKGEMYGHYNVRQYVLWRDDYTCQCCGAHATKKKEVRLHVHHLESRKVGGDAPDNQVTLCESCHEKLHKGLIAEKDFKKRKRRSTRDATFMGIMRKTLMQMLCSELPIPVVKTRGYITKATREKLLVLPKSHTNDALAIAQGKRGFNVGYLPEIAQIDKIYTIRPVRHHNRQLHKATILKGGIRKSNQTEKYVFGYRLFDKVQFNGQDCFIWGRRTTGIFTIKTINGKMIKDGISFKKLKPVEKSTSYLIA

SEQ ID NO: 18146 - protein, 418 aa, unidentified; identical to SEQ ID NO: 2425

SEQ ID NO: 18147 - protein, 431 aa, unidentified; identical to SEQ ID NO: 17947

SEQ ID NO: 18148 - protein, 481 aa, unidentified; identical to SEQ ID NO: 4548

SEQ ID NO: 18149 - protein, 297 aa, unidentified
HITAIKRICQILPISEIHVEISEFDLQRLKAMEEGRTLPVGTDYQLGEQYDFYNTRQYVLHRDGYTCQCCGTHDNNIKLHVHHIESRQTGGNAPSNLITLCEHCHKALYKGKFELPKGKKRGKTYRDATFMGIMRKTLLERLKKEIDVPVAGTYGYITKYWRERAGLEKSHINDAICISKYPYVKPLDTYYLTKVVRNHNRQIHKSNFSKGGIRKRNQAPYLIKGFRLFDKVLYQGKEYFIFGRRATGYFDIRTLDGTKVNKDSISYKKLRIQDTAKAYLKEARAIPHMNKFTCVLA

SEQ ID NO: 18150 - protein, 419 aa, unidentified; identical to SEQ ID NO: 4877

SEQ ID NO: 18151 - protein, 406 aa, unidentified; identical to SEQ ID NO: 2703

SEQ ID NO: 18152 - protein, 410 aa, Geobacillus sp.; identical to SEQ ID NO: 4122

SEQ ID NO: 18153 - protein, 512 aa, unidentified; identical to SEQ ID NO: 16896

SEQ ID NO: 18154 - protein, 461 aa, Parasutterella sp.; identical to SEQ ID NO: 3646

SEQ ID NO: 18155 - protein, 406 aa, unidentified
VVYVQDIDGNPLMPTTRHGKVRRLLKAKKATVVNLCPFTIRLLYDTTGYKQEITLGVDAGTKHVGLSATTKSKELYASEVILRSDVVDLLSTRRELRRARRYRLRYRKPRFNNRIKSKKDKWIAPSIRQKIDSYIRIIGFVYSILPVSKLIIEVAQFDTQKIKNPEISGKEYQEGEQLGFWNVREYVLARDGHKCQHCKGKSKDPVLNVHHIESRKTGGDSPSNLITLCETCHKEFHKGKIKLKVKRSASLRDAAVMGIMKWELYDELKSLYPNIKMTFGYITKHDRINHGIEKSHVSDAFVISRNFDSYRLGYYYKQKLVRRHNRQIHKMKILKGGIKKPNQAPFKVFGFRLFDKVRYQDNVYFVYGRRTSGCFNIRDINGNNNKNPTFKKLTYISHGLISVETV

SEQ ID NO: 18156 - protein, 419 aa, Anoxybacillus sp.; identical to SEQ ID NO: 5328

SEQ ID NO: 18157 - protein, 462 aa, unidentified; identical to SEQ ID NO: 2823

SEQ ID NO: 18158 - protein, 489 aa, unidentified; identical to SEQ ID NO: 15226
  source 1..489: note = uncultured beta proteobacterium

SEQ ID NO: 18159 - protein, 424 aa, unidentified
MQPAKQQNWVFQINGDKQPLDMINPGRCRELQNRGKLASFRRFPYVVIQQQTIENPQTKEYILKIDPGSQWTGFAIQCGNDILFRAELNHRGEAIKFDLVKRAWFRRGRRSRNLRYRKKRLNRAKPEGWLAPSIRHRVLTVETWIKRFMRYCPIAWIEIEQVRFDTQKLANPEIDGVEYQQGELQGYEVREYLLQKWGRKCDYCGTENVPLEVEHIQSKSKGGSSRIGNLTLACHVCNVKKGNLDVRDFLAKSPDILNQVLENSTKPLKDAAAVNSTRYAIVKMAKSICENVKCSSGARTKMNRVRQGLEKTHSLDAACVGESGASIRVLTDRPLLITCKGHGSRQSIRVNASGFPAVKNAKTVFTHIAAGDVVRFTIGKDRKKAQAGTYTARVKTPTPKGFEVLIDGARISLSTMSNVVFVHR

SEQ ID NO: 18160 - protein, 454 aa, unidentified; identical to SEQ ID NO: 8101
  source 1..454: note = uncultured beta proteobacterium

SEQ ID NO: 18161 - protein, 279 aa, unidentified
VVVETAEFDLQLLKAIADGKPVPQGEDYQKGEMYGHYNVRQYVLWRDDYTCQCCGAHATKKKEVRLHVHHLESRKVGGDAPDNQVTLCESCHEKLHKGLIAEKDFKKRKRKSTRDATFMGIMRKTLMQRLCSELPIPVVKTRGYITKATREKLLVLPKSHTNDALAIAQGKRGFNVGYLPEIAQIDKIYTIRPVRHHNRQLHKATILKGGIRKSNQTEKYVFGYRLFDKVQFNGQDCFIFGRRTSGYFVVKTIDGKVIHNSASFKKLKLVERASNYLIA

SEQ ID NO: 18162 - protein, 413 aa, unidentified; identical to SEQ ID NO: 3476

SEQ ID NO: 18163 - protein, 406 aa, unidentified
MVYIQDIDGKPMMPTTRHGKVRRLLKSKKAIVVNLCPFTIRLLYDTTGYKQEITLGVDAGTKHVGLSVTTKSKELYASEVILRSDVVDLLSTRRELRRARRYRLRYRKPRFNNRVKYKKDKWIAPSIRQKIDSHIRIIGFVYSILPVSKLIIEVAQFDTQKIKNPEISGKEYQEGEQLGFWNIREYILARDGHKCQHCKGKSKDLILNIHHIESRKTGGDSPSNLITLCEICHKEFHKGNIKLKVKRGKSLRDAAVMGIMKWELYEELKSLYPNVKMTFGYITKHDRIKHGIEKSHVSDAFVISRNFDSYRLGYYYKRKLVRRHNRQIHKMKILKGGIKKPNQAPFEVFGFRLFDKVRYQDNVYFVYGRRTSGYFNIRDINGENKKDVSYKKFKYISHGLISVESG

SEQ ID NO: 18164 - protein, 518 aa, unidentified; identical to SEQ ID NO: 7282

SEQ ID NO: 18165 - protein, 420 aa, unidentified
MQYVYVLNKHSEPLMPCSPGKARLLLKRQKACVVKRTPFTIKLMHGSAGYKQPITLGVDAGSKHVGLSASTEKRELYSEEFTPRNDVVELLSTRRQNRCSRRNRKTRYRTPRFNNRVHSKHKSWLAPSVEVKIQEHITVIKRICRILPVTLVRVETAEFDTQRLKAMLAGKPLPVGTDYQLGEMYDEYNVRQYVLKRDNYTCQCCGAHTTTKKAVKLHVHHLESRKVGGNAPSNLITLCVTCHNNLHKGKITLDGKKRGKTLRDAAFMGIMRNTLLTRLRNELNIPVQNTYGYITKLLREQNDIKKSHVNDARCISKHPLAEPCSVCYRTKAIRHHNRQIHKAKILKGGIRKANQAPYIVKGFRLWDKVLYDGQECFISGRRSSGYFALRKLDGTAITNSISFKKLWLLEPATNYLIERM

SEQ ID NO: 18166 - protein, 424 aa, Kosmotoga sp.
LVYVISKNGKPLMPTKRHGKVRKLLKQGLAKVVRREPFTIQLLYDATTYTQPVTVGIDIGSKVVGISAITEKQELLSMEVELRQNIKKLLLKRREYRRSRRHRKRRYRKPRFLNRRKKEGWLAPSVQCKVDAHVKLINLIAKTLPVTKIVVEIAPFDTHKIINPEVESVDYQNGVQKGFWDVREYCLWRAGYKSELSGKKGILEVHHIMPRSKGGTDNPSNLIVLTSEEHEGIHKGELKIPKSKLKKVKILKDATHVSTIGWYIVNRLKELFCVEVTYGSTTKARRSKFGIEKSHKNDAFVIAGGAFQERICEWYFGKYFRRQNRSLHKANPIKGGIRKLNTVKEVKGFKRFDKVKYNGQIGIIYGLRNSGYFDLRTLSGEKIHSSAKWQNLKLIERARTLILERREQCIPLHLVEGGVSCAGF

SEQ ID NO: 18167 - protein, 414 aa, unidentified
MPCSPAKARLLLKEKKAIVKRRTPFTIQLTIATGETKQPVSLGVDAGYKHVGLSASTEKAELYASEVELRQDITDLLSARRALRQSRRNRKTRYRAPRFDNRIRTKRKGWLAPSVENRINAHLSRIEAVLRLLPVTKITVETASFDLQLLKNPDISGKEYQEGEQLGFWNVREYVLFRDGHVCHHCYGRSKDPVLNVHHLESRRTGGDSPGNLITLCETCHKALHRGEITLKAKRGQSFRAEAFMGIMRWEVHNRLRALHPGIEVSNTYGYRTKHARIANGIAKSHCADAFCIAGNLGAERLCEFFFQKQTRRNNRQIHKLSILKGGIRKRNQAPFEVNGFRLFDKVACQGEEGFIFGRRSSGFFDVRKLDGTRISAGISCKKLHLLEKRRTYLTEIRKEEALPPLPEGRGLRA

SEQ ID NO: 18168 - protein, 431 aa, unidentified
MPNKVYVINKHGRPLMPCSPAKARHLLDEGKAKIKKRTPFTIQLVYGSSGYTQEVILGVDAGSKTIGMSASTKKEEVFAADVTPRNDVVDLMSTRREFRRARRNRKTRYRKPRFDNRVRSKHKGWLAPSVEVKIQEHITAIRRVCGILPVSKVVVETAEFDLHLLKAIADGKPVPQGEDYQKGEMYGHYNVRQYVLWRDDYTCQCCGAHATKKKEVRLHVHHLESRKVGGDAPDNQVTLCESCHEKLHKGLIAEKDFKKRKRRSTRDATFMGIMRKTLMQRLCSELPIPVIETRGYITKATREKLLVLPKSHTNDALAIAQGKQGFNVGYLPGIVQINKIYTIRPVRHHNRQLHKATILKGGIRKSNQVGKYVFGYCLFDKVQFNGQDCFIWGRRTTGIFTIKTINGKMIKDGISFKKLKPVEKSTSYLIA

SEQ ID NO: 18169 - protein, 427 aa, unidentified
MSIQPNYVFVLDANRKPLTPCKPSLARKLLKVGKCKVFRLYPFTIILKKVVSQDPQPVTLKIDPGSKVTGIAILRDSELMWVAELTHRGQAIKALLESRRSLRRSRRNRHTRYRQARFLNRTRPEGWLAPSLRHRVETTLTWVNKLSRLAPVHTIFQELVRFDLPKMETPEISGIEYQQGKLQGYEVREYLLEKWERRCAYCGVENVPLQVEHIHPKSSGGTNRVSNLCLACEPCNTKKGTKDIKIFLARKPDILKKILAQAKRPLKDAAAVNSTRWALFNRLKETGKVIVTGSGGLTKFNRLRLKLPKTHFFDAVCVGDAPNISVLANQPLNIKATGHGSRQMCRTDKFGFPSRYVPRLKFVKGFQTGDIIKAVVTSGKKIGTYTGRVAVRSSGSFNVSAVQGLIQGINYKCCFLIHQKDGYNYGF

SEQ ID NO: 18170 - protein, 429 aa, Parasutterella sp.; identical to SEQ ID NO: 3656

SEQ ID NO: 18171 - protein, 290 aa, unidentified
MPCSPAKARLLLKEKKAIVKRRTPFTIQLTIATGETKQPVGLGVDAGYKHVGLSASTDKAELYASQVELRQDITDLLSARRALRRARRNRKTRYRAPRFNNRIRTKRKGWLAPSVENRINAHLSRIETVLRMLPVTKITVETASFDMQLLKDPDISGKEYQEGEQLGFWNVRECVLFRDGHVCQHCHGRLKDPVLNVHHLKSRRTGGDSPGNLITLCETCHKALHRGEITLKAKRGQSFRAETFMGIMRREVLDRLKASHPKLEVQNTYGYWTKHARMLSASPAILAPKG

SEQ ID NO: 18172 - protein, 431 aa, unidentified; identical to SEQ ID NO: 4463

SEQ ID NO: 18173 - protein, 419 aa, unidentified; identical to SEQ ID NO: 3867

SEQ ID NO: 18174 - protein, 420 aa, unidentified; identical to SEQ ID NO: 3288

SEQ ID NO: 18175 - protein, 408 aa, unidentified
MVYVQDINGKPMMPTTRYGKVRRLLKDKKAVVVNLCPFTIKLTYVTSDYKQEIVLGVDAGTRHVGLSATTKSKELYSSEVILRNDIVDLLSTRRALRRSRRGRLRYRKPRFNNRIKSKRSGWIAPSVQYKIDAHIRVIDNVCSILPISRIVIEVAQFDTQKINNPEISGKEYQEGDQLGFWNVREYVLARDGHKCQYYKGKSKDKILNVHHIESRKTGGNSPSNLITLCETCHKEYHKGNINLKVKRGKSLRDAAVMGIMKWRLYEGLKSKYDKVSMTFGYVTKYNRIYNNIEKSHVSDAFIISKNFNSIRLGYYYKVRLIRRHNRQIHKQKIPKGGIKRLNQSPFEVFGFRLFDRVMFENSYYFIFGRRKTGRFNIRDIDGKNQRDIMHNKLKLSRCKRFMIQKEMN

SEQ ID NO: 18176 - protein, 480 aa, unidentified
LYTKPLDNIGEGSLPPSGEINLKGMTFMVYVKSIDGKVLMPTSNAKARKLLKQKKAKVVSLRPFVVKLTYKTKTEYIQKLNLGVDSGYSNIGFSVIDAKQEYIAGEVKLLEGMKKRLLEKASYRRIRRSRLRYRKARWNNRVKSKKKGWLAPSLKHKLDTHIKFIDYLKNILPIEKITIEVANFDIQKMKDDLISGIDYQNGDMFGFWNVREFVLHRDGHKCQNPNCKHKDKKEQILKVHHIRYRSEGGSDRPENLITLCSKCHIPANHKKGKFLYDWCVNGKKVRGFKDATFMSMIRWYLVNELKSKHNNVSITYGYITKNHRIQNSIEKSHLNDAFAITKGTNQARTKDRFLVIQDRLKNRSLEKFYDSKIIDIRTEKKVSGGDLNCGRSTRNKNLNTENLRKYRGVKISKGQRRIRKQKYFYQSNDLVKYDGKVYTVKGTQNEGKYIALKEIKKVPKVELLIPYVFKKGLNWSYGLC

SEQ ID NO: 18177 - protein, 414 aa, unidentified; identical to SEQ ID NO: 2588

SEQ ID NO: 18178 - protein, 440 aa, Lactobacillus sp.; identical to SEQ ID NO: 5150

SEQ ID NO: 18179 - protein, 420 aa, unidentified; identical to SEQ ID NO: 16129

SEQ ID NO: 18180 - protein, 406 aa, unidentified
MRGKPLMPCSPAKARHMLKAGKAFVVRRTPFTIKLTIATGETKQDVTLGVDAGARHVGISATTEKEEVFASEVALRQDITGLLADRLAFRRARRNRKTRYRAPRFNNRVRSKHKGWLAPSVENRIQAHMSRIDAVCRLLPVTRIVIETASFDVQKIRNPEVEGTGYQQGDQLGFWNVREYVLFRDGHICQHCRGRSKDPILNVHHLESRKTGGDAPNNLITLCETCHKAYHAGKIKLKVKRGQSFRAEAFMGIMRWTLLNRMRKAHPSLPVENTYGYLTKHKRIALGLPKTHCADAFCIAGNLKALRRGDFLFQQQTRKHNRQIHKCSILKGGVRKLNQAPFLVKGFRLFDKVRIGGQIGFVFGRRVRGTFNIRRLDKTVIGTDINCKKLSLLETRKTFLTELRKE

SEQ ID NO: 18181 - protein, 470 aa, Blautia sp.; identical to SEQ ID NO: 2925

SEQ ID NO: 18182 - protein, 427 aa, unidentified; identical to SEQ ID NO: 6307

SEQ ID NO: 18183 - protein, 416 aa, unidentified
MVVYVLNQNGQPLMPTVRFGKVRRLLRDRKAKVIRRCPFTIKLLYEPSTDMVQECYCGVDTGSKYIGTAVIGNDKVLYQSQTELRDDIKKKMNRRKGFRRSRRSRKTRYRKPRFLNCKNSKKLNRLPPSIRHKVQAHIDEIEFCKKILPVSYLILEVSQFDTALMKNPTLVDEKVKKWGYQEGFNYGYSCRREAVLHRDGYTCQCCGKKNCRLEVHHIKFRSNGGTDDENNLITLCEGCHKKVHDSVITLDKKPKKMNLKYATHMSIIRSQLLKIYPQAIETFGFVTSENRNHLGLEKAHYIDACVIAGGGLPFELSDMIYYKRRVSKGNYRLTKGIWGGQRLPTGKFYGLRKLDKVEYLGEEYFIYSRNSFGYVTLTDIFGNKIKFNYMPNGYKTPKMSNCKRISARRSSLCKKE

SEQ ID NO: 18184 - protein, 310 aa, Scytonema sp.
MSNYVFLIDQNKTPLNPVHPAQARKLLDSGKAAVFRRYPFVLILKRVIENPNVYPLTLKIDPGSKVTGIVLVTNQGDVIWAMELQHRGQQIKDALEHRRAVRRGRRNRNTRYRQTRFLNRKRPSGWLAPSLRHRVLTTETWVKRLQRFVPIGSIVQELVKFDTQAIQNPEISGTEYQQGTLHGYECREYLLEKWNRQCAYCGVKDVPLEIEHIQSKSKGGSDRISNLCLACHKCNQRKGNKDIKDFLKGKPDVLNRVQKLGLAPLKDAASVNSTRWSLFNTLKSFGLPIITSTGGQTKFNRTRFNLPKAH

SEQ ID NO: 18185 - protein, 387 aa, unidentified
LTTLSVSSTTLLNGVDAGSKTIGVSASTKKEELFAANVIPRNDVVDLLSTRREFRRARRNRKTRYRKPRFDNRVRSKHKGWLAPSVEVKIQDHITAIRRVCGILPVSKVVVETAEFDLQLLKAIADGKPVPQGEDYQHGEMYGHYNVRQYVLWRDGYTCQCCGAHATQKKEVRLHVHHLESRRVGGDAPDNLVTLCTACHDKLHKGIIMAADIKKRKRRSTRDATFMGIMRMTLLRRLREQLPVPVVETRGYITKATRENLLVLPKSHTNDALAIAHGPQGFRAEYLPNIRQADRLYTIRPVRHHNRQLHKATILKGGVRKANQAEKYICGFRLYDKVLYNGIECFVWGRRTSGSFLLRQLNGEKVKDGVSYKHLKLLERSQSYLVA

SEQ ID NO: 18186 - protein, 415 aa, unidentified; identical to SEQ ID NO: 3582

SEQ ID NO: 18187 - protein, 442 aa, unidentified
MGEGLQPDASPRRRNLRVFVLNKRGQPLMPCSPAKARLLLKAKKAVVKRRTPFTIQLALATGETVQSVTLGVKAGSKEIGLSASTDKAEIFASSVQLRTDVLDLLSTRRELRRARRNRKTRYRAPRFNNRIHSKNKGWLAPSIENKINVHLSRVETVRKLLPVSKIVVETAAFDIQKIKNPDIEGTEYQQGDQLGFWNVREYVLFRDGHKCCHCHGKSKETILNVHHLESRKTGGNAPNNLITLCETCHKAYHAGKIVLKQKRGQSFRDATSMGIMRWTFFNRLKAQCLELEVRNIYGYVTKNTRIRCGLVQTKTADAFCIAGNLGAKRLGEYFFQKQTRKHNRQIHKLTILKGGVRKRQQAPYEVKGFRLFDKVRYGSREAFIFGRRSSGFFDVRTLTGHRLSASINCKKLGLLERRKTFLTQLIKEDAIPPATEVAGFLA

SEQ ID NO: 18188 - protein, 527 aa, unidentified
MSTCVCVLSNNGERLMPTFRLGKVRRLLKDGKAKIVKHHPFTIQLLYDSKTNTQPIEICEDVGYNYIGISAKSKSHEYVSAQYDTLQDEKEHHDDCRKMRRTRRNRLRYRKPRFDNRKRGEGWLAPSLRHKKELNVNVVKMYCAVMPITYATVEVGSFDTMLVKAIQEGKVIPEGADYQKGPRYNLATLREAVFYRDNYVCKVCGRKATEGAILHMHHMFYWKGRHGNSLDELLTVCEKCHTPANHQKGGKLYGFGEDVKFTDLSGAAFMNTVRWQIVNELYAAFGKPFVTITYGAMTKEKRIALQLEKSHNNDAYAMGEFHPSCRCKFRHYQKRRRNNRVLEKFYDATYIDTRTGNKAKGKELFNGRISRNHKKDSENLHKYRAHKITKGRRSIRSKHYDIQSGDTVLYAGRKCITTGCFNKGKWLRITVGSTAKSVAISKVKLINHVGAWKKRFIHITSYKRIHPRLSLAAVDGVFCFKNNKRLPYNSQSDEEEQIHPSGASALFLLPTNERGVRPWQNPGQQKN

SEQ ID NO: 18189 - protein, 427 aa, Enterococcus sp.; identical to SEQ ID NO: 5630

SEQ ID NO: 18190 - protein, 518 aa, Kandleria sp.; identical to SEQ ID NO: 7410
  source 1..518: note = isolate UBA4229

SEQ ID NO: 18191 - protein, 416 aa, Parasutterella sp.; identical to SEQ ID NO: 10114

SEQ ID NO: 18192 - protein, 457 aa, unidentified
MDAVAVISASGKPLMPTNPVRARKLIKKGKEVIYKYRPLFTIRLTERTDGDIQTIEYCCDTGYQHIGLSIKSRKHEYVNERRDLLPNETERHNDSRKYRKARRRRKLRHRACRRDNRHDNQICKDGYAPSIRNKRDQHISLYRSYTEILPVERAVFEMGQFDTQVLKAIEKGEPLPQGKDYQHGERYGYATLREAVFARDDYTCICCGKNSFKDKRILCVHHLGFRIGDRTNRLANLATVCTKCHTPKNHQPKGKLYNLKPELKDFKGATFMTMVRWDMLDKLKVVSKDIQVDVTYGAATKEARRDLKIKKSHANDAYCMGSFHPSHRTDLKRYEKCRRNNRVLSKFYDATYIDIRDGKKKKANALGCNRTKRRESRRSEKNERIYRGEKVSKGRIVLRTKRAVIRPGDIVYVGKKKYIVASSKNLGAQLKLADGSLLTTSKVTKIIHCGGWKTVTL

SEQ ID NO: 18193 - protein, 512 aa, unidentified
MSTVYVLNKDGKPLMPTTRCGHVRHLLKEQKARVVTSKPFTIQLLYETDNVVQPLYLGIDPGRTNIGVAVVKANGTAVFTAHLETRNREIPKLMKKRKDSRRTRRTNGRRCRRQRRAKANGTISKKCVKQDTAQNGSVSKRAKKIGVIKRHLPGCEKEVLCIGIKNKEARFNNRTRPEGWLTPTANQLLQTHINLVKKIQKFLPISDVVLEVNKFAFMQLDNPNIQKWQYQQGPLYQKANLEEAVSEMQEHHCLFCKKPIAHYHHVVPQSENGSDTIGNIVGLCTKHHDLVHKDTEWQKKLAKKKTGLNKKYGALSVLNQIIPTLTKELSSLFPKHFFATNGKSTYDYRAAHGVSKDHWLDAYCIACSVLADDVCDNNINSHVPYELKQFRRHDRRALHKENMSRVYTLNGKSVATNRHKATEQTTDSLEEFRQRQPNDVCKLKVKEHHPEYRNPKRNFPGCVFLVGKHTHVMQGTSGSHNGKADGYYDTNGNSYSSGECKFVAKNGGIVFA

SEQ ID NO: 18194 - protein, 404 aa, unidentified
  source 1..404: note = Clostridiaceae bacterium UBA5742
MPTNRHGKVKHLLKDGKAKVVRRTPFTIQLLYDSPEYTQPITLGVDAGSKVVGLSATTEKKELFVSEVTLRDDIPELLSTRRQNRRTRRNHLRYRMARFLNRTASKKEGWLAPSVKHKVDSHLKVIENVHRILPVSRIVIETASFDIQKIRNPEISGREYQQGEQLGFWNTREYVLWRDNHECQHCHGKSKDRVLNVHHKESRKTGGDSPGNLVTLCETCHKSHHAGRIKLNLTPNKSYRDASFMGIMRWYVYNSLKELYPEVSMTFGYITKNNRINNNIEKAHSADAYCISGNMNAKRIDEIYNQAFKRKHNRQIHKGNFLKGGKKKLNQSAYEVKGFRLFDHVRYRDKECFIFGRRTSGYFDLRKLDGSVVHRSASFKELTLLKRQNTILIERKGRNGVLLS

SEQ ID NO: 18195 - protein, 442 aa, unidentified; identical to SEQ ID NO: 4522

SEQ ID NO: 18196 - protein, 358 aa, Oscillibacter sp.
KEELLSAEVKPRNDVVDLLSTRREFRRAQRNRKTRYRKPRFDNRVRSKHKGWLAPSVEVKIQEHITSIKRVCRILPVSKVVIETAEFDLQLLKAIEEGKPVPQGEDYQQGEMYGHYNVRQYVLWRDGYTCQCCGAHATKKKEVRLHVHHLESRKVDGDAPDNQVTLCESCHEKLHKGLIAEKDFKKRKRKSTRDATFMGIMRKTLMQRLCSELPIPVIETRGYITKATREKLLVLPKSHTNDALAIAQGKQGFNVGYLPGIVQINKIYTIRPVRHHNRQLHKATILKGGIRKSNQTEKYVFGYCLFDKVQFNGQDCFIWGRRTTGIFTIKTINGKMIKDGISFKKLKLAEKSTSYLIA

SEQ ID NO: 18197 - protein, 447 aa, unidentified
VPAYRIKHITKKEAPYMVYVLDIDGQPLMPTSRHRKVRKLLNSHLAKVVKRCPFTIQLLYQSTKETQPVSLGVDAGSRHIGLAATTEQKVVYQEELVPRNDVVKLLSARRALRSSRRSRKTRYRKPRFNNRVHSKHKGWLAPSVEVKIQEHITAIKRICQILPISEIHVETAEFDLQRLKAMDEGRTLPVGTDYQLGEQYDFYNTRQYVLHRDEYTCQCCGTHDNNVKLHVHHIESRQTGGDAPNNLITLCEHCHKLLHAGKTILPKGKKRGKSYRDATFMGIMRKTLLERLKKEIDVPVAGTYGYITKYWRERAGLEKSHINDAICISKHPYARPLETYYLTKAVRHHNRQIHKTKFSKGVIRKRNQAPYLVKGFRLFDKVLYQGESYFIFGRRITGYFDIRTLDGTKVNKGSTSYKKLRIQDTAEAYLTEVRAIPHMNEFTCVLA

SEQ ID NO: 18198 - protein, 425 aa, Anaerostipes sp.; identical to SEQ ID NO: 5668

SEQ ID NO: 18199 - protein, 431 aa, unidentified
MPNKVYVINKHGRPLMPCSPAKARHLLDAGKAKVKKRTPFTIQLVYGSSGYTQEVILGVDAGSKTIGMSASTTKEELLSAEVKPRNDVVDLLSTRREFRRARRNRKTRYRKPRFDNRVRSKHKGWLAPSVEVKIQEHITSIKRVCRILPVSKVVIETAEFDLQLLKAIEEGKPVPQGEDYQQGEMYGHYNVRQYVLWRDGYTCQCCGAHATKKKEVRLHVHHLESRKVDGDAPDNQVTLCESCHEKLHKGLIAEKDFKKRKRKSTRDATFMGIMRKTLMQRLCSELPIPVIETRGYITKATREKLLVLPKSHTNDALAIAQGKQGFNVGYLPGIVQINKIYTIRPVRHHNRQLHKATILKGGIRKSNQTEKYVFGYRLFDKVQFNGQDCFIWGRRTTGIFTIKTINGKMIKDGISFKKLKLVEKSTSYLIA

SEQ ID NO: 18200 - protein, 442 aa, unidentified; identical to SEQ ID NO: 3234

SEQ ID NO: 18201 - protein, 426 aa, unidentified; identical to SEQ ID NO: 8077

SEQ ID NO: 18202 - protein, 481 aa, unidentified; identical to SEQ ID NO: 4548

SEQ ID NO: 18203 - protein, 431 aa, unidentified
MNRVFVLGKTGKTLMPCHPARARQLLHSKKARVKRLYPFTIQLTHRSDGYIQPVELKFDPGSKQTGIGLVLHGKNRLSAIYAAVLTHRGQEIKSNLDSRRMIRRARRNRKTRYRQARFLNRVRSKHKGWLAPSVQSRVDNIVEWSKRFIRLSPVGFITVESVKFDMQKMENAAVEGLEYQRGTLFDYEVKEYLLEKYNYSCVYCGAKNVPFEKEHVIPRSRGGSNRISNLVLSCHDCNQKKDNLPIEVFLKDNPALLKKIKAQLKSSLKDAAAVNITRKQIVKELSDLNVPVLTGTGAETKYNRVSQKYPKEHYIDALCAGTTGAKIYIPKKLKPLLIKKERRNNRQMCLVDKYGFPRGKAKGPKIVHGFKTGDIVKAVVLKGKKKGVYKGKVAVRSSGSFNINVKQGRVEGIGWKNCVMLHRFDGYSYTY

SEQ ID NO: 18204 - protein, 451 aa, unidentified
MSVAVISKTGIVLMPTSEYRARKLLDSGKAIIYGYRPFTIQLTERETGDVQPVELCVDTGYIHIGVSVKSEKHEYLGLQVDTLTDEKAKHDDRRMYRRQRRNRKRYRKSRFDNRKRKSGWLAPSLEHKKEIHLQIITAICGVYPIADITLEMGNFDTQVLKAKEEGKQIPQGTDYQHGERYGIATLREAVFTRDGYKCQCCDRGIKDGAILHAHHIQYRSQGGTNRMSNLITVCEKCHTPANHKPGGKLYGWKPKIASFKDATYMTAVRWQLYRKVKEMFPGIHVKITYGAETKERRRILDIKKSHVNDAFVMGQFHPKHRSLPVLYKKKRRNNRCLEKFYDAKYIDSRNGKTRSGQELFNGRISRNHKKDSENLHRYRKKKVSRGKRNIRVQRYKIQPHDIVLFDGKKYETTGCHNKGTRAILLPEKKSKSVEKLTIYKYAGGYYPSKFA

SEQ ID NO: 18205 - protein, 465 aa, unidentified
MSTCVCVLSNSGERLMPTFRLGKVRRLLKDGKAKIVKHHPFTIQLLHDSKTNTQPIEICEDVGYNYIGISVKSESHEYVSAQYDTLQDEKACHDSCRKLRRTRRNRLRYRKPRFDNRKRGEGWLAPSLEHKKQLNIRLIERYVSVIPITHATVEVGSFDTMLLQAIQKGKSKPEGVDYQKGPRYNLATLREAVFYRDNYTCQVCGRKVADGAILHMHHMFYWKGRHGDSLNELLTVCEKCHTPANHQKSGKLYGFGENVKFADLSGAAFMNTVRWQIVNELYAAFGKGFVTITYGAMTKEKRIALHLEKSHNNDAYAMGSFHPVNRCAFEHYEKVKRNNRILEKFYDSQYIDTRTGELTNGKSLFNGRISRSHKKDSENLHKYRGKRICKGHYALRRKKLALNPGDLVSLNGEILVVHGTHTKKNGSVNVEFKTPSRGGKKSASLKKLKIVKTSNLMHSAWTKVA

SEQ ID NO: 18206 - protein, 442 aa, unidentified; identical to SEQ ID NO: 2834

SEQ ID NO: 18207 - protein, 455 aa, unidentified
MSVFVISKNGKRLMPTVRYGLVRHMLKDGRAVIYCRKPFTIQLTYVSSKYIEPLELCIDTGAQHIGISLKSNKREFVSEQRDLFKDEKEKHDGCRMYRRTRRNRLRYRKPRFNNRISNKKEGWFAPSLKNKADQHIMLIQRLATVAPIKDIYLEVGSFDTQLLDAIAKGLPIQEGTDYQQGALYGEETLRKAVFQRDNYTCQVCGRTIKDGAKLHTHHFLYWKGRHGNRLDELCTVCEKCHTSANHQKGGKLYGWGADKKFKSYVSAAFMNTVRWYIVNQVKDLVSDTEVHTTYGAATKLARKDFQFEKSHVNDAYAMGKLHPNIRCETEYYKKVRRNNRCLEKFYDAKYIDIRDGKKKSGKELGCQRINRREPRMSEKNLRIYHGQKVSKGRRSIRKQRYSIRPGDVVLFNGQKYISKGCGSYGTQVLLDIGKSVSIKKVQIIRHTGGWINLNI

SEQ ID NO: 18208 - protein, 414 aa, unidentified; identical to SEQ ID NO: 4015

SEQ ID NO: 18209 - protein, 219 aa, unidentified
VHHKESRQTGGNAPNNLITLCEDCHKALHAGTIQLPDGRAKRGRSHRDAAFMGIMRKAMVSQLRDIVDIPVTETYGYITKYYRELYHAEKSHISDAIMISRNFKAEPDDTYYASKAVRHHNRQLHKNTILKGGVRKRNQAPRVVRGFRLFDLVRYENSVYYVFGRRRSGFMDIRTLDGRKINKGSISNKRLKFVSTSRGLLVERRKAIPLADKSASFLA

SEQ ID NO: 18210 - protein, 443 aa, unidentified
MVEENMTCFMQRKGENPMVFVLDTNKRPLAPCHEAVARKLLKQGKAAIYRRFPFTIILKKSVDESEIKATYRLKIDYGSRHTGLAILRGQEVVWLGQLDHRTDIKERIDKRRAFRRARRNRKTRYRKPRFLNRKRKEGWLPSSLESRVQNIQTWVNRLKKLCPIGYISYENAKFDTQLMRNPEINGVEYQQGTLQGYEVREYLLEKFGRKCCYCGKENVPLEVEHIIPKSRGGTDRVDNLCLACHDCNQRKGSKTAEEFGYPHIQKQVKESLKDASAVNSTRWKAYEVLKQSGCEVECGTGARTKMNRIRLDLPKTHYFDACCVGESTTNHLYFKTKEVLFIKAKGRGSRSRTNLDRYGFPRGYLARQKFFFGFQTGDMVKAVVPRGKYQGVWFGEVACRKTGSFDIKGKDGKRIAQGINYRYVQVIQRFDGYAYGKGVAELA

SEQ ID NO: 18211 - protein, 413 aa, unidentified; identical to SEQ ID NO: 3621

SEQ ID NO: 18212 - protein, 408 aa, unidentified; identical to SEQ ID NO: 5560

SEQ ID NO: 18213 - protein, 515 aa, unidentified
MTALEERLSKTEYIYVLGFDGKPQMPTRRKRHVLKLLKTGRARIAEDIPFTIRLTYRNAPVLQPVTLAEDPGRTNIGAAVLSPLGDLLFAAVIETRNKEIKKLMADRKKSRQASRRGERKARQRLAKRYGSMVKSGMVMRKLPMYAADKFVTCKFIRNTQARFCNRKRCPDWITPTVQHLVQTHLNIIRKISRYLPVTDIAFEVNRFAFMHMENPEVMGVDFQNGPLKGYGDVKEAIRTQQHGKCLMCKKPISHFHHIVPRSRGGSDTIQNLAGLCPECHTKVHTDTTFRKDFDRKKSGQLKKYGALSALNQAVPFICKKLLEEYGEEHVHFCGGLDTSLIRTALGFEKTKKNQMHEVDAYCIGLEALEVNEVETPAFDHTFQIRQFRRQDRSIIHHQTGRSYYQGKEKVAQNRKPGFEQKTTALSQWYEEQVRIHGEKEAEKLRSQLRVEKSCRHYNDVDRFLPGAVFLYEGKRYVLSGRITNGKYLRACGQGMKNFPAAECTFIRHNAGLVFI

SEQ ID NO: 18214 - protein, 456 aa, unidentified
MSTCVCVLSNSGERLMPTFRLGKVRRLLKDGKAKIVKHHPFTIQLLYDSKANTQPIEICEDVGYNYIGISVKSQSHEYVSAQYDTLQDEKACHDSCRKLRRTRRNRLRYRKPRFDNRKRGEGWLAPSLRHKKELNVNVVKMYCAVMPITHATVEVGSFDTMLLQAIQKGESKPEGVDYQKGPRYNLATLREAVFYRDNYTCQVCGRKIADGAILHMHHMFYWKGRHGYQLDELVTACEKCHTPANHQKGGKLFGFGEDKEFANLSGAAFMNAVRWQIVNALYATYGKEFVTITYGAMTKEKRIALQLEKTHSNDAYAMGNCHPAHRCVFRHYQKRRRNNRVLEKFYDATYIDARTGNKAKGKELFNGRINRNHKKDSENFHKYRSKKVSKGRRSIRRQRYAIQPYDTVHLEGKTYITSGCHNKGTRLLIPANGKNKSVAISKVQVVCHAGAWIQII

SEQ ID NO: 18215 - protein, 310 aa, unidentified; identical to SEQ ID NO: 8570

SEQ ID NO: 18216 - protein, 493 aa, unidentified; identical to SEQ ID NO: 3781

SEQ ID NO: 18217 - protein, 451 aa, unidentified; identical to SEQ ID NO: 12558

SEQ ID NO: 18218 - protein, 447 aa, unidentified; identical to SEQ ID NO: 4640

SEQ ID NO: 18219 - protein, 404 aa, unidentified
  source 1..404: note = Clostridiaceae bacterium UBA2240
MPTSRHGKVKHLLKDGMAKVVRRTPFTIQLLYDSPEYTQPITLGVDAGSKVVGLSATTEKKELFVSEITLRDDIPELLSTRRQNRRTRRNHLRYRMARFLNRTASKKEGWLAPSIKHKVDSHLKVIGNVHRILPISRIVIETASFDIQKIRNPEISGREYQQGEQLGFWNTREYVLWRDKHECQHCHGKSKDRILNVHHKESRKTGGDSPGNLVTLCETCQKSHHEGRIKLKLTPNKSYRHASFMGIMRWYVYNSLQELYPEVSMTYGYITKNNRIRNNIEKTHSADAYCISGNMNAIRIDEIYNQVFKRKHNRQIHKANFLKGGKKKLNQSAYEVKGFRLFDHVRYRDEDCFIFGRRISGYFDLRKLDGSVVHRSASFKELKLLKRQNTILIERKGCNRVLLS

SEQ ID NO: 18220 - protein, 420 aa, unidentified; identical to SEQ ID NO: 8162

SEQ ID NO: 18221 - protein, 428 aa, Moorena sp.
MQNYVLVIDTNKQPLNPISPKRARRLLDKGKAAVFRMYPFTIILKAAIDNPTISPCQIKIDPGSKVSGFALVQNNQVIWGMELEHRGGLIKKKLESRRSVRHRRRSRHTRYRKPRFLNRRRPEGWLAPSLEHRVLTIQTWVKRLIKFCTINEIWVERVKFDTQKMQNPEINGVEYQQGDLAGYEVREYLLEKWGRECTYCGKQSVPLQIEHIHPKSFGGSDSAKPTLRERVSNLCLACEKCNQRKGNKPIEEFLKKKPSLLQKIKTKAKQPLKDAAAVNVTRNKLVRVLQSIKPVITGTGAQTKYNRTKLGLPKEHWIDAACVGNIEMLTLKTSQPLLVTCKGQGGRQKAALNKYGYPIRHNPLKPIKGWCSGDIAKRLLTGEFGKVSPRSKSNSFNYTVPGKKAISLHVKNLTRVHQKDGYTYSFCR

SEQ ID NO: 18222 - protein, 342 aa, unidentified; identical to SEQ ID NO: 10149

SEQ ID NO: 18223 - protein, 432 aa, Moorena sp.
MRVFVLDKNKKTLDPCRPARARILLKQGKAKVLKRYPFTIIMQEKEVENCVTHEHQLKIDPGAKTTGIVIIQGSKVIWGAELTHRGFQIREALTSRRQLRRSRRNRKTRYRQPRFLNRKRSEGWLAPSLMSRVDNILTWTKKLIRLCPIKGISQELVRFDTQKMENPEISGVEYQQGTLYGYEIREYLLEKWNRKCAYCGVDDIPLEIEHIKPKSKGGSDRVSNLTIACKKCNKAKGSQDIENFLSGKPNVLKQILSQSKKPLANAAAVNSTRWKLYNSLKSTGLPIETGSGGLTKYNRCRQNLPKTHWLDAANVGKVDHLYIESYQPLLITAKGHGTRQMCRTNKFGFPTRYVPRYKEVKGFQTGDIVKAIVTKGKKIGTYTGRVATRQTGSFNISTKSGLVQGISHKYCSIIHRKDGYSYSFVLQGMQWP

SEQ ID NO: 18224 - protein, 506 aa, unidentified
MPYIYVLGMDGKPQMPTTRRRHVQRLLDTGRARIVSHVPFTIQLLYKNDPVLQPVTLAEDPGRTNIGLAALSLKGDLLFSAKVETRNKEIAKLMDKRRQSRRASRNGERKARQRLARKFGTMLKAGMLMRKLPQYAADKFITCHVIRNTQARFSNRKRPDGWLTPSARHLVQTHINLVRKMGRYLPVTDVALEVNRFAFMQMEDPSISGVDFQNGPLKGFDDLHAAVRDLQDGKCLLCKKEIEHFHHIVPRSKHGSNTIGNIAGLCTKCHEKVHKDEKAGKRLKDKKKGLDKKYGALSILNQAIPFICKELETEFGKEHVHYCTGRETSLVRRSLGYHKTKEEQYHEVDAWCIGALSLDSIPEKAPAFEEVHTIMQFRRQDRALIKAQTSRSYKLDGETVAWNRKKRTDQKNDSLEDWYQKQVQLHGQKEAVRMRSRLTVKISQRRYNNPERMLPGTVFLYKGKRYVMKGQHCNGVYLQAVGMGSRDFPVKECTIIKRNQGLVFLS

SEQ ID NO: 18225 - protein, 431 aa, unidentified; identical to SEQ ID NO: 2977

SEQ ID NO: 18226 - protein, 424 aa, unidentified; identical to SEQ ID NO: 16952

SEQ ID NO: 18227 - protein, 502 aa, unidentified; identical to SEQ ID NO: 2616

SEQ ID NO: 18228 - protein, 451 aa, unidentified; identical to SEQ ID NO: 2910

SEQ ID NO: 18229 - protein, 432 aa, unidentified; identical to SEQ ID NO: 6011

SEQ ID NO: 18230 - protein, 418 aa, unidentified; identical to SEQ ID NO: 2710

SEQ ID NO: 18231 - protein, 295 aa, Microcoleus sp.
LKHRVDTILTWVNKFIRFAPISSIAMELVRFDLQKLENPEISGVEYQQGELLGYEIREYLLNKWDRKCTYCKTENIPLQVEHIHPKARGGSNRISNLCLACEKCNLKKGTQNIKDFLSKKPDLVKQIMAQVKRPLKDATAVNSTRWALFNQLKLTGLPVTTGSGGQTKYNRTRLELPKTHYFDAACVGKVDKLVVLTAQPLSIKSNGHGTRQMCRTDKFGFPSRYVPRDKFVKGFQTGDLVKAVVTSGNKIGEYVGRVAVRSSGSFNISAKELVQGINHQYCQILHRKDGYSYQL

SEQ ID NO: 18232 - protein, 416 aa, unidentified; identical to SEQ ID NO: 5948

SEQ ID NO: 18233 - protein, 406 aa, unidentified; identical to SEQ ID NO: 10063

SEQ ID NO: 18234 - protein, 421 aa, unidentified; identical to SEQ ID NO: 2846

SEQ ID NO: 18235 - protein, 330 aa, unidentified
LVGTICGGQNPRAHHLNQEGWNSRCSGGMRRYREEHITAIRRVCGILPVSKVVIETAEFDLQLLKAIADGKPVPQGEDYQKGEMYGHYNVRQYVLWRDNYTCQCCGAHATKKKEVRLHVHHLESRKVGGDAPDNQVTLCESCHEKLHKGLIAEKDFKKRKRKSTRDATFMGIMRKTLMQRLCSELPIPVVETRGYITKATREKLRVLPKSHINDALAIAQGKQGFNVGYLPGILQIDKIYTIRPVRHHNRQLHKATILKGGIRKSNQTEKYVFGYRLFDKVQFNGQDCFIWGRRTTGIFTIKTINGKMIKDGISFKKLKLAEKSTSYLIA

SEQ ID NO: 18236 - protein, 396 aa, unidentified; identical to SEQ ID NO: 4508

SEQ ID NO: 18237 - protein, 424 aa, unidentified; identical to SEQ ID NO: 7678

SEQ ID NO: 18238 - protein, 415 aa, unidentified
MVYVLANDGQPLMPTERHGKVCRMLKSGMAKVVKKCPFTIQLQYESERNVQPVSLGVDAGSKHIGISATTKTKVLYESDVELRDDIVKLLATRRQLRLSRRSRKTRYRPVRFDNRKRKEGWLAPSIRQKIESHLTVVANVCKILPINQIIVETASFDIQKIKDPEIQGIEYQQGEQMDFWNIREYVLFRDGHTCQCCKGKSKDKVLNVHHIESRKTGGNAPNNLITLCETCHKGYHNGTVTLPKNIKRGMKFKDAAFMGIMRWTFYNTLKEQYEPDIPVHYTYGYITKNTRINHNLPKGHCIDARCISGNPDAVSDGTYYYQKKVRCHNRQIHKQTILKDGVRKSNQAEYLVKGYRLFDKVRYQGREYFIFGRRKSGFFDIRTLSGEKVNKGSISVKKLTFADTRKNYLTERRTV

SEQ ID NO: 18239 - protein, 355 aa, unidentified
LKVFVLNMRGRPLMPCSPARARHLLKAGKAVVRRRTPFTIQLRIATGETKQSVTLGVDAGAKHVGLSAATEKEEVFAPEVELRQDITGLLAARLSLRRERRQRKTRYRAPRFLNRVRSKHKGWLAPSVENRIQAHLSRIDAICGLLPVTKIVIETASFDIQKIKHPDVEGTDYQQGDQLGFWNVREYVLFRDGHVCQHCHGHAKDKILNVHHLESRQTGGDAPNNLITLCERCHKACHAGKIKLKVKRGQSFRAGAFIGIMRWTLLDRVRKAHPGLPVENTYGYLTKNTRITLGLPKAHCVDAYCIAGNLKAVRRGVYLHQRQVRKHNRQIHKCTVLSKTLKDGTKIGYRKLNQT

SEQ ID NO: 18240 - protein, 422 aa, Streptomyces sp.; identical to SEQ ID NO: 12341

SEQ ID NO: 18241 - protein, 401 aa, unidentified
LNKRGKPLMPCSPAKARLLLKEKKAIVVRRTPFTIQLTIATGESKQPVSLGVDAGYKHVGLSASTEKAELYASEVELRKDITDLLSARRALRQSRRNRKTRYRAPRFDNRIRTKRKGWLAPSVENRINAHLSRIEAVLRLLPITKITVETASFDMQRLKNPDISGKEYQEGEQLGFWNVREYVLFRDGHVCRHCHGRSKDPVLNVHHLESRRTGSDSPDNLITLCETCHKALHRGEITLKAKRGQSFRAQAFMGIMRREVLNRLKASYPELKVHETYGYLTKHARIANGIVKSHGADAFCIAGNLGAERLGEFFFQKQTRRNNRQIHKLSSSKGAFESAIRHPLRPKASVFLTRLPAREKKASFSAVDHPGTLMFESLMEPAFQPASAARSCVCWRRDGPI

SEQ ID NO: 18242 - protein, 442 aa, unidentified; identical to SEQ ID NO: 2903

SEQ ID NO: 18243 - protein, 475 aa, unidentified
MVITLDKNKRPLGFMSERRCRILLEKKRAVLYRYFPTIVILKDVDARKLSGLSSYRIKIDPGAKYTGIAIVMDDTNEFMYAMQIEHRGEQIKKNLDTRRGARRNRRSRETGYRRPKWGNRCTAKEQRQSYDSRRDENWLPPSVKSTADNIISWIRRLCRWINITNCSIESVRFDTQLMENPEIEGVEYQQGTLYGYEVKEYLLEKYGHTCQYCGGKSNDPILEWEHMLPRSRGGADRLKNAALACHNCNQDKGNHTLEEWQTILQDRIPKESGKQKELDQIRQKFVQQVMEGKTPVKGLRYAAWVNSSRRYSQRHLYLRFPELECSSGGRTKYNRNVLKYPKEHHYDALCVGEIPEDGFVDRTHGYYLYAKATGRGTRLREQINQCGVIIRKWMDRSKTAFGFQTGDLVVADVPKDTNYKYKGHFSGRVMIRKSGSFDIRTLSGELVTVNAKFCRLLQNNSGYQMMIKRAIPLGN

SEQ ID NO: 18244 - protein, 442 aa, Anaerostipes sp.; identical to SEQ ID NO: 3218

SEQ ID NO: 18245 - protein, 428 aa, unidentified
LKVFVLNMRGQPLMPCSPAKARHLLKAGKAVVKRRTPFTIQLRIATGETKQNVTLGVDAGAKHVGLSATTEKEEVFASEVELRQDITGLLAARLSLRRERRQRKTRYRAPRFLNRVRSKHKGWLAPSVENRIQAHMSRIDAVCRLLPVTKIVIETASFDIQKIRNPEVEGTGYQQGDQLGFWNVREYVLFRDGHICQHCRGRSKDPILNVHHLESRKTGGDAPNNLITLCETCHKAYHAGKIKLKVKRGQSFRAEAFMGIMRWTLLDRVRKAHPGLPVENTYGYLTKHTRITHGLPKTHCVDAYCIAGNLKAVRRGVYLHQRQMRKHNRQIHKFTVLSKRLEDGTKIGYRKLNQSPYLVHGFRLFDKVRCLGQIGFIFGRRSSGYFDVRRLDGVKLSPSISWRKLTLLEKRSTYLTELRKQDGASSPV

SEQ ID NO: 18246 - protein, 422 aa, unidentified; identical to SEQ ID NO: 5333

SEQ ID NO: 18247 - protein, 279 aa, unidentified
TKITVETASFDLQLLKNPDISGKEYQEGEQLGFWNIREYVLCRDGHVCQHCYGRSKDPVLNVHHLESRRTGGDSPGNLITLCETCHKALHRGEITLKPKRGQSFRAEAFMGIMRWEVLGRLKASHPELEVNNTYGYRTKHARIANDIAKSHCADAFCIAGNLGAERLGEFFFQKQTRRNNRQIHKLSILKGGIRKRNQAPYEIKGFRLFDKVACQGEEGFIFGRRSSGFFDVRKVDGTRISAGISYKKLRLLEKRRTYLTEIRKEEALPPLPEGRGLRA

SEQ ID NO: 18248 - protein, 413 aa, unidentified; identical to SEQ ID NO: 3924

SEQ ID NO: 18249 - protein, 470 aa, unidentified; identical to SEQ ID NO: 2825
